United States Patent Application Publication US 2014/0325702 A1 - sequence listing, part 2

SEQ ID NO: 638 - DNA, 5130 bp, Heterodera glycines
  unsure (1)..(5130): unsure at all n locations
caaatattaggaaaagaatttagaatctttaattgaaaaccaaagaaanatcatgtacaacgaacggatggatgattcatttgaaatatttaccncaaaatgagcatggatttaatttatttcatgtcattttgtaaaaattgtttgttttaaactctacgataataaatagggaacggatttatatgtgcctaaaaaatcccaaaatatgtgccaaaaactgaacaaaaattgcttaataaatatgtgaattcctcaaaaaagtctatttttttatcaatttcgctagagaaatctaatcaaaaatcagttcaatgttttttgacgtaaatttctttctcactctgtaaagatttattattttccggaattttttctctaaatttaaattttgccataaaattaaaaatcgtgaaaaggtcaaaaattgcaaaaataaaaattttttggacaatttgccaaaaatttgggtgccaaaaagcacttcttataaaaaaaatttaaattaaaaaaaaatcgccaaaatatgtgctaaaaactgtcaaaccctcaaaatatgtttttatgagcaaaaagtccaaaatatgttttatttatttgtgtataaaagtcgggacttttatttgcatattttgggttttcatgcatattttgccatttttcgtcaaatattttcccatttgaatatctcttaagaaaaaaattttgattatgcctaaaattaaatccaaatctgaattgatgcgcgagtgggtcaactgccgaaaaccttaagaaatttttgatttgcaattgcaaaaacaaccaataaaatttatgaggaataaaattttttaaattattttgcacccctaattttcaagttttttgtgcatatttggtgcatattttgcgatttttatgcatatttggcattttatttgcatgtttaggtgcatattttggtcatttttcatgcatattttttgcagccctgttgattagacttggcactattcgtcttttttaaaatttttattatatgctaaaaaaattacattttttataaaaatattttccaaaattcctactcaatatttttcgttttaagggtgtttttttgtttcccaaaagttgcctatttagttatgattagagaacgtaagaaggcacaaatgtttaataggcataaaaaaattgggaaaaagcacgaaaatccagaaaaaggcatgaaaaaaggcatttgaaaattttttattaaggatttttagcgagcaaaacgcgtaaaacttaatcaaaaaacttaatttagtcatttaaatgttattaaatattttattatttttctcgaataaggaaaatttttaaaccaaaaaatttttatcaagaaaaaaaattaaattttaacgatcaatttttgagaaaatttttcatttcttagtgatttaatttttgaaattttttaagaccatttcttaggggtatattttcccgattttattgattttttaatggaatttttcaaaaaaacaccaaaaaggcatttaaggcacgaaaactcagaaaaaggcaaaaaaaaaaaaaaaaacagtttgatccggaattttgttcaattttggacttctcgtgcgataacatatgtgtgaaaacatgtaaattaaaaaaaaatttctgggttcatgttttgcgcttattttgcgatttaattgcatatttggccattttcagaaaaatctcttctcctctccatccctccctttcactctctctctctcatttctctctcactcactctctgactctcactctctctctcactctctcccactctctctctctctcactctctcccactctctctctctctctcgcactctcactctctcttctctcactctctctcttctctcactcactctctctctctctctctcactctctcccactctctctctctctctcgcactctcactctctcttctctcactctctctcttctctcactctctctctcactctctctctctcactctctcgctctctttctctcgttctctctctctctctcgctctctctctctctctcgctctctctctctctgatcaattacaaatcattttcattgaaaaagcgaaagcgattgaataaatttcaaagattgtgaataattcatcactaaattctcattacaattttccatttattctcattaatgtgaatggttcgtcctctaaacgagttttttttttaaagtgtcccgtggaaccaaaatttggttgacgcatttattttgcaaaatgagcaaaataaaaggcaataaaactaattaattaattattgcacggatcattaagaagaatcttttaatttcctccctaagaatttttccaaaatgtttccgttccgttttctcttcgttttcgctttcgctttgctcactttgtgcggcttttctcacatgacattggcacagcccggaagcaatgggccaattggcgaacctaacaaaatgttgcgcatccgccgttagtgattattaagcgacgaattgtaaaaaattaattaaattaaaaagtttttcaggggaaaatgaacgcaaggaaaattgacgttttccatggaacgaaccaaagaggatgaaaatgaccgaagaacaaaaaacactattagcaattaaattccgttttcattgttactttttagggtggtgttttggtataaaatcaaaaggttgatcactaatgaccaatgtggcaataaatgaacagcaaatgaaaatgggtggtgacttggattaatctataacttaaataaatttttgagctttaatttagggagtggtaagtttttatgaagccggagggaccttcaattttaggaaaataggaataatcttttttacaaaattttgctctttttaatttttatagtgcttattaattcaattccccaatagaaacgtatgattgtgatttttttgtacaaaaagctcagtcattaaagctccataattacaccattttagcagtcatttacaatcgaattcaatattttttttcgttaataagcattctgtgaaaatttcagcatgagagaacaaaattactttatttgacttggacggtcccaggagctgcggcgccgacaccattggccaatggcatttgctgctgctgcgtttgttgccgattctcgaccacttcttggtacggaggtggctgctgcatctgtgaagattccgatagaccacgtttaattgatcaaattcagtttgaggggtcattaattgtggctaatttgctttgcaatttgtgcccaaccacaaaaaacacctgttgctgctgttgttgttgctgcgcaactgttgccgtcccgggcgttgtgatgccattctgttgctgctgtttttgctgttgttggtgctgaagcgcagccattcgttgtgcggccatttcagtctcgcgcattttccgctccaacaacattttggtctcttccgcctgtttcggcatatttttcaacattggcaagcgaattgcgcctgaaatggcacaaccccacaaaccctcagctgggatagttttgcgcgttgcgcttccgcctcggcttcgctggcacgtcgtgcctgctcaatggcctcctgctcggagagacgcgcccgttccgcgatcaacatttgcgtctcctcggcacttctgatcacattctgccaaattaagggggggggggagaaagcctttaaatttggctcctaaatttttaaattttagtgctcgatcacctgcatggcgctcaactgttccgacagatggttcagttctgcgcggtagcggtccctctcctgctccgcctgcgcgcgctgctcacgctcgcggtgcaaccgcacctgctcctcctgcaaaggtttaaaaaaatcatacaaaaaataatttaaaaccccggatttaatcagggaactttttgctttatgagtttctgctatatcatttttattgcttgtacaataatcgcttatttgttagcaatagctaatcattaataaaatgccaaatccaaatgaccatcaaactaatctttgatcagtgtttttttattggtcattttccactgatcactttttgctgatcgactgttctctgatcagttttgcctttaccattctgcgccttcgctgctcgtctgcctgctgcttcatctgttgcacctcgagcaggtcgggctgtcgtctgcgcaggtaaaggttatgcgtgccaacacagaggtcgagaagtgactgaaacatggggagggcaaatatttaaacaagcttcttctgtgatccgctggaaattgtggctcccggtaaattggacaccagaaaattggacaccgaaaattggacactagaaaattggacaccaatggaaatttggacaccggaaaattggacactgttgtaaataaaaattaaaataaacaaaatatattaataaacaaaaattttggtttggcctaaaagatctttatcttaatctgcacatatgttgtttataagcgtaaataatatggaaatgaatttgttattatttttgtaacatcagcaggagaagaaaaacatcatatcattcataaagaaaaagttttattacccatttttcgtgcattatttggcacattgatcaatcaccccccatttttggtgcattcggagttagagggaaaggaatgaagcgcaaacagctttatattgagcaagatgaaaatcttcgggaaatatttgcaacgcgtgccgatcgtcatcccctccaatatttgagggcaattgcctaccgaatgcctgatccactctaagtgccttaatcatttatccacaccatttaattttcaacctaattcctgggtttattttttaaaagcgaaatttggtgtccaattttcctttagtgtccaaaattccggcggtgtccaaatttctgtttggtgtccaattttccggtgtccaatttaccggtccccggaaattgttccaaattaataaaaaattatttaaatttgaaattgaacaaaggcataattaatgtcccgggttatttgggaattgcaaaattcagttccattttcgtgaaaatcgaatcaagcacagccgggcgtcatccacagcctcccccatt

SEQ ID NO: 639 - DNA, 2303 bp, Heterodera glycines
attgaaaattttagtaatatttttttttactaaaatgtgattcaactaaatcctcaaggtcttgctaacactatgaattctccccttaaaagcagggcatcttcaccagcatccgttaatctcatcagtggccagaatcagggacgggcgaaactcagcttcgtaaagtccgggttttttgaacttcgagcttccgggtaaattactcgaagtttagagaaaaacatacccctaatgataggctcaagaactatgaatgacactttttcaaatttaccaaaaatttttgatcaaaatcttaataaaacaactattttttaaaaagcgcgccgcaaaatttttttccaattattcgttaatgtattaattggtccaaaaggcataagacttaaaaaacttttcctggcggtgcaattttttgtaaaatttcgtgcttcgaaaacctcgaaaatttcgggtttttgggcttcgaacttcgccttcgcgtaaaaattgggcttctccatcggcttcgagtgctaagccggtcttcggccgtccctggtcaggataccgtgtacgtaccctaatcggatagtattgtgtgccgtacatgtccaactcctcggccacacacagaaactcctcttccgcctcctcctttgaaagtccgctgttgttggcccaccaattgcggattttctgttcccacatttcggccgtcagttcgtattgttgcagcaccgacaccggcaacagtttggccaaatccaactgttgctgctgttgttgttgttgctgatcggcctgctgttgttgttgcggttgctgctgctgttgttgttggccaatgtctccgtacagtgcctggaccgcataggaagccaaaagaatggcctagaacattggaaaatggcagagttagccgggatagggatttttggaaaaacagtgcccgaattcacaggaacattgaaagccaggattaggatctaggggggccgggaccggaaaagcctgggtcccgggaccagtcccggttgacattacaataataaaaaaaatatttaaaccaatggggcgggtgaactacgcatgtaaaagaagaaaagaaaaccaaaattgaaattctaaaaagcaattttttaccgcctccgacggacagtacaaatccatggagagaatggactggcgaatttggagaaagaacaaatgccgggtcaggtcctggatcagctcgaccttcaccgactcggggaagaatttgaccaggaagaggaagtgcagcgagccgtcctcctgtttcggcacgctttggtcttttatctgttggggagggaaaatgggcaaatgcaaagccaattaattaattataattaatcgccgtgattttatcatggaaacttaaacattttaaaaatatatttggaatttttgctggatttcggtggaaacaataaaatttttttttgataaaacatttatttttcgcttttttgcgcgaatacccttttgtccatttgaagccaacaggtgaagcctttgcggttggtgaagcacaacccaaaataccatatctcccgaaggccgatgattttgcatacggtgtcgaacagatgttggcccagcgaatccctctgaaaaatgagagattttaatattcgtatttaaatttaaaatcgcatattcacataaaaataattatatttgacctcaatgctgagctcgttcaggtcagcgtccatcgtggtcaccttcactctgagaggctttccatgctcagttagccattccaacattcggcccataattaaaaacaaatattgacgagtttaactaagttttttcagctttgtccgataagcaacataaagtttttttttacctaaaatttaattgtcacccattagtaattagtgagtgtatttaccttttaattattctttttttaattgatagggacggacgaatttagatttttcctgggttcaactctttgctttcccacccaattttgggcccgtttctcccctcccgccccccccccccgccagcgccacgccacgcaatttccgctgtggtttaatttagtgggcaaaatgtgatgcgaatgattaaatacaattctaaatgatgatgatgatgatgatcaattattattatttaatgtgttggggcgggtgaaaacggcgggagaacagcagaagaagaagaagcagcagcggaagaagaagaagacgaaggaagaggaggaggaggaggagaaggacgattctcccctgggggggggcacacattcgatggaatgttgggagttggggggg

SEQ ID NO: 640 - DNA, 1982 bp, Heterodera glycines
aatcctttttttccattttttgcatatcacaaaaaattctcattccattcaggaaattttttcgatataaaatattgtctttgtgataaaattaatcggattatttgaaaaattgaaaatggttttttttttaaagttttgactgatttgagtgaatgaaataaacaaaattttttggaatttttattttttgtgttcgtttttatcacaattaccattaatctcattttataattttacaaattaaaaacactcacagaacaaaggtcgatttactaatttgaccttagcggagtttctgccgacccaaaattgtacataaaattagaaaaatgcctttatttagttaggtcaattaaagggtgggaacaaaaagcaaaagaatcgcacaaattaaatcccgggaacaattagtgatggaccaatgattagataagggagaatttaaataaaagacagaaattgagaatagagactgaatttcatgaaaaaaacattttgtggttttgacacaaaaaatattgccaatttctcagggtttagcatatattttaaaatttggtaagaaaaatcactaaaatggaaaaagaatgaaaaaaataggccgaagcagaaaattttctaccattaaatttcgttttggaaaatttaaagataattatagcattagaatttaacaactttttaaaacctgtttattttcgttcggttttgcccatatttattttatatttggcttttagcacataaaatttggtcttaattgatgaggagagaagcgcaaaatgttcgttgtgaatgaatgtttacaaatcaaaaatattttcacagccccgcttcacgaattccgtccagaagcagctgcactcggtgcttttgctcactctgtttcacaaagtccagcagttcgagcatccgcttgatcccaatcgatacatcgctgttaattgccgaataattaaggctttaaatatgattaaatgaatcttttttcccgaacgggacagccgtatcaaaaattctatttatttaagtaaattagatttttgtattttaagtaaattttgggttgctgaaattgcgagcttttagataattcaaattgcgagttattgtaatcaaaacccgatttttcacagcgccctgatctcgataggtgattcgaatttggctcccttacttttctaaattttattatttgattttttactctctgctgcggagttcgtcctcaatttgtctgatctcctcctcgctgaaaatgttggcctcccccagcaccgccatgacgtggttgacagtgtgcagctgttcaactcggatcactttgctgaacacactgagcatgtcggcctcgtacaaaaactgctcattcgatgtagtggccaacataagcagacgatgattctgtttcgaaaatcaaataaagaaattttggagcaagaagttgcctgaggcggtcgtttcgcaagcagtacaagaagtgtttgcaacaccatgttcgaatagcgtggtccaattggtgagtaatccatcagtcgttcgacgttgtcgatgatcacacagctaagcggcgatttgtacgcgtcttcgaaaatctgtcaaatcattttcaaaattgaaaattctcctcaaatttcaccttccgaattttggcacatttttccgcttcactgtatccaaccatctcttcgggagtgcaaactttgatgaacggaaactccgaatccttggcaatttgcgcagccaaaaaggatttgccagtgtttggaggccctcaattgtataaaattaattttgtaaacggattaataaatatgctggtgatggtgattgactgccttttacctgttagcaaagctcggacgaacccgcgcgtgtcgggcgcagcggtctctttgatcagaaggcgtccctcctccaacactcgcgagacgcaatcgccccacaggcaaagaccgccgtacagcagccgattcagc

SEQ ID NO: 641 - DNA, 1585 bp, Heterodera glycines
tgcttgattgtatggaattcgttgctgttgattgtgctgtatgccttgctgatttatgttgtgtcggtacatttcagagttgtgatgtaccgtgttcatatttggttgttcaacaaactgaacgtattgttgaatcggtgcgctcggagtaccatactcatgttggtaattctgatgctgtacattctgccgtcccagattcatttgatggataactctctgtggttgtgctacagacgtaggattgcgttgctgtcgtgttacaatttgcggttctccgtttatcactaattccttttccaatctagcaataacactaaaattttctcgaacttgatccatacccatttggtttgctaccctgttttccactggggtcgacgcaataggaaaagaaattgggagtaaattttgctgacgttctaatctcacattttcaaacatacgcccagcgtcaaaatctgttagactcacatttctgttgtgaacattaaaagttcgctcttccaaattttcaaagttttcgaaattcaaacctccaaatccgtttgcattgtccacttgttcgttttcgttttctttgtcctcctcaccatcacgaacatttctttgtcccacgtccaacaatgcatcatggatttgttcagtgttcatcattggttctgaaaaatttgaatgctctgacatcccgtcctcattttgtctcagtccattttccgtattgtttctgttttctctaaagatttcctgcccttcctggttaagaatgattcccgcattctgtgctctctgcctagttaatggcggacttcgcactatcattgttctcccagaaaatcaatttataaccaaaattcaaaatttccagcgcccaggtcgtttgcaaattcaaccaaattacgtagttcaaaatttccgttttcttcaaaaacaagttgaaaaccactcaggtgtcaaatcgttccgataaatgccgctttgctgcacctcccaggtgacaatggcgagaggtttatttatttctttaaaatttgtaatccaacaatccgttagccaaagagggccaatgatttgaggggcgagcttcttcgtctcctaatcaattataaaaaaaagatatttataaattaatctacatatcacagaacaatgagcaaaagcagaaaatttaatatatatttacgtaaggattttttataataaaaaataataaagccacataaaatatactaaattagttaagtaaactttgtcggtaatgttgaaagaacttgaaaccaagcggtcatctcttgacttttaatgaaagtagaataatatactgtattttaattttataatattttctataataatatattttatatttattgaaaaagtttgacattatttttcttttttatataatttcaattcgataatggtctgcctctttaataatttttatttttttccattaaacaatttaatttttaatcatacttcaatatttttcctgaaataactaaatccacagacagttgattttaccttttttcaaatccaaaatttggtgtaaatccaatgatattcaatataaattttt

SEQ ID NO: 642 - DNA, 1643 bp, Heterodera glycines
attggttctgaaaaatttgaatgctctgacatcccgtcctcattttgtctcagtccattttccgcattgtttctgttttctctaaagatttcctgcccttcctggttaagaatgattcccgcattctgtgctctctgcctagttaatggcggacttcgcactatcattgttctcccagaaaatcaatttataaccaaaattcaaaatttccaccgcccaggtcgtctgcaaattcaaccaaattacgtagttcaaaatttccgttttcttcaaaaacaagttgaaaaccgctcaggtgtcaaatcgttccgataaataccgctttgctgcacctcccaggtgacaatggcgagagatttatttattttctttaaaatttgtaatccaacaatccgttagccaaattatattatcgtctcgcccagagactgataaatattcagaaaatttcgtttgttctaacttttcgattttacacccagtacttcacttatagaaaacaaaattcgagtgcttcttacctgctttaccaggagcgccaaataggacaaaattccaaattaacttaaacaagcactgaatttgttggactgccgccaccaaataaactcaaatcaaaagcaaagtcaaagaccaccaattttataagagaaaatcataatatcggagatgaaaaccacaaaattaaaattaacaacgaacagccaaaacaaaagaaaaatagggagggaacaatttaatcaacaaaatgccaatacaatttaaatataaaatgagagctcaaaagtcaacttaattactacagcagaaactatcgaaaaaggcgtctctgccgcaaaaggtcaattattcggctccaaaaggtggggttcgcgcaggaagaagcatcagcgtcggcactgtttgcttcattcgcaaaccgaggattgccacggccgcgatagggaagacgagcgttggtgtacgggtggtgacgagtcggaccaaaggaatggtggcgatttgtccaaatttgagaaaagcgacggggcggtcacccagacctcccctcccatggttggcaaacgacgtcccggatcccgaacagtaccgtatttagggggggggggggtacacggggtacgtaccccgccttcgggcaaaaggtggcgagtcccgtcgttgataatttttcctgcccgcgactttctcgtcagaatgatcgatctgctcagccctgagtcggcacactgtccaatacaactgatcagtctctgaatccctcggtgatccggttcggttttcacggatcccgtcattgatccctgcccttgaacggagcgaattagagacgaggtaacttctcagatttcacaatgcccgcatcgatgccaaatgcttcccttcgattttgatcattcactggtttgcgtgcattaccccatttcggtctgcttctgtcataatagcttcgttcgtacctcgaccgatcgtgctcatatttcgaaggcacattgtggaggtgttgagctacgatccttcatgtactctattcctaaatttcctttcgatcctctagatagtacctttgcagcctcgatgattggcggaacttcaatttcgcttccccaacttttcttgatccgcttttttacgaatccgat

SEQ ID NO: 643 - DNA, 2964 bp, Heterodera glycines
agagagagagagagagcggaggagagagaaagacagagagagagagagagaaagaaagagagagagggagtgcggagagaaagagagagaaaaaagagggagaagagagagagagataaagaaaaaagagagagagagggagtgcggagagaaagagagagaaaaaagagggagaagagagagagagagaaagaaaaaagagggagaagagagagagagagaaagaaaaaagagagagagagagggatgcggagagaaagagagagaaaaaagagggagaagagagagagagagaaagaaaaaagagagagcgagaaaagagagagagcgagcatttggcaatttaaaaaatggataattattttagaaattcccatataattatttaattgctttcctttgcctccttttccatccgttcttttcttcatttttcggatgttcgccgccttcgaatggcaaatgcatttctgtccaaatgccgaatttgttatgaaaacggatgacgacacaattgttgacttggggcggtggaaactttgggtcgggaaaaagttcagaaaacaagcggaggtgaagggaggcgccgcctttttcggcgtcgttttggctaaaacgcgcccattccgtcgacgtggccacaaatggtaggctaatttcggcacttttgccgtgtttggatttgggctttcttccccctcctcctcccttttaggtacgtctcgaagaaatctttccccggagacattttcccggactatatgcaaggggccacttatttcggcactacccaagccgttcgagcagtgatggcacacacttcggaggtggtcggtttcaacatggacgacttgctgtacacgggcattttggccgaacgcgccaaaccgccggtgttccgatttaacagcggaacagtacatttcagaggagagcagaaagtgcgatcgaaaggactaaaattcaactctaatttgtggcattatgtctcctcgcattcagatttggccacggaaggaatactgtaagaatggcgtgcctttgatgttcgcggcgtacagcggaattcgaacgcggcacttcaaaaatgtggaggagtacaaaagggcgtaccaaagaatacgcacagtgaaatgctaataataatcacaacgaatttcgggaaagtgatcattcagaagccttgacctgcattttgtcatttttcttttaatattttgttacttttttgcacatatttcgcttttccttcccattatcgttgcatttttcaatggttaccctcccccaataggacaaaattccaaattaacttaaataagcactgaatttgctggactgccgccaccaaataaactcaaatcaaaacaaagtcaaagacaaccaattttataagagaaaatcataatatcggagatgaaaaccacaaaattaaaattaacaacgaacaaccaaaacaaaagaaaaatagggagggaacaatttaatcaacaaaatgccaatacaatttaaatataaaatgagaggtcaaaagtcaacttaattactacaccccgcccctatggaaaaaggcgtctctgccgcaaaaggtcaattattcggctccaaaaggtggggttcgcgcaggaagaagcatcagcgtcggctactgtttgcttcattcgcaaaccgaggattgccacggccgcgatagggaagacgagcgttggtgtacgggtggtgacgagtcggaccaaacgaacggtggcgatttgtcaaaatttgagaaaagcgaccgggtcggtcacccagacctcccctcccatggttggcaaacgacgtcccggatcccgaagaagacgaagctctacgagagtcacccagactactcgtagagggtttttggacgacggacttcacggtgcggatattcaacgccttatcccctggaaacggggattgggtaaaaagccacgctttaagcgctcgaatccctgcgtctttcaaaactccctcaggtgaaataaggtgttggttgaaggagttgccaaaacggaagatttccaaaattgagcggccattttccgtggtgctaatggaacgaaattgagcctggtcaatgaaagggcgcattttcatgaccaattcttcatattgagcagttttggcatgaacgtaaggagggaaggtgatgaagaagtcgacatgctggaaacgctcacaaagtgtcgtaaagatgtccaattggtccagcacagcttctgttgtctcgccggccatcagagagtctcgtccgacgaacaccaaggcagctttcactttgcttgacaaaacggtcggctttaaaatacggattacttcggccaaactgccctcctttccgacaaaggctgttttctccattgcctctgccaattgctttgccgagctgtctccgatcacaacccttggctcctcaacgaatgccacagcgtggtgaatgtgccgagcccgtattttttccaaaatccacggtgtttcggcaaaagtctgctcctagccggacttttccgaatccttaagaatttccaagccctcgggtgccatcattcccactcttttgtatccgctgtcctccaaggcatgctttgcacattggcactgctccacccaggattccagtgctttttcttgatcggagggcgaagggaatctcccagattccacataatctccccttttcccagaaaaaaggcacatttccattcccgggccgccttcgaggatcattttgatgaaattgcgggcagccgacatggacgagacggtgccgcctctcagaaggaaaacggccatcagagcctgcaatggcgtttggactatggcactcccaatttctgctgtgccaagtgccgggtcaagctctcccaaagttaatttttcacagaattcgtgttcagttcctgtgcacttcgaattccaccgaaaattcaccctcggtcgact

SEQ ID NO: 644 - DNA, 1487 bp, Heterodera glycines
  unsure (1)..(1487): unsure at all n locations
taagaattccacggttcttcgatatgttcgaccgaagttgaaatgggtatattatggccacacaattggcctcaattttggacgcgatggagcaggattatgacgagaagacactcagaaagttgcgaattcatctgaattaaatatggaaaatcaaatgatgattaagactgatccgcaaattcgacgccgacggatcgggcaaattggaatttgacgaattttgtgcgttggttttcactgtgggaaattcggtggacaaagaaacgctgcgtaacgaattgaaagaggcgttcagactgttcgacaaggaggtcattctttcattcggtctttgaccatttgtccccttcgatttgttgaccatttgtccccttcgatttgttgaccatttgtccccttcgatttgttgatcatttgtcccttttcagggcaacggatacatttccacgcagacactgaaggaacttttgcacgaaattgcgcccgacctcagcgacaacgaattggacgctgcggtagacgaaattgacgaggacgggtcgggcaaaatcgaatttgaaggcaaagcaaaatcaaacaaatacaattacctaattaaaacccaactttaatttacagaattttgggaattgatggccggagagagcgaataaaacataaaagaccaaacaaatgattggcatggcgaaaaaggcatttgaacatttgattttacacttttttcaaactgaaaagtgaaagtgtttaaatcgcaaaaggaaataaattaattataaactgtaaaattacaattataacagttgcaaagggaaagaacttcgtttatttatcttttcactgttccaatgtattcaatttcattttcgctgtcgtcgtccacaatttctcccggggaaagcattggacaaacgaattggtgacaaattgtcggcttttcctcctcctcaaattcgtccctagggtccgttggatcactaaaaaacattcaaaaaattaccatttgctgaaatgattatgaaaaacaaataaaaatgaatgcgccgcgctttgcctggaaaaatcggaaaagagtcggagaatcgctttggcgcgttcggaggggctgagattctgacgggcgaattcggccgacaatttcgccacttcggtgggcggcccatcgaaggcgccgtcgaagtcggcacagtccaacaaagggaaagttggcaaatacttctgacacattggcaaataactgaaaatgggaaaggaaagggtaaattattaatttgaaaatattgaaaatttaatgaagtttttttaattttgtttcgtttccactgccattggacccatggaaaataaaatgccattggcccaggggggtgtcttttccccccccccctctcttttcccctcacattcgctgttcctttggctgctcttccgctgcttcgcatnntaccanagcgcccgcattctcancatcagcagatgcaatttcc

SEQ ID NO: 645 - DNA, 4517 bp, Heterodera glycines
atttatgtagtacattgataatgtacatttctggtaaattctttaattatatccatttttattgtgaaatgctcacttgatcaagggcgtatccagggagtggtcttaagacattcttgtccaacttgacgaggaacaaattgagggtaaaagttaaaaagagtaaattagggaattgacaatgtttaagaattccaacggttcttcgatatgttcgaccgaagtcgaaatgggtatattatggccacacaattggcctcaattttggacgcgatggagcaggattatgacgagaagacactcagaaagttgcgaattcatctgaattaaatatggaaaatcaaatgatgattaagactgatccgcaaattcgacgccgacggatcgggcaaattggaatttgacgaattttgtgcattggttttcactgttggaaattcggtggacaaagaaacgctgcgtaacgaattgaaagaggcgttcagactgttcgacaaggaggtcattctttcattcggtctttgaccatttgtccccttcgattttttgaccatttgtccccttcgatttgttgaccatttgtccccttcgacttgttgaccatttgtccccttcgatttgttgatcatttgtcccttttcagggcaacggatacatttccacgcagacactgaaggaacttttgcacgaaattgcgcccgacctcagcgacaacgaattggacgctgcggtagacgaaattgacgaggacgggtcgggcaaaatcgaatttgaaggcaaagcaaaatcaaacaaatacaattacctaattaaaacccaactttaatttacagaattttgggaattgatggccggagagagcgaataaaacataaaagaccaaacaaatgattggcatggcgaaaaaggcatttgaacatttgattttacacttttttcaaactttgaaaagtgaaaatgtttaaatcgcaaaaggaaataaattaattataaactgtaaaattacaattataacagttgcaaagggaaagaacttcgtttatttatcttttcactgttccaatgtattcaatttcattttcgctgtcgtcgtccacaatttctcccggggaaagcattggacaaacgaattggtgacaaattgtcggcttttcctcctcctcaaattcgtcccgagggtccgttggatcactaaaaaacattcaaaaaattaccatttgctgaaatgattcatgaaaaacaaataaaaaatgaatgcgccgcgctttgcctggaaaaatcggaaaagagtcggagaatcgctttggcgcgttcggaggggctgagattctgacgggcgaattcggccgacaatttcgccacttcggtgggcggcccatcgaaggcgccgtcgaagtcggcacagtccaacaaagggaaagttggcaaatacttctgacacattggcaaataactgaaaatgggaaaggaagggtaaattattaatttaaaaatattgaaaatttaatgaagttttttttattttgtttcgtttccactgccattggacccatggaaaataaaatgccattggccaaggggtgtctttcccccccccccctctcttttcccctcacattcgctgttcctttggctgctcttccgctgcttcgcattttaccaaagcgccgccattctcacaatcagcagatgcaatttcctgaaaatataaaaaaataaaagatagaatttgcatattttttgctctctccccccatttttactctctttctctcccattttcctctctctttgctcctttttttctcccccttctcttccttttcctcttccttttcctcctttttcacctttcgctctttctttttctgctgctgcgtttcttccttctcttctgatgcggtggaagtgcacataaaaatcacttcttcttcttctcctcctaattcttctgcggttgaatgaatttcgtcgacgagttccattgtctgtgcaaatacgatgaaataaattattgtgtttgtaaataaaaaataaataaaacatttgcattgtttttttccaacaaaatgtgcattttttcccgccctcgcggggaaaaaagggaaatgaaacggacgaaaggaaagagaatgaaatggactaaaaaaagactgacaaatatgtctctctttcgcttgatcgtaaagtttcttaagatgatagcaaggaaaagttttttggcggatttttttaaataaatggcgaaaaaattgaaaaaaaaattataaaatataagaaaaatgtagagaaaaaaaatattgcacataaaatcagtcatttgtggtcgctttttcacacaaaaagggatttaatttttaattttcatggaatgtttttagaaatcatcaaaaaacgaagttggcttaaagaaaacacaaataaaaactgcgaaaatcgccctacgaatgaccgaatgaataaacaaaaattacagagaaattaatgggaaagaaaagaacgaatgggcaaaaaagtgagaataaagggagaggggggggggatttgggactaaaaggattaataaacgattaataaacgatgaccaattcgggggaaaggcgcaaataaaggggaaactccgcaagtaacgctcaaggccaaaataggctgaagagagtacaaattgagttcgggtcaattctattctcggagttttgaatatcaaacctaaaaacacaatttgtgatcggccagcagatgcgaaaggcaaaaatctaatggcatttgttaacagaattgttcgaaaaatgataaatttgaattttgggtgtgactttgagctaatttttcaaaaaaattctgggcaaggaagggccgacaagtgccgccagagaaaatttttaatttcaatttaaaaaaggattaaaaatatatttaatttgtaaggttggaaaaaataagacagactgaaaattagccactaggccatttgtacattgacataatcgatttaaacagtatataaaagcacaaatcgccaaatttctacttgcattttttacaaaatttcgaccgattttcaatttttcaatttttttttactttagtttttaatcgattgtgccctctcagttactctgatcacactttgctctctcatttccccacagtctccgctccctctctgattctctcccacctgctgctgtctctgcctttgctgttctatttcgtccgcttcgtcctccgtttctgatgttgttgaagtgcacacaaaaacgacttcttcggcaccgttttccttttccttttccttttcttcttcttcggcggatgagtgaatttcgtcgatcagttccatcgcttggggctgtccgacggcactttttgacaaatgttgcgattttctcctaaaccttcgtcgtttgcggcgttttttctgtcgtttttcgttcataatattattaaataataataattattattaataaatatttaaattaattttccctttttatttctaaagactaaaaagttaaaataaatgaaacaattaaacatgaaatgaataaattattattttttgttgaaaagggactcttttttgatttgttcagctttttcaaatgaaacattttcttgcgaatgaatgcgactttttgtttatcccttctcttctctttcccaccaatgaaatgataaaatgcgacgacaaaacaaaacactttttatttttatcttttaaacgccgcctaaacaaatgaaaaattcggagataatttgagtttattgagaaattttgtattaatattaaaaattttaatgggacattttaagtgagtcatccattaattaattggttaattaattaattaagcgattttcttttggaaattcatcgacaaaagcattggacaaagcatttggcctcctccgtccgtttcttttcgttgttcgaaccgccgccaaaaatgcctttgattctttgccaaatgcttttatttgcgccttgggcgaatttcagccgacattccgaaaaacatgggcccttaacaaaaagagaaaaaggttggaaaacggcggagtaaaaactgggctcccagataaaaatttcaaaattaatatttgaatttatttaaaaataaaaaaattaataaaatttggttttgttttttggtggaaataatattttgtaaaattgtgaacagataacatcggaattgacgttgatttaggctaacaaattcagtgtttcaatggcattttattttataccaaaatcaaagaaataaacacttaatttttagaaaaagtcacacatagaaaaacaacattcgccataaatttggaaatttgggttttttaaaacagatttttgagaacttttcaaaaaggtacaaaatcagcaaattagcatttaaaaaacagcattgcgtccttaaaaacaacaaaatactgataaatcagcacatctcatctctgggcttcctaaataaaaagtatgtataggaaaggttggaacccttccccccccc

SEQ ID NO: 646 - DNA, 2271 bp, Heterodera glycines
  unsure (1)..(2271): unsure at all n locations
tattatttttgacaaaccgtgaagtcgtacttttttggtgtacaacacctgtcgggtgggccaaatcctcccccccccccccccctctcttctctctctctctctgtgcccttttggtctcatcccttgcttatgtacttttgaattggttgttggttattaaattgctctcctgtcactgatcagtgatcaatccttcccattttgtttttgatttgtccctttttctttttcccctttttctttttcccctttttctttttcccctttttctttttcccctttttctttttcccctttttctttttcccctttttctttttcccctttttctttttcccctttttctttttcccctttttctttttcccctttttctttttccccattttccctttgtcattcgcttctttttccatccccgccgcacctccaaaagcgccacttcccttctctgtccttcgattgtcacttcttcgatttggtctttgatgtcgacacatttcccttcgtctcctctttttgtgcgctcttctccaaacacttcgatttgctgatcaaatgggggtgagagagggattaatttgaattgctaattaggttagtaattaaggagtatttaagggcatgtgaattgtacatttttttaaactccaaaggggtgggggattcacaaaattaaaaagtgataatttgcattcttttcagttagtaataatacatatatttcacatttaccttttcttcggtttctgtcaaaatcaattgcattaacgcaaaaataatcgaacagaacaaaataaaaagtttcattttactgctttaatgcgtaatttaatgagattctttccttccgcagaataaaagctgtaattttatgctgcttttgtccttggatggcaaattcttttcaaggactttctttggaattaaggacggatgacataacacggataataaggttaatgatattttgatgttgcaacgttcattcaacatattatttgtgagtataatcaatgattgaggatggttttggttggttcggtttttgtaccaaatgtttattgactgtaccaacaaatcgttttgagggggagggggcggcggcaccagcggcgacactttgcgcattcgccggggggggggggcggcgattgttgcggcgaaaggcgggcgaatttaatatgacaaaaaagtgtcagtcaaactggtatttattatcattattattattactaggcattcattttcacattctcgtggtctgttgtacattctcactaataatgaaattatatggaaaatgagaaaaaggacaaaaaacggggagggaatggccccgcggtcacatttttgttgaattttctatgattcattttgccattttttcacaatttgtccattaattcattttggtatatttaattctcggtaaattttttaaataaaacataaatttatacacaaaaataaataatgttttccgatctttccagaaaatgtgaaaaatgagatcggtggcaaagagaaaaatcgaattaaaacaaaaaaaagaaaataaacacaataattaataagtaacaacagcagcagaagaatgacttggaagagcgaagatcacacaaaacaaatataaacttcttcaatattttagcaccaaagcaaaaagtggcggaaattggcaaaaaaaaaaaaatgaaaaaggaggaggaggaggaggaggggggaggtaaaattgaaccatcattccaatcngtcagttggcacccccccccccccccgctctcccatttcggcatttttccgattattttatgccgattgttgctgctgctgcccctcattgctgtcactccttccaacaatgctccacatccaaattcgtccaactccgtcgccgatcagaagtgatcggtggtctttggttggtcggatggctgtgatcggtgccggctgagaattgccaaccaaaaaagcggtgtgctcgctcagaatacgccttaaccatggccaatataatgtggagaatgactcaattgtcccacttcagtcggaactccctcctccatttggttttttccatgccatttggccacttttgccggtgccgttgttcttccgcttgttcatcgttgttgctgttcgtcttctgcgtcggcgtcgtcggctgctgttgctgctgcgacgtttgtctgctgatggtggacgagtgggcggtggacgccgtggagagcgtcgaatccatcgacgacgaagcgatgggcaccg

SEQ ID NO: 647 - DNA, 3268 bp, Heterodera glycines
  unsure (1)..(3268): unsure at all n locations
aagcgcacgcttgggcacgagacgcgcggagggcaacgatttggagacggacagagaagcggagacggaggagggagcaggggaaagcgagagggaccagacgaaaacggtgcctaaggagggaatacggtggcattttgaaaagggcgcaaaacgaaagaattgccggtggacagtccggcgaacatttggcgaccgtccgtcgtcgccatgcaggtgatctcgtagacgtcgttggtctccaaaacgcaggacgactgaacggaacaattgcaatggacagagaatgaatgattggggagttcgcccaccttttcattgcccacggcgccgaaacggacggaacggtcgtaaaagccccaggcaaggaaatagcagggcggcaccaacactttattctgctccaacaccaccgcttggttgccccgctcgccgaccacaatttcacctaccgccgtccgcaattctttcaccggacgggcggaaacgcgcaacgcctcggggcaatggtaaaagaggcggggaacagtcaaaccggggacgggggacaccggcgggggaacgccaggcggagaagcacctaaaaatgggaaagcatagcacttaaaatgcaatatgtgaatatatatacgcaaaatctttcgctggggatgcggttttttgaagagttgggcggggatttggccaaaattattaatgaagccgagcgtggcgttgcgcgtcagtgggtcctcaatggtctcaatgtcaatgctcgtctcatagaacaggtggtggaacacgttgttggcctcccgtgcggcatcacctgcacaagaaaagacaaaaatttggttaattctctcgtttaattgccccttttttaattggctacagtccgatcacttaaaaatgttttctcattttgattctgttcttttgctgatcaaccaatgatcacgaccatcctttttcattaacggaatgatcagtgatcacttcggctgatcagtccgattcagtattcacccgtctgtttgtagccgaatatcaaatcgatccattcgtgcaaatgttccgacacgaagtcgcactccaacgcctgccgatggagtcgtacaaattcgtacgcgtccccatgagcccacgccggcaacagaacgtcgtccagccgagtgccgttttgtttgatgcccaaatcgaaggcattttcgttgagaaacatttcgggcaggaaaaagaactcggggatcagctccttcacgtccgccatgttgtttctggccgcactccaaaaagcgtcccgcacggaatggaacattctgtcggccaaatcgaagtgaccgccctggggggggggagaacaattagagcacttaggggggggggggggggtaattaaaaatggagatagaaggaaagggttggatgggacagagagaacctggagtttaaggaactgttgagtgaacggctccaatcgaaccaaataagagagtacaatcatcgcactactgtagtgggtaccgtacatgtacggcggcgttcctcccgggtcgtcccactcgcggaaccgtttaaggaattgggcaagccgatcagggttttgggcacctgaaaaccaattccaattaaatttaatggttatttattgctattcgcttacccatcggcttgctaaaatcgcggaaaatggaagggttggttaggtcaattcggtccgagtcgtagtcggccaacacccagggaaacacctgaacagcgctaattagttgcttaatagcccaattagaacagggccaaaatgccaccgggtattggctcaagtcgttgtaggaacggccggccaaagtgttcagatacatcagataatggaagttggagatttctcctcgctgccatttgtgggtgattgactgttgctgtcccgtcagaagttgggcgatcagagacgaactcgtctcggtgggccgcagcttcttctgttcgttcatgaactgggccacgtcgctggacgcgttcttcgccatcgaaaccaacttctaaatgtgcgggcggaagaagtttttatgttgaaggagtagatttagtcttacaatagtggggttggtactaaattggcccctccttccactcgccccccataaatggcctaaaataaatgtgagactcaattggcccctcgccccccacaaattccatttcctccctccacctgaaaaacgtggtcgcgcactttgcgcggaaatgccaacaaaaagttgcgcccgtccgtgctgaacacttcgagtgcaatttgctgcagcaaatagcgccgtttgtgcacctctttgatgtcgtcgtatgcgaatttgttgcactggcggttcacttttgtgctgaggggccgcgagcgacagcccattgcaatgtacggaatgattgggtcgtggaacctttgggggaggtgggggatacggtaggggcaaagaacggggaagaacatacatacggtaggtgagaggacaaaatgactcactgttctggcaaaaagtccaagtcgcggatttcgcgcgtcttcagcaaagtgaatccgtccaccacgtaaaaatggtccttcccaaacagcaaaaggccctccattatgtccaatccctggacacgagcacaacggaacatcgaatggagctgaaaaagagggcaaaccaacgttaaaatagggaaaagaatttaagaaagtttgcccttggcaataaatgccatttaaattacggtcttttccaaaacacatttttcctaagtttttgagtggctttttcctgtatgccatgttacgctttgtcttggcatgcttttcccttgtacactttgtctcgtacactttcccctcaccttttcgccctgctccaacagtctgagcagtgtctgattgtctggcccttggccgttcgtcgcttcgtccgtcgtccaattgtccttgcgcttgtgccgtttgttcctctgttgctgctgctcttttttctgctcgtccatgtctttctgctgctgttttccattctcttccgcttcttccactttctctgcactgtctgcttcttttcccaatttttgcgttccgttttcctccactctctcgtcctcctcttccatctcttcctcaatctcttcgtcgcattcgttctcttcactttctctttttctctttccgtcttcctctccatttgcgatgtttttctccgaatatttttcngcatttatttccaaattcttttctaccattcgcttnattgttgacatgttcaattctaaa

SEQ ID NO: 648 - DNA, 2812 bp, Heterodera glycines
aattaagttcaaattgtcataaattgcgtcgctcaccctcaacagattcgatcggttgctgatcacttccgttttgtgactgatcactgcccattccttccacgctctgatcagtgatcgcccctcccggacttggcattaatcctgccttaaagtctacaatgcgttcgtccatcgtttccgctctcgttttgctcatccgttcccagtaggcttttgcatcgcgtgaaattgccactttggcacgcaatggtttcgcgttgggcccttccaaatacggacgatagggataatggcgatagaagtcggggtttggcacaagtttccgccgaatccggcacggcccctctgtgatgtccaactgaaatttgtcgaggagggagccgtggttcgggcctaaattgaaatttaaaaagaggaagttcaagtgccaagaatggaccccaaagtccgcgctctctgatcagctccgtctccgcgttgtgccattcttggatggaccacttccgcacatgcgaatgccattcgtgataacgctggcaacgatttctgatcaattctcgcaccaaactgatatggacctaaaaacagtcacaagaataccgtagcactcagacaatcgatccactacagtaccctgatccacatgtaaaatgtctccggctctaccctaagccgtgcgtcgtcaaagtgcgccagtgcgtccagtccctgcttggactcgacgtcgtccgccgaagtgttggcaaaactcgacatggcagttgacttgcgcaacttgcggaggccactccgcgcaactcggctcagcttcgtctgcagttgtgtcggcaacattttctgtgcgttcagcagacgcacagcggacgaatcctggcgaggaaggcaaaccgattcaaattggcagttatttggcattttgttggacaaataaaagtatgtatgttcaagtgcctgcttgttggagttgactttgcgaaaaggcgccgactgtttgtgagtcgacgaattgaagccacgcgcggtttgccgcctcgccgcatttggcgcgtgacgtgaacaggtccaagtccaagttgcccttcttcagccactcctccagcactgcctttttgtgttgccaaagaatgccccaaacactttgtgcacaaatggacacctattggccaatgattttgccaattttgagtcttttggccgacctgcgcagtgccacgctccaattcgcgattccgccggtcctgcaagtcgaactgaggccggtcggagagcataaacaccaaatggacgagcgcagcgtaaaacagcgggtccacgttggacttgggggtcagaaacagctgctgatttctgacaatggcatttcgggaaaacatttatgccaaactcggcatttgccttccgctagtcgatcacctgacaatttcggccaaagtgtccaacacacacatttgcgtgtccacgttgtcaatgggccgcgacaaaaggtacaaaatgaggcggaagagtgaggcgatgtgcgcgtcggtgcattggagctgagccgccgctttgtttgaggcgtgggcctcggccaaaagctgaaaatcattggacaataatcaaagtgttatcacaaaagtgataaacagtgccttcagaaaacacttgaaaatgcgaattgggttccctttgtacagacaattccaaacggtgtcaatgacacgcgacagaaagcggacgacgctggcggaagtgcactcggacgattggttcagttgggcctttgcccccaggggaacgaccagcggagccgaggccgagttcagaaagaacattttgctggccatgaaatggtcgagacaggcgttgaccagctcggtgaacagaaggttctgcctgttgtgggtgggtccattgcagtccatgtactgtaggggaagggcatactgtagcaagttattaaagaatggcatacggtaaaaaacaaacaaaggcactcaaaagtaaatgagaaaaaagtcgaaatggtgttttttgaaaatggaatttgcctcgatcagtgcgtcgaacaaaggctccgtccgcgcttcgttggccaaacaaaggtcattcagcagaatatttgtcagcagctccaaactctgtttctcacagcgatttttgccgtctaaaataattttaattttattttaaataattatttaatttttttagttttttttgcgtttgcctcctcctgcagctgttgttgaagcagcatattcctcagcaaatgttctctccgaatttggcgtttgtgccgaatttggcaagggaaggagcgaagagaataaaacgacaacgaaagacttaacattaattagtcaattaaatattaaaatagtcattagggtaattaattaattgcctcggtgtgacaaatggcaaagaattgagaggaattttggtagagaaaattgaacagttggagaagctgaattatttgtttattgataaaattaaattttgctttacacaccctcaggggataatttgtgctccaatcgttggcattttgttcaccgctctcttccgcttcaaattgcctgtgaattgtggcacgaatagtggccaacagagacacaatgacttcgggacaaaattgggcacgttcaatcgcatcggcaaccgatctgaatattcccaagttttggcaacgatcaaatgccaacatttggccaaatcagggcttatgctgctgatggcattcaaaaaattctgatttttatgattttgtctccgtctccgctcgtttacaattatccccttttcctactgtatcccctccccc

SEQ ID NO: 649 - DNA, 1788 bp, Heterodera glycines
tttttggtactgaaagtgtccatttttcactgggactcagttgacccagtgcctagatggcatcggttcgaatttataccttgttttttagacttagctgatccagagctttcgagtgatacctaatttgtccgaatttgactgttttaaagggtcagtggccccctttttcactcaatttttcgagttttaaacaggttcaaaaaccggttttttggcatttccgcaactggagagctacggctatcgaatgatactaataatgtttaatttggatgcttcttgaaaaagggtgcactaaagttgacaaaaataatttatggtcgtctttttttatggcctgtgaactgcaatagagccgcttttatttccataaaactgttttttaattactcaatccgaagccatttaaagcaaattttgctgggcaacggacggtccggcaatggaaatggcacacatttgtcatccatttgtacagacagcttcggttctggtcctttgtccttgcgaatttcgatcgttctccaaatagtcaattcgcttttgccatcgaaatgtttgtccaccaacgcatcaaaacgtggcgaaagaagtgccaatttgaggccgagttgaggacggtcaaaagaggggaaaatgtccatccaaacgtcgttgcaaatccaactgaaaaaagttttgttaggtaaataaatgacgaatttgtgcttaccgtctgttcattttttggcaattagcacaatttgctgttgaatttcgagtcacacaaatatatagcagaataattaggtaattgcgttggaaactttatttttatataatgagaaacaaagcggaaaacaatcttttttaacgaaaatcactagggatgtcaatttaatgtaaatacatatttttttccttgattccccatgctctaaatagtaggaaaaacactttcttttctgtgtttgcgtacaaaaatcgggacttttatttacatatttcgggattttatacatatttggtacatattttgaggattttttacgggaatttttaaaattccttaaaaaaaaatcaaaaatttcggcaaatttttcattttttacatacgtattctgagaatttttgcaaatttatagaaatttcttctaaaaaaattaaaaaacttttttagaaaatgtactcctaaaactagcaaaaattaatttttaaaatgttaaaatgtgattctaaacctatttaggtcatttttatgatgacattttgtgccttgttttgttttcatagaggaaaagaaacagaaaattaaaaaatataaagattaatagagaaaggatgagtagtagagagagtgcagtgtttgcttctctgtcggcgcgggtgggagggttagaatggtgccatgtcattacttaaaaaccatcataatgggcgttacttaaaaaaccatcataattaaaatttttgcttataactttgctctaaaaagaccaaatttttgatgtttgctatcattcgatagatctaaattttctttatgagcctgtaaaatttcaaaaaattttattaagcttaaaaaagttatggccaaaaatgttcgaaaatcaagtttttttgagttccccgagctataacttttttgaaacttaacaaaattttttgaaattttgcagactgatagataacacttagtgctatcaaatgatatcaagaattaaaaatttggttgctttcgagcaaagttataaataatttttcgacaaaaatttttcataatgatggttttttaagtaacgaccc

SEQ ID NO: 650 - DNA, 6507 bp, Heterodera glycines
gatttatgacaaattttggttatttttttaataaaaatctgtaacaaatcgattaaaaacacaaaaaatttttccgggcggcgcctatcggcactcgacggagccccccctgtccatcctccaaaattttttgaaaaaatgcgacgcaaaaaaagcgtttttaaagcaaaaaagtcgtcgcttgacttttaatcggaagggacagaaaaattttggcataaaatgaccgattggaagaggaagaaaaagggaacgcaacagaggaggacccaccaaagaggagaatattttgcaaaatgatgacatttgccgggcgttttaccttatccccccacccccaaatcaatcaaataaataatcaatttgacggataatttttatccaattcatttgtaaaagttaaatccacatttttcaaaaatttgaaaattgactaacgtaatgataaaagtcaaattcctaaatgattaaaatggaaaaacgtaactcgtgcgcctgcatgaattatttcaggattcttatgagcattttgaaatagtttttcaagtttggtaaaagactttgacattatgccagggcacccatcgtccatgctccgtttccaaggacggtatgccgatttgcaaggacaagtgggaaaaattcatgaaatccaagaacatttaaattttttattttaaacaatgaaaaacggttaatatttattcattcaaatggcttgtagttttcatttttccaacatatttttgttttcacgggtcattttcctcatttgcgacgacttttattctgctttaaaacgttttttgtggcgcgctttttccaaaatatttccgggaaacagataaaggggtcggcggtgccaataggcgccgccggggaaaaatttgttaactgattttcaccaaaaaatgcggattttgcgattttgagataatggcgatgaccacattttacttttcacaacacttcttgcgggcgctttttgcgaaaaactttttttggggatgggagtggagaaattataacacttttccaaaattgatcatttttaagcgtcaaaatttaaaaatagaaagaaaggccctgggggtgccaatatgcgccgccgggaaaaaaattgggaatttttgtgcaatttaggaccagattttgcaccaaatatgttataaattaaaaatttatcaaatttctttgaatcttgttaaaagttttccaagtgctcattttcaaggacgtcattgccattcaaggacgaatgggaggccctgcattaccgtaaatatttcataggaatggctgagatccaaccctttgttatttgagaaattcggtgattaattttcttttacctttggtaaaagacttttttgggtgagtataaatatgtaatataagcaataaaatttctaaggaataaaaagatacacacagaaaaaaaacaacacatcgtcctaatttgaaaatttggtagcaattttatataaaaacggctatttttgaggatttttttccaaaaatcagcatttcatcaaataatcagctttgacccctagaaatgagcaaaatgcttacaaaatcagcagagttgggaaccctgtacatacccaagggatgcgaagacattcacaatgagaaatgcacgagtccaaacaaaggagaagcagaagctaattaaattttaaattatattttagaataaaaaacggtaaataaataaaataaataggggagcaaaatagaatttagtgctaatttggattttggtgatgaatggttttggcatctttcatttgtgcttttatatgccatggtttctctgcccatctctgctgttcccattttggttctcttctctcagattaattgccattgattaatctgtccattgattttccttgggttaatttgagtggcttaatgccctcctctgccagtgaatgggaacggacggcattttctttgctcgcacacggcactttgggaaaagcaacctaatcctcaaccaaaaaatgaaaagcaaaatgaattgatttgatttatgctcttctgaggccgaaagtgatcagaatcagctaaagcttataaaatcttttgagaaattatttttttatgttttaaaattggtaattccaggcaaaatatctgctaataaatctcaaaattcttctcaattttatttaccttttttcttaatcactttttcacatttaatcggaaattttagtcagttagacaaaacgaaaacaatttaagtttaaccattttatttttccattaaaaatttctttaataaaaaaatcaaaatgttccattttaacaaatcaaattaggtaatccagaaattgacaagatgcgaaatatgcgtcaaaatccaaaaatatactaatgacctcctaattggttccgcgattcggtgataattaatcttccatcatatactattagctttggcaccaaaagtaccatatttgtttgtattttcttttctccttttggccatcccttcccttttattcgtttttcatatcagctgaccgaagaatgagctcaaaaaagctcgagaaatttctcattcggtgcacattttgacaatggcattaatgccgtcgtccacctgctgctgaatatctctgctgagtggcgctgttcctccccccccccggcgccatcaaataaatatttgtaatgcaattaagtttgccccattaatttctgtcctttttataacacttttccccgcctttgctgaattcaattttccgttatcagtgtatatagaagttcaagcagtacagcaaatttcgatgggaaaggagatgaagatggacaacagcaaaaatggagaaacaagggaagaggaggaaaaggaaggaaaatagcattagggaaggaggagagacggaagagaaagagaggaaaaggaaaaattcggcggaaggaggaggagaaaagagagaggaacagcagcaaatcgacactttaatgttgccggtgctaattgctaattttgtgtgtcgtaaatccctcgtcaaaatcccgaaaattaattgtcacaagtttcaaggagaaattcatacattcgatagataccaaaccatttttatacatccgatttatttaccgaaattgagagttttttctttataaaatgcatttgatcacggatgaatatgatcggtcgatcaatcattcttaattaattcatttcttcttctggggttgatcgctgtttttgttgttttgtccgtcactcatttcgccctttttcgctgctttgtcccgcttcttcttccggtggcggagacaatggccttaattaagcgcaatttgaattatttaaacaaaattaaatgccttttttttatttgctcacccaatgcaattagtgtcactatcaagccaaatgatcacattgttacaattgttgtcccaatttccgtctttccaatgaaccgccgctgtctccccaataattttgcttcgtttcattatccaaccgatgccccattcattttccttggccaatgtcagcttttcctttgtccattcgttcaccaattcaaatggcacaatttgcattgacggcacgcgaacaggaaaatgaatttcgtaactgatggaagaaatggcattggcacgaagaaaatgctaaacaatttgagtggggtcggaattccaatttccgaaattttgggcctcattttttcgaattttatagaatatttttttcgaagctagagctgggttcaaggggtaaaccaaaaatacgtttaatggttcttaaatggcgtataattaaaaggtatgatcattttttggcgtaaaacgggccgagacctcggaggaccgggaattcccgccccggtccgtacaaccctacttttaattgttaatttctttcattattttttggtacagaactgtctatattcaatgggactcagttgtccctgtgcttaggtggctcccgttttgacatttttctttgatttttagacttaactcaccaagagctttcgaatgatactaaatttggtaatactacccgatggtaccacaacttttttgaaaaaaaaaatttttgttttcaaaagccgtgaaaaaatgttccctggggtttttggggttgctgatcaccaatatgacatccatttcgactaatttcgaaccccgaacccgaacaaaatttcgtaagttcaaattttgcatttttcgtctaaaaatgggtaatcacatggaaacattctgaagtggtaccatcggtagtattaccgtaaatttgtctgaatttgacctttttaaaaggctaaattgtcctattttgtccattttttcggtaaacaaaaaattgtatttcactatgaaatcgttgggtttacgccaaaaaatgattataccttttaattaacgccatttaagaccattaaacgtatttttggtttaccccttgaacccaactcatagttcaaaaaagctcgagaaatttctcattcggggattttcagcagtatttgttcctgctcccccctccctccgcaccacacctccttgaaactgttgacccaatcgaagtccgcttgtgcgttcaaatttctgccaaaacgaaatcgcttgggttgtccatcttttctcggagagtgcaaccatttggacgcctcaggcaacaaatcaccggaatagattgaattcaattggtcgagatcggtgagaattgaatgcgaagtgagacgacgcaatttgtcaaaaaggatgccattgcaaacgcccaagtggcgaatgttttcagaaaaaatgggccaaatttcacgaacaaaaacatcccaaattggctggccattcgtggtgtttgataatggaagccacaaatgtaaattgatgcctcttttgtcgaaaatttggtgattggaacgaagaaaagcgatgacggagtgatcaatgtacctaaaaatggaaagaatgcttttattgcaatagcttttgatttttaattactcaatccgaaggttcttaaagcgaattttgctgggcaacggacggtcgggcaatggaaatggcacaaatttgtcatccatccgcacagatagcttcggttttgttccaatgtccttgctaatttcgattggtctccaaattgtcaattcgcttttgccatcgaaatgtttgtccaccaacgcattgaaacgtggcgaaagaagtgccaatttgaggccgagttgagcatggtcaaaggatgggaaaatgtccatccaaacgtcgttgcaaatccaactgaaatgggaaaacagtttagtcaaataaacgacgaatttgtgacttttaaaattcttttaccgtcggttcatttttggcagcaattagcacaattttggacgagttccgaatgatgtcacacaaaagagcagaataataattcgttggaagctttatttttttaatgagtcaaagcggaaaacaaaagatttttatagtcatgaaaagggaattggtgaatattttttgtatatgaatagagagagccctgatttttttttgatttttttgcgttttttgaattggtgaatattttttgtatacacggcgattcaattttgggctccaagtacaaataagtttattatttatttagtaatcagaacgccaaaactttgcaaaacttaaaattttttggggattttcccttgtaaaaatagaagagccgatctagagttaaaaacttaagttccataaaataaacttggaatcgctagaggaggtcaaaatataggcctatacaaaatttcaagaaaatctgacccgaggaaaatttttttgaccctagtaaaaatttcaataattttaattcttttttagccaagtccacaatttaaggccaacccaaataaaatttacaatattctccagaattttcccttcaaaatgagcataaaatggttttatttgctctagtattcaccaagttataagctaagaaaatttcataaaattgtcgatgttgtacgtaaccaacgctttttgaatatgattttttattgacacgaaaacttttattaatgaaaaaataattctgccttcttctgtaaaagaagaaattgaaattaacacacaacataaggaggactcgaacctgagaccccccttttggtgactaacgcacagaccactaagacgaaatgaatagagagagccctgatttttttagatttttcctattttttacggattgtacttgatgaaagaaacacgaaaatcacattttattaaaacaatttttgaagttttttgccttcaatggggttggacaatgtttaaatgggaaacgaaaaatcattgacaaaaacggaaggggcggaaacattttggcataaaatgaccgattggaagaggaagaaaaagggaacgcaacagaggaggaccaccaaagaggagaatattttgcaaaattatgaccatttgccgggcgttttaccttatcctcaaccaacaaatcaatcaaataaatcaatt

SEQ ID NO: 651 - DNA, 4594 bp, Heterodera glycines
ataaaatggcaaaaatctcaaaatatggacataaatttctcataattgagtgcaaaatttcttcaaatttattggttgaaattgcatatgagatacatttccaaattttttgactcggtaaggcgctttgacaaagacggctttcgttttgcaattagtcagtcaacattcggaaattggtctcgaattttttcggcaattacgtgcaatcattttaaaagaaaaaaaaacataaaagctaaaatttattaatttttttagcgcaaaatcaacaacaaaagcgaaattttcgcttttttgcttatttttgacataatttattaatttttaagaaaatttaaatttattcaatattctcgagaaattttggcgaaaaaatgattttttgaaaaatttttcgggttttgggctcaaaaaggctaatttagctgctgggggcctttagcttggtttgaagcttttaagatggatttatatatccatatttttccatattttggcattttccaaaaaaacccctattagaacggcccccatcagctaaattggccgttttaacctcaaagaccagaaaatgctccgaaaaagacattttttagcaaaattttgtcaaaaaaaattgattaaatttaaattttcttaaaaattggttaatttatgtgaaagataagcaaaaaatggaaaatttcggttttttggtcgggtttttttgaaaatttacccctcaatttagaaaaatttatgtccatatttttgccattttatgtccatattttgagatttttaccattttatgtccatatttcgcgatttttagtccatatttttaccatccctagttatgataaaagtcaaactatctaaacgattaaaatggaaaatcatacataactcgtgctatgccaactcgtaaggctccctgatgtttcgtcactgggtactaattgggtttgtatccacatttttggtcaaatttttcagaagcgtagccagacagtcaggctggctgcggcgggtgggggtcggggtcactttggcgcgggccattttggcgccgcgaactttaaagtgttataacttttttcttatccaaccaaataaaataattttgataccattaaataggcctaacaaaggagaggtacccaagtgaccatgggacttccgaatgaaactttcagggtaggtagattaccccccctttgtattataaatttttttttatttttgctaaatgaagcttctggccgagatatgaagcttttcctttttgccttttcaatatcattttcaaagaatgtaaagccaatgtgagcgtcggtggcctggtggttgtgccttccatacttttttcttcttctaaagttcaattccccaaccctgtaaataattattttgtttttttttcatatccaaattagtttttaagctttttaatattaataaatttgaacataatatttttttcatttttattcgacattaattttggcacatgtgataattttggtagaaatgagtgaagcaaaggaatttgtcacaccatgcacatctaatcattataaattccgaacaaaaagtgatttgacagtgatcaggaaaaattgttgggaataaatatttaacgggatgagaaaagttggaaaattcatcattttgtgattcaatgtagccccccttatgccaagaataacgacgaaatgaccgaaattttggagcacaaagttggaaatggattaaactttgaagtttaacaatttcatcacgatggtaaagatttacaggcagatcgtcaagcacaatgcgatccgaaatttttctgacaattgacttccaagttctttaaataaattagaagtcagatctgttttgggaccccacctgaacaaatacaaatcacatggttgtacgaatccggtacaccctggaggtattgtctcgagacatatgttgtccctggcaaagtcagttgatgatgatgggcctgttggtgctgctccaccaatggccgttttccattgaggccatgagtcaagcaacactacagcttttttgttgccgatcactttcagtaaaaaattgtcaacaaaaaatttagccatttcttttgtcataatgtgggaacggccggcaattgctgttatgttgggagcctatgagatgttttttgctttaaaaaatatattctgtttatactttgaaaattccttttttgggaaattggccactcttttcagcaataattatgagcagtggagtgtacagtaccccatgggctgaaatgatggggcaaattgtatagctatgggtggtggcagaaatgctttgtgccctgctttccactatttttgtcccagttatttccaatgtgtgaggtgaatggagttcgagctgaaatcctgactgatcactgttcagaaccaagtccggtttcagttccaggacatgttgtttgactctgttaacaaaatttgctgattgttccaccaaattttccttatcaactgaatattttttggtgacgaattttgttatcttaattgcttaaataagtgtgataatttgatcagaaaaacctttctggtaacaattcttttggctgatttgaaattcttaagccatcgtcgaccacccttgtaattttgaatcttgttttgcgattcattgttaattttgagagcccatctccgcaaatcaatgtcttttatgggcagattttcttttcttttttcaagaaaaatgccaaaaagttgggaattgagcaattttaccgccgatatgcgatcatgatatgtcgtttcaaatctttaaatgattgaacagataatattttcattttttcgcacctcctgagccttttcaaatcagcttcacatgtgatccaacgaaatcggcttttcatcgatgccaagctccgaaatcccttttcagtgccacggaaatgtcgtagggcactgattttctcggcaaatccaacatgcggggaacacaatttctttggggagggcgcataactcgatgaagatgactctaatgcaaaaactatccaagaaaaaaaggcatactgtacttgctggagaggaaaaactcccttcactatcttcactttcatcatcttcaaggtcaaattcctcgtcaaaatcttgctgatcttctttttgatcaaaaacggccaattcatccacaataaggtcttccaaagtctcaatttctgacccttgttttgcacaaaattccaatgtgttcaaaaaatcctttgccagttgcttttcctctggtgttaattgggtgggagggggggctttaccatgataatgttcttgcaataaaagaataacgtttgttggatttattggcatttatttgggaagtatttttacaatgattattaatgcgacgagagtagatgagaggaccgagaagagtagcaacgacagaattttcaacacttactgataagcaaaataggtcaatagacaaattattctctcatataaaataaaaatgaaaaaaatattatgttcaaatttattaatattaaaaagcttaaaaactaatttggatatgaaaaaaaaacaaaataattatttacagggttggggaattgaactttagaagaagaaaaaagtatggaaagcacaaccaccaggccaccgacgctcacattggctttacattctttgaaaatgatattgaaaaggcaaaaaggaaaagcttcatatctcggccagaagcttcatttagcaaaaataaaaaaaaatttataatacaaagggggggggggggtaatctacctaccctgaaagtttcattcggaagtcccatggtcacttgggtacctctcctttgttagtgaattaaggtgaaaaagcagaggatgaagtagaactgacgccatcaggaggagacaggtttttgagtcagtttaaaaaatccaattgaaaaatagtgtaactaacgccagatttgcaaaaagaattttgcttcttatgaattataaaaaataaataaaataaagtgtagtgttattataaaaaaaatatatatatatactatgaaaaaaagaaagtgttttgatgaaaatataaatgaaaatgattggaaaaatgacatttttgaacaattaaaacattttgtctcgcaatcaatttttatgagtttccggcttcaaaatattattgaagtttaagaaatgtaaaaaatagggccacaaatgcccgaaaatgttccttaaaaaatggggcgcaaatatgcgggccgcaaatttccatgacgctaaagttaagccgcaaatgcccgattgggtgagccgcaatgtcagattcgcaaatgtctagagaccctctaatgccgataattttgtatgaatctaaggatttatcctcattttgtggttttttgataggtaaatggggattttttgaaatggggatttgaggattttgtggcttattgagaaattttgaggattttttgaagcttttggggaaaatcgtcagaatttgctacattttatgattaattttgataaattgtcataatgtttgacaatcatttaatttgggtttttaatagagcatcaaaacgaaaatct

SEQ ID NO: 652 - DNA, 916 bp, Heterodera glycines
tgccacagacttttattttaaatatttgtatcactgacgcagcattttccgtttcataaaaaaatcgtaacatataaaaatgggacatgaaattgggtgagtttaaattcaactttttgcctgaaagataaagttagatgattttccaatcctcaattcttctcatcaattatgtaatatttttgccgaaaaagtaatttgacttaaatccataagtacggtggggtgtccgagcagctccccatctaccaattgcctaacgaattcaatgtcaaatttttcaagaaaaatagcaagtgtatttaatttcttttcttttttttgctcttttgttatcaattagaactgttttaaacaattagggtttgtcataatgatggaacagaaatgtgattttttcgggagtcacccccaactcatccatagacccaacagtgattggacctcaggcaaaaaaggagtaccgcgactatccattttgcccggggcaatcactgtcctgtatgtacttttcaattgtacagcatttccaaatcatttccattccattcctagtttgttttgttgtgagctataaaaacattttcaaagccaaaaaatcatgaatagagcaatcgagagctaacggtcaacctaataagaaaaaacccctgagggagagaatttaattaaatccaaacctccgggggtccgtgccgggtaccgcggggtaagcagtgctggctttggcttcatcacggcacccgaccttttaggccaagttaagctcagcgttgcctaacttgccagatcggacgctagcgcatgattccactgtaccaagcaccccaccggaagttcatcgaaacaaaaaatatataaacccctaaatttcgagtccgctcggaggcatgacaatttttgtagaagaaaaaga

SEQ ID NO: 653 - DNA, 5337 bp, Heterodera glycines
  unsure (1)..(5337): unsure at all n locations
attcagctcttccaatgattgttgtcggtgcatgcctacataggaacatgtctgggtttgattgttggaaggggcctgccaggaatgatcacggggtccgacagggcaccgcagtacagatcgacagaaattttcgaaattttccatcctggctcggcttcttggcttattgcttcggacatcaattttttgaggattttttaaaaattgttttcgggatcctcatttggtggacatttaaaataaaagtgctgacatattctttaatcccaaattttttgttttccttcacatgtttttccacctcttcgtaatacttgcccaagtctgggctcttccggaaataattacgggtatttctcgagcgccttacgtcttttgaaatttcttggaaatttttcttggacattcttaaaaaataattagcataaaaaagttttcgtaaatattgaatgaaataaacaagccaaagaataaacacaaacacaaaattattttaatgatatccaaaaggcaacacattatagtcaacatcaattatccccttcttctgcactggctcgtattctttcattacatccctcgagaggactcgacagtcccttgtcggcccaattttctcaggataacgaaacacttttttgaacccatcccgatgattcaacaccatgtctttgaacaattcatagctgaattcgttcctcctgtccaacgtcatcccccgtatcttcgttttatgccaaatcacatcatctttcttcctcctcattttcaaggcgtactgttttggacccgccgacacatactccaaaatttcactgtctgaatactcacgattcatctctctgaacaaatgtttatagaaattttcaaaaaacatcttttaccccaaaaatttcccctcctccaaaggacaccgacccttcggatgagcaaaagccagagaatcttaatgttttaattttatggaaacttttctaatgtccacctgtgtcacaatacaatagcttatacccctcctccctgtagacctgctccatatactcgtacaactttacactggcagcactcgtggtccacaatgacaaaattatgttcgaaactttatgctcctttataaactcttgcttcttctggtatattgctctcatcacaccctcatttatctcaatcggtctttaaactcaatcgtgtcatctttgatgagctccgtccatctttccaaattattaacaatctcagtcacagaaagtgtgttcctcattgaaaatttcccccataaactgttcaatcccttaatatttatttgttttttgaattttatttgtttttctcaccaatttggcgatcatacgtagcccagggttaaacaccattttatcatattccaaccaaatgttgtacttggccttgtacatttcaatgaatgctctcttttcctcctcatttctcacctccgagggccagcccgacgcctccacctttattttcaagaacatgcgcacatatcctttgaacagctgactgtcaaattgctcaaagtgataggcccgatagaagcctattactctatatcccaacgccaaggatttccgcagttctatcgaggtgaatgtaccaatcaaagctctccgctctggccgatggttacattttttgacatccttagccaacacaaactctttcttcgtttttttcgcacatgtataacaattggggaagagaagcatattatcaatatgcatagggaggagaggataaagcagttcctttggggggatgaccttcacctttagcaggccatcatagggcacatcgtcgggcaccgtccaattcacatcgaattccctgctcaccacaattttagggaccccaaccggataaggggtgtcttaagcgaaggaaaatttcaaaaatgcaagcagattttttaccataattcacaaacggatacaagcttatgatatcgaacatcgaaatctcaacttcttcggttgcttttgcgtacaaacaaaaaggcattgtccgtccccccgcgtaagcatccctcggatttattggacccttatccggcacagcgtcaaagaacctcttcatctccctattttttttcaagttctctttcacatcgcattcctaaatttgttcaataatcaataaaatttgaaattggcacacccaaacttcctccaccgagaagtttttacatttttccctcaaaaactccattcgtgtctcagttcgtcggaaatttacttccatacaacgcccattgggtcctatggtccagggcaaaaaacattttggacatccatgaaacgcacatccctttagcaaaaaataaaatagggaaggaaattctgcctacctgaaattcaatgatttttttctcagctccgatgatacaatccacttttaatcccccgatttccacttcacccccattgcatgcgtgtctaagtctcactcttttgctttgagccaaccattcaaaatacttcacggcaattttgctctgattctcggctctctcataaccgccttccggaataattgggagatgattttctctcaaaaattttgttcgaaaaattctcatcacaacccccgcaattgttacactgtccttcaacacatccatcccatcagtaatctccaaaaacaattgccggaatttcaaaattgcctccatcaaaatttcgacgtcattttcgcaataaaccttgagctgctctcctaaaattcaattttaaaaggaaaacagattttctctaacctagctcaaattccattctataattttcattgtgccattttaccaatttagcacattcctcctccttcatattgtccggacaataatcttcaaggggtggtaggtgtgtcaatttttttccaaagttcacatttttgttgtacttatgagggaagtacaactttgctaaggttttcaaacccaaagtctttggaagatctgccaacttgttttggctgagcagccagaaatcccgaaaatacacaccacgcgctttcatttgataaatcttcaggtctgccatcatcaactcggtttcgacccctctttcagtcagctcttttaacacaaaatgcgagtcgaaccttccaccataatgagcaaaagcaaccgtttcaaatcgtttaaatcccaaaatccaatcaacaaattcgctcattggttcaaacccatctgctacagaccaagtgatcatccgcggaccattacaaatttcgcattccctctcttctcccacacaaacactacaagtatgcgcggcactaacaagatttggtttgtgttcgcccccttcaaccgtcgtctcgaggtcataagccacaatacggtatgctttctgctgtcggagtttgatttttttaatgaaacattgccgacccggatgatagactttgcaaattctacagaatttctccccgcacgtgtgttttgatcgtgtttgatatgtttccccaaatttgttgcatttcttgtactccctacaagctgtctttttgtgagactcgaaacaatcattgttgtagaaattccgattgcattctccacagtgtatcgcctcacaaacatccaaacaggggaacccgaaccccatccggcaacactttttgcagcgctccctacattccattcggtgacggtctttggtccaaaatgtcacctcacagcttacacaaaaatttttgacggcgaaaaattgagtaacagattttaaaccatcccaatgttcgcccactcttatcacacaaacttcgttttttcttactcccttccctttgaaaatcggtctaagtccggttttctaaataaaacaatcacacgaagtttaggaaatgttcgtttaccatatcaaacgcaacgatacgaaatatatctgggaattctttgtcccaaaagttttgcacaaattcgaggtgtttaagcccaaaagttttctcctgtgtatttatcccagccttttccatcaaaaccaatgctaattcatgttgttttttccctgttttcatgatatgtcggaatttatcacgagaaatttcacgtccaaccgtttgataaagcttagcgaactcgagtgcataaaatatacctaaatattttcataaattgagtttcatttttcttctcactaaattttccctttggtgttggaatacgccctagttctttgacatcagcaaaaaaggatgagttgaacatttttcaaagcttagatatttgaaatggaaattttaaagcagaaaaaatgtacatggcttaaaccaagttttttcatgacacatttcaacaaaaaatttatttcattaataaggcggtgggtattctggaaaatcatcaaattcttcttgttgttcttcttttgtccaataataccatgctgcacaaagaataaagagcaccagcgaaaccagcaaatacaacatgagaagcatggcaaaagagaaacccaaaaggaaaatgagaaattctgacatttttgctgcaaaaactaattaaaaacgcattgagatttaacaataaaatggcataaaaccacgaaaaactaaaaaccaattattgtacatttaatccattgtgactttcaaaaaccaaacgagatatttttaacagatttctccattcttgtttctgtgacatcagcgaattgaaagtccctctgatacgctttttagcccatgacgacatgagatgattgctcaagaagactgtagagaattttgaggaaggaagggcttcaactatttcaaacaatagctcaggtggcagtggcattgttagctaaaaaagacacggtggaattctcttactatagcggcacagaaacaaaaaaactaaaacgaaaaatgactaaaatcaaaacgaatccaattattttttcgatattttctttctggttaatttctgtgtgcgcggcactaacaagatttggtttgtgttcgcccccttcaaccgtcgtctcgaggtcataagccacaattcggtatgctttcttctgtcggagtttgatttttttaatgaaacattgccgacccggatgatagactttgcaaattctacagaatttctccccgcacgtgtgtttgtttcgcgtattgtgtgtttccccacatttgttgcatttcttgtactccctacaagctgtctttttgtgagactcgaaacaatcattgttgtagattttgaaaggcgaaaaattgagtaacagattttaaaccatcccaatggtcgccccactctatcacancaacttcgttttttcttactcccttcccnnttgaaaatggtctaagtcccggtttctaaataaa

SEQ ID NO: 654 - DNA, 6609 bp, Heterodera glycines
tgactttcaaaaaacaaacgagatatttttaacagattctttcattcttgcttctgtgacatcagcgaattgaaagtccctctgagacgcttttgagcccacgacgacaggagatgattgctcaagaagactgtagacaattttgaggaggggaaggcttcaattatttcaaacaatagctcagggggcagtggcattgttagctaaaaaagacacggtggcattctctaacgataacggcacagaaacacaaaaacgaaaacgaataaatgactaaaatcaaagccaatccaattatattttcgttattttctttctgattaatttctgtgtcgtttaacattttcctaaaacttaattctgtcacttaaatttttaggaatcagggaattttctcaaccctttacataaaacgatcaatcaacaaaaaatttattaaaaatgcatctgttttctcattaatgtgggggtgagcggggtcaattggtctcccaatccattgttgtcttggccaacggatcatttgctgtggattttgccccaacggattgacaattggaggcgcctaaataaattcacgatgatgattttgggtttgaaagttccgaacttgaagagcttcgttcctttgtgcgacgggcgggacgcgaacgatgacaggtgggaaatgccatggttggggcggcacaagatgagcctaaatttctcctgtcttagaaaaaactgcgggtttaggacctgatggggcagcggaagtggtaggccgttgattggatgatggtgatgttgaacaggcacaacatgacgcaacattggttgcccctaagaactcaaagcggtgaaatttgggtcaaaagaaggcgaaaaaggtcatgagtttttacctgatggggcagtggaagtggtaggccattgattggatgatggtgatgcggaacatgtacaacatgacgcaccaacggtggcccctaacaaatcaaagatgagaaatttgggtcaaaagaattcaaagttttgacctgatggggcagtggaagtggtaggccgttcattggatgatgaacatggtgatgcggaacaggtacaacatgacgcaacaacggtggcccctaacaaatcaaagataagaaatgttggtcaagagaaggcgaaaaaaggtcattttttgacctgatgaggcaatggaagcggtagaccattcggtggaggttggacatggtgatgtggaacaggaacaacatgacgcaacaacagtggcccctaacaaatcaaagataggaaatgttggtcaagaaaaggcgaaaaaaggtcatgagttttgacctgatggggcagtggaagtggtaggccgttgattggatgatggtggtggtgaacaggaacaacattacgcagcattggttgtccctaagaactcaaaagtttgagaaatgttggcacaaaatagggtcaaaaaacagtatccaacctgagggggcagcggaagtggcggaacattcacaattggaaaccggatggggtgttgtggggcacggagggcgttgtatggcattggtggaccctaaagcccaaatttgacaatttgtggcaaagcaaaaaaagcgatttcgatttcgacctgacggggcataggaagtggtcggacgtggagaagagggtgttggacatggtggtgcgggactgggaatacacgatgtggcatttgtggaccctaagacccaaagctgtgaatctgggcaaagaaagctcaaaagcctttggtttctgacctgacgtggcagtagaagtggtggaaaggggcggcgaacagggccttgacgaaatgccggcggcacccgggcaattggacgttggacagctcgtgcgccaatgtccagttcctgtctttgcacaatgttttggtgggcggcattgccgtcaccgtcgtcatcgtctgagcttacatcttccgccggccgattgcctaaatttttgggggataaaatggccaaccatgaaaccgtttctctcattgtcaaagcacaaactcaccctccacaacaggaattggtagtccaacgattggtcgcggagttggggccctcattcttttgggagatgttggtggagttgggtcacgtcggctgcgttgcatgttgtgccagtctttgcgccatttccttcaaaactggttgataaaatacatttaaaggaatggtttacaaaaaatcagaaacagcctctttgttgaatggcatttggtgattggtttgggatggatcgaacatttggccatagtgttttttaaagtcaaaaacccatgcgttataatacgcggaatagtcgaaatccatttttgaatttggtcagcaaagaattttgaagaatgaacgtggaaatgaatagagccgcattaccccgcttaagtttgctcctccctttgccgtgccattgcgattggctcctccctcagcacggctgtgattggctccaccctcagcccgccacggacagcaaacaataatgtgaatgattgatgggggaaatttgaatatgattttgtctttctgtgccatccctcccccatcatcgccactgttgggagtgggcaaaagaaatttttttctcaatttcgttggatgattgatagggaaatttgaatatgcctttgcatttcggtgcgcttctcccctgccaggcaccactccgttattgcccactgcgatgggagggcaaaaatggactgaaagaaaatgaaatttcttcgcaagtttagttttgattgacagttcagtgtcataaaaaagaaaatttgaaggaccaaacggaattgtcataaaaaattcaaatgcgaaggacgaaagaattgcgattgcaaaaaaaccaaaaatagtaacgatggacaaaaaatttttgtgtgtttgtgcacaatttacgttgggcaaaaacgaatgagaacaaaaaaacttgttcgtttgtgcacaatctatgttgggcaaaaaatgacgtttgtatatgattgtgttgtgtaaaacataaatgataggaaaaaattttgcgtttatgcacaattgtgaggcaaaaaataacggagcaaaaaacttgtggttgtgcattttgtgggagaaaagtgacgaaaaaaaggaataatttgcaggagatgtcaatcaaaaaccgaaatgagaaggttattagtcaaatgagcagtagatttgtgtaaaaacttgtccttggtagtattttttggttttgacgtgtcgtttgtgcggttatttaaagcggttgaaagttgttgtgatcatcattcgagcaaaatggacgtaactcttcccgtcagcaactcggcaggtgaatggatcggagaggaacggagggatggtgttgtgctctatgcgccgtggacggacgagtggcatgtgcaacagcagcagcaacagcagcagcatcaacaacaacaacaccaacaacaacaacagcaaaacgaggtgcagcagcagcaacaacagcttgtccggcgaacaggcacggggtggacgcggtttccagcatggaacgaaccgctcgttgccaacgattggcgagagaaggaggaaaatctgatccaaaggaagagactacagcgtgaaaacccggagtattgggcgcaaatattggaggaggaaaagcgagccggtgaggagcgccgcttaagggatttgcggttagagcgcacatgggatggctacaaggaaggccacttcgagcgtcggcacaatgacggctcgttttttgaggccagaaaatttcttggttcaaatcgacagaatgactttttttcattttcagtttgttgctggggtcgggaagacagtggttggaagttctggaggagggctttggtgaatgatgttggcatgggattgaaagtgttaagattaactatgattggggatggtatttgacattaatcgctgataaataaatttttcgttgagttggaacaatggggaagaggaggggagggttggaataagttggtaaatgttttttcacagaattttgggaacacattaaaatataataaatgctcacgaataatattggtccgcatagtgcatcgactaacattgtgccagcgtcaatccccctcccgtgccggcaacataagccacacaaaatagccaccaatccatccccatcctctgccggatgttggcaactaaaaccatacatctggcctatccatctgtgggtgggaggcaacttaagcctcccaatccctcctcaacccctgccgaatgttggcaactaaagccacacacccggcctatccatccgcgggtgggaagcaaagtaagcttcccaatccctcctcatccactggcaggtgttgacaacgtaaaccatacccacggcctaccctttcgagggtgggaagcaacgtaagcttcccaatccctcctcatccccctccggatgtaggcaacttaagcctcacatccgaccttttggggcatttgaatccaacctcttattctcaatccttcattggttgacatcatagccatataaacccatttgattttttgattttaaaaacattaatacaaaatatgtggaaaattaatgataaacaaagaaatgtcaatggtcggcgggaaggttaaaaaacttctatgtaattatgggtgtgtacaaacgtccttgagtgtttcggaaaaaacgagtgacagagagcaaaaattattgcttacgtatgcaaaaaacagccaatcagacaaaaaacacctatgggttgctcctatttaagtagctagctgctcgctgctgctattcaaaaatggagcacccctttgaaatgcccgtcgatttggatgattcccttctatcattggatgtgtcaccgacgaactccttccctattgatcctcccctggccgacgtagattcgtttgtccctgatttggtgccagaactgggcgacgactcggccgagtatttgtccgactctgaggaattcgaggttgagcgaatatgcggccaaaaaatcgaaaacggccgacagttctttttggtgaagtggaaaggatatccgaaatcccaaaacgattgggaaccggaggaaaatttggtcagatttgatcgttttcgaatattctttttgcccataccgttaattttagctcggttgtcagcccaaaatattacaatattggcgtcgtcgccaatacgataaggagtaccgggcccggacaaaggacgacgagaaatcggccagagggggaagaagaagaagagcaaagcgtatgaagaaaagccaaaggccgccgtggatgtggagccggatccggtggaaaaagcaaaagaagagatgggcgctacccctggggaggtgttggaggaagagaccgaaggtctggaggaggaggatgtgtgtaaaaaagggaaaccggaatcggcagatgcgggaccagaggtcgaacaattgaagaaaatgctacgtgacagtggccaaatgccgatggataatgccccactacccctaccccgctgggtgcggggtagtggggcatttaaaaaaaagtacaaaaaattgtacgacgcaatgactaataatatgggatgatgttgaatgtttatgtattgcttgttgttgcctaataaataataaaaaaatcaaaatcgaaaaaccaattagaatttaaagaaattgacagtattttgtattttccattgtttttctgtatggtgtgactcactgcccccccccacacccgccacaccaccgaaaccacacccattaccccacatttggatgatagacatttggaatagtgtgaaaataaaatgtaaataaaatttggtaaaaattgttatgatttataaattgaaaaataattattagggttaataaatgaataaaaaaatttttggtaaaaataaaatttaaaaaataaaaatgaaattgattaaacgaataaggttaaaattttgaaaattaaattggaaattaaatattaatttaattatagaaataaataaatatggaaaatggaaattaaaaattggaaacaattaagaatagcggattaattagaattttaaatataaaataaaatttaaaaaaggttgggtttggttttgaaaatttaaataaaaattaaataagtttagaaaaaatggaaattaaaattggaaataaattaaaaataataaataaattggaatggaatgaaaaaaattaaaaatgaaattaaatggaaaataaaataaactaggaattaaaattggaaataaattaaaaataataaataaattggaatggaatgaaaaaaattaaaaatgaaattaaattgaaaataaaaataaaaataaaataaaacaggaattaaattggaaataaattaaaaataataaataaattggaatggaatgaaaaaaattaaaaatgaaattaaattgaaaataaaaataaaataaaacaggaattaaattggaaataaattaaaaataataaataaattggaatggaatgaaaaaattaaaattaaatggaaaataaaaattacataaattttaaaatgaaaattgaacattaacaatttattttttgtgcagacagtcaattaacacatgcgggggggggggggg

SEQ ID NO: 655 - DNA, 8781 bp, Heterodera glycines
  unsure (1)..(8781): unsure at all n locations
aaagtcaattgggtgcaatgttttncgggatttaccaatagaattaaagaataaaactgacaacttattaactgaaaattataggtgaatcagaataaaattcaacattcgggcttaaaatccggagaaaagtcaattggtgcaatgttttcgggatttacctatagaattaaagaataaaactgacaacttattaactgaaaattataggtgaatcagaataaaattcaacattcgggcttaaaatccggagaaaagtcaattggtgcaatgttttcgggatttacctatagaattaaagaataaaactgacaacttattaactgaaaattataggtgaatcacaagaaaattcaacattcgggcttaaaatccggagaaaagtcaattggtgcaatgttttcgggatttacctatagaattaaagaataaaactgagaacttattaactgaaaattataggtgaatcacaagaaaattcaacattcgggcttaaaatccggagaaaagtcaattggtgcaatgttttcgggatttaccactacattgaatacacacattttttatcgattgattttaaccaaaaggtattggcagtaatttctctgtctctagccaaaaggtattggaacacattttttttgatattattgattttttttttatgcgcttacaatagtacattattattgattttttttgcacttaacatatttttatcgattaatttgaaccaaaagattttggcaggttactgtctgtgtctctaatatacagaatattttataagtagtaccatattattattgattgatttacattattgattttatttaaatttgattttatttattgatttggtttattgatttataaaatatgaagtttttttttaaaaaaatatttgcttgttcatttttaaatttgtttgcctctttggtcttaagctatgtgtagtcatcgatttccaaaggttgtaacaaagagcattgggtttagtcataataaaacattctctttttggatgtgtgattttcaaaaaaaaattattattaaaaaatgaggcataagttgcaaattggccgcgatgttattgatatattatattttttgcgggaattctccgcacaaaacactgttttgttgacggtgttcagaaatgaaaaccgggaagtgcataattgtacttatccgcgaggtggttctccggatgagctgatcaccattcagcttttattgttgcaaaacttggcgccgtacgcctttgttcggtattaaaaataattaaaaagtttaacaaataatatatttttaggttcgatcttgaatgacccgtgcataaagaatgttgtgatgttaaatgttaaattaataaattaatttttttttattgtaatgttataattttaacaaataaaaaatttttaaaaatggaattggaccaggtaattgtaaaaaatgctgtttctacattataaagttgatgaatatactttttcaaatggaatttaataaaaataaattatttagaataaaaaaaagagcgaattgaacccgaacaaaaaaggtaaagcatcttttgccaaaccaacactttaccggttaggctaagcgcttcaccctatttttttttgtaaaaaatattggggatggttttggtaaattttgcattccttgcatcactatatccgcctcaccgggtgagatgtgtccatgtttttttaggaatcggaccacaataaaccagcatagtaaaaaagcggggaaagcaatcaaataatgggaaaataaaaagaggtgaaaaaaggtttcatttggtgttttaggagtaagcaaaacctgtgtttggcttgttgtgttattcatcttaaaataatggaaaataccttcaatatttgctatttataaattaccctaactttgaatctgaaacaatgtgacgattatagtccaccataatcatttggtcaaactcgcctagaacaaccatctctacgcctccttttgggattggtgaatcgaaggtggcccgaatggtggttgtgccgctccgtagcagttcgaagccacagctgtcatccagtgttgagctaagcggaatgataaagaatgtccaccccattttgaactgtttcattgtaatatcgcatgacctttccgaatttgccataccaagcgcctcgtacacatcaacaaaagcgcgagtgaagtggtgttgcggaaaagatagtttgtatggcacagacgggtagaccattccaccggcgtgtactgatatctcacgcaagtcaaaaggctcaaacttgaacggggttagcttatagtcaccattgaaagccgaatttgacaccatcgctatgataacgcgacggggaatggttgcactgaacacgttgtattcaaactcatagcgaccaacgctgatgaaggaagacttgatctccgttttacgaaccgcataagtggctggttgtttttcaagtgttttgtacaagctcatgttcagcgaaggttgtacctctaccatttttgcgtaaatttttacatcgtgaactgacaagcggtatttggtcgtgtcattgtcctttagcgtttgtataagaaatgaatcctttgccctgtaaattgtaaacagcaggtccaaattgtttataaggtaaagctcctgatttcccaaatcaaagtcgaggcgtgagaggaactgtgcctttcgcccatcttgaaatattttgcaacgttccttgaacccggtgtctgtggcatcatcatgtttagtgcttggttggtaaccggttgagccaaggaagtgttttttgacgtttccaggtaagctcaattcgttcgtgatgtatgctttgaagggatacaaatttccactatcatacacttccgtgttaccgaccgtgacttttaattgttgtacaaatgtcagtccaatggcttggattgccgatacattggtgtcttcggccttaattggtgtccaactgccgttagtttcaaacttttcaacagaaacttcaaggtgcagatagattcgtgacaaatcggtccacaggttgtcactgtagagacggaagaggtagggcgattcttgtgtgattgtcgccaagggaagcacttggcggaagaatgatcggacaacagagacgtttgttggaggcacagagaacagatttaatgcactgtttattgcaagtggactgtgttcactaattttttgcggacaagacattgtgtgttatcaataaggtcccaacgagtcaacacggacacgtttctttttaccaagcattggtggactaattgaggaatgcattttatttataggtttatgtctagctcttgcaatttttggcatttgctcacttttgtaccgtttgaagtcaaagccttgccctttttgggcttcaatgttgtttgccgccttttccagcaagttcttcagacctgacttactctcgttgacaagtgattctttaaggtctttaccgtccagtacatttgtcaacactcggtttccactctcaagtccttggcgtccaagtgccgtgccaatttgtttaccaattggcaacaagtatcgcatgaggcttctgaaaacggcgccaacacccgcgcctcgctgatagggaacgccacgaaaaatgttgaagccaccaaactgaactaattcagctgatgatggtgatagtgtagaccaatccacctggagaggatcaaaatcgacatgcattttttttttactgcaccttttaatcaggcaatgactattatttataatattattgttgtttgttgaaaattacctttctgacaaaggtgtttgcaattctgtcgggtgacattctggagaaatgtaaaaagtttataattttttcaaagggaaacccctggcagcgtgtgtatagaaagaaaattgcgtgtcgaccacacgcatttgagttgaaggactgaattggtattgggttgtagcgaatttgtttgtattgggccaaaaaaattttgatgtgcacacttagcggaggccaaatgcccaatgagtcatagtattcaatgtgcatgggggaaagacagtaaagtgacacccaatgtgaacctcgtgatgtgcttgggtcaacattcagtaccatacaatgtggatatactgcaatgtgattagttgggattttatctgccgcaaaacatccaacataggcgtggcgtgtgactgagttgttggccaaactgttgtcaatttcaaatgtattcatcattgttatgattaaaagtaggctaattttcgaaagtgcaaagttaaagtacatgtgccgtactggaatggcatcaagtttccactatttgtacgtatttcaatcaaaagttcagatatttcctttaccagtattctatggtattggattgctaaaaattgttcctcgacaatttcgtcgggttggccccgtatcgttactatgcgtagcactggtgcggtgacatcaccaatcatcattggctcaatgaggtcaggtgtgtaaacgtggaatgaagaaacgccgccactcatgtcgggcatgaagcgtgcctcgttttcgggcgccaccagctcggtgctgctaaacccaagaatgtaggcgagctgtgacgacattctgacgcgctgtacataacgtgggtcaagtctcagcgtgaaccggtttttgtgagtgtcaaaagtaaacttgcacgcaaatctcacctttttgtatgcctgtatccacgcctcaaggcccagttctttggtggcgtcaaggattgtgcgatcttcgtcaaacatgtttgcaatctcatcgttcaatttgtttcggccaagttcatcaagcagttccaaatcctcccccttgagggtggaaaaataattgtccagcttgttttggtatgtgtccttgtcatccatcttttctctcaacggaatttggcttgtctctgcacgtttctccctcgacacaatgccttgggctgctgcgtccatcaaatcaacagtgctgtcagtgccgccagtttggagtgcgtccaggagcacggttggctcgcttctctcgtgtttttcgtcgaatgtactcatccttggcccattggcgagcaaccgaggcggaattgttgaatgccaactgagcggtacgcgctttttttgccaacggttcgcttccctcgcccaacagcctgtacaaacttttactcagatcatcaggatttttaatatttgtagtggggacggcaatgtgcactgtgcttccggtctgccaatcaacctgcacaaattgttcttccaccgtcccaatggagggccatgaatgtggataaacaatgaccgccaaacccacttcccactcggaattgaattggattttgcgaggcagacgcacccggaaggagtttgttcggtttccatcaacacttgtgttggaaggaaggataacgtaaaatgaatttgaaggcatttttagttgctttcatttgtttgcagtttatatgtttttcgacgtgattgagttcagtggaatccagctgttgaagcgtgtgctgtacccacgccatttcacaaaaccatattccacaccgtcttttccctttttcctccgcaacaccctttcaatgtcatacatgcgctccttgttcttcagcgtcttgcacaaatcgttcgcgtaaaaccagccctttagtgtctcgttgtggtcatctcgtagacggtagacgatgggtgaccggtcggcgtgaacctccgccactgtgaacagttcgttggtgaaacggggcaagtaacctttttggaacacgtgtttgtacttttcaatacgcacacggtcccccaccttgaatttttgtactcctttgaccatttttttggccttatcatatagcatttgtctaaagctctctgcgttcttaaaatttacgtcaacaggtctcgcaccaaggcttgagttgtaagagtggttaatggcgcgcacaaagtcctgcactacatccacccatttataggtgtcgcgttcggtgaagtagcggtacagccgctccttgatgctccgatttgctcgttccgccatcccggcatggaattgtggggatgtgaacatgcaaaagtgttcaatagcttttgcccgaaagtactcttgtacggcccgggctgtaaattccctgccctggtcagtcaacagtttccacggtacatattttgcacgtttgagtaccgcgtcaaatgccttgatcatgctggcgctcgtctttgactttaccggctctacaaacagctgtctgctcagcgtgtcgatgcagacgagcaggtaacggaacccggcgttttgtttgccgagtctatcaaagatggccaagtcggcctgccactcggtgtgcaggccgggtgcgagcgttggcaaatggcggtagcgtcgcttcgcttgtcgatgaagggtgtaggtgcgctgggtggacaaaaaattttgaacatcttttcggctgatgttttgctggtgttttcgcgcttggcacaaaagcggctcaacgcttgtgaacgagacgggtgagtttgtgtccttgtacaaaaactccaacaaacgctgcttcttcttcaggctgccgaccatagctttggcttgaacttcaatgccgtactctttttatgttttttgcccttcccaaactgatgcttggtgaagaggtatttgctcagctgagcgttctgttgtgcccgttccgtgaactcgcggagcccaacgggtggatccttgtactcactccggctgtcccggtttaacaggtgggcaacaatacgctccacgttgctcgtttttaacggtcgtccgtccgcccttttgattttcccctccccggacacacccaatgcgtctgcgttgcgacggattaacgccatcacgccttgtttggtcagcgtgtagtttgcgtgcgattttgttgtggacgcagaggctgtctgttgggctgaacgtaacacacgtggactcgcgtcctcccaaaattcgtcatcatcatcatcatcatcatcatcaactcgcgttttgggctgctcatcgcccgccgactcgtcatcgtcatcacctccaccaccacgtttgtttacgatcaaccgacgacgctgtcgttgttgttgctgaagatgccgcccaaccattgtgcggcggaatgcgctggttggcttgcgtttggcttgttgttgtttttgctgttgttgttgttgttgttgtgtcatttgtaccactgggccggccaatgatgcagttgttgttggcagagcaggtgccgccgcatcggcgatctcgcgcaaattttgtagacgcacatcaactggccgttcttcctcgtcacgtttcagtttgttcagtcgcttaaactcctgctcatacctgatggacttttcctcctcatttattgtgtcgtcattttttagctggtccattcgcgcgcggaccaaccccattgggctgccgtcctgggaagcgccggaggtggcggtcaagctctgataaatttcctcggggacgagcacatagcgctttgtgtggtgcattatttcaaaaaaaaagagcaaataaaaatgaactattactatttataattttcaatgacattcccaattagcgggagcactatgctggccatcagcccagcgatggccgggaggccatcaccgtgctgtaacaacaccgttttggcagaccgtgcgctgcgtgtgcgcgctagtcgacgaagtgactgtgcgtttgttcgtaaacgctttagctgtttggctcgcaaagggacacggcccttcaaaatgttgacacaaatttccacgagacacaacagctgttcatcggaggcgtcttggatgagcgggccggcactctttgttgagcacatgttttgtaaaaagtgcacattttttgaaatcacctttgacactctcattttattggcacataaacaatcgtatgattttcatatatatgcgttctaaggcgtaaagcttccggactctcgggatgcatgtcgacgagcaggtatccaaaattttgtgcacaagcgtcccggtaggcctccatgaagtgggcggtccttgacgggaacaggtgggtggcgagtgtgcggacttgtagctcgcccgccgggttcctcatcaacaccaaataatgggagttgctacgcgcaacgcgcagttcccggttgaacaggtgctgggtcaccaatattacactaacgccccagttgtgtgagccacgggtgaagagtgtgtccaggtaatgttggcccattccaaccaccaaatcgtccaaaaccagcaatagccgctcctttttggcccgctctcggaccagctcttccgccgggacaccgttgtgtacggttaccggcacactgtcaacccgtccagctctctgcaagttgatcacattctcgttcagctccccgtaggcgtagagcactcgcccaacgcttacggacacctgtttgtccaggttgcgcaacagtcgcattatccactccgactttccactcccggtgctaccggacacgatcattgtgaatgggtgtcgaaattgcacatgcacatgttcaaattttttgtccatttaaaaaaaggcgctcattatataacgtttgtgtgtgtatatatatatatatatatatataatgtttaggtttgataaattttatttattgatagccatggatattattcgtgcaactgattggatctgctgcaacgccaacgccaacgccaccacgaccaccaacaccacagaaatgatcagcaggacgacaaca

SEQ ID NO: 656 - DNA, 2623 bp, Heterodera glycines
ctctctctctctctctctctctcgctcgctcacacacactctctcacactgtccctctctctctcactctctctcactctctctcagtttcacacagatatagagacctctacatacacgtacagacacctgtatatacagattgccccacactcgcactattctcccctccctttcactctccgcaccaccgctctccatcagtgtgtatctgtctcgcactcgctcacacacactctcactctctctctctctttcacacatacactctcatttttttatgtatgtgtatatatatatatatatatatatatatatatatatatatatatatatatatatatatatataatgtttaggtttgataaatttttatttattgatagccatggatattattcgtgcaactgattggatctgctgcaacgccaacgccaacgccaactccaccttggccacaaacaccacagaaatggatcagcaggacgacaacaataagccctcaactccaccaccagagacagctgcaatggcaacagcagtggtggtggacccgaaaggagatgaggaggaggaggaggaaatcaactggcttcgtctcatcgatgaggtagagcaacaggagcagcagcaggagccgaacaaggaggaggaggaggagcagcacaacggggaggagaaggcggcacaaagtacaggtggtggtggtgacggctattttttttaaatttttataaagacacagagaaatgtgcttgtggagtggtgagcggcagccgacagcaagtgtccctggtggaccacctgtgcaagcggttcaactgctccgcgcacgagctgaacgtgttgttcaaaagtttggagcaacggcgtgcgattgttgggcacttgcgcacagcacggttgcgcacctcccatcttcgcccctctgtccgcaactttcctgtgcgctgcaatgagctgtccgtcctggacgcacactcggcgcccgcctatcggggctaccttggaattactgtgagtcattgtttttttttttggtttatttttccattattaggttcgtatgcactactacataaagcacggcatccgtctgcgccatcccaattttccatgtgttgttgaatttggaggcggtgatcacaagaccttttttccgcttgaagttttgagtgttgttctcgcataggtgaaaaataaatagtaaatgttttctgttgtgaattgtactgttgctttcaaaataataaatgatgatgatcttcaacaaccaaaatcgctgacccgtcaacaatttttggccatcgcgcaacatggagtgaacacggaatattgcccgagccgcttccacgccatcatcatgcgcattcgtactcgcgccgggcggacggtggccgcgctggtgttccgctctgcgcgtgttgttctgaccggagtcacgcacccggacaaggcacagatgtttgcacaaagggtgctgcgccgcctccagcacactcaacagcacatatcaacaacaacaaccgagcaccaccaccaccaccctttcgtcatccatcaattgcgtgtggtcaacattgtgggcgtgcacacgttcgggcaacgcatcagtgtggagcgacttgaggcgcacatcagagctgcttttggcggcggtggcagcagctgcatttatgagccgagcatgtttccggcgctgcgctggcgactgccgtcaatcagtggtggcgcaactgccacttgcctcctatacatctcgggcaaagtggttgtgacgggcgtggcgaccatgtctgctctgcgcgccacctttgcatttgtgcaggacacagttgtgccaaactattttcgataaattttaaatttttttttatattcttcgccgtggataaagcggcggattctttccgtaagaaacccgtggataaagcggcggattctttccgtaaaaggcggctcgtcgtccggcggagccggacgaccccccccccccctcccccctgggcggcggcggcggcggcggggcaatgccaaacatacaaataataatactagcaaatttatcatcatcatcatcgaaaccacccagagtggccaggctgggttgggtcggggttctgtttgggtatcatcatcgtcatcatctccaattcctccatcatcatcattggttgtgcctgtgtttgttgttgttgtggtgcttgttgttgttgttgttgctgctgctcttcttggtagccaaaggggcgcgtctgcatcccaggccgcacacgtcccttggcgtagaagggccggtagtccttgtgcgcctcgtgcgtgtacagatccgcgtgcacactgcgaccaatttgcggaaatgtgacgcggatggcccgatgttcaccaccaccaccactcccgtacacgtacaggtcgtcattgtcgatcagatcatcactacaaaaaaaattaataccacaaatagcgcacctacatgggtccgtctatgttgtaggtggccaacgtcagctccttcatggcgtcaaagttgagcagctgctcgacggagtaggagaggcggaaactgcgcaccttcagattggatcgctcatcactgccgtcacggaaggtgtgccggatg

SEQ ID NO: 657 - DNA, 2474 bp, Heterodera glycines
tctttccgtagaggcggctcgtcgtccggcggagccggacgaccccccccccccccctcccccctgggcggcggcggcggcggcggcggcggcggcaatgccaaacatacaaataataatactagcaaatttatcatcatcatcatcgaaaccacccagagtggccaggctgggttgggtcggggttctgtctgggtatcatcatcgtcatcatctccaattcctccatcatcatcattggttgtgcctgtgtttgttgttgttgtggtgcttgttgttgttgttgttgctgctgctcttcttggtagccaaaggggcgcgtctgcatcccaggccgcacacgtcccttggcgtagaagggccggtagtccttgtgcgcctcgtgcgtgtacagatccgcgtgcacactgcgaccaatttgcggaaatgtgacgcggatggcccgatgttcaccaccaccaacactcccgtacacgtacaggtcgtcattgtcgatcagatcatcactacaaaaaaattaataccacaaatagtgcacctacatgggtccgtcaatgttgtaggtggccaacgtcagctccttcatggcgtcaaagttgagcagctgctcggcggagtaggagaggcggaaactgcgcaccttcagattggctcgctcatcactcccgtcacgggcggtgtgccggatgccgtagttctttgggcctccggcgacaaactccacaatgcgtcggtcggtgcgctcgcgcttcatctggcccagcgcctcgccctcccgcacacattggccgccgcccatccggttcacgtagtagattgagtcggtgtctgcaaaattttttttgtttgtaacgaaaacaaagaaacaaacaaacaaaccacagtagagcagctccgaaccgtccagcgccagcacctgttccatgtacccgtaaaggtgcagtcgcgcgtacgacgtgacgtagatggccacgggcagacagttggtgggcggcgccttggcaaactctggcctcttgcgcaccacacagcggtccatgcggtccgacacgtgcacaaagtccagcttgtccagcgacggatcctccagcagacggtggaactcggcgggcgtgcgcgtgtaccgcacctcggtcccgcccacacgctgggccaactttcccctgtgttgtgcagtgtgtgtgtgtgtgtgtgtgtgtgtgtgtgtgtgcgctgacatcaccaccaccatcataccaaagggagttggccagtgtcttggcgatgaggcgcaggcccgggtttggcgccattttgtccgggtccagccggattccctctgtgcgctggaagtcttgcacaaatgcctggcgctgctcctcgctgtcgcaaccttcaggccagccactcgcctgcactttgagccccacaaaggtgttcacgtaggagctgaacagcgttgtgtcccactcatcgtagtgccacaccttgggcgtgggtgagagtgagcattgagcacaatttggtcatgctcacttcaaagaggtcggtaaccatgtagccgagctgcaacgccctgttgagctccacctcagtgtatgcggtgacccatgagcgctggtcgtcgccgtgccggcacgggcgttgctgtctccgctcggcacacgtggcacacagagggaacgtgaagcgcccgtccctggtccggtagccgagcagtggcacacggacgtgccgtggggccagcactcggaccagcaaaagaccgcggaaggtgttgcattccggtctgctccacggcagaggggcggtcggtggacggagcagcacctcccgggtcagcacccgtgggttcccgacaggaaatgggttgaccttctgcagtgcaatttgtgtttgcgtataacaaaaaaaaaaaatgtaaacagaccatgacataagggtagaggctgaccacgtcaatgcacaaaatctcctccccttcggcacacacgtgatggagcttgaacggctccgtacgaccacccctcaacgcgtcgctgcgtgggtcaagcggacggggcacaaacacatgctcataccgccccctcagcgccgggtccctacgcagccgctccttccactcacaggcccacaccgtgtgcagctcacagccgtgttggtgctccagctcccacaaacgccgcaccgtccgctcgtacagatcctccgccgtccgaccggcggccaaccgttgttgccggttggggaagcactcaacacatcctagcaataaatttggatacaaaaaaaatgggggctcccaagtgcgcgaccgtgatagtaacagcccatccactcgatggccatcgggcgaaggggcggctcccgacgccaaaggccgtccacccgatacccgctgtcctcaatgtgcgcctctccaacggaccagctcgcacactgcacctgcgccacccggatgctctagctcaaagaaagcgaatgtagcgcctcga

SEQ ID NO: 658 - DNA, 2923 bp, Heterodera glycines
agaaacaaattgaacagatacgagatcggtatccaagcgtccgacatgcgtaaatgagtaaaaacacgccgaataatgttttggtcgttgggtttataaattagataattaaagcggacgtcacttgaattggttacaaaagttagcgcacgattcccttttgcatagtcgccaatgtgaaatttatagatgcgctggtctctgatcacaaacacatggttgtccaccaaagtaaagtcgcttttatctggtggaagaaaggcgacaaagttgctcttcaagatcgtatgtgcggaagattggttttttcgaagccaccaatgctccaggtattcaagctctatttcgctgatccgcctctgatgcttatcgatcagaaacaagcgacccgagaggtgatcaaacacaacccgtccatgtttggacagtcgttgcacaatcttctgctggtgaccacggaagatagccgtctcaccagattctctgtcttcaaaaaggttaaaactatacccattgtattcaaaacaggccaatggtgacattttcaccagtgatttcattttgaaaaacacactctgatagctgtgcaaagtgtacacattttgaagtgaaacggcccattcgctgtcacgctcacacttctctattcggcatgctgtattccaactataaccaaagtgttgtgctgtcgcatcctttgaaaaggtacgatattttccgctgtcgaaatagttttgattgtcaaccgtcaaatccacatttatcagctcagagtgcaacagtaacggcacatagctgaggactagacccacgtaaaaagcattcataaaatgaaccgtcatttttctcactgttcaggaaacgtgagcttttatagaccgttgaccaagtttctgacaaaccatttcaccaggtaatctgccatacttcgagtcttgcgcaaagtctcaatcacatggcagaaaggaacgccagaacatcggcttgccaaaaaatatatacaaaaatggccacacgtatcggatgtgggaagttgaatttggtctttagtgaccagtacctctttaaatgtgttgaggtaggcggctaaatcggggtttgggtgctcaccaagactgtcaaaatattccacccctcgatggcttgaagcatagcaagccacccaatgctcacctcgtgtcccttctttgcccgtattcacgaccatacaatgaggaaatttagaaacacgcttcggaattcgatcagatgggaaaacgccaatgaatttatttttggtagggcgcagccttttcagaattatttccaactgagctgaattcattgatgcttttcagtgtcagtcaattgcatttacacacttccgtctgtactcagaacccggtctgcgttaatggacaacacagaatcgaattcaccaaggacaagcatctcatatccatccgcttttataggctgctcaaattgcacctttatcgtgcacgtgccttgtctgatcagctcaaaaccaggtgtgtcctccagagtggaggtcaacggaatgacgaaaaaggcccaaccgttaagaaaacgctgcatcccaatcgagaccgttttggtgtcggagtcatccaaacccaggcctgcgtacatgtctacaaatgcacgaacaaaacggggctgtgcaccatcgaaggacagcaaatacggggtgctgggaaaggtctgtccgtttgcttcaacactaattgaacgtaaattggcgtgctcaaacttgtagggcgacatttttcggttaccggaatatgcgtcggttgaaacgaaagtgcaaattaggcgacgaggcaacgtagaagtgaacacgttgtgtgccagctcggtccggcctgtgccaagaaaaatggaccgcatctcaattttacgcaacggatattttgctgaagtggactccaattgtcggctaatggcaaggttaaggttcggtgtgacgtccacagtgcgcacatagagacgcatgtcatgcacacggatacggtactctttcttattttcctgtagtgtaccatctggttttttgtatgggggcgtaagcaggaggaatgaatcattgttgcggtgtatggtgaatattacatcctgattgttcaacatcaatgcattttgacgtgccaaatcaaaattaagttttaccattgtctcacattgtttaccgcctgaaaaccgtgccgcacgtgcggtaaatcctgggtttgttgcgctgttctggtcatcatcgtcggggtagtagcacgatgcctcgtggaaagccttacgaatttcctgtgaatagcccaactccttcattatgtagtcacggtagtgataataaattgaactgtcaaacacctcaatgcctgaaatgttgaccttcagcgagcggacaaagctgctaccaaagttttggatgaccccagcatgtttatcgtttgcgtccgtgtcactgagtgctacccattctcccgcatcattcttccgttcaattgagctgagcaggtacatgtaggttttgctcaagtcacaatattgactgtccgagaacaggcgaaataaatatggacctgtctgattaagagcagacagaggcagcaattcacgaacgtttgtcttgtttatggccacatttgttggcgatagagaaaattaagacagacttccttctagaccctcaacactgtctttgtcaatcttcttaattacgctcattttctactgttttttttttttatttatgtttctctcaaaaaattgaattttggaggagagaatgtatctaatagtgaaaaacacaaattatcatacctatttataggcttcgcgtgggtgccacactttaatgtgcaaatgtgagctgatcgatgatctgtcgtttccctctcaatttgccagttttggtattttttctatg

SEQ ID NO: 659 - DNA, 5432 bp, Heterodera glycines
  unsure (1)..(5432): unsure at all n locations
agatcagggtggatattttgccgactgattgttgtaaatgcgtgttttgtgatcaaaccncaacacataggacagctgtttgctcaaatcaacgtgcattactcctggggcccattctaatgccgaatcgctgagttatttcattgtaagcaaattcagctgccattttggattcacgctgttgtaccattaactgcccatgctctccgtggagcacttcttcgatgagtttatatgttgaaatgcggtgttgactatcgttgtctttaccttcttcttgtaacatcttctgctgtgcatgtgttccatcgaccattcggtccacttgttcgtcaatcagcttttcaattattttctccttccttctctctgtcgctaccgttgattgcttaacaacaaattttgggttattggaagacaacgcggctgcttgaggtaaatttccaccatcttcagcttgagtcactgatgtagcagcatcaccggactgttctaatccacttaatggcggcgtaccgagttcatttttatcagcaatactattatcttgatctgctaaattttgttcagctggcgtctcggatgataaaatagcggtggcagtagtggtggtgttttggtggttatttttactattgatagcttcgtctgggtttgagggctcatctggtgaaaaggagtctgttcgagtggagctagtcctatttgacccctcagctacagcactgaggcctgagttagctttccctgtctgcgcatctctttttttagcctcgtattccaaagctgcaaaccgtttacgcctgtagtcaatcagccgttgaatgctctctatttgtcgctgcagcgaatccctttccgttgcgtcagtttcaaattcaagcttttccctcaattccctcttcttagtgtactcaagttgaagcgcttcataatttttctggattgcttgccagtaattaacaggattggcttggaagaattcttggacgaaggttaggttttgttcatggcttaaacgttcaaaatcctcttgagattttttctgatcacgttgcaatgctgcgttgtttaatatttccatctttcttccaaaaacgtgtatggaatttctcattcgttcagtttgtgaattgagctcttcaagctttttcaaatctttaactccttcatactctcccatctttgtctgtagatctagcacatctcggaggtaacttgacctccattcgtccagctgctctctataattgtcggggtatcgggcaaagaaacggtcaatgagtctttgttcattggcttcttgctgctcaccgtcccttctcttcgcctcttcttcaatcaaatgcaaatgttctttcagaaaagtttctcgcccctgaaagaccccaagctccgtcgaaagaagtgtttttcgttcgtcatccgctgttgaattgtactcctttgtcattttttcaaccctttctctgagctgatagtgtttttttctcagttctccaatctgttgccagtagtcaaagggatttcgagtgaagaaattctctacttcgataactccagcgcctgattctgacaattcggtttgtcgtttggctcttttagtgggtgtaccatcatttaaggatgagccgccaaactttttatcgtaagcattctggattatctgattcagtgttttttgtaaactttgtacactttggaattgtacatttggaattttcactgacaaattgataaacttttgcgattccacgtcagaatttccggcatcttctctgtagttaggattaaccagtttgacagagatagagtcatcctcgtccacactgatcgacgggaatgaatatggatagattattgctgataatgcgacggaccatttggagtcaagctctaaggtgtgcggaagtctaaccgtaaaatttgaagcagtatttcctggaccaggtgtgtttgaaggaattacaatgtaaaaatcatccattatttagctttgttcaaatgctcgtcgtttcactaagtctgaatcacggacccagctgttgtatctgtcagacaagccaacccaacggacgaaatgttctttgactccgtttcgtgtacgcgattttagcacttctgcgcggtaggtacccttttccgttgtctttacaagttcttgatcgtagaaaattccctttatgtcttctccgttcaaatcacgtattctgtacgagtgcgggtctgtattgtttacacgttggaccctaaaaagttcgtcagtaaaattgggatagtaaccttttgaaaaatgacctttctctttgctaattcttacaatatcgccaaatttgaattttgcgcttgctttgatttccttgtcaccggtgtgttctttatataggcgttttcttaacgccgaagcattcttaaaggttacagaagctggacttgtaccaatggtacggtttgtagtactgttcacattatttgcgattttatctatcacccctaaccaccttagagtattattttcactaaaatatttgtataagcgctctttcagtgttctattcgcccgttcaaccacacccgcatgcaggctaggactgtacattatgtgtttgattatgtccttttgcttccaatattcaatcatccgttttgcttggaactccaaacctgcatcactgtacagtttgttaggcagcacccctgcttttttgaacaccttttcaaatgcttcaatcatgtgttcgcttttcttcgactcagactctgcggtaaaaatttttctactaagcacatcgatacaaaccaaaatgtagcggtaaccatcattatgcacccttaacgtatccataatgcacaagtcacattgccaatctgtatgcagaccactcggcaccgttttgagcctaggaaatttgtttctccgtggcttaaacaatgtgtaagtgcgttggcgatgaagaaaatcatagacattgtgtaaggtaattcgaggatttcttctcttggcctcctgccaaacttttagcataccagcgtagctggccggtgagcgtaaatcgtaataaatttgttccaataatttatccacagtcggctgctgtgctattatagtcttgcccataattcaggtttaaatttgaattttggttccattctgtgtaaacctcgcgtttttatagacgatgaattcatcatattgacaaacactatttttttctttcccattttcttcacagtgctgtgccgccggcggccttcccccgtttgatgtattttttgaagcagtttcatcatttccgggtcttttgagatgcgctgaatgaagaagcgatggcctctgggcacatcttcgcgctgacctgtcaaatgctttaacgattcggtgaaatgagagcctgaaacgggtttattgaaattagtcaaaatttctccgctgctagcattgacaccgaattttttgagatccttcccgataatacccatcaattttgggaaatttttcggactggtccttaatgaaatggctggcgtcttttggtgtggcgttttcctcgacgatgtagtagcagcatcagcagcagcaggctcaaactgatcagaggcagttgaaaagtctgtgtcctcttctacatctgtgttgctcttacttacgccaccatacgattgaattgaagtcgaattgcggtgttgtgcgttcacattggacggtgtttgttgtttttgaatgcccatatacggcgcaacgtttggtgctgtaactgagccactctcaacaattactttttgaggtttgttctcaataatatcttttagctggtgtctacgcttgtacaaccatgagtgacgcttcatttttatttctgcgttcgtttttggatcagccagattattttgaatctgtacatcaagcagcgttttttcgccctgtaacgggtcggctagaggaggagatacgccgctgctccctttcagtagattaatgagggccaaatactcgctctctggcaccataaccatctttttagtatatttcattgactcgctattgtcaggccgtaattttttcgaccaagtgttgagctagtgcaccaagaataggtactaatattgcccctaatgcaataccacttccctgttgtagcctttttctcgcagtcttttcgctacgcgagcgtgcaattgcacgataatagtccgcgtattcggccaaccgtttcctctggcttctgtttaggctgaaattgaattttaatatgtttgcacaaatttcaacaagtcctaatatttgttcggctgtggcgtctcgcagaagaatgtttttctttttttcggatttcgtagaggcgatttttttaaaaaattctgcgttttcccttatatatggactgaattcatacatttgtagtgacaaaaacagattttctcaaccttttataccctttctctattcaattggtaggtacacctcacgctgttcatctgggaaaattttagttgttaaacgttcagactcgggcgcattaggatgcatatttataaccaaataactgaacggttcgctggttgcatcattgtatgcttccataaaataatttaacctcttcggaaagagttgagatcccaccgttctgacctgaagttggccagaaggattccgagttaaaaccaaataatggctattggctcttgcggtacgaatattgcgtccatagagactttgcgttacaaaaatcacacttacgtcccaattatgggagcctcgggtgaacaataaatccaaaaaatcgttgtttacgctcagcatcaggtcgtccaggattaaaagcaggggtttaggcatactttgaaccaacgtttgggtcggtaccccattatgtgtctcaattccttgtttcattaacccgatcacagaatcgttcatctcggaataacaatagagtatttttacaggaggcggtgcgatcagtatgctataatgttttaaaagtttcaataaccattgagtttttccacttcccgtagcgccggataaaattaatgtaaacggcgcgttgaacatttttataaaatttatttgtgcttttttttgcatacatatttccctttaaataggcataagggcacaaaggtcatctggaccccgtctccttcccattttgactcttgtgtcaccatttttcaccatatagctgataaataacctttttcggataactgtgccgctgaccgaatggtagtgtttttgattcgactctcgggttcgggtcctgttgcttgttggtgaattaattttaatttaatcatatatagatgacatttatcctttttcgggtaactgtaccgctgcccgaatggtagtgctttggattctacctcttggattcgaatccatctgcctgtgagtgattaattgaattaaatcctctcattggctt

SEQ ID NO: 660 - DNA, 2957 bp, Heterodera glycines
gtgtggtgatggaaaccacaaatataaattggtgcctctttcgtcgaaaatttgctgatttgaacgaagaaaagcgatgacggagtgatcgatgtaactgtgaaaatggaaggaatgcttttattgccataaagctttgatttttatttactaaatctcaaggctcttaaaaaggattttgctgggcaacggacggtcgggcaatggaaatggcacacatttgtaatcgaaccatacaaacagcttcggttcaggtcctttgtccttgctaatttcgattggtctccaaattgtcaattcgcttttgccattgaaatgtttgtccaccaacgcattgaaacgtggcgaaagaagtgccaatttgagaccaagttgaggacggtcaaaagaggggaaaatgtccatccaaacgtcgttgcaaatccaactgaaattatggaaaaacagtttagttaaataaatgacgaatttgtgtgacttttaaaatccttttaccgtcggttcatttttgaggcaattagcacaatttggccaaattctgaatgatgtcacacaatatatagcagaagaattaattgagttgggtaaagcttggatttttagggttttcctatttcttgacgtatattatcagggaacggatttatatgtttttactttttttttgcgcatatgctatcgcatgaaaatctcaaaaatagcatttttacctgttttcctttcaatcagagcgagtttttagcacatataaaaaacatattttggactttttaggaataaaaacatattttggggtttcggcagtttttgacacatattttggcgattttttggaaaaattaggttttttttacaaaaatgtcttttttggcactcaaattcgtggtcaaataaatgcccaataatttttcaaaattttcttttttttgtatttttttgacccttttcatgactttttcacttttaaagcaaaatttgatttttagcgaagaaattccgaaaaatgagtaaatctttgagagcgaaaaaaaatttacgccaaaaagcattacattaagctagcgaaattgataaaaaatgagacttttttgagaaattaacttattttttgagcagtttttttcaatttttggcacatattttggccttttttttgggttttagcacatattttgggggttttttggcacataacacaaattgcagagaattaattgcgttggaaactttatttttatggtactaccgtagagttgagcggaccgggaatgttgggcaaaaccgggaccgggacctgagaagccgggacgggaccttggttttccgggaatttttaaattcaaaaaaaaaatcaaattttaatttatttcaagtgaaaataacacaaaattaatttttattttgctatttattttataaaatctaaaagttaaagctaaattaaattaatgaaatttttaaacgaatttacttcagttatttcaaacaattaatcattttggactaaatgatcgaataatcttagaaatccagaattgcttttcacataatttttcggcgcgttttttccaaaaaactttttgggaagaaaggggtccggcggtgcagttaggcgccgccggggaaaaattttgaaaatttgagtgagatttgtttacgaatttcaacaaaaaggctggttttttggactactgggctcaatttgtatggattttctttaaaaaaattataaaatatgcgcaattaaaaaaaagtatgaggaagcatagcttgtcgatatgtaggaacccatgaacaaaaagaaaatcaaaatatttgaatttctgcagagtgattgaaccaagggaaagaagtagaaaatcaagaggattccatattcgtgatcattgatcagcgacctcggaaacccccggcggatacttgttttctgaactttttaaaccaaaaaaagaatttgaaaaaatgttgaccaaaaatgtggatacaaactcctgtagtaccatttttataattagagaacaaagcggaaaacaatgaaaacaaaatttgagaagctcgaaaaacagaaaaagggaacgcaacagaagaggagaggaggaccaccaaagagaatattttgcaaaatgatgaccatttgccgggcgttttaccttatccccccacccacaaatcaatcgatcaaataatcaattggacggatagagggaaaggatgaaaatagcagtggggaaggaggagagacggaagagaaagagaggaaaaggaaaaattcgacggaagaaggagggggagaaagaggaggaaaaggatgaaaatagcattggggaaggaggagagacggaagagaaagagaggaaaaggaaaaattcgacggaagaaggagggggagaaagaggaggaaaaggatgaaaatagcattggggaaggaggagagacggaagagaaagagaggaaaaggaaaaattcgacggaagaaggagggggagaaagaggaggaaaaggatgaaaatagcattggggaaggaggagagacggaagagaaagagaggaaaaggaaaaattcgaagcaagaaggaggggagaaagaggaggaaaaggatgaaaatagcattggggaaggaggagagacggaagagaaagagaggaaaaggaaaaattcgaagcaagaaggaggggagaaagaggaggaaaaggatgaaaatagcagtggggaaggaggagagacggaagagaaagagaggaaaaggaaaaattcgaagcaagaaggagggggagaaagaggaggaaaaggatgaaaatagcattggggaaggaggagagtcggaagagaaagagaggaaaaagaaaaattcgacggaagaaggagggggagaaagaggaggaaaaggatgaaaatagcattggggaaggagctaaatgggaagagaaagagaggaaaaggaaaaattcgacggaag

SEQ ID NO: 661 - DNA, 6681 bp, Heterodera glycines
  unsure (1)..(6681): unsure at all n locations
aacaataaatcttaccttttttgtattttgttatattaattaaaaagttaaataaaaattttaattgaagcatttaaaactcaaacaaataatttaaaaagcagacgataaaatttaccaagaaaaaaaaacagaaaagcttttacataactcctaataatgggatttttcataaaataattataatcttaaaattaattcaaacaatacgacaaaaaactttttttattggttaaaaaaatattaaacataatgatatgataaaatggttatattaatatctattttctatttcataaataatatggccaaattattcatctaagaaattattattaaattaaaaaattaaaccaatttataaaattcatattgataaaaatttaagacctaattaattgaattctagtaataaaagaagcctccgaaatgatgcgagttttcgatcatgagcatttataatatggcatacattaatgacgaaattgaaaaactcacataaattgaaattcatcactatatgtatttattaaatgtaaataatgaaaatataatctatgtcttttaaaaatcaaaaataatttataaatttaaaattaatatacagagtgcataacaatctataaaattaattttaaagaaactagcgcaggcgcgctcgcttcgctcgcgcacttcgcgctagctaaaggttaaaaaaatatttgtcatccttatccaacttgcctcacgctctatttttttctctcatctctttgtcgactcttttctttctctcgtctcttcttaatttactatttttccatctaacctcttttctttctctctatcctctttctctcatctctttccactctctctctcctctctctctctctctcctcactcttctccccttttatctttttttttctctctctctctctgtttcatttcattctatctatctctttcctctctctctctctcctcttttctcttctcgttcctctctactctttcctctcttttctttctctatctctcttcagcacctcctattttctctctcttcttcctctctttatcctcttttcttttctctttcctctctctcctctttctctctcttatcttttctctatctcttcttttctctctctctctccagcacctctcttttctctctctctttattctctctctctctcactctttccttttctctctctccagcacctcctattttctctctcttcttcctatctatctctctttcctctctttctcctcttttcttttctctttcctctctctctcctcttttatctctcttatcttttctctatctctctctttctctctctccagcacatcctcttttctatctctcatttttctctctctctctctttctctttttttctttctctcatctctctctttccttttctctctctctccagcacctctaattttctctatctctctctctctcgtcttttctttttctctctgtttttatctatcctcttttctttctccctttcctctcttctctctatcgtctctttctctactctcacttttcccatctatctctcttttctatctctctctctatttcatatcattctatcgctttcctatatctttctcgtctttctctctctctctgtctccaggcctcctcgtttctctcttctctctcttctctcttccgctttaaattgggtggcttcaaaagaagccccaccaaaattcatggacggcggattaaagaaattcgtagcataacaaagtgtacatttcactttgttagaacagctgaaaatttggctacgaggggagctcacccatgtgaactctccattaattcgctatggtggcatggcccagagtggcttaagttgagccaagtatgttggccaaatgaactcttctttgaaataaaagagaggacattcttgaactcccaatagaggaagaaaaagtctttttaactcatactcgtatagagtcaaaaaagcaattatttgatgcaaagagacaccgttcttggaccaaattggtcaggacagttctctttgtaatacggtttctacatttaagattaataaatggaaaagacccacaagagcttacacataaacaccgtaaagaaatcgtaaagatttctaaaaacggtccattcacagcagaagatgttctgttagctgaatgtcttctaattcgtctgtatcaattaagtgatccagatgaattcactaaagttccctcacttatcgatagtgaagggatattgaggttgaaaacaagattgggcaggagtgatcaatcatttggattcacttctcccattctccttgggaaaaatacccaagtaagagacttaatcataatgaaatgccatgaatagcggcatcacctaggggtggatagcacccttacggagttcctaactattgggtacctcactcgcgaacagcggtgaaaagggtactcaaacagtgcctccgatgtcgaaggatgaatgcataccagtttgcattaccaaaaaagcctccactgccggaggaacgtgtctgccgacaaatggcttttaagtcaattggtattgactttttgagaccaatggagacacgattggcaggacataaagtcaaagcattgataattatactaacctgcctcacacgagagcggtttacttagaagccatgcttgacacaacagcggaatcttttttaaaagtcctccgacgattcatcagtcggaggggaaaaccagatttaatttggagtgacaatgccacttcatttaaactgtctcaaaagacaattgagcaattgacaactccgaaaggagttggacaatatcacgaggaattccttgcacataataaaatgaagtggaaattcatcgcccaaatcagtccttgggcaggcggcgtttacgaacggcttgtccaattgtgcaaaaattgctttaaacgtacattggggagaagaatcctcaagtacgatgaacttaataccttcgtggccgaagtggaggccacacttaaccatcgaccaattacggttgtgtctgatggggaagatggcattcagccacttcgccccattgatttgcttcaaccagatttgcagatcaattgggagataacagcagaagaagcccatcccaatgataagcaaatctcttcgtctgagagattcgctgctttatttaaagcaaccagagaagctcatgaaagcttctggcacaaatggcacaacgattaccttctccttctaagggagagggaaaaatgggatcacaaaggtcctcatcttcaggataagggagagccaaaaaaggggatgattgcggaccgcctcagttgtgccccggcacgtttgggccccggcggtttttggatataacttttttatttgtcaaccaaagccaacattcttggtatcattcgaaagccctaagtgtgctctattagcctgcacaattttgaaaaatttcgttaagaattccggttgtttatatcctaaattcgcaagttccctcaaaacaaaatgcgaatcataccgccctaaagaaatttttaaatccttgtaaattcatttattccttacccccaaaatgtgcatatgcatatgtatcatacttttcaagatttataatccatttaacaaaacaatttagggggtcaattccatccttactacaccagtttaaatgacgaggtcccgtcccacaaatttcgcaatccttaatttctcccaaacataatgaacagataaatcgggcactaataaaattgggcttatgaatagtctcttttcttaatgatttttcatcgaaaatcgtattcgtctaaattaaaaaatattgttttacacctaaaaaactaaataccgtgtattctaaatcgtaggcaactatcctataagatgccatttttttgttctcaatttttgcataaaacacattttttcggaacatgtattaagtgacattttctgcaatgtttttgatctaaaattttataaatattttaatttatgtttttaaatttacagcagctatgttctgtatctgtcctaaattcgcattgacattttgtacatttttgatacaaaaaacaaattttatttttgtgatgctcaaaacaatttttattaaaaaaaattctgttacatttttcgcagttaaatgtatttctttacggggggcatgggaaaccaaagcgttaaattttccagtagaagattacttttttattgttacctattctgcagcattttttgcacctctcttcatactccaaactatgtttttcttctctttgatagggtttttcacagcttatacaatatttatttttaatagaaaaaaattgtccaatacttttaattcctaaaaaatgttttattaccaaaaaaaatatataaacccaccatcccaatgatttttttcatgaaaaacgcacacattatattgaccggggccattccccttaaaaatcggacgaagtccaacatcccttgaaaaagcaacaattcaaatttccccggaaattttgagtcctaaaaatctattagtaatttatttaactattaatccttaaagtttgaagttttacctacccaaaaatcctgtacaatttgcaaatgcttaagaccataatttttcccatccatattaatttttgcgtccagcattaattttgttacttcatcaaatctaattcgcaattatttttcgaaattgattcattgaaattgtttcctcctcagttttattaattagttgataaaatctacttaaaaccaatgcataaaataagcctaaaaaattaaaaataccaaaaggaaaacaaatcgcagcgatagagagagagatatttatctagagagagtgatatttcatcacgagggagagatttgtggacatttaaaataatattggcaagcacatagctataaataaaacgattaattaatctgctgtcgtggagcaatataaaatctaatctgtggaagtttgtataaatttaatatcatgtttgcctaaattatttgaaatcaaaaattaaataaataaaatattaaaagatgctactcaatgtttaatattttcattaatatttgaaaacatgtaattttaccaatacctaaaaccaaactttgaccgatcacgtttaaataataatttttcaatgttaaatttatattaccagaaaattatcaaatattcagaaatatctaaaggattctcacattaaacctatagacctcccaatcgcactttatatattatcaaaagtatgaaaataattgaccaatctaattttaggggacttaaatttgaatagcaattgtcttaaatgggaaaagaacgagctcaatttgaattacaaaaatgtaaaatataaataatcaattcatattaaataaatccaatattaaagtaaaattggacatcaatcatattggatactatagattattattaaagaacaaataaataaatatgttctaaaatgatttttcgtaaattcatttttaaattaaaattttattataccaaaagttaaaaattttctttattttgataagcatgctcatatcactcaatttcgcgtcgcacgaatgtcgggagagagcgtatatttaaaaacaaaaaataagaataaaaataatttttaaagatttaataaataaataaaatttaattattggaaataccctatcagtgataatattaaggtaaaaaatgcaatttaaaaaaattaaaaacagcctattttgataacaaataataaatagtctatttcttcctagttctttaatttcacagtaatccagggggttaaatccttaaaaacctataatttttcattattttttaaatttttacctgcccctcgaggtgtactatatgtagttataatgcatgagatcggcgcatgcaataaatcatattcgctgaatgattggttaagaattttccaaccaattcttttttcaacatggttttttcaatcaaattttctaatatttttttaaagttttcggagctctcttttctgtttctttttttgggtttttaattataaatcttgctatgttttcataaatcccgtaatcgggcatatttttttcggctgacgaaagttcgacataattattttcatttaaatttatttcatcaatgctttttttgaaaaagttttttatatttctttcttttcttttttcagcgggcacggtcagaaaatttttttgggcctttaccataatttttttatttttcttaaataaaattattttctattagttaattattttttatagagagtattttttaatatgaaaaaattcagaatgtaattttttttcgcgattaaagtgaaatatttttgcgcaattgcgccttttatagcagctccggaagttcgttgtgacaggcggcggtcggcacgtgattgctgttttgcttctttttcatgcctcaattaggcgaaagtgaatattgattagtattttctacgctgtgcatcgaactgactggcccatgagtcacgtgcttattgcgaaataaggtcccgggcccaattttcgatgcgcaatttgagccatcaatcacttaagttgacaaatgtgccagcacngggctggattttccaaaataattaggtca

SEQ ID NO: 662 - DNA, 3099 bp, Heterodera glycines
  unsure (1)..(3099): unsure at all n locations
ttttgattttatattgctattttctttttttcttcaaattttaaaaattttcgaatatatttttgtcattaattttgctttatttttcgctattttaggttacaaatatcagtttattttttgtattttaattcttattttttattttaacaatcaatttcttttgtcttcgattaaagggagcaattcataaaagaggatgtcagcgcgcaccgccatacccgcgcggattttattttagccatttataatcatatattatatcttcctttgcttcatcttttttataagctaaatcaaatagttatagtaatcaatgcgagtattaatcgattatttgcgggacccaaaaaaaacggctgaacactagcgcagtggcgcgaagcgtactcgagaatatcattaggctggggttttttgcaccaaaattagtggccgggagtccatttacaatttaatcgcttttcttgttttcatgcttttcacacaaaagtttatcgttctgctcctttttaatgtgtctaaatggcaaaaaagctattttgtagtaaaaaaagataaaaggaaatttattaaaaagagattaacaatagggaagaaactaaattagaagctgcagctattttcgaaggaaattttgtaagtttgaatatttcgccatcacaatggactctcagactcacaaattaaatctctgtgataaatcattaataattagaaatattatatctataaccaaaatatgaaataaatttataaaacattttatatttttaataaagtaacaaacatgaatctaaaataaatattaataaatccgctcatgtgaacagatacagtttaataggcattaaattacagataatatgaattaaattttgaaaattaatataattttaaaattaattttttatttgattattacggtaaacatagtatttaatctatcataaaataactaaaatcctaaaaactttaaacatttattacatttattacattaaagccaaaatttatttattctcacatcaaagagtatattaacaaataatttgaatataaatttcgaagtcgcaataagaatttgaaaaataatattttgggccaaataatcaaatggtcgcgccttctagacagcacgagcatttgttttggataaataaatattatagcaaaattattatttaaaaatttcattcatggcatctaagtgttaattccgttccagtcatgataaaataaatataaacaaaaactgaaaatattaatttattttacattgacgtgatgtttacatatttaaatcattgtttgtaaatcatttcaatgtgcattaaaacagactttatgaatattcatttatacaacacaaaagcataaattaaaatttataaaaattttctaacaaaataaaaaacgaaaacgatatacactaaaatcttaagaattttggaattaaaaagtaaaaaaagatttgcaaaaattaactgaatttatttcctatcacatcaatgtaaactaaactgcgccgagtcatgtccaatcagctgatcagctgttccttctcaataccaccgaactcaacccaaagtcttaaaatttataaggaataaaaaaatacaataaatgattttttaaaacatttttttataatataaacaatcctaaatcaaaatgattaaataaactttgtttagttcattgattcagcaatagtaatttagaaaaaatatattagaatagaaagcttaataatgaatttaacaaagtatattaaagcaaattaaaatagaaattaaataaaaaataaaaattgataaacactaagaggtaattaattctcttttatttgaaagtgtatcttatctcatatccataattttattatgatgaattgacactaaaatcagatatttgtacaataagtggggcatatttgttagttaatttaatataaaaattatttattataaatatttgctttattaaaatcgttaatctctacataaaataatttctctatcgaatttaaacataaaataacaccattaagacttagactcaaaagtgtcaatgtgaatctccttaacaatttgacttctttcacagagcgcgaaagatttgggataattacgaaacaataatatatttttagatataatttaaataaaataaaaattttagggaatttatgaacaaaatagctaattttcaaacaatttttaaaaaattatcataaatagttaatgaaaaataaatccaaatatttgggtttgggtttcattaattttgctaaatcaattaataatttaatgaaaatttttgaaaatacagcaaaaacagagctaaaagaaaaattcattaaaatagcatggaaataaaatattataatgcaattgataatattgtgactaaatttttaaaattgtctaaaatatttttttaaacaaaaatttaataaaatatggctataaatttttcataatagaattgctatttaaaaagcagctaatagcacataaagaaaaccataaaaagaattcaagttaaatatatataacattcataattttttaaatgatagaaaaaaattaaaaataccaaaaggaaaacaaatcgcagcgatagagagagagatattatttatctagagagagtgatatttcatcacgagggagagatttgtggacatttaaaataatactggcaagcacatagctataaataaaacgattaattaatctgctgtcgtggagcaatataaaatctaatctgtggaagtttgtataaatttaataattcatgtttgcctaaattatttgaaatcaaaaataaataaataaaatattaaaagatgctactcaatgtttaatattttcattaatatttgaaaacatgtaattttaccaatacctannaccanacttttaccgatcacgtttaaataataattttttcatgggttaattatattaccagaaaattatcaaatattcagaaatatctaanagggatgtcacattgaacctatagacctccccatcgcactttatatatttatcaaagtatgaaaataattgacccatctaattttagggg

SEQ ID NO: 663 - DNA, 8117 bp, Heterodera glycines
tttgttctttttcttatttttcaagcagttcaccaatcttcttgaaaatttcatttgttattgaggaacagaccgcacaaattcttcattaatgtcatcatttttatgatttaatatatattcgtaaaaattgttattaaatttaatgttttatacatttaatattcaatctttttattatagagtattctgatactccaatgacaattagttttttaattaaatattttttaatgttgttttttgctatttaaatttaatcattgaactttaataatttctaaccaaaattgtttttgttttacatctgttttcttttaatactctcgctctacatgcatgaataatgaacaattttggttttcttaggttattaatttttattaagttttatgttacaaattaatttttaaaattatgatcagccattgtgttcaatttagtcttggttttcaaataaatgcggaattcattttaaatttattcaaaatactattagcttaaatttctgttattaaaaatattattttttttttcaaacaaatcttttaattatacttgttaaatagcatgaaatgattggtcaatacaaaatctgggctatttcgacttttcttttgttaatatgactttgaactggatgctttaatgatttattattattctccgctgtttcattaaataaacgaatttttctattttaatttacctcaaattttgattttgattttcttgcataattgctttgatattttgaaaaattaatctttttacttttaaaattttaccgtatttcctcgattatacgcccccccccctcgaatggaagccccccctcgaatataagccccccttggaggggggttgaacaatagaagccccccctcgagtagaagcccccttcgaatataagcccccctcaaaaatttttttttttcaaaacttttgaagtcagaaacgtgcaaaaactattgaacaatttattttaataaaacattaacaaaaaaaatattaggaaacttctgcatcaatttcttcgtcgctttttatggataattttataatatttatttgttattttaaatacttttaataaaagcccccccccctcgattggaagccccccctcgaatataagccccctttggaggggggttgaacaatagaagccccggggcttataatcgaggaaatacggtaaattaaaattttattataccaaaaggtaaaaattttccttttttttgataagcatgctcatatcactcaatttcgcgtcgcgcgaatgttgggagagagcgtatatttaaaaacaaaaaataagaataaaaataatttttaaagatttaataaataaataaaatttaattattggaaataccctatcagtgataatattaaggtaaaaaatgcaatttaaaaaattaaaaacagcctattttgataacaaataataaatagtctaaataattcataattaaaaggattaaaagacaaaataaaaatgtataatcactagagaccgacttttgaggcatatgccttttttgattttatcagttgccgtaatttttatctctttctgctcatttatatgaaatattataaaaaaaatttttgaaggaacatttttgttattttttttttgaaaaaattgaataatttatttgtcggttttatttttttatagaatttgcacttcactcaaacattgcagattttgattaaattgtcttgcgtatattcatgtattccagaacatttggcacatttctagttctgttttaaacttagatgaataaaatcgtaaattaaaaattatttgaatttttaaaatttcgtaaattcaatatttttaaggtttctttcgttttttctagttgaagaaatatttgttgctttattagtttaaattctttggtttgtacctttctcaatatacatttttaaaataaatttttcggggaattaaatgaagtatattttaaacattaaattttaagccttcggaaatattttaaaaaattccttaaattagattaatatttaataggtaaattattaatatgaattttattttttatcccattagtttgatgtttattttatgaaaggaattccgtttgtttagttcttcttcaagtcgacaacttgaagttttttaatccaaaattattcattcgcccaaattatctttgatcttttgttttctattatcctgcaaaattacaaaaaattcactaagtttaaaaaaattatgacttgagaaactcaaaaaagcaagttttcttgaacatattttgtcataaatttcttgaaactttttgttatgattttgccaaaatgacagttttaagagaataaggatttttagggccgttggaaattttttacatacgttttacattattttaaagatactcaccaacaaatttcaaattttggattaatttttgacgataatcaatttttaatcgtagatttttgtatataaataattataaaacgatattgcattttttgaaaattattgtttattttttccgttataaattaaaaattttattatattaaaatattattgtggcaaaaaaattttttttcgagaaattgacttgcaaaaaataaactgtatctttaggggtgtactttttttcgctcttcagcccaaaaaacgaagggcgaaagcgaaaggcccaaaaatagcgaaaaagcgaaaagcgaaacttgcaacaacacccctgatacaaatgaatcttcaccttccaacatattaaggtaccaattctcgcatattttcataataattaattatacatgtttaaggacttatgaatcaaaaatttatttatggttatatatttctaaattactcaaatctgaagctctcgtttgaaggcagttcatgtgttgtcttaccccattgcagacctctgccatattccacttggtattttatataaatggaatctaaatgaaatagtaaattgttttttaaaacaatgttttagatgtaggcgttatcaatttaaaagatttaaataattttttggtgttaattttgtaatctaaaaatgtatgtatgaatttttgtgtctagctttttatagaatttttttatttggttctcagtactatgtttattttaaaaatatatttatcagcgtttttcttaatatatgttttatatatcactacgaaaaaaacgttaattcgtaaggttggtgaaaagaatggctttttatttttagaaaatttaatatgttgcagctgcattcgatggtgagatcgatcacaggttatccaagaaatgtaaggcagaaaccaataatttacttcatcaattataattaaggaaatcttgtacaaattttctcctgtaaagagtccaaacggatgtggcgtcggacgtcgtttcttaacactaagtaatggaacacaacgaactgaaatttataatcgaatgtaaactaattattaaatttatttgtgaattataaaaagccaaaccattcacttttttcccatgaaacgctgagagcatttctttaaagatgaattttccatttccgacgaaattgtgaatagctatgctttttagccttacattcattggtttttacagtatccttaaaatttttgacatttttattttaaatttttttaacaaattaaaaataatagaaatataactagatttaatttttcgatttatttttatttttaaatttattatgttctattttttgaatgcattaatttttattaatattattaacattcattgaatcatttattacatgcttatttttaatgtagtattttgttgtagttaatcgtaccttgatttttcggcatttaggtaatacgaaaatgataaaaatatgcgtataaatattatacaaatatgcacaaaaaacaaggcaaattaatttaaaaaaatatgcatttgcatatttttgaccgccctgattattatgattccaaataaaaaagtccgcatttgcgtcttgttgcacattaccaaatcgaattttgccagacattagtgattatgaggtaaattaaagaagagtgaattctaagttatatataattttattaaattgtctaaagatggtaaatttagtattatttaagttctgtgtttttgctctattatctttttctgatttacagatatttaagtaaattatggaggtaatagtagatttagaataatgttactatatttcttcatattcatcttgattgataacgtaggttcgtcttgttgatcatcgatggtcgcataattaaacgcttcaattctcctgttttttccatttattttataatttttctcaatttatatttttcttaattataagcagggatgcaaaaaacatgcaaatgcatttttttcctggcttctccatgctctaaatagcaggaaaaacactttcgtttttgtgtttgcgtataaaaatcgggacttttatttgcatatttatgcatatttcgccattttttggaaaatttgttaacaaaaatgcaataaaaacggaaaatacacccctaagaatcggcgctaaaaaattcagaaaaatacacccctaagaatcgaccgaaaatttttaaaaacacaccactaagaattggaaattttctcaaaaattcttcccccaaatttttttttcattggaaaatttttgatttaaaaaatgtcaatatttgctaaaaagaattttataaaagaaatgtagcagctcattggcaagtgcatagtaatttttttaaattgaatttgaacccctaattttcaattttttagtgcatatttgtgcagattttacgatttgtgtgcataccgtatatgctctaattatagcccatgggggattatttttaaacctcctaagaatacaggggataattagagaatgggggataaatagagactgggggattatttttcaacctcctcagaaaggtgggatttggacttcaattcctgatcattgtcccaaaaccccaaaaaatttttttaaaaaatccgagaacctcgagcataataatttatttgaattcccgaaaaaaagtctttatttaatgaatcgaattttctaataaatatacatatcacaaaaaatggatctcttcgcattgaggtattttatacaattatttgaatctttgaaaagaagcttaaaattttaaaaatgcaacaacagagcgctttaaaaataatgaatacaaagcaaaaaaaattattacagacataaattggttgaaaatattaaattaaaaaataaattaaaacagaaagtacaataaatttctttttccgttgtcaatcaattgtttgagtgttgcatttatagttttaataaaattattaaagaaagaacgaaaaagccttaaaaactttaaagatttcgttactttaataaaaacctatgtgaaccattcaaacaaattaaaaataaattgcaactaatgtttataagtcggtctacctcagttgggcgcgcacggttgggcgctcacggttgggcgctcacgtttgaacgcgcacggttgggcgccagcacgtttggacgccgacacatttgggcgccaatattccaacaatttttttaaatttgttttttttattaaaaaaatgttttaaagcgacaataaattccaatttttatgttttaaaatttattaaaaggatataagtaaatattattccgtacggatgcagcagcaaattgaccaaaagaaataggccaaagctagagcacgatggccatctctacacacttgacaagacaagtgccgatggaacgactaaattttggcgatgtgagttcaagaacagtggtgtgaacaagtgcaaaggacggatttggactcaggttgccatcagtttttaaattcaatgatctcaatttttttgattttaagcgttttaatacggagccaatttttgctgagtcagcaaaaatgctgatatcgattgcttttattcctattgccgatctgactgaagcagtcaatgtattggacgttgcgttccgaaattttccgcacatgcaaccgatgttggattttatgttaatcgaagtcataaacagccaacatttaccacgttcaggttgatgaacaattaaacgggtcgtacacttgaagatgggtcgcgaactgaaccgcgtttcaatcagaataattttcaattttgttattagaaaaaagtaaatgtaactggtaattagaaacaataacgaatcgtcgcccaactcaatgaataaaaacgatgaatgccaagaaagaaagaaatgcataattgttataaaagctttttaaaaaatatatttaacttttattttgatgaataaattgatacaaaatgtttagaattgtagttcatcaatttaagaaatataactaattaaattgttaatatatcaacaataaataaaaaatataccgaaatactttaattgatattaattgctaaaaattaatattgaaaaaaagattataaattttatttagctctataatgattgtatatattaatttgattgggaacgaaaagctgaatctcacaaacgcgcccacctcaaactggcacaagaaatcatttaataccaaaattcctataaatgcattatgaaaagttaacgctttcaaaattgtagcaatataaaaacaaataaattcataaaattaatatagttcataattgtttatattaagcaaatcataatattatcatacgttaattcactcgatagattttattatttatgttaaaaactctacaaaaaaaacaaattcgaaattatttgaaaaattttaccattaatggaaaggtaactagacgtacggcatcttatcctgactagtttaagtattttccattagtttttaattcaaacaaacatttttttttatcttttaattatttttttcctttctttaatttacctatataactgtaaccaatgtaatattgaaataagtattatataaactattatttattttaaaattatttaatctttattttcatgcatccccgctcttgtctcttttaacacaatgcaaattggattagattttatatagattttttcataaaactcatttgtttattaatatatcttatacacctatttgtcataaagacttagtattttaccaaaatgcatcattattcttgcaattaaattttataatttggattggatcacaaaattttttatatttcaaattaattttattgacatggaggcgagatgttgactaatacaataatttttaaaacttaaagagttaaattcaatattaaaaatttaaaataaaaataagtttataagtagtatagattaacgtttttatttgtactatgaggattctcgcaggattttcacatgcgtttatttgggattatgtaaattcagtgcaattaccttcaaatagaattaaaattcgcgaaaacttttttggcattttaaatgatttattaaattggtaaattcaaattttgtacaaggaattctgtgtttacctgttaacatttcatgaagtattttactaattttaatgcatttccatttgaactagattattgttttattttatattattcattgacccatgttaaatattaattttaaattttgatgtaaagaaaatttaaatgccattaaattaaattaatattggaccaatttatttttaatatttaaaattacacaattgttcatatttgtttcttataacttggaagtgttttattgaaggtttttttatatcattttcatatgactaattttataaatttgtacaatttattaattttattcatgtacatcgaaatcttttcattggtaaactctctagaattaataaattgtttgaattattttatttttacaaaataattcattgcttctatttcttttctgtgccagtagaatcaaatttttgatttcttcatatatttttctgaacaattaattattaaaagtttcattcaaggttttatttatatattttacagtacattttttaacaaatgaaaaaacttgctaagaaaattaacttttggcgtttaattttaaatttctaatttgtttcaa

SEQ ID NO: 664 - DNA, 2753 bp, Heterodera glycines
  unsure (1)..(2753): unsure at all n locations
ttatttttttggcgttttatttctcccgtaaatttaatctttacaaaaaaagaaagaaatgggcaataaaacacatcaaatgatttgtgtatatgtattgtttacggcagcagattgattcatttaaattctctcctcttcttcctttttggtgtatgcattttattcctcaattaaatttgccatttaaaatcaaattggattttgtaagtaaatttattatgtttgcacgcatttgctgtattaggtaggggcttcattattacatatgtatttgtttttttgaaaataaaaattaatttataattttcttaattacaatttataatatcacgaaaaatatccaaattttttcgaatgggaaaaattgttggacaattttaaaaatcttacactatttttcttaaaatttgaatttttcgttacctttttctccattaaaagtggcggcactctttgctgaaccccttcaattagggcaccactgctcgatttgtgtcggcattgagtcgagaaaagtgtcggttttctctcttttgagggtcgactctcgggaatttttcgctctcgaccagctctctaatgaccatcatttccattcattcattcatttgtttttttttcttttctgttcattccttcggccattaattttttgtcgacggcggagagtcatttcgccataattacgggctttgaccgccaaaaatggcacatcgcccagaatgcccgccccgcccccattttttcggcattnttcggaataaatgcccaaatttcggcaccaaatgtgcccggaatgggcaacaaaaaagtgccaacattgctttgccaatcctaatgcaatttccaacgccggatgtgttcgccccattttttgcgcccaattaaatttgtcaaaaattatcaaaccatgccggaaaaaatacgaaaaaaatgccaaaaaatttgcattttatttaatggcattttgccttccggcgcttttaaataaaagtaaattatcgatgttttcacgggtaacaacaacaagcacatttagcacatttccttgtgtgtgtgccctttttcggcttttggattttttggcattttcctcccccaaaaatcgccgccacaaatcccccggggcgttgcgttcgtcgcccgggggccgggggaagccccgagggctcattttatgcgctataagcgttattgtgtcattatcatatatgggatatgtatgtatttaagtttgtaggtttaaatccccccggggcatttgcaaatgaagcaaaaattttcgccgtcgatttatccccgtgaaacattttttggtttcttttttttcaaattattcaccaccacgctcagtaaaatcaaaagcaaatttgaccgtagtcatgaaagtcggttagttaccgtattccctggaatgagcattttttgtagcagtaataaattgggttggaaatggactcgtcgaatatttggtgagagaggtgaaactttcgggatcgaccccgcccaaaaacgtggtgaccttgtcgcccgctgagcgtcaaccaacaattgggcactcgtcgagactgagtctcgagccctgctgatgcctctcaagacaaccccgagagtttgtgaggtttataaaaaaacttcttttgagagttaagccgggaattgatgaccgctgagaaacccgtgaccccccggggctcgtgattgaaatttggcacgaaaccccaaatgtgtcccaaaatctacatcattgtggaaaattcgattaaaaattcactgaattttctcagtttgccctcgacaaaaaaagatggcccctagccaacaacaccttcacaaaaatttgttcacggtttctgatttctttctcatttctgtctcggcacatggacattcattcatccccatcatgctttgttttgttttccgccaaaagcgcaggccaaaaggaatgccaccataacgccaaaccaatgaatggaaattggctaattttgaaaacataaaacaaattcccaaataattaaatttattttttaattaatttcaaaattctttttgtttcctgattaattttgccgtggttacttaaagaattgaaaacggtataatatatcttttttaaaaaatgacaaaattctaattaatttaagtttaaaaatataattatataaatatttcttttttaattttacaatttataactttggcatgccttctttccctgcataaatttggtgccaaattctgtttcccccccgtcccctgcaatatttgaagtgccgttttgcatggcatttttatgtttccattttggtcacaacacaaaaccgaaaaggtttccaaatttgtaatataatcaagaaccaaaaatcatttattatatttgcattaattatggcataagtaaattaaattttctatttaccgtcccaatttaattaatgtccttgaaaagtgtctttggcatggctaggaatttttttaagtgcgctaagccaaaaaacaataataaaaaaatatcgaatagactaaaaatattctgattaatatatatataccaattagagtagagcgggacccggaattttgggcttaaccgggaccgggaccttttcgggttgaaaacccgggaatttttggctgggaaaaccgggaaaaaccgggactggtcccggtcccggtcaaaaccgggacctcggtactcagttgtactcnagtgtccgtngtttggtcccggtcccgctctactc

SEQ ID NO: 665 - DNA, 4675 bp, Heterodera glycines
ggatgtccttaaaaatattccaatgacgcccaattcaattttcagattaaaattaaaaaaattgccaaaattaataaatgaatgaggtctttgccggcgtcgtcgttcttgttaaaaatttatttttgcttccttttattttttcaaatgtttgccaactgcgaacattttgacgcagacgatcgcccaactgatcgaaatcgtcgcaacgaagtgatttatgccgtgatcagaccaatttaaatgcggcattttgtcatttaatttttgcgctaagttcgggactgaaattctcggcactcgaatttgtgactgagacacaaaaagccaagagtatagaactcgagaccagcatatgtattggcccatgatggtcgttcatcgacccggagcttagtccatgccgttcaagagtggcaaaattatttgattttcggcacctttaggaatgtgccgtgtcgagaatcttgattctcgactcaaaaaatccctgggatttttttagggtcttggtctcgaggttttatgtgacttttgggtctcgcttctcgaaaataagcatttttgcacgatttaccacagattggtgccttccaaccctttgacaatgccatcccaaaacattggcacgtgccgtcgtcgtcgctgtctccccctctgtcccgcccgtcttcggcatcctttgaaaaggaaacggaggaacagtttgaccaaatgccatggcatttgttggcccatcacgcggcattgggctggtcccaatggagcgaatggagcgcatgcacgcgaaaggtgcaaagaattgggaatttgtttaaaatattttttaattttaaatttatttagggtaaaaatatttgtttaaattaaattaaatcgaatgattgttagatattttttaaaattattttaaagaatgtttaattttaaatttattttaggcaatttttaaatgaaatgaaataataaaaccaatcaaaattaattggttccattcttttaattaccatttttaattcattttcaaataaatataaaataatatattgtttgaaaatatttatagatttagtgaaattaaattaaattttacttatttttattatttatttatttatttttctaccaattgggatgtaaattatgtaagaaaaatccttaaatatgtaaaatgtatgttgtttaggtatttaaaaattgttttatgtacattttcaaaaaaaagttttatgaatttcttttaatttttttccattatttttttcaattccactttttttttggaatttacaaatttgtctttaaaattaatgccaaattagaattttagtgcggtggcgagggcatgcaattccaactgcgccgctgcctggacatgtactgctcgggaccgtcgtccaggcatcgaatttgtgccgaaaaagtgtgccttttgcataaaataaataaataataaattattttatgttaaattaaaatttattttaaaataattttttaattttattatttaatttatatttttaataaaaaaactattttcccctcccccttcaaaataatttaattcaaaattaattttccatttttaaaagctttgtcctccaaatggttccttttccactcattctgccgttgccattgaatgtgctcttcgttcatcgccagagaatgaattgttgcctgtgaccagcatacaaaatgtataaaaatatataattttacaatttaataattaatttcttttaattttacaaataaaatatttttattcaaaatcttttattttaatcgaaattattattcatttttcttttctttcattcttaattgttggttaattaattataaattattttcatattaaattaataattaaaattgtttttattcattttctacccaatttgtccaaaagtgttccgccctccattgtgtgtcccgtcggaatggcactgtgcacacttttggcatggcattacgtgatggcaccaaatgccatctgagccacggactcccaactgttgaggccgtttgtttgcatgggaagtgagttttttcaaatggcacggcaccattgtagatgattattaccgtataattataatagatcattacagtatataatttgtagggaatttttgaccgtataaaattgtagaagatcattaccgtataccaattgtagagggttatactgtatttcagtcgtcgagggttattaccgtatagcaattgtagaggcttataccgtacaccaattgtgggggattatactgtatttcagtcgtcgagggttattaccgtatagcaattgtagaggcttataccgtacaccaattgtgggggattatactgtgttccagtggtggaaaagtttttttcctttccccggcagatgccgctcagttggctgtgacggcattgtgggctcgtcggcacgggaggatcagtgcggcgtgtgcgccggtgatggctccagctgcgcggacgagctgttccagtggcgggacacgggccatttcagtccgtgcgacaaaagttgcggaccgaacagtacgccaaaaggggggaggggagggagggcaaattcaaaaaaatttaaattgcgcgtcccgaaaaaaggcattcgcgtgtcggtgtccgtgtgcgtcaacattcacacggaacgcgtggtgccggaacgcatgtgcgccgaccgggtgaggcccaggccgcaaatccggcgctgcgagcacatcgtttgtccagcaaagtgagcgcgggacggatcagtccccaaaaagtgggcaccgatcgatgatttgttgccattttggtcttatgccctgatccggtgcttaattcacttaacctggcctgatcagagctaccccattttgtctgatcagtgttggcctagtccaatcatggcttggacagatcattaatgcttgattcaatagtttgtcaccagaataaccatttttgtctaatcaatgcctgattggatgggctatgccggattttttggtttggcttaattatctctcaggaattctgtctaatcactgatacgtttgacagtgaccgttcaaatcagacatcatcaaattgatcagagtgcaaaccctcctcaatagacaaaaaaaaactggcattgatcacttgactaaggcaaacatttgtccacatttttaggggggtttaaaatttattttctagccattcgatgaagcccaaaattaggcatcagtaagtttgtttttaccctgaaatttttgccgaactgtgcgcattttgtgccgtttaaatttcgcttttcagtaccaggttcgttgttgttcgcatgtgtgttcagtgaatggttgtcgtcacgtcattttttgcaattcaaatgcttctcgctcatgccaagctgtttaagcagttcaaactgttgcttttgcgtgccaatttaattttcaattatttttgcttttttcgaaaatgccatccgtagtttttttttgtttgctaagaaaataattcatccaacttttttcaaagaaaatgccatcctcggattttgtcatgaaaatggcatatcctacatatataaaattgggaaaaatcaatcattattgaatttttcaacaaagcgaaaatgccgccattcctcaatatatttttttttctttctaaaaaatgtcaatatttaaaattggcgaacttttgccaaggcaaaatgccaccttcggttttttcccttaaccattgccattattttgtccaaaaatttcgtttttgtttaccaagaaatgccatttttaaaaacgctaaatgttatgcttattccgctagcctatgttttgcccctgttttcttattgccatttttctaaacaatttttgtgccattgtccccccccccctccctaaaagatggtttgccggcgaatgggccgactgttcggtcacctgcggcaccgggcaacagcgacgtgaggtgttctgtgttgaacgggttgatgctaatgttgaccggcgtgtgaacgtgcaacactgcttgccgagccaaaaaccggtgaattttttttttggattttttttaaattttcgaaaaatccaaaccaattttggcaccatttgtaacccccacttactgatcagttgtgatcagcttcacgattttgatcaatccttaacaaactctggtggtgctaattggccatcagcagtagtaatgctataaattgccgtcgttccttaattacattaccgtaacttaacattaatcacagtaccgtcctttccttaatcacactaccaccctttccttaactacactatcgtactttccttaattagtctaccgtattcattttctcccccccccccccccccctctcaaatggggaaggcgttataaatggaattttgtaattatatcagctctccaatgttagagcggcatttaaattttgaaggtggacgtgcgcaagtgcagcagtgaggcgtgcccggaatggtgggccggcgagtggggcgcgtgctccgccaactgtgggcgcggagtgcgacgccgaacggttggacgggcggggggggggcaaaatgccaaacaaaaatttaaattaataagtgtaaatcgaatgccaataaagcaattagaatgccaaaaatactgatttttggaggggtttatgggggcaaca

SEQ ID NO: 666 - DNA, 4526 bp, Heterodera glycines
aataatttgagatttaataaaataaattagtttaaaaatttttgttaacttagaaaatattaataaaaaaaatttaataaactaaaatatatttttttaactatcaaaataataaagatcaccaaatattttacgcagataatatttttataattattaacattttcaataaaacataaatttattatttaatattaattgcttatttgttttaatattattttttgcataattattttaaattaaataagaattttatttgtttatttaaatatttcattttcaaaccatttattttctattaaatttatttaatttaaaaatataagtttaaatttgtcgggtaactgataaaaatcccctgtttttatgttatcaaaaattctcaaaatcctctggcctatctcatttttatttaatcgtgccaaaatcgtacagcccgccaacttgcctcgggggatggcatttcgatgccacccaaaacgccgaagggcatgccgaaattcggagggtgggggaggggtgatttattggacctccgaccctcccaaaaatcccctgggggttcgttcctccattattttcagctgccaaaaaaaaacaaacaaaaataaagcaaaacattatgccattcacataaaacttcgaaaatattattatgctcttcatttttaagttttcgaattccaaaattggcaaaattgaaaattgcggggattttgaattttgcaaattcctttccttttcaaattctattttattaatcaatttaaatagtgcaaacacatcaattcatgcttcaaaaagggtcggagaatataattttcgcatttaaattacctaaaatatattttaataaaaaatataattaaaattctattttaaatccttttttgattttatgaaacttttaaattcttaatttcttcttttcctttacattttgattttattccagaaccaaaatgatatccactttaaaaaaacattatgaattttcactttggcacaattcttgcacaaagtccatctttttggcattgccattggcccccgggggcacaatggcaaaaatgttcaattaagcgccccttaagcatttgttatgcccagcagcagatgatgatggtggtgatggtcactcatcacatcatcaaacacacacagtacacaacgccaaacacttttggtccaaccaatttcctcccccgggcccattttggggacccttccatcccgaaaatggtggtggactccccctgaaaatgccccgaggggttttccccctcccctccttttgtgccgttgttttaccccccccccatttggccattcattcgcttggggccaagccaaccgtcgtccgtccgtccgtcccctcaagggtttttgttgtttcttgcccacttcctcccgcccacccatcaaaacacttactcatcacactacaactctggtgggagggtgaagcttgagccccaactctcgaccccttcccccactctcgtgccaccctttccggcgctgggattttacgcggacggcttttttacagggataggagggaggtattgcatatagtttctgttttcaatcattgtttggtttttgtaagacattttctggcaaattttttaggtttgcagacgtttttttctgagagatggggggaggggatactgtactttccaatatggtattcccggtcaatggaatctacctttgttccttttaattctggcatttttggcaattctcggtcaatgggattaagccaagccgtagccaacactagggttcttggcccaacgccattttgttcggtcctttcttggccattctccccttgattttcagccctttttggcataatgttgccatcgtcgccatactgtagcttacagttagcctcattattccttttactgtcctctgtttttgtgctgtcactttctgtggttgctgcggcaccgtataacgacgacaacagtgacgaggagacagaggaatggaaacggtgcaaattttgtgtggaaaatttcaaattttctggcattttgcccatttccaaattggctgcgaaaatccacccccaaaaatgcaaatttacgcgctaatcgcgctaatccgttgcgacggataatccgcccaattgtcagtgtctttctgtcgcgcaaacatcggacggacgcgaaaagtgtccaatttcttttgattttacttaaattggattattgtgtcaaattcggggcaaaggatgtaaaaataaattttatattatcaagggtaaaatttaaaaaaaggcgaaagaaattttcaaaaatttaaatattatttttaaattaaaaatatttttctaattaaatttaatgaataaatttaagtataatttttatattattttaatttgaatttattaattgttaattttttaattaaatttactaaaaattataatttatttaatttttactttattaactttgaaaattaattaatttgtggaaggaatattttaggaaataaatatttatgaataaatatattttttaaatttttttacaattaattttaataattattttaataaatttaaaaattatatttaaagttaattaattgttatgttaaaattcaggcccaaacaattgatgagctattcggagggtccttctgccgcgacccgacatgaactaccttcccattgcgctctctattggaattattttctctaccctccttgatcaaaaatgtttgtatgactggaattgaaattcagcactccctcatttttgcgttgtctctctccataaaattataagccgctcaaataaattttaaaaaattagcgcaaattttaaaaattaaattgatatttgcgttgatggcgtaatgttagttgatttaattaaatatcaacatttaaattgataccccgcaaaaactaataaaaaggttgatttgccattctctacttacaaggcactaattctcgaaggtcgacaaatcaatgagaacgaatcgatagtgatcaaaaatgaagaaaagattcgttttttatttcatgccattttgtccaatgttccccaattaggggagtagaattgtaattgggaaattttttcattcaaataaatatgtttatatctattttggtgattagtaaaagagtagaaaataaattaataattaggattttaattttgtagcaaaacaaagctttgataatattttttatcaattatttattttatattaaagttttgtagagccaaataaaaacgtcggattaaatcctgtaattatactcagagaccttcaggattaattattctgaatcttgattattatttattatattttgattttaatataattgaaaattcgtaattatgaaaatttttacaataattttaaatatatttttgttatttcatttgattatattaaataatgcaaaataaagaaaatattttaataaaagaaaaaaagcaattataacgctaatatttttaattaatattaaataattcaattataaatcattttttaaataaaaaattttgtaaaaaataattattcgtaaataaaacacagcaattttattcccttttagacaaattatcataacaaagaaatgaaaattgccaattcattcatttttggcttttcttattttatttgccaatattttttccattttttcttttgtcgttattctttcactgctaatgccaaattgtttaatccggtacttttcggttttgtgaccccccccccccctgaagttttcaaataaaaagtcatttctatggtaatttggggcgctgatcacgaatatgacatttatttttaaaaattccgaatcccgaacccgaattcgaacacaaattcgaaattaataaattacaaggaaatttttaaatcttttcgccataaaatcattaaggcatattatttcttttaaccacttttattaaatattaaaaaaatttatttatcaaatacaaatacaatctttttgaaaatttatataacaaatctattttttagagcgcagataattttttaaataaatttatccaaattttcgtaaatttttccgttttttcaatccttcaaaatttcttccccaaaatgtttcttccattctgaaattctcggttgatgaattttcaaaatttttccaatttccttgtttctgagtttattttattccattcttttgctgaatattttcttcctttttgctttattttttcttttattttataaaattttgcaattatttctctttttttgagttcatttcgcctttcttcttctttttcttcccaattttctccaaaaaattgggtaatcctgtattttactggccccataaaaaaagagattaaaaaggggtttttatgcaattcggagtagtattcgggggtcttcgggagcgctgatcacgaatatgacatcaattttgaccaatttcgaatcctgaacccgaattcgaacaaaagtcggaaattagtttt

SEQ ID NO: 667 - DNA, 1482 bp, Heterodera glycines
agagagagaagaaaacctagagaaaagtgtgaaggaagtgaagagggagatagagagaagaggaaagagaaaaaccagagaaataaaaataggacaaagaaaagttagagagatagaggagggaaagagggaaatagacagagagagagagaaaaaaggaagagagagtgaaaacctagagaaaatgagatggagtgagaaggggagtagagagagagatggaaagacagagggaaagagtcagagagggaggggaagataggaaaaaagaaacgagtgacaatcacttacaaaaaaagccttaatcatcgaggtgatctgatcagagaagaagccggcagaaaacccattttaataagctttagatcggtccttggagcgcgtgttcgcacgcctgcgggggcggcttgcgcactcgacgtgtggtgcgtcataactaattagaaactaattaattaattgcttaattaattatggacatttttttgcgccaattgtttagcgctgcgtgcgcaccgcaagcggctcaagcgcggccaccgccacccttctggtgttgccggatggccaatgtccggggtaataccttttttttgactttttatacaaatttcctcaccgatacgggtgtttcggcccttgagtcaacaaatttctcgatttttttttggttctcagtctcggctctcgagaatttcggctttcgagtcgagaaatttctcattttttagtcggggcttctaatttctcgagccaaaaattctcgtttttttttgggtctcagtctcgactctcgtcggtggtcaattcaaatcatcgaaattcttaactttcgagctttccttatcaaccatctctattaaactcccataataataattaatttgtgtctccctcccatattaaagtgttcggcccggtgacgaggagccctgcggggttgtcgactgtgcgcccgaatggctcgctggcaattgggtgggaaaaactcgaaaaaactgtgttgttgacggcattttgccgtgccaataatgttcagggccaatgctcggcaagttgcggcaccgacggcgagcagcggcgcgtgttgcgttgcgtccgacgcgacgcgctcggcgacgtgcgcccgctggacgacgcgcgttgcacggacgcgcaaaagccgcccagcgtacgcttatgcagcttgggtaagaagcggtggcgctgaattgggcccaggtcctggtgaccaactcggcgcgactgtttgtacgcggcggaaaattggaaaattggggggggggggagcgggggagggaggagaattctcaaattgggtacagtaagtgaagtgcgtctgcggtactgtatgtcagggatggcattccgaggcccaatcaattttattaaatagtaatacagtagtaagaaatgagcagccagtggagtacggtgtacacttcactagagaaacatacattataaatatgccatttcata

SEQ ID NO: 668 - DNA, 6103 bp, Heterodera glycines
tgagtttattttatcccattcttttgttgaatattttctccctttttgctttattttctcttttattttataaaattttccaattatttctctttttttgagttcatttcgtttttcttcttctttttcttgccatttttctccaaatatttcatcaaatgttttctgttgcaattttttatccactgattcaacataattaatattaattatgtcaatcaaaaataaaaattaaagaaaatatttagaaattgttcagaaattcattgaaatgacaaatgaatacaaacaaaaaagaaaatattcaaataaaaaatggaagaaaattgaaaaaatagcgaaaaaattgaggacaaatcgccaatatatttataaagaaaattggagtaagccatggaataattaaaagatgggagaaacaatttaacatccgccgtaaaaaaaataacgaagaaagaaaaaatggaaaaattgaaaatttattagaaaattaaaaaagaaaatccgaaaatgaacgaaaaggaaattgcaaaaattgtgaacacttcccaacagaatatgctcaaatgttgaaaattcatcaatcgagcatttcgcgatggaagaagcaattaggagaaggaatgttttggagaagaccagtaaagaagtgatttgactggagtgattcatttgaaaaatttttatcgtttcctttccatttttgtatttactaatttttatataaattttttttacatttcgagattttaaacaatttattataggaaaaaattattgaacacaaaattttcatcaattagcatcgatcaattaaataaaatttgatggttgtttaaaatgaaaagaataaacatattatatatttatttatttagatatgcatacaaatataaacaaaattttctaatacataattccccgatcaaaaaatatttataaaaatcctttctggtcgatcagtacaccactgatcagtcagcagagcattggtccaatcagtccactatccgaacccagtccggtctgtccatgcggccatactgtatgtcgttgattgtatcgtacatgcgttgcatcactgtcgctttggatgccattgtcggaatgtgcagctcgtcaatgcggcccgtgccacgctcaacataggcaatgcgtccgattggcgaaatgacacaagcggtgccgcagccgaacatttgcaggagctgcaacaaaacatataattaaaataaagaaatatcgattattttttttggcagatttttacattttttgttaaaaattgcgacagaaagatgtaaaaaaaaatttaatttaatttgatttgtttgtgccttacgctcatatttcggcatttttgggtaactttcagtatattttggcatttttgttaaactattttgagggaaatgcaggtttaactcttttttttactttaataaaacttagcaatttgagaaatttttatgcttatcgctttagaattttcttaaaaacatttcattaaattttaaaatttttatgcaaattaattaattcatcattttaaaattatttctaaattatttctaattttaatttaaaataattttgaaacgcactctccgctcgtgcaatgcccggcgcaattccgccattgttgggtagcgttccgtgaccctgaactcgccccactcacgtgctatgctcaacaccgagtcgcgcacaacgcccggcaaaatcagtccgtcattcagcggcggagtgaccagttccaattcttaaataataaaatatttaaacttaaaagattaaataaaaaatctttaatgtgtgactaagcctctgtataaaagttaaaattttaaagcgaatatcatttttttaattttcaaaaagttttcctttgtttttttcaataggccatataaatttaaaaactttggcacattaaatcggcaaaaagtctaaattaactccgtggatttcttttttttaaattatgattttaattttacctccgcattcatttctccagtagatgaatatgttcattgcaccaacttcagtgatcttctcatctggcccagtcaaccacaacacttgttggtatcccagatcatgtgcatgctttccgatcagaagagtgggagcataattgctaaaaataaatttaaatttttattactttttagagtgtttttcattttttagaaatttaaaagttcatccagccctttttggagttcccatattttgtctattttaattaattttcgatttattgtcactgaaaaatgccgaacctccaatgtgtgaattgtatatcattttggtgtttatttatttaccacactattatatgtacaattgtctcaattctatgttaattagtgtcgttgtcaaaatgcctactccaaaattatgtataattgtcaaagttttggtgaccattgtcattgacaaaatgtcttccttccttattgtagaatagcacagttttgttgatcatattccaatgacaaaagatcatccccaatgtattccattttgcccatttttggtgataatttgtcccattgacaaaatgcctaccatcccattttatatgcgcccacaccgccggggaatgcgcgggcatagcttggatcggcaaacagcgaaatggacttgaagccggttgggaaaaatgtgccaactgggccggtcagaatgaacattttggcggtgcgcgagtgtgcgacgccaagcgttggatcagtgccgatcaatgtgggacgaatgtacaaggaggaggaggccgagtagggcacccattcccgatcaagccggaccaactcggcgatgaccttcagcatttcttccgcatcaaaatcctgtttcgggtttgaggagtaaagcaatttgaaaaattaaatttgtttaaaaaggttttcagcataaataatgggcaaagtgcaaataaaaaaaaaatcggattccacctaagaaatttgaaaagatgccatctcaaaaggaactcagaaacagaaaatggcatttatctataaaagagtgcaaaaataatgccaagacattcaaaactgtggaaaatgccattaattagtggaaatgtcgcacccggggcggggggggggctggagaatggtgggtgagaatgccacggcactgtacaattaccggaagtgccgcacgtgccgcggtacgcttcatgcgtgcaatgttcatttctggacggaacaatcggattctgtcgtcaatgccacggtaagccttcatgccttcgaacagttcaatcgcataatgaagcacctttttgtgtgattaacaattagaaacaaatccccaaaatttataatttcatttgtttagaaatattcgaatatttttcattcaaattaatttaaattgtttaaataatgtgttgaaggattataatggaaaaaaaatttttatttatatataaattaagaatttttatttgaagaattccaatttttcagattgtatgctttttcgaaatttcaaatttcaaattttcattttaatatttaatttatttcgcaatttttatttatagttgtctgatttttaaagattttttaaaaatttacttttgcgcccggatgaagctgaacactgtgcaacgggctaatttcgggttgattccatcccgcggtgtccgaccaatcgacctccatcatgtgatcagaaaagtgatgtccaaatttgatctgatcaaccgttcccagcggcttgggctgcatttgtccagcagtggcacggacaatggacaaatctttatgcttaaaatgtgagaaaatattatgaaaacattataggaaatttttcaagtgccaaaaaaagagaaattaatccattgaacaaatatattaaatattctatgaaataaattttaatggaatatttattaattgacgctaaaaatataatttgagtattttttttacaaattttattgaaaaatttcggacaggcttcgccgaaatttggtaaaaaataaaaaataaccccctcccagccaaaaattgccaaatttttaaaaaattttacttatttatttgatagaaaatggtcaattaaaccaaacaattgtattttaatttaattgaattcaaaaatgccacaaaactcacgtagaatgtggatcgatctggctccaccgccggttgttgttcgacggatgcggcaatggcaccgccagcggcggacattgagctcattgcgcgagcaccgatgtgcaaaatgatgctgggtgctgtttgcagagttttcataattgttttgttaaataatttcgattttctacgataaaaaaagttgcagattaattaaaaaaacagaaaaattaaacaaaaatttccaaatttcatgtgaaacttttttaaataattaaagcattatttcagaacccatacacacttatttaattaacatataaaataaaatttttcaatagctcattgtgccaaaaaagcacgtagccattaaataacctaaaaattctgataaataattttaaaattaaaaaaatcgaaatttatttaaaaataacttaaaatttaatattttgaaaattaaaagattgtgaatccactgtttactatatcacacaatgacaactcaaaccaataaaattggcactgatttaaaaataattaaaaaacatcaaacgcataaaaccatctctcattaagtgaatcttattattaatagtaataattattataccccatttaaaacaaattatttattattcttatcacagaacccatcgccgccggcgccatgtgcacggcgatgaaaatgaacgaatgaatgaatgaaatggtgggaacacaaaatatgcacacatcgccacagcacccgggggggggggcgaacgaacggcaacgaaatgttcgcccatttcgtcgtcatgcgcttcggtccacgaggagtcgtcgaagtctgatcggaatgtgagaatgggttaagaataaaaaattgttatttaaaaaaacaaaatgtgatgctaatgatgatcatgctgatgagaatggtaatgaacgcgctccgatcatagcgatgagtgattggaagcggtggaaaatgggtttttcactgatcgggaccggtctgctggttgctgatcacacaccctcaccagcgactctggcgctggctggttgatcaaccaccctcactaccatcagaaagcggctggctgatcaaacgcactcaccaaggctttcacccccaccctcaccatcggctggttggaactgatgacacaccctgatcagcaacagaaagcgactggctgatcaaacgccctcataaaatttaattctctgaccaacacatcctcactagacaaagcagctggctgatcagtgatcaatcactcattacacacgcactcttttccaatgtcgttccggtcacaaaacagcagagtgcttgcttgctgcgaccacgtggtgctgctgctcttcgggggaaaaagagtttgtcactgctgctgatcgggaccggtcggctggctgatcacacaaacacacccacccactccacccaacgtcacattcagttaaacaattccggccaaaatgtgaacccacgtggtgctattattcacccgcctcttccctgtttaccacaagccccccccccaatccccccaattttgctgacacagcaggagagagtgatgatgatgtgatccgttatttaattgttaattgttgatcacaggcgaattggacggttatgttgatagggaaaagaagtacagagtagcaggtataccgtatacgatcaaacaactgtaagtaagactatgagataattgaacaaattttataaaagctcaaaaaatagaaaagaaaaaatttcaatgcacataatgacagatttgtttgtttaaactattcgtaaggatgtgctttcaataaatttataattttgttttgttaatatatttctggcgccgcccaatttcgcattgaataatacaacaacaaaaaagtcgtacaatagcgatcacacgatggcaaaccattgtgtgagatcacgagatcacagtttgaaaagtttttcatcataaatttgtgtattt

SEQ ID NO: 669 - DNA, 765 bp, Heterodera glycines
  unsure (1)..(765): unsure at all n locations
aaaagagggggggaaaaaaaagggggggggaggggagccaaggaagaaaactgggggggagagaaagagagggggagagatcagcaaaaagaggaggggagaaaaagggggggatgagagacaaggaagaaaactaaaggagagagaaagagatggtgagagataagcaaaagaggaggggagagaaaagggggaggatgagagacaaggaagaaaactaaaggagagagaaagagatggtgagagataagcaaaagaggaggggagagaaaagggggggatgagagacaaggaagaaaactaaaggagagagaaagagatggtgagagataagcaaaagaggaggggagagaaaagggggaggatgagagacaaggaagaaaactaaaggagagagaaagagatggtgagagataagcaaaagaggaggggagagaaaagggggaggatgagagacaaggaagaaaactaaaggagagagaaagagatggtgagagataagcaaaagaggaggggagagaaaagggggaggatgagagacaaggaagaaaactaagggagagagaaaaagatgacgaaagataaggaaaaaaaggagggggagaaaagggccgcgaaaaggaagggagaaacgaaaattaaaaaaataaactaaaatcacgtaaaaaaaaagggcattttcatttccggtccgcgtctcnctaaagaccaaaggagatttatgagtgtcccaagtgtaagaaaacaggactcgtgacctctaga

SEQ ID NO: 670 - DNA, 1365 bp, Heterodera glycines
cataaatcaaatacaaaatagccatgacacacattgaatgtgttttggtcagttcttcctctttgaaaccgacgaatgatgggccggagtttcgatcattttccgtttgagaattgacttgacactctaaaaattcaaattttatggatcaatggcatttcgccaacagcgtttcttccgaaagggacacctgctgatgctgctgcggttgttggagatgtgccgcgtcggcgtggccaaaaatgtgcagttccactcggtcttcgctggaaacggtgaagagtaattcgccggcgttcagtccgttgcccgtgcgatgcgccgcgcgacatttgaacagactgcggtcatcagtaatggtgctgcagcaaaaaggaaacatttcgatggaaaagcaattgattaacgaaacaggagagacggaatgaattgtgatcaaacagaggaactttgaacttcggaattccgggttcggaaaacacactcggatgcaggcaaaatcagacaggatccgggtccaaagtgtgagaaagcggcccagtgttatcgactttacctcgagtccggcccaatgtatggtgcgacacgaacgacttcgaggaattcacagtacacaatgtacaggtgaggagacgcatatactgtagtgggaaaagagatatactatactacaccagtttttctgctgaaaacgcccaccgaattccaacggcactttctcccattcgatgtttttgcttcgcgaccgtttcccctgcgaattaacgaacagtccaaagtctgaaatgagcattgattaggcgagcaaattcattgtcaatgagtttgctgttactgtgaaatgccaacaaaaattcgttgtccgaaatttcgacagcggcgacgggaaaatcgaagggacaattttccaccacaagaggagaaggcattgcgaaattgtcatcaaatcgcgcaaaatggaaattgtcggctccgaaaacgaaaccaaacgaagcggagcaaatgcaagtgcacggctcctccgttttgatttgagcgaccggagaaaagaagcccaatttggcgacgtattggagcacgacaatttcgtcgattgtggcaatgtaaacgaaactgaaatggaaacggacgatgaataaggagggaagagggagcgaaaggtggaggagggaaggaccgtttgtcgcggtgatgttccgagttgctgaccaccgcaatatggcattgttcgatgttggcaatgtttgtgcaggacaccgtcggctgttgtgcaactttgaatgcgcggaggatttgttggagatggatgacggccaattggcgggcggaaacacaaatggcgaggagcatgtcgaactcgggcaa

SEQ ID NO: 671 - DNA, 9530 bp, Heterodera glycines
cccccccccccccccccacctggtggccatttgcagggaatagacccagcgttgtttggcctgaacagtcggagccaacatgaacagaatgtagctgaacagaatattccattaaaaatgatcattttactgtattttgttactcgggcagtttaagttcgatcaacatggacatttcagtgccccgaatcccgtccagcggtttgtccgtcgtttggttgtaaatgcgccagtggtcccggtccaaatcgatgctcaaaaagggcagtgcgccttcactgactgccaactgatcgctgtcgtaaaaggacagtcggttgtcgtcgatcactgcccatgcgttgagccaatgggttgattgatcaggactgggcaaagcagcggaggcggaggaaaaaggccaaagtttaccccagcgggtcattggttggaaggagatcgaatgtgtgtccaggtagaaatggccaccattctttcggaagaccgcacgtgttgaccacgttgccacgacagtgcgggtgcaccgtaagggaacagtcgcggcatcggaggacgagtcgaaagtgggggagaccgtccatgcagacttggcatttattctggaaatagagggacttcaaaacttgacggaaagagaccgataggaccgttgccactgtgacaaagtgccgcttccaccggtggggaatgtcgtgccgcattctgcccggaaatcggggcgcactgtgcgcggagtcagtcgaactgttcctgcaaagcaaaaccaaatgatagaaaatcaaaagcaaaggcttgcttcagcttcgactgagagttgcgcgctggtgacaatgcgtcgtgaaaacgtacggtctcttcgcggagcattggccgtgtcggcgtcatttcgttttgcttttcatccaacactaaagccaaggcattaattaatgaaatgagaagtgccctgttaatcattttcgtaatttgtttatcaatgaaaggaatttcacctctgcgtcgattctcgagattatttttcagctgatttctctccttttccagctgaaggcactgtttgtactccatttcgatttcctaaattaatctctaaaaatccaaacagaactaattgtccgacggactgaaagatcagagccatcggagaggagagaggagcgatggcgcgggagcttttgcatttgcttcggctgaacgacgctttgcaaataggcgatcaatttctccttctgttcgaggtcggctcgcaattcgtacaactgatcactggtggaattctgatcaaaacaaaaggttttccataattctttattttggtgttttttgtcctcactttttctcgctcgttttctgatttcagctgatcattcgcttctttgaatgcgtccaattcggatttgaatgtttccgccttcttcagacagacgtcaaaattcttaaatgattcaatacattaatttataattggcattccttctttcgtcctcctctctctctctttacgatcccttttctctttcgtcgtcctcccctctcttcccatctctctctctgttcgccccttttctcctccgtctctctctttctctctgtctctgccacctgtctcaaaatgatgttctcctgctttgttttcgtcgcttcttctctcatcttctccatttcctctctttgtgaattattctccctttcgtattgttccactttccgttgtaatgagcgaagctccgcctcttgctgcctcaaccgtgcttccatcttcggcaccttcaattgccaattttggtgccgtttttaaacctttctcacctctccgctattttcactctcttttccctttgatgtccccgcagaagttgcgcccaattggtcagccaaatttgccaattccttaaacattttgcttattttatgtatgctaattcgcattggcaccgtccgatggtcagtgctcgtctctttaagctcactcttaaaatttaggaatgacatgactttacaagcattgaaatgcacctccaaaaagactattttgtccttcagccatttgctgcggtccttcagcgatgcgttttcattttccattttgatcttttccgtcagttggccgctcagtttttcgatttcccttttcagcaattcgttttcgttttgcgcctttcgtttctccgcgtccgttaagcgaagttgcgtctaaattgccaattaattaatatttcaattgaattcgctgtctttcaaaatcaaccatcagtttttcgcattgcatgtccaattcgcccattgaccgtttcattccgtcgcattttctcctctgaaggtccaactcggattggagtaacttcagccgcgaattctcacactcctcattctcacggcacagccgctgcattttatcaatctgaaagtggaaatactattagccaaatgaaagcagttttagaatatcgaatgacaccaacaaaaacaccgaatgaatttgacaaatctgattgaataattttaatcattctttttcgagctaaaagtgactaataaaaagcaaaggacaaaaggatgccaattcaattggtcctttgcactaaaaagccgcttaacaatgggccaatgccatgccttctctttcatttcggtttccatctttttttggcgttctttgagcagttcattttcattttcaatcgcttttttctcagcttcggccgattcgattttgctgcgcaattcaccgactgtcgaattcagcagtttcatttccttctgaatagaataataaaaaacgaatttaaaaattgcatttagattttggaaaggaccgcaagtccaccgaatttggcagtttccgtttccaactccgtgtatttccgcttaagctgaacatgctcacagcgcaactgcgccttctgttgcttcagccgttcaatctcatccatgaggcgtgacgaaacgatgtcggaagagctgaaagatgcttttgagggggaggcaaaaaatggggaaaataacccagatgaagcgctgatctgtttcaaaagtgagttaatttcctgttggagtgccgctttttcctcctcacattgtttgtagcgcttaaatggtcaattccgttcgaccccttccccccgctccgtgccaaaacctgctccatctctttgttccccttcttcaaagtgccgacttcgtcgcgaaggctttcgttctttgtgtccaaagagcccaacttttggttgagctggtccaggtactgaaacgtcaattaataacaagttcgaaaagcacaaccgattgactcaatttaagctaattaattaattacctctcgtttctgaccatttgcttcgttcgttcgcaatttttccctcatttctgcaatctccgcctctttgacccttttttcggcttttaattccaaaatttcgcggtggaatgattctgtttggcccttcatcgtctcttgcaacagttccatttcgacttttttctacaaattttaattaatccaaattttgggttcgcaaatgaatgcctttttaagtcgtgtctccaaaacagtgattctgttcttcaattcgccaatttctgcctccgatttcggtgccaattcactctcttccaattcccacagaacgccattggccgttttcctcgcaatttccaattcctcttggacccttcgtattgtgtttgtgctctcctccaattgattttggagccgttcaatttccaattgctaataaagtttaaatgagacaatttaaaggatgatgggcacttaaaaaaactcccaaatgcacattttggaagtaatttgaaaattgcgaagctggtcccccattaatgtttttgtttgttttaaaaatgcctaaaagtcggatttaattaaacatataactatgagtcagtcaaaaactttgctgctgatgtagttttagagaattaatttgctcgaaatggaattaacctcgaaaccaacaattgtttaaaagatagggatttcggaaccattccctcactaacaccatcgcgaatgatgaaaatcttaaatttattttacttatcatttaagtacaacacaattatttgtaattattttttaccgtagacggtggttttgaacggttcttcttaactttgtccaaaatccagctcattttgtatgacagcatagttggctccaaaacgtcctgcctaaattagtcacaattgcccaacaaatatcacaacggaaaacaaacgtgcaaggctggaagtaataatctccgcagaatttgtaagggtttttcagatagtttgcgcaaataccaactaaaatattattaataataatgcacacatgagaaaaacaaaccaatcagcggatcctcagaagtgagtccctcaactcctttcttgcgaagcatgaacttctcgaacggcgttgcctttggaggacgactggtatcaacgccaatcacaagcacatcacctccatccatgttgaatttgctcttactataagatagaatataagaaattttaatgcagaaaaacgaacgacgcttgcgggaacataggcatgtaattgaagccgaaaagcctgaaaacaaaataaagtcactgaatgttcgctaagcccacttcatgttcattttattcagcacattcgacagagtcatagcacgcgctttgctggccacttcgaatgtgacatgttgagtcagcagaccatacttcttctcgttgagtttcaaaattgctacagatttaagttaaacaaaaaaaaatatgggcattgccaccgtgtgatttgacgaattttttgtcgatgtagagcaaaaactgaattcggcggtccgagagttgctgcatacgttcagaaatgttctccaattcgatgcactcgtattgcgggtctggcaaatgcatgcccctctttcgacccataaccacaacttgttgaataaagttactaaaatttaaaaaaaacagtaaacaggcgaatgccctattccataattctaccggacatctccctctccaacttgacgcgtaaaaccaacgacccatgccttcatcaaagtgctcgtctcgagaaaacgaacacctgggttcacctataacgagcaaatagcaagtgatttaaataagattgctactctgtcttggaaatagcccatcacattccctccaaatttgatctaaaattggttaattaggtgaacaaaaaggtaagaatagattacctggggcatttcgtgcatgccaattttcacatcattctttccaccgataagcttcactccaaaatgactcataaatgcacttgacgtgccggtcccgatttttctcacttccgcttcaatgtcggcgtaccgtttgctcgaattagtcgtgtttgcctataatagtataagagaatgcgagggataaaaaaaaatattttacactaagaagctcgcgcgaaataaattcggacatcttgtcgatgggcactcgctgaccaggcaagatgataacacacgacattgggaacaatgtctacaaccgataatgtggttaaaaacagttctaattttgttaaaaaaagaaaacctctcggtcctgttgctggcgaacggctggcaattgtccatttatcggaatgttcttcttagtacggaaaaagtcgaccatagacataggacgaccatcaacgtcaaaactagaaccaagttttaattgatccacaaaactctcaaaacctaatctcggccatcttccgttgactgatcgcatcaatgacaatgacgcgcgacggtgcataggtcaggtagccgctaacgccgcgaaacaagtgattgaaatcggaccagaatcggtccatctgggaagcattgttgatgttgaaccgtcttttctgcaccatctccatgacgatttcctcaaggttacgacttgcgaagaatgcacaagtcttcactaaaaagaaaacttaagcactcaacaaacagaaaacaaagcaaaccgtcagcaaccaaagccgcctttggttcaccattgttgtcaataacgcgaactcccttagcaatgccctcgcgtgtgacaattccatcttcgagctctttgcagatctgacgcttaaaaagacgaccagcaccaatgatgtcatgggtcccactaagattaaacttgaaaaataattaaatactgctaattacgcattgagaaatggctgggaagtcagcatttcaaggaaagtgcgcaaagatctgtcagactgctcatcaggacggcgcgagatggaagaaaagacgtcgttgagatccagctcatgtttatcagtctgacaaggtttaatctcaattttgaccgaagacccacgcaagaaatcgcgaacgattccttggattttttccgtgtcaatttccaatgcctaaaattatataattacataatgttaaaagacaaaaaacaaacaaattgttcgattcgcttgttcgtgaataagattttacggttgtcgtaaacgaagtgtgcctaaaagtaaagtaaaataattgcatgcgatttaagaggaaattaccgcttgtccaaatccctgcgtcgagtcgtgcacgaacttgatcaaatcgaaacaaacggtgcgaagcaatccatttttcccatcgtcgccaccgcccgaagtcaaacttttgtttcggctgagctgcaccatttcaacgtcatagcggaacgcaaaagcaccgccatgtgaagatggtcgagtttcgaacctaaataacttcagtgtctcaaacgcattaatttaactgcaaacatacacataaacacttgaaaagccttcgacatatctgttacaagctgccggaggaggaatgttcttaaacaattagtaaaaatctactgaatacaaatacattgagtcttacagcagcctacttaactttcttgacctcctcagaaagagatgacatgtttaatatttggtttcaaacaatgctctgaatttcttcttaaattgttaagaaaaaaatctcaattgtaattaaaaaaaacaatattttcaacatttatgtgtaagtaaataccaaccaaacaaacaaataaaaatttatgtgagtggatcaaaaatgcaacacaaacaaagtgcgtcatggaaggcactatggggtcaagcccagtgtcactcactatatccccaacttccctccctttctttcttcctttagttctctttctttttttgtttatctttttctcaacactatctcctgtgtttttttgtttacataaatacctcattttttactttctttttttcaaaggttttcgcttcgataaataatccatttaaaatgtgacatacctacacatcaaattagtatagttaatgttttttattctgaagtgtaggaccaaaatgtggacccaaacccaatgagtactctaattccgaaccccgacaaattctaacaaaaattcaacttcttttaaatttcacattttcttcaacctttgtttacacacacggaaacgaactgaaagtcatgactgatactcatcagtgcttcaataaaatcgtttaaaccattttagactaaaaatcgaaaaaatccctaatttctacttaattcgagttcaggtcaggtgttataaataggttaaaatgaagccggattcgtgctcagcgcctcaaaatacccacagaaattgttagaattttcagaaaaaaaaattttaaaaaattttcaggaccaatggtcacatgattgccaaaaattttcccttttcatttacttaaaaaaccgtaatatatgcaccgccctgaagaaaacaatctatttgattggatagcaagcagatttatgcgcacaaaatcaaaataaaaggcaagcgccaagtggcaatcccaaaagttaaacaaaaattaagttcgaaagaataaataaaagttgtcgaaaggcatggatcaagattatgtcagatcaaatcaaaatacccgatattactctccgtgacgctcccgaagaacgccaatcgtccaaggcctcaaacgcccacggcacaccgggcaatgccttccgttgtgacggaaaacatagcgccacaaacaacgagaatggaagaaatggccgcatgttgtggagatgtgcacctggttcacgtaaatgcgctgaaggcaaattgtgcaaataagaggctgcccatgctccagaatgaccttaatgaaatttttgaaaacgtcactacaactaacaaaccctgcgatctcttgcgacagccgccctctggtgggcacgagaatttggcaaagccggagccagcgtaacaatttgccagctgcagcagagagcaagcaagaaactacaaaaaattagttgtgtataataccgcaactgattgccagttacccctgcaattcgttgttgttggccttgggatcattgacgggaaaaatgtattgtggcatttttgatgtcccctaaaacaaaatacatagataaatttgtcattccaaccgaaaccttgagcggaacatgtgactgcatccaaaactcgtggatgtcgacgcgtaccactttcgaatcaataaccgcccctacaaaaaacgatgaacaaaatgattttcgctgaataaaacctggagcagtattctcgacttgttgctgccccttaacgaagaaacgtttgttgtgattcttgtcgacgatgcaatagacgaatttgggctcccaagtcgggtcatatttcttacacgccttcacataggaaggaaattcgtcgtgaatgttctaaagcacacttttacaatccgtcgtgattcttccagcccaactaacgttcggaaccattccctcactaacaccatcgcgaatgatgaaaatcttaaatttattttacttatcatttaagtacaacacaattatttgtaattattttttaccgtagacggtggttttgaacggttcttcttaactttgtccaaaatccagctcattttgtatgacagcatagttggctccaaaacgtcctgcctaaattagtcacaattgcccaacaaatatcacaacggaaaacaaacgtgcaaggctggaagtaataatctccgcagaatttgtaagggtttttcagatagtttgcgcaaataccaactaaaatattattaataataatgcacacatgagaaaaacaaaccaatcagcggatcctcagaagtgagtccctcaactcctttcttgcgaagcatgaacttctcgaacggcgttgcctttggaggacgactggtatcaacgccaatcacaagcacatcacctccatccatgttgaatttgctcttactataagatagaatataagaaattttaatgcagaaaaacgaacgacgcttgcgggaacataggcatgtaattgaagccgaaaagcctgaaaacaaaataaagtcactgaatgttcgctaagcccacttcatgttcattttattcagcacattagacagagtcatagcacgcgctttgctggccacttcgaaggggagatgttgagtcagcagaccatacttcttctcgttgagt

SEQ ID NO: 672 - DNA, 1369 bp, Heterodera glycines
cgtttgctcggattagtcgtgtttgcctataatagtataagagaatgcgagggataaaaaaaaatattttacactaagaagctcgcgcgaaataaattcggacatcttgtcgatgggcactcgctgaccaggcaagatcaatacaagaaaatttattcaatgctttttagacttagctcgtcaagagctttcggatgataccaaatttatcaagattagatcgttttaaaaaagttagaagtgtcaaatctctcaatttttcgagttttgaaccctcctaaaaataggttctaaacccatttccgcaactcccggggaacccgaaaccggactcaaaatcccggagctttagggacttcggattcgtaaagtatgcgaaatcgataaatttgaattttcgactttttgttcgaattcgtgtcctcgttcgaaattggtcaaaatagatgtcatattcgtgctcagcgcatcaaataaccgctaaaatgtgtcttttcgggttttttttgtgggaccaataatcttaacaagctaaaaaccacaaaatgaggctaaagcctcagatctacgaaccctgtcaaaaacctagtatttcgaactttttttgctctgattttttttgtacattaataaaaaattttgaaaaatttgtaggttaatagagtttttcataagctttggaacaataccaagaatgcttaatatggttgagtaggaaaaaagttatggtccaaaaattcgcccggtgacgttttttcctggtccgctatatttttaccagccctaatcatcattatgtatgtgtaaaatagctacctaagtataaatgtttgttttttcagagattttgttgtcctcttaaatgtcatcataactcaatgaattcgcctttttcagtttcggtaaaacgaggtaaatatcggatttgcttaaaagtgactttttttaaatttgtgattttcgtagaagagttcgaggctggtgcttcttcccagcatttgcagaggatacatctcaacggcgttccgccaccggtccattcgctgctgctttcctctccttcccaccatccaccgtttgtgcccaccgttcgtccgttaggtgtcgccggcggcgtttcgtatggaaaaacaaatggcactactttttcgcgtccatcgcatttaactgaggcacaacagcggggatctattggtcctctacaacggtcagaatctataaaaaagatttccctaacgtaattttgaaatcttagtccatctagcggcgatgctaacagtacaatcaatcagtttctgatgaattacgttgtggtaaattcgctttttctctttcaacacattatcattttataaactattaccctcag

SEQ ID NO: 673 - DNA, 884 bp, Heterodera glycines
  unsure (1)..(884): unsure at all n locations
tttcccaggggttttattgtgacttgggtcattcttcttgtggttgtggtaccaaaactgtaagcaagagaaaaacaatttggccacggccttgggccacataacctgctttttactaccatgctaatttaggtatgagtccgttacatataattaatggacaaaaaatgcgcttttggtatgtaaaataatcggtaattacagacagagaattttttccggtcgattttatttgtgtgttaactttcattcgtgccgagagagctgcggtcatctgcgctggccattctccccgccgttgtgccccacggcggcgtttggccaaccgccgcaaaatgccatcggcaaatttcgtgccacaaacgaaaaacacgggcaaagtttccatagaaactttgctggatttagcaacgcgtaggaaaacaaaaagaaatgtgtggaaaaactacgtaatatatgtacacggacattgtggcaataatttgttaatccatcggccgataaatgaaaaaaaggggggggggaagaaatttgaataaattacacaaaagcaaagggaagcgaattcagaactgaaatgcgtgccaattttcaagtcgattttgcatatattaagcaataattgtgataaaaagcatttaatgaatttaatgggtctaaattttaattatttaattattgaaatttcgaatttccatattgtttatcttttagagtcgtaattttaatttccgaaatttttgaagcctcagaattcagattagggttgcgaccccgaccgtcggggttggaaaagtcggggttcggagttgtcggggtcagcaacgtcggggtcggggttcaaatcgttcggggtcgggatcggggtttgngggggggggggg

SEQ ID NO: 674 - DNA, 3064 bp, Heterodera glycines
atcgttgacatttggctgagttgacgaatcgtcgccttttggctgagttgacgaatcgtcgcattttggctgagttgacgaatcgtcgcattttggctgagttgacgaatcgtcgagttgacgaatcgttggcgcgccaactattttagtgacggaacgccaaaatagtgatttctagtactcagtaaacaattcacgagcatatttttcacagaacgtttgtcatttccccgtggattcgggcggaaatgctccgtctgaaaacgctttatccgacgccggcggaggaagaaaaaggaggaaaatgaaggtgctgtaacatttcgacagtggctgatttcgacagtgaccgatttcgacagtgaactattttcatttattttactgttttccgacatttccgacagtggctgatcacgacagtgaccgatttcgacaatgaacaaaattttaactttgccaattctaacatttgaaaacttcaaattgatatcgaaaataacgacaaaattgtgtaaaacgacaatgctaaaatcctataaatgtttaaaagtgcagatgataagcgcaagcgcgaagaaattggatcggatcacgattgaaaaaatcctgcacaagtgcttccaagttttggtcttgacgaatgtatttggcctttctcgtttcatgaggccctttaatgccgtcagccggtgcaatctgataatctgcaacccgaattctccacagttcatcttcctcgatcattttccgagcaaatgaactcggtcgttggttccccctaaggtgcacattccaagttgaatgccaaccctgaagaaaagacatgaaaaaatggtcacatcccaccacacttcaagcgaattgtttgttcttccaagcccttctgctactctgtccaccacattccacaattcaattggaaaaagagcgtcagtctgtgccaaattaagcgcctcaattctccctcgaatccaattatcagctactccgcctgcatcgtgaaccaaaacttcttcattttgctgattcggcgaggcccgatccacgtgttaatgaaatagatgatcagctcttgaagctcaggagtcggctcaagaattgacatggcaatgcaaaaatagttgtagacaaagtcgacggggacaaaagccagcgcttgtagagaccgcaaggatgttctgacaacttcatcgtcacgatatcgcgtgagcaaatttggcaatcgctgaattcttcgccaaattgcttgtccaaagtgaagtacgggaaccaattattgccaacagactgacgaattgtttcgaagaatcttgtgtatgtggcgagagttttgctgggcagtaaaccataaactgccggaactgcacaatgatcgatgacaactgccattgtgtagacttgagtaaatccccttgggcatgtctaagataaaaacaattttacttattttgtggtatattggtagcggcacattttatatgcctctcgccactatcagctaaaagtgccctttagttattcacctcaaaagtgccatcgattgccacttcattctgataattcgccaaaagatcaaggccaaaacgagaacaaaaaatgatcattttttctccattaacagtttgatcataaatcgtacgatcacgcaatctgtccggtatgatgatttgagatgcgggtaagacatccaatccaacatcgccgacctaaccatttatttttaaaattattttgcttattaaatttatatttttaattatctaattatcatttgcctcttcctgatgcttccgtttctgataattatatgttcgcctcatatcagctgcagagggtgcactgattgcccgaatctcatcactaaggttcgaccgaacttctctgatgatgttacggcttgtggtcgggaattcgctttgcgcctcttgtcggagacgttcagatgcttgtctcacctaattagctacttaacacccgttacattttaaatttctaccatatgaccccccaaaacgggtggatggttatgctgtccggtagtgcgtccaattttatatcgcgacccatcggcatcgacttcccaacggcactgtacacaagcacgccctgggcaataaggtggacggtttgggcaacgccaatactccattccgtcttcagttttcgaaacagccttagaatttttcgtttaacattttcacgaaattaaattagccttttaacctcgaaagtgtagtcatatccgctacgagatagaagaattttcccacgatttgttttggtctctgcgaatcggagtagagccattggtcaatgaattcggaaaaaaacgaatagagggaacagcaaatgatgaacaccagaaatgacaagtcgagaatgaccatcagcattcgggaacaccaaaacaattcctctcaaaattctcttatcaaattgacctccaagaaaattgacctcccaatataaagtgaacgaccggcccttccactatcaacggcctacggccaaagtacagtacaactgagttttacctcattgaaaataaaagaaaaatgctttattttactacatcatatataaatttcacccattaaatagtgacttttttaaataaaaatgactaatacacaaatataattttgttcattgtcgaaatcggtcactgtcgtaatcagccactgtcggaaatgtcggaaaacagtaaaataaatgaaaatagttcactgtcgaaatcggtcactgtcgaaatcagccactgtcgaaatcagccactgtcgaaatttcctggcaccttgtcatggcattgtgttgaacttttgttattttcgcaccgtaaattgatttttttttaattttaattttcgactttttgctcgaattcgagtccgggattcggaattcgtcgcaatggatgtcagattcgtgatcagcgaccccgaaaaccccctagaaatgtgttaaaaaaatttttttttttatggtctgtaaaccacataagtaccaaattatggctgttggaatcgtgtctagattacgccccggaaatttgcgtatttta

SEQ ID NO: 675 - DNA, 7008 bp, Heterodera glycines
tctctacaaaaaatatttgaagaaaatacaatgccaataaataattaaccaatgcgtaaattcaaatttaatttactttgtgaaaaaaaatcaggaaaaattattgtacataagattttgtgttggagatatgtaagatatgtaactgggcattcatttcaccgagactgatgctttaagctttaaattgatacaaagaatgcagaacctttgtatcaaacaaaagctaaaagtccctagaatcattaagacaagaaaatagcaaataatgacattaagaaaaaaacgacaacgagaaaacacgaaacgcatcctttttgagtatattcaagaatttttttttgtctattacttttagcccagtgtttgggactacaaaagattctatagactatgcttttatttgataccaagaatgtaggcattgaccaattaagaagaaatttatagccaaagaaactgatgattagacgcctacctagaagtccagtggacgtctgtctatatagcctatttttactatttttcatatatatttgtttagaaattgcaatattttcttttaggggcatctcttggtaatttttgtcgttgaaacacagcaccagtgacgcattgaccatggactacggcgtggaacgcaaacgccgcagactctccaactacggagcgacgtcgccgacaaagagtgtccaggaggtgaaacccgtggcattgtcttggcacggtctcaccgctgtccatgccaaatcgggacggaaaattcttggtaaaccccagtcggagttgcgttacctacgtcaaagactgtttcgatttttttagacgacgcgtccggcatggccgacgcgggccaactcgtggcactgacgggcgacggcggagtggacaaaacagcgcttttgaacacgttgctggaccacaacctgaagactttgagcgtggagggtcaagtgctgatcaacgcgcactccttgggccggttcatcacttacgtcatcggggtgagtcggaaaactgctaatcttctgttaaatgtcaaattttgaattctaaaacaaataaatggtaaacagaattacaataatgtacaatttttcctttgaaaacttgggttttcaagcgtactttaccaattaagtttttcaattcttcgcgccgttagttttaaattcaaaacttgaccgcataatataaagtgccggaatggcaaatccaaacatcgacgatatgtcggttgagaccgttaattgaaacgggattagtggttattaaactatagtgtgttttcccgttctcaatttcagtacgtgcaacaggacgacttgttcatgggcacgccaacggtgaaggagcatctgatggcgccggcacagctttggatggtcggacacacccaacggacgatgcgtagacgcgtcaatgaggtgggattttggatcagtacaaaatggaaatcactaatttgctaatggattagtttggttgctaaagtttcgtcgtgcggctattggaattggcgaacgagttttttaagaatgaatttctcattttcagttggaagaagccatttcggatggtgaggcgcgtcgtttgccgttcgccttcgaaccgcggcacaacccgcaaatcatttttgccctccaaccgactaaggttccaatttttttttgaattttccaaaattcctgattaggacctcgcctcgtcagtggtggacagcgtggtctcgcacattctgcgtaccctgaatttgttcggccggcgaatcgtcgtcacaattcaccgtccgtcagaaggaatgtgccagaaatttgagcgggtaaaatttgaccgattttccataaattgagttgggatgagtgccacccccaccctaaatcgccaaaatttacgcatttgtttttatttgtctgttgataaattatatttactattaaacgttactttttgaagttgccatctgaatgtacctttataataaaattgaacatgtcaaaatttatgccttttctcatcccattggcagccacaaagcacaaaatggaggtagggaaaagaatttttttttttgaaaacattctgttagcaatttttgtaatactaccgaggtatcacaaaaaatggtgtgataccatcggtagtattgccgaagttttttaaaatttctcatgggggaaacaagcttctcccagtgctgacttcttacaaagaagcagcaattgtttttagatttagcgcaaaaaataaattctctttggcgttttgaccaatttgtctaacactgaaaggaattcaaaaattttcttaggcatagtttttccaatcattttattttttgaatattatttagaaaaagtaatcctttataaaaaatgcacattccaaaaatagaattccccaaagaaattgttccaagtttggccaatttgtcgctaaatcgtcaaccaattgatgtggttttttcttcttttgactttctttttaatatattttttgagtcctcggaaagggtaaaatgatttgattttattgttagtctgattttgtgcccttagccctgggttcaaattaagtaatactttgaaataaaaaagaatttgattttaggaccgtcttttgaagttactcgaacggacgcaaaaggatgtccagcgcctgacgaccgccaaccaacagctcaccaccgccaaccaacagctcaccaccgccaaccaacagctcaccaccgccaaccaacaacttactacaacaaaccaacaacagcagaacacaatcaaccaccagcagcaaaacatccaacaactccaaaacttattgggtttgtgcaaaatttattggagatttaaatttcttttctcgagcaattgattgtaatgcctaatttttcaagccggtcagcaaccgcttgttccagcgtttgcccccggggtttttggtgaacaacagcagcatcatcatgcgccagcggactttctcggcgaccagcatgcgctcggcggccagaatccacacgcggcaccttttggccccgactttttcggtggtcagcccgaaaattttggtcagtgccttggttaagtcaggcactttctccattttctttcgtttaggtgttcagcagcagcacatgcaggagcagcagggtccccctcctccgccgccaccgcagtaagacgttgcaagtggaagtcgaatgatgagttgacgtttgaccttttaacctcttatgttttaacgttattttgtctgatgaagaataaatctaatgcctcgtttcagtgtaattgtttttttttgttcagaattgccagttagaaaagcaaaaacaatagtggtttttaaccaaacaataaagcgcagcaggtctaacaaaaaaaagcaattaacatttgtggtatgtcaccatagcttaataaatttcgagatttcaaaaatccatcaattctgacttgatcacgcaaattttaaccccgtcccgcaaaaaagacagccaatcccacagcgggaacaacaaatttctcagggttttattttgaccatcgtaatgccagcaatttttattgtcaaaattttcattcgttcagaaaagcgagattgaaaaagcaaaaacagcagtggtctgattcaaacaataaagcgcagagttcaacaaagaaaaagccattaacattttgtgatttattggtgttgctccttcatttccgttccgttcattttcactgtccccccttcaagtcgcgcatgccggcacgcatcacctcgtccacctccagcagattggaggcgatgttctgacaggcgttcagactcgcctgcttcacgcacacattgtcccaaacgctctaaacgggggaagagaatgaatgaaagtgttcattttttgtggcacgacacatttgtccccgcccatttctgatgacacacctgaggaacacacggctctccgctctccaggtccaatccgaccagctcaccagcagcactgaacgtctccaccagcttgacaatggcctggcaattgaaaggagtaaataaataatttttttaaaagccttttccctcacctcctgggcgtcgaatccggcattgaccgccaaagttttcggaataaccagcaaagcctcagcaaaagcctgggaatgagaatgatgacaataattgaaagggattaagaaagaaagaaagaattacggcaccaaaacaccgagtttggcacgccctttcacattgtcggcaagctaaaacagagattggttgtgaagtctagtgggaggactctacttgctacctttttcagtgcacaatatcccgcaatttcaaatgcaccggcgccgggcaaaacggcacctaaagaaaccatgaaaattaaatatgtgacgaccaaatgacagtcataagtaaagcccaaaactgggaaaagaggtgcaaaatcaaataacccaaagtgccaaggcattaattgcctaggtaattagtcattttcatccaaattgtcccatcccctcgtcgcaaaacccaccgtctttcaacgcattggcaaccgcccgctgtccgtcataaatggcgtccttcagctgcgtgatgctgtgcttgttgggccctttgagcagcaaagtgaccgacttgggacttttgcactcctccacaaaagtgtatttgtcctcgccctgaagcggtacggtaaccatgtgttacatacagtacaccaatggaaaactgtccccgcccaagaaataacggcactgctcccccttaactgaccagcacatgctcataaacactgcctgcccagccgagcacatcgggcgtcaggtcgtccaccgaattgaccgcctcgccaccgcaggccaactgcagccgttccatgttccgacgcttggcacgtcgcagggccaaaatgccgtgctgtgccaacaaatccaacgacggcggatcaatgcccttgggggaagcggggattagttatttttttaaattcgagagtcattcccgaataaaacaagcacacaccttttgattaatcaccacaaatccttgatctccaccggcacagaccgtctccttcagttccacaattttcagcacccgtcgtgtgatgtattcgcgctccgcctgcagcaaacgctcacgctcagcctattaaagcacaaaagcttcttcattctcgtcaaataaatattgaattttggtgttgaaactgtcgcctgcccaagagttttacagaatcaactgcacgtgccatcattgataacaagcacagtttcaatttttatcatcaaattttgaggaatttaattataaatcaaaaataatgtaaaatttagaaaaaaaagtaaaataaaattcataaattaaaaaacaaaagaatttgaatctgctttttgagatgtcggatacctaacaaataagcccagtcctgtccggctggtgctgtaacatttcgacagtggctgatttcgacagtgaccgatttcgacaatgactgatttcgacagtgaactattttcatttattttactgttttccgacattcccgacagtggctgatttcaacagtgacagatttcgacagagaataaaattattattttattattattatgtattcacatgaacaagccggaacccacggttttgcccgaagcaaactacctcacggtcaaactgacccgaaaagtcatttttattttaaaaaattcactatgtttaatgaaaattgatatatgtgtgtagtaaaaataaagcatttttctcttattttcaatgtgaatgaatttggaaaaaaacgaatagagggaaaaacagcaaatgatgaacaccagcaatgacaactcgagaatgaccatcagcattcgggaatgccaaaataattcctctccaaattatctaataaaatgacctcccaagaaaattgaccacccgagataaagtgaacgaccggccttatcactatccaacggtcaaagtaccactgaattttaccacattgaaaataagagaaaaatgatttatttttactacacacatatatcttgcaatgtgatacaaaaattcaaggaaatctgatatatggaccggacaaaatgcacttatgcttattgggtacactggaaaaatcattgccagacatttatgtgaatttgcgtttttttgctgcaaaatttacaaaaataaaaattctccaattttccagaaaaagtcggctagcaattggaattttgagactagaagtattatcagatatttttagcatgacatattaagcaaaaaatgttcaaaatgaataaagaaaattcaaatggaaagaacgatcaatttattattattatttcgtcaaataaaaaccattagaagattttggatcacaatttttttggaaaataatttttcaaacggttagacaaggccgaaacatccgtaggacactcattttatcgttaaatctgaaattttgcaaattttatttaatttcatttttttttacccttcaattgatcaatttttccaactcgcgaaaatcgaactcttccttggacatgttggcacccttctggccaatctgagcaaggcatggtgttattgttgaaagatgctctgctgacgagcacttgagggtcattttgctcttcacaagcccaaaaaacagtgatctgatcggtgccgaaagcggcaatgaaattaatttcattaattttaattaggtaattaatgagtggccgccccaccaatagcgcaaccgattgcaggacagaattggcgatcagcagcacattcttttgccacaatagcagcatggcccgacgtgtcatacaatccgactttgcaataaatccctttaaattgaattttataattaaaattattttggatttcgaaaaatttaaattacgtagcaaaggcagggaaaggcgaggcagcagaaaaaagaaaatgggagaacaaagttcattttccgcttaatggtttgatagacggaaaaaaaatcattagaaatttggtgacaga

SEQ ID NO: 676 - DNA, 1952 bp, Heterodera glycines
caaaacggcacattttttagtcaaaaagcaggcttaacacaaaactgatttaaacaatttaagtatctttctaatttatattattatttaatttgttttacactcactttttcccttcatcggcaaataaaatgggctgtcaaaattcaaattgcccatattttctcccttggcgccaaattggcattggcacttttggccaaatgccaggaatttgctgacctcctcacaatcgttgtccaaggaacaaccccaaaaggtgaacatttcagagactgtaaaaaaagggtgattgccaatcaatcagatcgccgcatcgatttatcgatcggtcaactaatcaatcaattgagcaatcagttttttatatttaatataaaaatcgattattgatcgattgattgatcaaaatatttgtgaaatggagattgataaatcacacataaaaatggacctatttcgcagctgaccgtgtaacagtactctccgcctcggcattctctggccgctgtagtaccgtatccgtttccacgaaaatagcccgccctgcaccggatgccttataatttaaatgtttttttttttaaattttcgacgatctatttaaagttcaattctccgtttctagcaattacggtctaatcgggtatataaattaattttcatgcatttccaattatggcataatattcgtggcattttatgcaatcttggcactatttctctgatttatccccccattcatacataaaattctttggcactattttcctcatttttatggcacaattctcgactcattaccatccatttttccctttggcattgttttccctcattatttgtgccacacagttcactgtcattttcatgcaaattttttttttttggcattttgcccccacttttctcaagtgcctctggcgaaagggtcggaatcgggccgggcttctccttttcgggcagtttcgcttgctcattggccatgtctttgccctcgtcaccaaattggcactcgcagcgctgcttcgtcgagtgcagcgcggagttggccgcgttcacaaagaattgttcgcagccttttttgtccgcgtccccgctgcacccccaggtgatcagtgctgtggaggtgtagttttctgaaatttttgaaaaacaaaaatttgccatttcagccggggcctaaccaggcgccaaaaatggcatgatcatatttgactagcaatcgccagaccaaaatgtttctttttaaaaaaatttcaattttctcttagaaaaacaggatccgaagcttaagcctaagccgaggctcaagcaggccttctgcgcgtcataaaattggggacaataaataaattacagtgattttaattatttaattttgttaatcttttattttgcacttacgctccatgcacatcacggaaaagcagtgatgggctttgctctcgcatatttcatttgtggcattttcacccgataaatgattggcatagcccgccttgcacgtcaatgcttaattaattaattcattaactaattaacaccactcattaattttaaattgttactcaagcatgggttgaacatggcgatcatcagcagcaatgcaattagcggcaaaagaacaaaggaagagatcattttcaatatgtccttaaaattttattggaatttaattggaatgattttattttttgtttgtgctaataaattgtaaaatgaatgcttttcacaatttttttcattttccatttgcctttttttatgagtcattcattcactttccatccaagcaaatgcttctttctgttctggcgctattctgatgattaatcaaaattgtcttcatcatcaacaaccatttcataaaataattattcactgagaaaattttaaaaaaattaaaaatgatttgtgttaattaaatgtgaaaattattatagtaatat

SEQ ID NO: 677 - DNA, 1415 bp, Heterodera glycines
  unsure (1)..(1415): unsure at all n locations
cataaagtaggcaatttttgacttttatgaaattcactacgccaaaagtcgtacaaaactaataaacgggagatttatttgttccagattttcgtctttgccntattttagggtttgtattcaaaaaaagttgctcataataaaggcatttcttttgctttatgaaagtttatatttgcaattatacatgcacttttgctccataattttataacgattatataattttagagctctaaatttcaagaaaaccgcataaagtaggccaatttttgacttttatgaaattcactaacgcaaaagtcgtacaaaaactaataaaacggagatttaattttgttccagaattttcgttctttgccctatttttaaggtttgtatttcaaaaaagttgctcataataaaggccatttcttttgctttatgaaagtttatatttgcaattatacatgcacttttgctccataattttataacgattatataattttagagctctaaatttcaagaaaaccgcataaagtaggccaatttttgacttttatgaaattcactaacgcaaaagtcgtacaaaaactaataaaacggagatttaattttgttccagaattttcgttctttgccctatttttaaggtttgtatttcaaaaaagttgctcataataaaggccatttcttttgctttatgaaagtttatatttgcaattatacatgcacttttgctccataattttataacgattatataattttagagctctaaatttcaagaaaaccgcataaagtaggccaatttttgacttttatgaaattcactaacgcaaaagtcgtacaaaaactaataaaacggagatttaattttgttccagaattttcgttctttgccctatttttaaggtttgtatttcaaaaaagttgctcataataaaggccatttcttttgctttatgaaagtttatatttgcaattatacatgcacttttgctccataattttataacgattatataattttagagctctaaatttcaagaaaaccgcataaagtaggccaatttttgacttttatgaaattcactaacgcaaaagtcgtacaaaaactaataaaacggagatttaattttgttccagaattttcgttctttgccctatttttaaggtttgtatttcaaaaaagttgctcataataaaggccatttcttttgctttatgaaagtttatatttgcaattatacatgcacttttgctccataattttataacgattatataattttagagctctaaatttcaagaaaaccgcataaagtaggccaatttttgacttttatgaaattcactaacgcaaagtcgtacaaaaactaataaaacggagatttaattttgtttcagaattttcgttctttgccctattt

SEQ ID NO: 678 - DNA, 1069 bp, Heterodera glycines
tataacgattatataattttagagctctaaatttcaagaaaaccgcataaagtaggccaatttttgacttttatgaaattcactaacgcaaaagtcgtacaaaaactaataaaacggagatttgattttgttccagaattttcgttctttgccctatttttaaggtttgtatttcaaaaaagttgctcataataaaggcaatttcttttgctttatgaaagtttatatttgcaaattatacatgcacttttgctccataattttataacgattatataattttagagctctaaatttcaagaaaaccgcataaagtaggccaatttttgacttttatgaaattcactaacgcaaaagtcgtacaaagactaataaaacggagatttgattttgttccagaattttcgttctttgccctatttttaaggtttgtatttcaaaaaagttgctcataataaaggccatttcttttgctttatgaaagtttatatttgcaattatacatgcacttttgatccataattttataacgattatataattttagagctctaaatttcaagaaaaccgcataaagtaggccaatttttgacttttatgaaattcactaacgcaaaagtcgtacaaaaactaataaaacggagatttgattttgttccagaattttcgttctttgccctatttttaaggtttgtatttcaaaaaagttgctcataataaaggccatttcttttgctttatgaaagtttatatttgcaattatacatgcacttttgctccataattttataacgattatataattttagagctctaaatttcaagaaaaccgcataaagtaggccaatttttgacttttatgaaattcactcacgcaaaagtcgtacaaaaactaataaaacggagatttatttttgttccagaattttcgtactttgccctatttttaaggtttgtattttcaaaaaagttgctcataataaaggcatttcttttgctttatgaaagtttatttttgcaattattactggaccttttggtccataattttatacgaattatataattt

SEQ ID NO: 679 - DNA, 5370 bp, Heterodera glycines
  unsure (1)..(5370): unsure at all n locations
gaaagctgggatactttttccacgtcctcgagcgttcgtcggaccgtccgcagatcaccaaggtgctccatcgcgatttgaagcagttcagctgggggcgggtgcgatcggagccccaaacatctcgttgcggccgggagtggctgggtgaacgcgtcgtacaggtagtcgtgcagctctggcgcttcgtccccgatcgtcgctaggccccgatcgaaatggcccttgaaaatgtcgaccaattcccgcagtcccctctccatggccgagagacagactgctgtctgtggcctgtctccgttgagatccggatcgagcaaatcccgtgcttccgcgatccgatcggcgagagggcccgatgccctttccaactggtcccgaatggcgcgtatggcaatgccattgctccgaaggtttcgcgtccctccgggctgagtgcccgaaccgcattgaattgccgatgcttccgttcctttctgtttgtcctttcccctttttgcactcttctgacctgctccgatttgcgttgtgggtgagccaccgattcgctcatttccgtcgttgccgtggtcctgctcgtcgtccgtaggctccattgcggctgttcgaagtccgaaatccgaatttggcgcggtcgtcgggtgaccggtcgatgagttgtgcagtccccctgctaacggcaccagtttgtcgaaaaagctggcgatcaatggaggggtgatcgccggtttcctttgccctccttctcggctttgtcgacccctttccgaattgaatgcccaaggggggccgagaaaggagaatggggagggccgacaaaaggggggtgatgtaacggcaccaccactcagttaaggagtgagtgaacctcccaattgcctgccgggatgagtcccgactccgatcgctgaggagggaagggcgatgggagggagtgggcaaggatcaggagtgatccaatcccgcacgacaattgctgatcgctccgaatgcgattaggggcgccgaatgccccaaccgaatgaccgaatttggtgattgcccaaagggaagggctattttcctctgtccaaaggaaaggacaaacacacaaatatttattgccaaagggaagggcacatatttggaggaaaaatgtgataagggggagaccaagtgaagggaaggacgaaagaaaagggaaagatgaccgaaggaaaaagagagtgaaccccggagagattaccggcggggggttaaataggccggacaatgagaaatgcaaatcacgtgaatgggcatttcggacggggacaaagttgggaagaacatttgcccgatgacattggggcccaaggtacaaaatgaattgaattgaatggtgagaagagacgggcaaaaaattgggacaaaagaagcgatttgagaacagatgccccgcggaggggcaacaaaggaaaacatttgaaatgaaagtgagcgggggcacaaaaatgcaaatgagaaatgctgagaagcaaaaggaagggaaatggtaaacaaattggataagacggaaaaagagggggggaaggcaaattgttgaagtgaaaggaagggaaaaggaggcaataatgggggatggtgatcataaattaatcactgtttggcatcgggccccctgcttccttcagtccgccgggaacaatcccggccatccaaagcccatcctttttctctcgtcgctttcgcgacattgggggcggcggcgaggcgggccaaggacgagccacagtcgaaatgccaccatcccattgaaggaagaggcacaggggaccaatcccctttggagtgatgccgttcactgagtccctgagttcaccgacttccgggccgatgatcatggccgcggatccggaacatttgaatcccgatggcgtgcttgcgcagtcctccgagcggagcatcaccgacatgggctccgatgaagaaaaaagggcgacaaaacaaagcagcggaagcagtgccatggcggccccgggcctggatgcccgtcctcgttctgcatttctccaagctctagcggctgcgcgggctcgtctggccaattgcactcgttcttgacttttgacctgatcggcggtcggctcgggaatgtccccacccgtcaaacgattaaaaactcgaattgggtgccgagtcacccatgtcatcaccttccacagcagagacgccccgagcaagcactggctgaggcctctttcgcacggttctgttgttccgtcttggtccgattccggtaactcacatttggtccgttgctgctccaccctacatcgcttctcgggctggacatgcggagggtccttccgatcgcgcgggttctttggcgttgggttgaggggaccaatccccagacgatcgttctcgtaaatggacggtttcgatttgtccgctgcttccactcccgatgaggctggcatgcggttccatctgttttcttctccgcttattgccatgaggatggtgtcgcggggcactgattgccccaagggcgccccgaaatgctctccgcaaagtacggtcccgaacactgtgtcgacaagaaaggccccctcggccgatattttgaatccgatcaccaagtcccaaaacttgcgaattccgatcacgatttgaggctgaaccgtcgcgtccgtcggcttgagcaggccggaatgggttctcggctcgaccacactttccactggtttcgacccaatgtgttcgcgggtttccggtcccgctggctcacgaattgcgattggtttccctggtccgacccaacagaccaaagagtgatggtcgttgcgcaggcaccaccggcatgcttttgggcggggacagcaactggcaatatgatcagaagaaaggcatcggatacaccgccgttgctcgaagaaacgttgtcgtcgttcttggaacgtgggataagtcgggcaattgcttggacggtggccccaattttggcatagagaacagccgttgtcagttggggccggcccacgagattgggcaagtcgattccggttccgatcagccactttccggtgtggcgcgtgagttccggtccgaagggcggatgccccaggtgttatgggtcgttgggatgaggggttgcttctgaccatgaacaccctcgggaactgatcccgattctgtgtcccttcggcgtgtcggctttgttccggtcttgattcggttcggcgctccggctcgcgcattgccgccaaagctgactctgccgcgcgcatgcacctgacttgggcgcccaccgccctccgaaattcccgaactgaccatttcgttccactcgtgctttcccggatcctcaattccgtcaggatccgaaccggcagcttggactcgagcagtggcatgaaggaagcgtcctccacattcgccccgagttgctccaattggcacactccgcgttcgaactcgtccacgacggtggtcaggctttgagcattgtctgtggccggtggaaggtggagaagctgggcccggattgcccgctgcagatcatccgtgtctccgaatcgttctttcagcaattgaatgaccacgggatagttaccgtccgaaggagggtagacctcgacagccctcctggctggggatccctcctttaagcagcgaaggagaagaagctgcttttcgaagcccgggatgggcttgtcgtcaactgcccgcttgaaatacgaccaaaatgtcgtccaatcctccggttgtcccgagaatgtcggtggctggaggcgcacggtttcgaatactgtcgtctcttcgtcacgtcgagtggttcgcagaactgaggggtctctgcccctgacctgttcgggtatccgaaaatgaccgcagggatttggattccccgcaattggaagttctggaatcagcgggcgcggttgattgcccgcttgtcggatgtgcggggagggagtccgttccctcctatcgctggcctgattgacccaagtgttggctccgtttcctcctgcgtttaagaccgggtactgggcgaccttggcgacgcttcgcatcacgggcgtcactgcccgtcgttcctcttggatgttcagctgctcgaaccgtcttgggaattgtccaaacagcaaatcgaccggctgatgattggtctgtggttcatgaacttgcggtggagggaacggcgtgcgatggacagcgggatcgtttcccgcaggttgacagtctacggttcccgatcgggtcccggatganagctgggataacttttcccgtcctcgagcgttcgtcggaccgtccgcagatcaccaaggtgctccatcgcgatttgaagcagttcagctgggggcgggtgcgatcggagccccaaacatctcgttgcggccgggagtggccgggtgaacgcgtcgtacaggtagtcgtgcagctctggcgcttcgtccccgatcgtcgctaggccccgatcgaaatggcccttgaaaatgtcgaccaattcccgcagtcccctctccatggccgagagacagactgctgtctgtggcctgtctccgttgagatccggatcgagcaaatcccgtgcttccgcgatccgatcggcgagagggcccgatgccctttccaactggtcccgaatggcgcgtatggcaatgccattgctccgaaggtttcgcgtccctccgggctgagtgcccgaacagctttgagttgtcgatgcttccactcctttctgtttgtcctttcccctttttgcactcttctgacctgctccgatttgtgttgtgggtgagccaccgattcgctcatttccgtcgttgccgtggtcctgctcgtcgtccgtaggctccattgcggctgttcgaagtccgaatttggcgcggtcgtcgggtgaccggtcgatgagttgtgcagccccttgctaacggcaccagtttgtcgaaaaaggtggcgatcaatggaggggtgatcgccggtttcctttgccctccttctcggctttgtcgacccctttccgaattgaatgcccaagggggccgagaaaggagaatggggagggccgacaaaatgggggtgatgtaacggcaccaccactcagttaaggagtgagtgaacctcccaattgcctgccgggatgagtcccgactccgatcgctgaggagggaagggcgatgggagggagtgggcaaggatcaggagtgatccaatcccgcacgacaattgctgatcgctccgaatgcgattaggggcgccgaatgccccaaccgcatgaccgaaatttggtgattgcccaaagggaagggctattttcctctgtccaaaggaaaggacaacacacaaatatttattgcaaagggaaagcacatatttggaggaaaatgtgataggggg

SEQ ID NO: 680 - DNA, 2194 bp, Heterodera glycines
ttaatttgcgctcaatttcgccgaggcgttccgcgatggcgctgaactgcgcagtcatttcggtcgccaatgtgttgttgttgtttgttgaaattaatttttcaattgcagataggcgattaataatagctttaatgtttttacaaatttattcaaaagtacaaaaaactaaattattctaaaaaagtttgcacaaaatagcaaaatttggtcatttatcgtgtaaatctttaacaaatcaacacaaattttcaaaatttgcccggcggtgcctaccgtcaccgccggacctcccttgtacctcaaacttttttgaaaaaatacgccgtaaaaaagggttttgaaaagcaaaaaagctcgatttgcaggcttgatataattctaagctaaaataaagattgtaaaatttttttcgaatttttaatcaaaattttaaaaattttgaagaaagtcccggtcccggcggggccccgggccctaaattggggccggggccgggagtcccggaaaaacgggagtctcggtcccgggggtcccgtacgggtccattttccaagtcccggtcccggccatctcaaaattcccgtctctacttaactttataaataggcaaaaattttgatgcttttcgagggcgtcaatgatggttttttttgaaatgttgatttgatgatttttgatgcttttttgagaaagtttgctgatttacgctgatttttgggaaaaatacctcaaaaatggccacgtaattttcttatttttcggccaatcacattgacaagaaataacaaataataaaaaaaatcgcaaaatcccctaatataataaataagtagggctataaattatatgcactaaaaaatggcaaatatgcgcataaaatatgcaataaaaatccctcaaatatgccctaaaaaaaccgaaaaatgcccaaatatgcactaaaatatgcatttggcgacaattgcaaaaaattttgaatttcaaaatttatatatgcatttttgaattttttttttcaaatttttattttatgctcaaacaaaattactttttttgtatcttttgcatcaaaattttttcaaaagtgcttacaagaagttctaaatttttcgattttcaagggtgtattttttaaattcccaaaaagtcgatccttatgggtgtatttttcgtttttattgcatttttcctataaaatttgccaaaaaatggccgaaatatgctctaaaaacggaaaaatggccaaatatgcatttattctcgaaaacacccaaaatatgcttttatatgtactaaaaaccttcaccaaaacaaaaaattttaatgcagaaatgctatttttgagcccctttcttcatagcatatgcgcaaaaagaaaatatgcaaaagcatataatttataaccctatttatataaccatagttcttagacataaacctttgtaaaaaaaatgattgactgatcaaaatgccaaaccataaaaactaacaaagcaaaattcgactccaaatcatccgaaaaattttacttgaaaaatttcaaccaataaagcaatttgacttagaaaaacaaataaaaaaacaacgcctattaattaaaaaaaaacattaaaaggtcgttttttaaatttcaaaacaatatatttcttggaaatttaggttgtttatatttatgccattttttcatagttccgccacttttttatcaacaacgatgtggtttttccgaattaaaggcaaccaacggcaatccgccactgtcggtgccggtaaattaatgataataatgggtgggtggggtaggtaatctatgcgcgaccgttgggatgtggcccgtgggaaaatcgtcatcccccaccccctcaccgccagggatgtgccggctttgccttatccgtcaccttccgccggcggggcaaataagattcaaaagggggaaggcatcggttggataatgcatgggctaaacggaggacgggtacactgtccttttgtgccgcgttgacaggtaaaatggcctttaagagaggagctggacatttccaaccggaaattagagggacaacaaaggacagacctttcatttaactaatatgtatcctatcaattcaattattctcttccccagagggtggaacagttccgattaatatgaatttgatagattttctgataaactccgaaggtttga

SEQ ID NO: 681 - DNA, 4210 bp, Heterodera glycines
tcagggggaagcaggaaacggtggcacacatattggcacgcgtgccaccttcgcggcaaaatgttatggcgagagatagaaagaagtgaaggagaagagagagatagaagagaggaagcgagaagaatgaggagcggaaagaagagaagaataaaagaggggaaaggagagagtaaggggagagaagagaggaagcgaaaggatgaggtgaggaagggagagagaaaatgaggaagggaaagagagagaaaggataaagagagaaattaatgaatagagaagtgaggaaaggataatgagagagagagagttagcaggagagagagagagagagagagtaaaagtgaggaggagaggagggaataaaggaaagaaaagaaagagaaatgagaaggttaagggaagagagtgaggatagaatagaagaaaggataaagtgagagtgtgagagagagaggagagaaaaaaagggataaagtgagagaggagagaagagaggaaagttagggaaggagagaagagcaaatagggaaggagggaatgagtgagagagagcaaagaagagaggaaaggagagagagagaggacaagagagaggaaaggagagagagagagaggacgagagagaggaaaggagggagaataacgaggagagcagagaagaaagaaaaggagggagagagagtgaggacaggagagaagagaggaaaggaggtagagagagtgaggagaagataaaaattatttataacaatttatatttctatattactactaatataaaaataaaataacattttcattattttaggttgataattactttcaaatcaataaaaatacaatatttatttacagtgtcataatttttcaaaaattttcttagggagatagttgggacaagcaatgccgaaattaatgtatttgaaaaatgtttacaaattctaatacaaaaaaacattcaaattcgaattggcccaaagttagccaataatgaaatatatgctgtaaaatccaccacatttcttttaacatgttgaaatgtcgatccgcttcattcatcaaatcattttctggcaaatgtctttcgtcaattcgaccaattgatgagtatttggcaatatcattaacacgattaaaacatggaatttgcatggaaaatttgttgaaaattttttgcaaaattttcacggcattttgccgcaagattggatgacgactaaatttaaatcaaataaaaaaaaagaaataatttagtttgaattaccttaacagtttgtatccaatcaaccaattgcaaattgataaaaataaacaatgaaattgaacaacaaaagctaatatattaggattgatttcatgattattcggatatgatcttaaaattattattattcaattgctgtttttctcaaactttaaaaatttaatttgaaaaatgttttgaaaatttcaccacatattgtaataattcacatattaaaatattatcaaatattaacatgttattttatgtaatattttatcttttaaaattaaatattcttaccaaaaattatttattcatcgatatcaatgtaaattattttattttaattcgttttctggctttttctttctacgtaaaattaaataattaatctgctaatttttcattcacttaactaatacctgcttgatttgatattatctaaaacatttccagaataacgccaaaatcgaagtttccagcagccaaaataggctgattttggctgtgtgttgaaaatttggggcgcctgatagttcatttactgcactggctgttgttgcacttgtacaccttgctcgttaattggccaggcataaggttggcgtggttgaaaatttgacgcttgtattggttgggcttgaggatggccaaaattttgttgaaccgcagctgggttttgctgaaccagcattcaaaacggaatgttattggctctacgcgcaaaaacaccaaaatgatgtatttgcttgtggatttcaacaccatgctgagtcagttgaggttttgcgggccaactccaacacagcgcttctcgttgacagatatcgaaatcgtctaaggtttggataaccgaaggagtcatcgtaaacggtactcactcggccgaaagcaaaaaaaaagtctcgtcatgttcaaaatgctatttataacagggctcggatctgtccttatttataagatttgtccttatttggagggtccaaatcttacaaaataaaaatgtccttatttgtaagatttgtccttatttcgggctattgttcttatttgtcgcttgtccgaaaaatcggcgcccccacaaagtgtcgctgacccacaaattgtccaagccacgaattgtccaagccacgttttgtcaaagccacgaattgtccaaaagagtaaaaacccacgaattgtccaaaagtctaaaaagctcataaaaacccggaaaacgggtctattttagggtttccggggtcgctgaatatgaatacgacatttatatagccccttgcctaatcctaaacccaaatataaccatgaaataggaaaataaatttttaatttctaatcgaatggcgaccataattcgaacaaatttttaatgctcttatgtgattcgaattctctctatagacacacacttagcttcacacattgaaaaaaataattttattaaacattcaataaaattcattacggaacatggacaattgaatggtcgtaaatttcaaaatctctcaattttcctgcatatccttcaacttggagaccgagcgccgacatcagatcactaatttcaccgttgctgttgtacgacgcgtccgccaaaattcgcataataaccgcgtcctgcaggatgtatcatttgtgtcgcttgtgaatgaaatggcgagcagatcaggcagcgtccgcctgtctgtcgatactttcattaaccccaccaatgaaatctgagaggtcggggtggtgacagaggccatgtggcgcccgaatgattttgtcctcccacgctggaactgaattttttattaaatttaaacggatgattgatgaaagaattctgcctggcgctgtcgaagtcgatagcgggctcaacgaatattgaacaagctgctcctgtggactcacagtggttggccatgtaagagttgatggtgccggtgagccgatgccgaactgtattagggtagccgcatagctgtgttccgaattgtggtcgaaattgttgtccagagtgcagctaaaaattaaatatttggaaaccaaatgcataaatttaaacaaacaatgattgccgatgggtgaaaaatcgagtgggttaccatctccaaatgcgttaacaccatccaacaacgggcgctgtgtcaagccgatgtatgttcgagagaagtaaaggaagaacactggcattccaagaggagaagacggccaagataattgagaaagctcttctgatattgcggacggcaaaagcggcaaagagagaaccgctctggaaaaataattatgatttacatctaaatcttattttttacctgaatatgttgcgaactgcctcaacatattctgtcttctcgccatataaatgctcgagaccaacactttctttgattttctgtcgccttgactccagcgattttctgagagatgtgtgaaacaagtcctgaatagattggaaattaaattttttgcattacttcaaacttaccgttcaaccatagacaatctcccccgaaattggtttttccgtgctcaaaggtcattgctgaaagttcagcctcgttcaaactctgttgttcaacattgtcggaagttatcacggcatgcggttcgtcaatctacactccaaaattcacggcatcctcagttgggtttgaaatgtctaacaaataaagcttcttccgacttttttgtagacattcaagtttattacgaatcatttgttcaattaatgaatagcaaaatctgaagacaaaaaaaagcacatattttaatcaaattttgagatttttcttattcgggtgggtctagggttaggcaaggggctatataaatgtcgtattcatattcagcgaccccggaaaccctaaaatagacccattttccgggtttttatgagctttttcgacttttggacaattcgtgggtttttactcttttggacaattcgtggcttggacaaaacgtggcttg

SEQ ID NO: 682 - DNA, 2081 bp, Heterodera glycines
gccgttgccttttgtcgtattgtttctgctgccgttactgcccacccgcgcaagttggtttggtcgtgtccggttgagaacatcgcgcactcctccccccatcgccgggcgccgactgtgttttggctgattgtgagtgcgctgtgttgtcatcattttctggtaacaaaaattgatgttaataataaaaaaaattaaaaattttacccggaagtaaattcagcaaacactgacaaaaaatcaggatggtcaatgaaatcgctaatcgatccaaatttcttttcaaagtttgaaaagaggttgtcgatggtttcttttctcttcgccctgatgaagcggttcttgttaaagagcttctttgccgcgtagcccatccagtacacatttgtttggggccagaatgaggaccaattttcgctaaaaaaagaatttttaatgtgacaaaaattagtttctctcgacctggccaccgtcttcatcatcctgtagacgtcgtattggtagtcgccaccatcgctaacaccattttgcgcgaaaaggcccgtatcttggctgagatcaacgaagaacggaacaccttctggttttgggaaacagaaattaatgagtaaactttaagcgcttgagaaaaatttgagcttactttttttcatacgcgaaattgaaaagtcgattatggaggcgcgcaccccatttgagacgacattgatttgttttccttggtagatgtatctttaacattaacattagtttccagtttttttcttgtgctgcttaccgaattttttcgttgtccgggcaccgctccacgagaatgtttccggcatgcagatcccggtgctcgaattcgagaacggcttcggcaattgccagggacaaggcgacctgatggaagatggagtaacattcggggccattttttatctgcgaaaaaaacaattttaatttttttctttttgaaggctaaccttaaacgcctccagatcttttcccccataggaaaggccaatgataacgaaatggagatcttcgtcggcataaatgtctggccgttcgttctccgacaattcgggctttgccttcttgaaggcatcccaagccttgagcaatttcggaggaaaacatcctaaacggaaagatgagttatgttttagcactacaaaacattttgatttagcataacaccccacaagccctaattaggaatgaaatttgaagggactctccattaaaaatacctttgacgatcttcctcatacgcaattgtgtgaatgatggcgtgacaaagtcactgccggtgtcctcggatagttctgtaagctgtttggtgatgaacagctcgttgaagatgaattttgctgtcttcaggtcgactccattgacgagcttcgaacactgctcctgcttgatcgcgaatggcatgaccttgaaaaatatttgataaaatatttgaaataatgcaaaaattatgagtaaaaccttcactgcgatggaatcaattttaaagacttctccaaatgccccctcgccaatttttgaccaattgtcgaaagaactaaaatgcgatgaacaatttttttacgcgatcatttttttggtcgtttgttaatttttcgaaatttctccataaatttgattttgtcattttttgtacatattttcacaacaattaccttgttgattgctccaaattggcccaagagacagctgctcgctggtcacagagtattaggagttcatcaaattctgaaaatttatggaatcattgcgcgaaaattttatattatgcattaaatttgcctcaaaatccagtctctatttataaaatgctattctataaattgttaaaaattagaattttttaacatttacctaaatttttaggttttttgcatttttgtgcctttttgaattttttcgtgattttggggatttcgttgaattttttaaattttgcggacttaaattcacagccttagtgattgccaaatctgagctaggacaaaaagacaaaactcaatgattaatttactacttgggaagttgctcaaatttatttttaatctaccttcttcacatga

SEQ ID NO: 683 - DNA, 2291 bp, Heterodera glycines
  unsure (1)..(2291): unsure at all n locations
acaaaaatgacttacgcaactgtccgacgttgcgttcattgtgtccagcagcctcttgggcgttttcggctttcccttgaccaccaattcaaagagttgggccattgttttgtcgtctttggcggtgcacttgagaaaaaacaaaaatatatatatttgtaaaaaattttataaaatattcaaaaatatgcatcattttttaaaattatttttcggttcacgttaaaaattaaaaagtttcaatttctcaaaattcccaagaaataattttaaaacatccgaatttgctcaccgtgtttttggagcgtggcggtgtcaaattcttgctacaactaaaaaataaaatgaattaaacttttttttttgttaaaccaaccactgaatgtcagtggcatcctttctggcacttctgcgcggctggcgacgacgggcggtggaggacaatggttggtctgatgagtctgaaacaatgcattattttaaaataatatatttgaattaaaaataaattttaaaattaaattatcattaaattaaaaatgtccgtggaaaatgtttaactgttttttgaactaattaaaaattacaaaaaatgaaacggtttaaattaaaattgaaaaagagacaagcggataatcgtttttgaactaaatgccgaactggtaaagaaagttttttatctaagattttccatccaaactcatatcttacccaaggatggtccgatgccatgtacagacgaaggttgtgccgttttaggagttcggatttgcgtggcgtccttttccttttcgttggcacgctgcgatttcaacggcacaacactgggcttctgcacagacacttctttgctggaaatttttatgccatatttaaatgaaaattaattttaaaaaatagtaatattttgagggctcctggaaaatgcgtcagtggaaaaggtgccagtaatacagtatttttataataaagttactactgtagcattaagtattgcattacaaaaggtcgaaattgcactgattcactgacgcattttcctttcacgatttttatttaatcgaaaaaaattgaattgtcaataattttcttttgccatgtctttaaatttgtgtcaccatcaaaaaaagaagaggcactaatttttttttttgaaatttctctgctgactttatcacaatggtcgggcaagcgccagccgtctcctcgatgttgatgggcaacgtgtgcaacgacggtggactgcgtccgtgcgagttgagcgcaatgacacggaattcttcaaaaagaaatttttgaaaaaaatttttttttttacctactaacaaattaaataataaaaaaatttaatgattcatcataaaattttagaaaaatcgcatgaaaatttttgaaggggggggggacgacgcgggagaaagtgaagtacacatttaaaaacaattaccgtaggcctggaactcgcgcaacccgggcaccaaaaactcggtcaatggacactaaaattttaacgaaattgtaattaaaataaaaaaatctttttattgggacccattaaaatattctttgtgactattgtatatggaaataccgtaccatatccggtgttgccatctcccattgttcgtgaccccattctcgcttctgcacaaggtagccctccagtttgcagccaccgtcctcagctggcggttgccaagtgagcgtcacacaattaggacctgagtttttgtaaaaaatcaaaaatattatttttggcgttccgtctctaccaatggattgcgcgtggacttgaattggcattcccggcggaccatagcgttgtcgcaatttgattcggtcggattggggcgacggtttgctccaacccgccgcattctttgccgcaacgcggaacacgtactcgccccggtcgctcagattttgcactttgaaatttgttgaccaggtcgcggattttttgcatgtaacctaaagaaaaaaaaaaaaaaaaaattaaattttgaattttcacaaaaacggggcaatttttttaggatattcaacgcataatcctaatgctatgaaaattttctttgtattttttataaaaattttcgtttttttctaaatttttttttaaatttcgggtgtgggaagcgagctgctcacttcgagaaaaaaaactcaacaataattacaatacacaccaaatactccataaactcacccattcgttcgaatgttggtccttgtgctgtagttcgtagccacgaatttttgccccgccgntggatgccggcagctcccac

SEQ ID NO: 684 - DNA, 9377 bp, Heterodera glycines
cactaatttcgaaaaattttgactttcgattttttgttcgagttggggtccggggttcgcaattgaagaatgattttcttgtagaagtttacttctatattacaatactaatgccatagaattttattttaaaatatttgcatcactgacgcattttctactgacgcattttccactgacgcattttccactgaccgattttccggtcacggggattttggaagaatgccaaacaaaaaaacaaagcaatgagcggtaccagcgaagaacttctcccttcttacctggacgagtttcaatggcggcagctttatggaaagaaaacagtggaggccttcgataacatcctggcccaaattgcccatttttatcctgtggataattgatcaatctttttattgccatgcaaaaacgagttatgattcataaccaatttttttttttgaatgagctattgagtgcttggactttttcgtatatgatttttttaaatttaattattgatcgtatgaggcggggatctgaggttcgaatccgcttggctgcggattattttttatgacattgatgaaaaatcatagactaaatgaaggttcatgcataatctgaactcagatagtgcagtttgtccccccccctttttttcaaaattttttttttatgttttcaaaagtacataaaaacccttttctatggggatttcggcatcaatgattctgaattcggaccctgtaactataacgaaactgtaattaaaatagaaaaatctttttattgcgacccattaaaatattctttgtgactattgtatatggaaataccgtaccatatccggtgttgccatctcccattgttcgtgaccccattctcgcttctgcacaaggtagccctccagtttgcagccaccgtcctcagctggcggttgccaagtgagcgtcacacaattgggacctgagtttttgtaaaaaatcaaaaatattatttttggcgttccgcctctaccaatggattgcgcgtggacttgaattggcattcccggcggaccatagcgttgtcgcaatttgattcggtcggattggggtgacggtttgctccaacccgccgcattctttgccgcaacgcggaacacgtactcgccccggtcgctcagattttgcactttgaaatttgttgaccaggtcgcggattttttgcatgtaacctaaagaaaaaaaaaaaaaaattaaattttgaattttcacaaaaacggggcaatttttttaggatattcaacgcataatcctaatgatcagcagtgatacaatcaatatccaataataactggaattttctaatcgaattttcatatgttttgattaaaaggctatgaaaattttctttgtattttttataaaaattttcgtttttttctaaatttttttttttaatttcgggtgtgggaagcgagctgctcacttcgagaaaaaaaactcaacaataattacaatacacaccaaatactccataaactcacccattcgttcgaatgttggtccttgtgctgtagttcgtagccacgaatttttgccccgccgttggatgccggcagctcccactccaattcggcccatgttcggccaaagttgcgcaccacgggtttgtccggctggcttggcaccgagtacttgacaaccggctcaggcaacacctgtgttttaagcgagtaaattataattttttatttttaaaatgtctatttttggaaaatttataaatagggcggggattttttatttatttatttatgtttttccttaagaaaagcacgaaaaacataatttttagccgacaaatgtttcgtttaacaacttcaatataaatttggagctttcttaaataaaatatttagaacaatatttttaaccttattttaatcaattttttataaaaatattttgtaagaacaaaatacagtaaagacgaaaaatactccgttaaaattgctttctgaaaaaaattcaaagttcattcctaattgttttgcaaatatgtccctttctaattttaagtttaaaaatttaaaaaaaatttacggcgggggggggggagggaatgaaacgagggggagggggacgaacggctctgtttttccccaccttgaatcgtgtgtccggcacattgccaaatggggtcttctcccacggcgcgttgggcgctttggccagcagcggttcgtccacgtcgagcggctcgcccacgccaaactggttctcggcacgcacacggaatttgtagcgctcgccgctggtcagcctgcgcactcgcagcgacatgccagctggtgcaccgacgcgctcccagtcaccgccacgtgctgacttgcgctccaccacataattggtcagtggcgaaccgccgtcatccttgggctgactccagtgcagtgtgcacgcgtccgcggcaagctcggagaaccggatgggcccgcccggcttgccgggcacgtccagcacgttcacgttcagcttggcactgtctttgccgtgccgattctgtgccaccactttgtacggtccggcatcgctgtgttttgtgtcacgcatggtgaacacaattttgtcgtcctccacttcaatggtggtgcgttcatcaaaaattgtcttgccgttgttcaacacgtccacattcggcttcagccctcccgagctgtacggcaacgtgaaggtgatggtttcgtcggcacgcactgtaattttggcagattttttaaattgacaatttttaattttatataaaaaataaaatgacaaaaataaaggaatgtaaattaggaaccgaaatggtaattactaattagtccatgttttaatgcgttgcgctttttcaaaaattttgaaatgggatatttgcaaaaaaaaattctctaaatctaaaattaagcaaaaatcttagaagtaagcgaatttttaatttttaagaatcggagactcaaaagaaacaagtaagaaataagcattaagcacaattacaaacaccgaattggacaaattaccactttaaaaattcagttcaacttttaacactaattattaattataagcaatgcatgcgccacctgtgatgtctttcaggttggacaggtcgaacacgggacggcctggctggtcagtggtgaacacgaggtcggacgacttggacggttcgccctcgcccgccttgttgacggcacggacgcggaactcgaactgttccttctccggcagacattcgaccgtgcagtgtgtgtcgcgcactgttttggcacgcgggatgccgatgttggcacgagaccagtgattgtcgcccattttgcgttgttcaactacatagccatcaattcgcgcaccgccgtcatgcagcggacgaatccagctcaggtccaccgtgtgcttggtgacgttgccaacgcgcggcttctccggcgcgcccggcgggctgacaaacggacggcattgctgatgctggagaaaatgtttattaatattaaatgaattaatagtttattaattaaatgttatttaataaattttaaaacaaaaaaaaatccaaacattttaattataaaaattaaataaatttgaattaatccaataaaatgaatagcaaattgcactcaaattttcaaaatttccccaaggacgcctgcctattggcaccatcggacctcgcccccgtccccctcgtccaaaaaagtttttgaagaaaaacacaaaaatagacttaaaaagtaaattaaaaaagtcaataaacatggtcgaacccacccccccccattgcaaaattttcgtttgacccctccccccgctccccctcaaatttatacccaccacattcgccgctatttcgtcacgcagctgcttattctcctgctcctcctcactgctgtccacccattcgtcttcctccacgtccgatgcttcgagttcgaactgctccgcattggcgcgcagaagtgccttaattttatggatttattaaattagtgatattttgaccaaaatttatattttatttttttcgaaaaagtttgtttttctaatttaattagaaaaaatgtaatttatctgactcaagcccggtttgacttaaatttttttgtacaaatcaataaaacaattaaattataatgtgtttttatttaatttatgacaaatatattaaaaaatcattatttaaaaaatataaatataaaaatatttgcaatttaattctgcaatatatttattaataaaaaatattaatttaataattaaaaaagatttctcttgaattttgaagttaattaaagcattaaaaacataattcttttatttactagtaaaaaataacataaataaatattcgcatttaaattctgcgaaatttttttaattttgaattaattcataagtagcatattatttttaatcttgataagacattttttgttaaaaatttttttagaaaatttaacatggtcgaacccctccccccaaaattatcgtttgacccccccccccccttcaaatttattcctaccacatttgccgctatctcgtcacgcagctgctcatcatcttccacatcgatgtcattgtcgtccacttcgcattcagaagtggcattttcgttttcattggcactctgcgatttcaacgtctcaacaaagtcacggggctcctccaccacagacacttggcatttgctggaaaattttgtaccataatttaaatgaaaattaattttaaaaatttgtactatttttggctcgtggcaaatgcgtcagtggaaaaggtgtcagtaataaaataaagttactgtaacattaaagtattgtattacaaaaggtgaaaattgtctaataattttgttgtttttttcaattaagtttttaaatgtcaaaataattgaaactttccaaaatccctaaaaaataagtaatgatttcaagtaatattactaccgtatctcaatttaaagaaatactgattcactgacgcattttccactgccccaatttccgttcatgatttttatttaatcgaaaaattgaattgaaatttcagtcaaattaaaaagaaaattagtgaaatgcaaaatttggcaacgattttttggcaccattccaaaatttagtgcaaaattttcaaaaatatcttatatttttgaaaatttctcactttgttgtggccggataagtgatcgggccctctggggggccgggccggtccacgtcggtgttcaatgggtcggaacggccaaacgcattttcggcacacacgcggaactgtaaaataataaattaattaaaaatttcgaaattttaaggctttttcaggaaaacatagccgacattcggtttctagacaattttgaatttaaataaagccaaaactcggtagaattaaaaaaataatgcgccaaattaattttttgttttcgatggcatgccacattttagcaaatatttttctttcaaataatctgctccatggctttttctgaaatttctcataaataggaggagtgtcaagcatttggcgatgagcaatttttggccaaaaatgcaacaagtgcaaaaattgtataaattaaaaaaatattatttaaaaattaacattaaaaaaaattattttaccgctttgacacggaaattaaaaaaagcttaagaaaattttcaaaaaggtaaatataccatttattcaaacaatttatttaataataacaattgctttatttttctattaaaaaaaagttttgagactgcttttaagcataggcgcaaatatcagaggcgcaataaatattattatttaggtttgtcaattaattaaaaaactttaaaaaatattagaacacagaaattaccagttttttgtcggtaccgtttgaaaattttagtgtcggatattttttataaaaattaattccgaattcaattttattaaatttttgtgtttttttgtccattaaaaaattattcgtttatgcacgtatagtcatggtcatgggagccggtgataattccaaacaaccgataaggttttgcttaaaaagacgaacgacaatgttttcattactgaaaatcgttttattttgtgaaaatattcaaaaataaggacatttacaaaaaagataaaattttgtttattttttcgtttgatatttttcccttttgaaataagtacaaaacaaaacaaaatttgcgcctcgtttttcacccacctcgtctgggtccggcgagccagcaaacacctcgtcgtcaaagtcaattctgatcggcgtcacattgacatgacaggcactaaacaaataaagaatttgtttttaaaggaaacagccaaaaatgttaactgttcagatcactttaaacccttttttatcatgaagagcaattggatttgctattcctaaattttcagctatttttaatcttgacctcctaactgatcagaaataatcgatcaaatgagaatcttgcaaaaatacgttaattttatgagatttttcaactaatattttaatgcccattgtcattggtttggatcatctcaacagctaatgaattattttttatttttcctttattaatttggaatttttatgaatatggaatttaccactgaaatcaaattgctatacacagtaaaaagtgattttagaattaactgagcaaaacaaggaaaatttattaccggtgtttgtcaaatgtgtccttcaagtcacagccataattgcaatgttggctgaatatttatacaaataaaaaaagataaaaagaatcaaaatatttttaccatttgtatctcccattgtacccatgattgcgagaatggcttgccaggtacaaaggacgagcaaatgcatctgggcattctttgcacttgtatggctttaaataaataatagaaaagggtactttttcgttatgccataccccccccccataaaaatgtcataatcccgagaaagaaaacacatttgtatggtaattttaggtgttaatcaataatctgaagttaaagccgtacaaatctatgaatttgttgatgttattacaaaatccacaaaaagcactgatgagggtgagaataatttttttttaaatcatcaacaaaatcatatgaagaaaatcatagataacagtatagattttgcaattttgagttagactcctgatcagcacccaaaactaccattgaaaaagctttcctttgttcgtatcatgatatttttttcggggggggggcgggcgggtgaagcaaaaaaaggaagcagttatttgggaggacaccaatcggaaaatttggactccagtaaattggacaccaattcaaaaaagtgcaagaacctaaaattcaaaaataatggatatttctattacaaaaaataattttcattctaaaatctaaaaagttaaatgaaaaaatgcatcaataatcaattgtttaaagtcattgcttaaaattttgtgacaaaaattaattttattttctatttttgaaaataaaaaaagtaaaatcttttaatttttttaaatatctaatgattttttttttgttccacagcttaccaattcggccggcttgtccaattcggcctgcttctcctccttgagctgttgccttcttaggtaacgttgtgcactgctgtccgatgtgcctcttttgtgcccgcgctgctcaagcagctgaagaagcgtgtggtcttcatccttaatttattgtctaattattatatttatttttttggtgaatttttaattataattatttaatcaaaaaaacacctcaaagctacggaagcctgcctgatttaggctttttgttcgtcgccactcccgccttttctcctccgtctcctggtcaggggataagggatggataaataatattttaaatttaataatatactaaagatgaaagtctatacgatttatacccgatgaggtatgggcacttcgatttcagtgtctacaaaaagtactgtatttcttctgaagatatcgcattttatagtagaaattatcagcatcaaaactgaagtgcccatatccctgcaggtaaaagttgtagagttgttgtcttttgcatcttgtagagcattttgtgctcttttcaatgtaactacttaaaatgtctaaaaaatcccccccccccccgttgaaccaaaatcggctcctccggtggttttccgcctcgccgcatttcaccaccaccgccggaggttgtttcgaaacgataattgaatagaaaaggaacaagtgggccaagtgccgaatttgttggtgctgctgctcgaagccaaatttgggaaactctgtgatcagaaagccgagtccgctgagagtttgctccaacagttcgccaaagtattcaaaccttacagtaatggccaaaaggcgaattattgaaattgggaaacttaacagcaaaagcaaagcggcattttcaatcggctaagatgactccttgcatatttataattttttttcttaaattaattcaatgccgatcttttgctctgcggatcagtctctccctactgaaggtcgatggagctgagcagggcgtagttcatctgctgagtcctgaaattggccgaatgccttctttctcctccccccttttttttgccaaatttccaattcctttcgattgttaccaatgagttgccaccgacaatttctgttgttggactgcccagctgcacaacacttcgctcatctatggttatccgtctttcttttgtctgtccctcccattaaattcgtccttttaccaaatattgcttctccgcttccatcgcaatggccaaatgttctccggtggccaatatccgtgcgaccaattcgttctgtgccccggcaccaatttgtcccgaaaagagaatgtcgacgtcatctttgaacgattggtacacttcggcagtgacattgtgccgttgcacaaattcggcaggcaattgaaaagcgacagggcctaagcggtgaataagccattgaaaggaatgccaatgggaaaagacagtcggactttgcggcgtttgggcggacggagcgggcgaaactttggcatgggaaaaagcgaacgaatcgctggcggacgggggaccgccgccgatgtccatgggttggtgggcaaaataatcggccacagaagcgggcggatgaagctgatggacggaggaggacggattatgaaacatcggctggaaagggaacagacgaaaaatattttggaaagggaaacttcggtcggagagttttgcgtgaataattgccgggaataacccctggggcgaaagaatgcgaaaattggaaaagttgataaaattgattggagatgagtcgcgcgacggaaggcgagggcaggcgaaaa

SEQ ID NO: 685 - DNA, 1730 bp, Heterodera glycines
tgaaaagtttcattgaaaatggtaacaatttgaaaaaaacaaaattaataaaacagccataaatttgtatagatttgcaccaaaaatcagtttagttaaatttggattaaaaataatgactgaaggatatgcattataaatgttaaattaaacacaaaatctcaatatatccgcatttgatggatctatgcaaaaatttcgcgaattgctgcacccgcattaagaggtgtagtgatgatagtgacgaggccgggcattctgaaaactagggttgctcaccgtccccgagctccccggtccccgaccccgatccccgacatttttgggcctattccccgccccgacccccgacatgtcgctccccgaggtccccagcccccgactttttgccccccgactccccgacactaattcggggaattggggactccgagctttgcaaaaatttaaaaagttaattcaaaacgaaggggggaaaggttgaaaatttatgaaattttgaagaatctccttaatattaattaattaaaaattccgaaaaacttttcggcgaagcttatggcaccgccggcccccaaaaactcaaatttttttttgcaaagaattgtcccaaaattgcaaaaattggtattttttaggaaatgtaacaaattgcaaattttcaaaaaaaaatttcctcgcggctcctaacaccaccgccgctcatcccctctttgttccccaaattttttatttgaaaaagagcgccgcaaaaaatggtggtcaaattccgtgctgggacatttcgtaaaattcgccaccttgggcgtttcgtaaaattcgacatttttgcaatttttacaattaaaaaatctaatctgttcacatttattccgattgatttattcaattaataaaattattttcactttaaaaataacaagaaatatcttattaaaaatgttgccaagaagatcaatcccgattcggtcgtcaattacttatgtagtaatttgagttaattttgttaattttatagatatgaactatggccctgaacaccaaaatttaatatattaatttgattttttagttattgattaaaaaattctctacttttttaaaaacttatttaattctggtcagcactttggaacaaaagaataaatatctaaatccgccatcaaaggtatattaaaattaaaagatgattaaaattataaatttttttaatttgagcaaatatgttagtcgagatttctctagttgtttgtcaagaaaattaattgggcgtttcgtaaaatccgccattttagcgaatttattttacattcttggtaccattcgatagccaagctttttctctattagcctgccaaattcaaactcatgtaattggagtcgttcgctgccgcaacaattttgaaaatggcattcattttggaaaaatgcgcatcgattctttgctgtgcagttttgctcgctgttatcatttgtttttccaacaaaaatttgtacaacatttgtataaatgcgatgattttaccgtataaacacagtaatttttcgtgtgaagatattaaaattaaataaaaaattattatattatttatgaatgaatttttgtaacatgatgttcatttactattttaggactaaagcacagtttggagatgtgcccaataaaataggagtcgaaagatcgccatattaccgaatggtaggccggttttcgggatcgggctatgggg

SEQ ID NO: 686 - DNA, 1449 bp, Heterodera glycines
tgatggacgtggacaatggacccggacgcagcaataccggacgtgggctcaagagtaccggacgtggccaatgacccggacgtggaacgagataatggacacgcagcgggtacgaaccatcaagaaccaaatgatcttgatagttcttttgattatttttctgattgattattttttaatttgttttactgatttttgctttttggcttttctattaataaatttttgtctgaaaaattttatgtgtaattcttagtttactttagttttaagtgcggcacctttttaacaattcgttccttgctcatccattaatttaacgtgatagaaaattgccaaataattagttgatagatatttatctaaaagttttgaagttaattgcattacctcggcgccgccggggggaattttgaaaattttagtgtaatttgctaacagattttcaaaaaaaaaggctggtttttgggattactaggctcaatttgtacggattttctttaaaaaaatgataaaatacaattaaaaaaattaagaatcatattctgtcgataggaaagccatgagtatacaaaaagaaaattcaaaataatttaattcctgcagaggattgaaccaggggaaagaagaagggaaagacaaggcgactagccgctaagccatccgcacaattgcctgaatttttaaagaatatattaatatatttttaaaattttttccttttaactccaattttcttcactaatttttcactcagacccccattcttaccagtgcttgtttttcccggttcccggttgccctaccgggaccgggacctgagcttttcaaattccgggaacctggaccgggacctcgaatgaccgggaattcccggcccggtcccggtcccggtcccgtggcactctaataaaaagtgaaaaatatgcacataaaattttccaaattaagcgtaaaatctctcaaaagttcttccaattcgttaaatttaagctaaaatagctaaatatggtataaaaaatcatttttaagaaaaaatacaaaataaagcatttatttattaattttggcgaaaattgaataaaaatcgaaaatttccgttttttaacttatttttgaaataaattaacaaattttaagaaaatttaaatttaatcattatttcgacaaaattttgctaaaaaatgtctttttcggaaattttttcggtctttaggagtcaaaaaggctaatttacctcatgggggccgttttaataggggttttttggaaaaatgcccaaatatgcacataaaatatgcatgaaatgccaaaatatgcacaaatatgcaaataaatcgcgaaatatgcacaaatatgcaaaatatgcatatggaaatacgtcctagacgcttcaaaccaagctaaaaagatgtttttcgtccgtttcaggcctgccgcagtccagga

SEQ ID NO: 687 - DNA, 1475 bp, Heterodera glycines
agtgaccgatgttttttcaagttttcaaaaacagattaaataaatttaaaaacacattattattatttattagatatttttagatgcttctacgcaaataattaattttttcaaacatttttttgatttttaaaataaatttcaaaaaatccaggtccaggcctggatccaggtctcgatgagcctggatttttcctggacctggattttcctggatttttgtccaggaaatccaggtccaacatggaatccaggtccagatccaggtccaggcttttttcaaaatgtcgatctctaatagtaacgtttatttaccgccgcccattttccgagaattttttatcttccaagtcatgaaaacatgtttccagtggttttcggggtcgctgacctcgacgtcacccatttcgaccaattccgaatcccggacccgaattggaataaaaagttaaaaaacaaagttttcgctgatttttgcgtatttttcacttctttgtatccaaaagcaccactttcatacccaactcaatccttcccatggctggctctacgcctttgaagcttagaattttgaaacttacaacaggaagacttccaattcgtgcccaatcgtccaccccggacagttgcttaacaaatgcctcataacgggcaattcttggattgtcaaaccatccgttccagtttatgcgaaagtaacgcgggtatttttcgagccaaacgatattttcagcgtgcatttttatctaaaaaagaactaggaaatacttagcacgaatgataagccagaaatgcgaccagtatttggtgtttggggctttgcgggtacccttcaatgggttttttgtttttaattatgtacattatttcctaagaaaggggtatgtatccataggtgctgggtcgatatcaaaatcatcaaaaaggggttacacaaaaatcattaaatgggaaatttaaaaaaaaaaagtttcataatctgcctctttagaaaaaaaactattttcaccttttttggcgttttgctaatattattacaaaatgcaataaaacgaaaaaacaaccctaacaaacaaaaattgaccaaaatctttttcaaaaatacatccccctaataaatgaaaatttttaaatttttcttttcaaaaagtcgttaaaacatatttatgggggttttctgggccgctgatcacgaatatgacattaattttcactaatttcgaatcccggacccgaattcgaacaaagtcgaaattcaaaattctcacaacaaaaattggttttgatttttcgacattttgtccgaattcgggtccgagattcggaactgaccaacactaaggtcatattcgtggttagcaaccctgaaaactcaaaaaaacatgttttcaagttatccttatatgaaaatttttttattaaaaattatgttacatgatgaaaaatcatagacaaaatcaatgattttgtaaaat

SEQ ID NO: 688 - DNA, 6372 bp, Heterodera glycines
ggttcaaccgggatactcccataaaaaattttcaagaatttaatcattcacttcctacaaatccaaatttattgttctaactctgttgaaagctaaaatcgcaaaatctggccattttttggacaaaatctgtttacaaatcgaatttaaatttttaaaaatttttcccacggcgcctttcggaaaataccaccataggtcatagactaagaattgtataaaacactcttataagttttcttaaacaattttgaaaaacaggtcatcgtcaaattcggtgttaaggtacttcaaaaatcggagctgatccccccccccccccgttaccaaaaatttcggttgaccccacccctttccatgtatgttgtaaaggacaacttggatgcactcttactggcgctaatgaacgagtttgaattagttgactaaagcgaaaaaagaaaatttacgagcatttaaaagaagaattagggctttcgttaaaaaatttgttgatcactacccgatcggaatccccgacccccgacattttgccccccggggggtcggggagcaacccttagtccctctcccgcccccccccccccacatttctcaatcgtccgtcgatggcccttggcctgagacacctcttatgcagtatgctttataaaaaaatcaaaaatttaattattgaaattgtttattccaaaaatactatctgattgctatcgaaaccaccgaaaaatattttatttataattaaaactttttcatgaaatttctttataacttccctttattcctctttccctcccgttcctctgcttttacttgattttttaaaattgaattttttttttcaaataaggggataaactaaagcattaccctattccttatatcaaaaatcaaagtttcacttgggaaagataagtttcttttagcttatttttatagaggattggttaggtccaatggcgccgacccgggcaaaatgagccaatagatccaaggtactactgtacttgttgtcttactgacagtatgaccggcttacaaaaagtgccacattgttgcactttcctttttatcaactggcagagttagggcccatagaatgagtaaattgggtggctgacgttacaaaagtgcatttcaagcccaattccttggcccaaaaatggcacggcatacctcttgccattttaagacacgtggcagcaaaagtttgtgcagcagccaacaggacgagagcgcattcggtgtggcattttcggcagggatgagaggcacaatttcgaacaaaagttcgagcggaaggcatttgggggccattgttgggagaagcatagttttgttatttggggtaattagtgagcaattagctgattagcattgaacaaaaaccgccgtcgtcacattggcactttgaacttggtttggcccgtttcgtctcgccagtaacagtagcagcagcagaaggaatggccgtttcttctctcctttccgtttgctttatctcttctgcgttgtctgccttttcctcttcactctctatctctatctctcaccttctctctctctctctcctttttattttctctatgccttgcgttgcgttcgtcctttcacaatgattcggtcgcttttcgtcgtaccccgaggggttttgcgtagaactgtctcgtttttctgcttccacttctaacgtgcacacttttgtctttgcttctctgttctcgctttttctctcctgtggcaacactctctgcgttctctcgcctttccttgcgttgcctgtctctgcgttctctatctctctcgctctctttcacttcttcgttttgaataggacagagaaatgaatccaacttttgtttttatatgtatttgtatagtttggcttttcctaaaattaatttgtgaacgattctcaaaaatacaaaattttattggtaatttaaggcagttagggtctcctcatttacaaggagttcagaacagttaagcaccagcagcagcagaggaaaaatgaacaatcatcgatttgcaattgtacaaatgataaaatggcattttgtgagagaattatataatgtcaaaatggcatttcatccatatcattagcgtacaatataattttggtcgccattttcatatttgtacactccgccgatggacaattaatcctccccatttttgctcactgatcaactgctgctgcagatcaattagcgcaaacaataaatattaattatatttattaatttaattcaacttcttccgctgattaatgtccaagcactttcacattcactaattatgtgcatttttacatagaaaaccttttttaccttttatatttttaacttttcatttttctaaaatttcaataatattgaaaaatttgattaaaattttctgggaatttaattaaaaaaaagaggaggatcctataaattttatcaattctcatctttatttcgggttggcaactcttatgcagtttaatcctcccccagaaatttgttgcccaaatttttcgtttgatttaaatccataatgcccatgttttcagttcgccgatcatgaatccatcatccacttaggcctatttcgaacctgggacccgaattcggacaaaaattcagatttttaaacccaattcatggtaactgtgctgtgtatttctaggccgaaaccaaaagcaccaacataatttttttataagtaagggtttggaacttaagttgtgaaagccattaaaaaagtcaattgataatgattaaaaagtcacgaaaaagtcaaataggcatattagaaagttcaaaccaagggcgtagccagtagagaatggcaaatcaacctttttattagtttttgcggggtatcaatttaaatgttgatatttaattatatcaactaacattatgccatcaacgcaaatatcaacgtaatttttaaaatttgcgaaaattttttaaaatttatatgagcggtttataattttagtgcgagagataacgcaaaaatgagagagtgctggatctcagtcccagtcatacaaaacatttttaatgaaggaggtagagaaaacaatttcaatagagagcgcaatgggaagggagttcatgtctcttcttcgctgattcttttggtaagagacgcagattcctcgctatgttctctattctctctctgtcttaaatctcttcccataacactctctttttaattaatttttctttattcttctttaccaaaaatgcttttgtatgactggggcctgggtcttaaattacgaaaatccgtaattacggtggtcaaaaaacccgtagtttccgcaatccgtaattacgcccagccccctggatttgtgagagaacaaaaaatgcaaaatttcttttcatttttttgttcatttccaattctcttccttctcctcctcttcttctccttccttccgcttcttcttcttcttcctcctcctcctccgactgttcgattctctcctcctttttcgtcccatttcttctcctttgttctgttggcacaaaaaaggcttttaaaaaatgtttataatttggatttacgcagcgacaaatcaatttaatttgtatcccaaatttttctctacggcgcttttcggcgcctaacccttttaataagcatgccaaagcaatccaaacacagctcgttcacacctaccggcccttactaccttttccagcgcttttgcggccattggcgccgtttcggcaccgtcgccacttttttccgcctcgccgctgcacacaaattccaccagtcgtggcatttgtttctgctcgtggtacttcttgatgtgctccaggcctgtgatgtgaatgagggatttttgatctcgacaatttggttgtactgcttcgagagggccacaaaaagcccgtccaattaatttcataagggagcagcagcaacaggggttttcttgaaatcactgtccaaaaaattctaaattcaaaaccctgatcggtctcccgaccagggttttcaattatggaaagccgtaatacgtgattacgcgagtttttaaacctccgtaattacggaaacccgtaattgcatgcagccctgggtccgaccgatctaattcggctccttctgatcacaaaatccatttcgctcgggttccgatcaatcttgcctaggggacttaggcaccggacattttgctgacttatctctaaccatgactcagaaacacagcggccaaatcttttgttttggccacgtcattgacattaccgaagttaatattcggatggcgtaaaaaatcggacggcgtttgattttctttaaatatttcattttgattcaccgggagggaaattcactacctcgttgtcccatgttttgcccacaaaaagtactgcttgctgtctgtttcctgttactgacttccaatgaacgttccgcagatgaacaggaatggcatttcccgatgggcggtcagtttggccaaatttgcctccaccgcggccaaccgaccgattttgtcggcataaaaagtgaccagcgggaggccgtagccgtcgcggagcagcacctccagctggcgagagtcggatttgcgcgagtcagcgtagaggacggccggcagacggcggatcttcgcaaaatgcaaaattagccggattggggagagaaagagaggagagagagagaaaagagagagagagaagagagagagagaacaagattttgacataattgagattgatttgaactcgagactgatcgagaaaaagtgagagcaaagaaataaggagagaatgagagtgagagagaaacaagagagagagaagaggaaagatgagagcgagagagaaagagggaaaatggagagagagatatagagcgagaaagaaatggctttacatgaataaactgatagagaaaaaggggaagtgtgcttccacaaattaatcccgtacgcactgccaatcaatcgtcataccgtatggtacagtacctgctgtgacaatgcttggagggatgttgtacttttctggatgggcggcgtcttctcctccagcatttcaccgtgggttgttgccgttgtcggcgtcgtcatttttggcatttccattgtcgctatcgtcattattggcatttcaattgtttccgtcgtcatcattggcattggctgtgttggcattctgttgatgggtgtcgccgccgtcgtttgttgctgagtggctaatagcgcgagaagcagcgactgctccagcaactgctgctgcaggttgttgttgtccatccttctgaacaggttttttgccaaaattgaaggatttttgaactattaaaaggattttcctgaattttcattaaaaaatccgaaatcctggccaaaactagggtccccgctgctcgtccgtcacccacccgtcactgttcgccgccgcttctcctcccctccatttgttgtcggcatttgccaatgatcagcattgccctgctgctgcactacggcattttgttgtgccaccattagtggtggtgttggcttttgatgttgccgccatggtcgaccaccgtcagctgcagcagaagtgccaccaccgacagaaaagggaccaccgtcataaccggagacggcaccattgaagcttaagtgaaatgcgatggaggggcaggggtcattaaggtggattaaggctcaaagcgcaaggctaattggtttaatgcactaaatccatgcctcagcgcagggcagcgatgcggacggaaaagtgccgaaagacgcggaaaaaggggagggcggtatggcaaaaagtgatggcacgaaaggacactcgcgaacacaattacaatcagctggtgaaaatggaccgcagagaaatgagacgcgacgcgccatttttggttaacgaattttttgaaataggataacagagaatatttagacctattgaatgagaaattttgggaatgattgactcggattcgaaaaggatcaaaatggatgccagaatcggattctccgaccctgaaaccccataaaaataaaaaaaatttcgaaaagggtggctaccatcagaatattaccaaaaaatgaaatcgaaaataataagcccattcgttttttgttttgttcaagtatttcaggagtttagcggtttatgcgaacggagggcgtagccaaaccttggcttcgggggcggcggttgactaacccaccccagaagagcgacgaattgaccgtttgcccttcgtccacttatgtttcgccacaattttaagtaatttttgaatggtagggggtgaattttggccgcgttcaacaattttcttttcataaaaatagagcgaacatgagcaaaaaaaaatttttttttttttttg

SEQ ID NO: 689 - DNA, 1699 bp, Heterodera glycines
tccaagaaagttacaaacgaaaataatcagcaattacttaattaatcaactcttttttggtaattgcctgaacgctgcgattttatatattttagcttcgttagactttgtgctttcgaatgataccaaaaagatagggtttgttcgaacataacaaagttattgtataaaaacccgggattgtcaattgattggactcataaagtgcattagagccaccaaaggggggaaataaaaaaactttcagaaaaaaatgatcaacaatttgaccctaaattttccccggcagggtcccaattttcttatgtttttgccaatatctgatctaaaatggccaaaatttggggaaattacactggaagaaatgttttgggccggaagagcaaacaaaagaaaaagctcttgggtgcccctcccccgaaggttacgggcctgaaagggggcgggagacagaccacgtcaaagaatagcaccaagtcgggccggatcagtccgacctcagaatggcacgcccattccatggacattcctttggccaatgagtaggcaatgcccgaatagctgtacctgaacagacagcagatttttgaaaaatttacgttgagttttggcacaaaatgttttttttttgcaatttcataaagttttcccgtctttaccattgcttctccgattttttggccgaatattttaagaaattgacccctcccttgtccacctatggcccccctcccctgaagccatgggtctggctattttaaattatggctggaatttgttcgaactatctcctgtcgttctccccctcccccctccgaatttcgttccaaatttctctcctccgccgctgcctcggctcacctgtccacgatcaaattccatccttcggccaattcctcgaccatttggtgtatcattagccaacgattggccgcgaataacaaatggatggcttctcggctttcctccgcacttatgacgattctatatggctgtgctacctgcgggaagaacttttgcaaaatttggctggttggtttagagccgtcttcttttctggaatggatcgaaaaagaattgccattttttgatttgacaattaaaagagcttatttaaaattcaatcagacgacgaatgaaaagagtgagaaaaggccactaaatttgactggaattgaagaaacttttgaacaattaaaattcgaattagtttcactcattttgagtgcccaaaaattgcgggaattgactaatgaaatggcagaaaaaatcaattaacagaaacaacaaatggcttattgaaaatagaaatttgatttgatgctttttcataaagaaaatcaataaatttgtatattaaaaaagaaaaaaatttgaaaaataaaaaaatattcaaaaattttatcagaaataacaatttagcggaccagtttttattaatgctttttttacattaacaatttttgcacttatttaaaaagcatatgggtccatccctgatctgcatatacatatacatacataaaagaagcgattatatatttatgggaaaaatgaacgtaagagcaaataaaagcgtggcggtgctgtataagaaaaggattggccaacattagtagtgacccctgtacgcgtgttacaatttttggcgctaaattcaaatttgaattttcgcgtcgatacactgtggggagggacg

SEQ ID NO: 690 - DNA, 1655 bp, Heterodera glycines
ggatttccatttccacgtcttcaacaagtaaactacaataggctttaataacagcacagaaaatatggagacattgcctaacaataattcggacggtgtttctgctctatcgctctgtttcctttttctctcatcggccctctttgtccgtccgtctaccaatggtacaaagcgtgtcggaaacgcgtgtccgcgccggtcacaactcggagggtcaagaaaaagccgacgatgaaaatgacgagatagcgccaaatcattgtcaaagggttgccgaactcgggccccgagaagtagaagtactgaagcttgtagaagttgcgcataaattcgcgccaaatggcacgcggagatttgtcacgacgggcgatgtacgcggccaagtcattgactttgacttccattagcggaatgtcatctgaatggaatggtaatactgctaatattttcgagtcaattaatccacggggtaaagttgacgattattggaaggaaaagtaaattaacaatgaactagaggaaatgattagcacaatgttcttaacgaaataaaggtttcaaactcactgtttgttccgtagtaacgataatgaacatatgggccgtggacacgcgggttccattctcgcgggtaaagaccaaaagtggttcgggcgatgaaattgttgtaagtgtatacgcccaaacgctgaaatgctcgaccaattggctttagaattctaaaatggaagaaggtaaaaagttatttaaaattgaattgaaaaacatacaaagcatagggaaaccaaggctcaataaaagtgtcatgaggcggcggcttcagccaaactttggtcacattcttttgaaaaaaatttttaacaggcttcacaatcatatggatgaacagaagcaaatgatgatgctgaactaaaaagaacgattgagagcaaataaattaaggcaaattttcaaaaagaaaccgaaaaaagggaaaataatcgctaaaaagtttcaaatttaggggtgtaaaattacaaaagttgttcaaaaaaattaaccaaatcagtatgagataaataatttttaaaatcaaagtttatcgtcaagaaagtaaataggtaggtaaataatttttggagatgaatttttgataaatttttcatttcgtaggggtgtttttgaaaattttcgggtcgattcttatgagtagggagtccatatttttttctggcctgtgggaggcctgaaacgcacgaaaaacatgtttttagcgtgttttgaagcttctaggatgactttccatatgcatgttttgcatatttgtgcatatttcgcgatttatgtgcatatttgtgcatattttggcatttcgtgcatattttatgtgcatattttttatgtgcatattttgccatttttggtgcatattttatgcgcatattttgcgattttatgtgcatatttttggactccctacttatgagtgtatttttcgtttttattgcatttttattaacaaattttggaaaaaggccaaaataattatagctttttcaaaatcttttagtttttaggtgctaaaaataaaaaaaatagaaaatagttgccaataactcgaaaagtagcttaacaaccatgaaaaaaaaacatgtttttcctgcgtttcaggccac

SEQ ID NO: 691 - DNA, 1742 bp, Heterodera glycines
  unsure (1)..(1742): unsure at all n locations
aaaaaatttttaaaatttttaaaaaattgaaatttaatttttttttttttaaagtgaaaataatataaaattatttttttattttatttttattttataaaacccaaaagttaaagctaattaaattaatgaaaattttgaaatcaaattttcttcaattatttcaaacaattaatcatttttggactaaatgatcgaatattgtatgaaattcagatttatttttcacatcacttttttcggcgcgctttttccaaaaaacttatggggaagaagggggtccggcggtgccgataggcgccgccgggggaaattttgaaatttgggtgtaatttgttaacagattttcaacaaaaaaaggttggtttttgggatttaggctcaatttgtatggattttcttcaagaaatgataaaatatgtgtcaattaaaaaaaaactatgagcaatcttattttgtcgataggaaacccaaaattataaatcgtggccctacttataattcgaagctttttttattttgcaaacctatgcattagaattttttcattttattagtttttaaaagttttgggtacttaggtatacatttacgccacattcaaaaaatgtttttgttgtttttaatgataaaacatgttccagaatccctattcaacggagaagcggaagtttttcgaaaaatgggctaaaatatcggggtcggaatttcagtcaataagacgaatgccaaatactgattaccaactccgtggggaggatttaaaggcaaaaacaggtaggtcatctcgatgaaacacggaattaaactatacaatttatgcacaaccgatatgccattttattaatatatcaaatgtgtatacaaatacaatgacgatgaatatgaatgagatttcacaaatatcgaacaagcgaagcacaatatattaatgggtatacaatatatacatattcaggtcacataaggaaggatcactgttcacaaggggaacatttaggaagcattggaacagacaaaacacagcaatcggatgggaagggaatggtcgaaagcaagggacgggtgtgttggtgtcgcgagacgtcgtcgtcgaacactgtcatttgcacgcagcagggcctggctattcctctgcttggctcgtctccgctgtgctctgttctcccagcgcttcgtccacggtggatgcatcggcggtgtccttcttcttgcccttcttgtccttcttcccgtgcttgtccttcttgcccgctttgctgtcgtcgctcttccccgcctccttcgatcggtgtttgtccttgcgcttctcctcctttttgtccgccgctggtgctgctgctgcgccttcgcccttcttgtccttcttcttgtgcttgtcgcccttgctgccagccttcttctcctccttgtcgccggcggtcgtcgcttcttcgcctccttccggcttgggcttctcctcgtcgtcgctcttcggttggtcgagcatcgggccgaggtacgccttccaacagtactgaaaagacaaaaatgttatgaaatgcaaattgaaaaaatgaagaaagcgcagcattacaattcctgctccgaaggcagcagcagcgatgaataggtaagtggccattgcgttgcgttgcgcactgaagcggttcgttggttggagtgtggtgaagaagaagaagagaagaatgtaaagtcgagggaagacgacccctttatacngatctattctgctggaagga

SEQ ID NO: 692 - DNA, 2842 bp, Heterodera glycines
  unsure (1)..(2842): unsure at all n locations
aaaattgatataaaagggcggaaaatgcccaaaattctcacttattccatttccttcaattcacgcctattattttcgacacgcctcgcgcctaattactgaggtgttcaccatctcccgttttcccctcaccccctccatttgcacatcactaattttttttccccttttacagtgatcaacaacgctctgccgcgcatttcaacctcaacgcacacagcaaacgcggatgtccggcgctggaagtggacgccaaaagaggggcaagacggaagcaccgcgacgcccaacccgccggtcaacgcagcagactcgtcaggccgacactcagcagcagcaaaggcgtgcaccagcaacgcaggaacagagtgtgctcgcgccgcagccaactcttcgcagatgggaggacacggcagaattcttcttcgccctggaacgcttcgtcaacgacacaacgccgcgctccgtgcaggacctggtcagcgaattcaccgaactcaacgcagcgccacgaccggagccatcgcctgagtttacacggtgggttttggcgtcgttttcaatttgtgcatgtctaattttcccaattttcaattgcaggaacttggaatgcaaccgcgaccgagatgtgatctgcacggaaatcaaccgggtgcgactccacagcggacgctacatccacgccaactggatcagcacgttcggcgagaaccgcttcatctgcactcaaggcccgctcgagacgacctgcgacgacttctggacaatgatcgtgcaggagaacatcgaaggcattgtgatgctctgcgacaccatcgaacaaaatcggatcaagtgtcatcagtactggccgaccgcggacaacaaggtgggttttgaaattttacccaatttaacaattaatcgtttccccttccctcctagctcatgcgcttcgccaacaaccagatcattgtcaaattcgggcgcgaataccacgtggaaggcgcgctctacaggacggacctcatcgttggagcaccgcagatgcgacagggccacttgcgcgttcaacacttccactggcgacaatggcccgaccgcggagtgccccacagcgacctggccccgctgcgcctgctgtaccatgtgatcggcgtcccccgagcggttgtgcactgttcagctggtgagttaacggaaacaaaaacactgaaaaattaatcatttttcccattgcaggcatcggacgcactggaacgctcgtggcggtgtacttggccaaccaaacgctgcacctcggccagcctctcaacatcttcgctctcatccgtgacctccggcgccaacgatcgcaaagcatacagacgctcgaccagtacctctacatttacttcgtgattcttcggtgggttttcaaattttcatcaacaaaaatgaaattttaattttttcagttatgcacaaaacaaggcgtcaaagctgaacatcaacgtgaacgcgctcaacgccctcgtgcaggcactgaactccaccatgcgacggggctgagctgctgctgctgctgacgtcgccgggccggccgatgacggagggatcgtcaggatggaatatgatcatttgcgaatgtattgcgttgtcaccgtgtccataaactgtcataatgccccatattgtaattgtcaatacacccgatcatttgaattgtatgtatatgtattattgttgatgtgtgcgcatatataaactaatcaaaatgagaaattttcactttgtcactttttgggtgtttcggcacttctgacttatatagaggggggatttttaaaaggatcgaaaaatgactaatttggtatcatttgaaagctctagatgagatataacggacagattttcccacagccgtcaattcggagcataaccaagactggcttcggggggggggggggtgctaaagacaaaaattcgatttttaaggggtgtatttttctttttcagccgatttttaggggtgtatttttgcaccctaaaaattgactactttacgtttcttaagcatttagaaaatttctttatatatttaaatgcctaaagcagccaaatcaaacgctgtgttaaatcgtcactggatttcaaagttcccggaaggaacttattcaactgatggaaaaattaatccgggactttacaaattgattgatatcgccaaaattttcattggaggtcgggcgaaaattgataaagactgatattaaatatgatttttttttgcgtaaatacacttggtttttccaatttttagcacatatttttgcattttttaacacatatttaggccttttttttggtttttagcacatattttgggtttttttagcacatattttattacatatttcaggatttttagcacataaaaatcccagccctaattataacagatattgtaccaaaaatagtcaattttcatttttgaagcatatttttgaaatatatttcatagaatttcattaaaaatcgaatttaagaataaaaagaattcgccaataattttataaattgtctgtttttgtttgccaaaattgaaaattttaattcctttttcctttttaaaatctttgaattaatttaattgatcaatgtttatgcctatcattcgcttccgggcgaaaatttgccaatttttcccacaaaattgcgcgttcgaagcaactgcaaagcctaactttagtgatcgaagtcactttagacgatgacgagtgatcgatgggacacggattatttgtcttcagtaaatcgcatttttttggacgaaaattgnggctctatttgaaaaatacatatttaaaacatgttttttaaa

SEQ ID NO: 693 - DNA, 6404 bp, Heterodera glycines
  unsure (1)..(6404): unsure at all n locations
ggatgaaatgattgcccagccatgttacaaccctctcaatcacaatgtcgacaatccgctttactttccncctgattatgaagaatcggaagaaatggaagaaggcgcggaggacgaaaacattgcgaaaattgaaaggcgttggatcaaaaggaaaaagcgcatggcaattacccattgattgaactgtttgttttgttttgtcagattaaaatgtttgttgctcttctgtactttgtgttaattgcttttcgtttttcgacacattacaatatttttctatgaattcaatcggtattaaatttaaagtttttttcgtcctctgcttctgcttgtcagataatgattgtgaacccaattagaaatatattcgtgaggaattttgcctgtcaattcggaccttctgaactcggttaggagattttaaaaatggctggactcgggagtctacacaaatgagtctttaattatgattttcagctcgttcctatgtcaccgatggcccactgacagtgagcggacgcagtgcgcctgtcaaaaagcgcacaaatgccgcagacgaaattgcgcggacaaagttcgagcttttggaacctatcgctgttactgacttgccacgggcacaacaacgttttgctcgtcaaatccacagatccaatcggactcgggtgcaaaaaatatttgccaagaatatcaaaatgatcaaaaacggcctggccggcattgcattggtggtcgccatttatttgtacacatttttcgtgatgcgaaaggaaacattcttggaagaaattgacgaagaaatggcaattgaacggggcgaaatgaaactcgatgaccaagggagactggtggcagtgaaatgagcacttttgttaatttgattttagcacttcatttgtctaatttgttttgttttattttttgaagagaaattaaattgttttgtttatccaccatctttctgatttttatgtacttacagcgttaggaaaataacttcctataccaaaaaattttttccattagcttttaaataaaccaactttataaaatttgcctatttcgggaaagtttggcccgaaaaatttggcttaaattgaatcatacgaaactccatcgtacgaatcgcctattgtacgaactgcctttgttcgaatagcccattgtacgaaacgccatgatcccattttttaaatccatacttcaagaatcccaactttaaccaaccgaactatccaagctcctttaattttgaatctttgctttcttcgtgtaaacattagattaaacattaaacggcatcttaaaatctatttgcataactattacatacgtacattaagcaggaactcatggaatagaaatctactatctgtcaactaatattcatttttagtcatacaataatatgaattatcgtgactttgctgagtatcagggcatctcaacaagcggtgcagcggcctgggaccggcttggagaccatgcttttctgagcccataccaagatttttcatcgatgtcccgtgttcctggcgaggcctttcgcttggagcgtccctatagtaaaaacaaggcaaaaggtggcggacgctttactggtcagtaagagaaaaagtaaattgccaagtaaaattgagcaatgttttagaaatgcgcagcggtcgtccgaatacgatgaaagcagtgggcattcgccgtcagcagaataattattctgtaaattcacaaataaattctttccttgggtattgaaattaagtttttagtacactccaattcccgactcgattgagcacaaagaatttgccttgtcttcaaatggcgttttcaatttccatggctatcagagtctttttactctccaacatcgcgtaattcattccaccagccattgttctttttagattttgtcatttcagttcgattttattgtcgacggcgtcacttacaaaagtgtcgaccagttctaccaaatgaacaaagtcaaggatttgactgggatcgaatcggccaaattcacggacggatcgacgcggaattacagcgcattggccaaggaattgttgcgacaagcaaacgtgataatttaaatgctcaaaatatataaaataaacaattgttaaggtcaaacggcaggaaattgacaaatggcgcaccgggaggggcgttgaggtcattcaggtgactgacattgggcaaaaatggcaaattgcccattttgtgtcgttttccttttcagaaggctcttctcgagaaggtccgccagtgctacgacttgcgcaattcgatcaccagcacagcggacaaactgattgtgcacagttacaacggcgacgactttttcggggcgggcgttccggcgaaatatgtgaacgattggtgcggggggatggagcagaacaaagtctcgctgaaggtggacttatactgatttgcagtattttatataattattttgatagtacccaatggaatttcccctcactgcggacaatgtgaaatatgtgccgctaattgcgaaggtaacaatcattttcagtatttagtaatgatttaatttgtgcttcaggggaagaatgttctcggtgccatttacatgattttgcgcgaaaaggttttcgttgtgaaataaagcatttcgacttattactccattgcttttcagatcaacaaaggccaattggactctttggacgtgcaattgaagccgattccgatcagcagcagcagcacaagtaccgacacaattatggtcgattccaactcttaaatggcacgcaaattctttttgatctgagaaaagttatggatgatgcctttgtattgtttgggcgctttttctctcgtttcatcattattgttttatcactttttgttgttctcaaactttcaactttttgtgctgacgaatacttttcccaccaattttcacatgattaaagagcttatcgataaaaatgattttcaatttaattgatcgtcaaccttcattgtttattttgatttgtgaattcggtttttcatgttaaaaatggtatttagcaaaagaaaattgcaacggatagattagcaccatttgttaacattgtcaatttgctgtttctgaataaagcggtggacaattggcatttagtgcccatgacagcagcagcatcggagaattttggccctctgtcagcacattacgaggaagacgatgaactgcttacaccgacaaagcgacttcggttatagtgtactttgtaccccccctttttttgaaaaagaaaaaattcaaaaattttttttcgaaataaagttgttttatggattgtctgggtcgtagaattcgatttctttttcataaaaggggggggggggggagtacaaagtaaacgattaccgcgacttcatttaagcgaattgcggctgaattctgacgaaaaatgtgcgatgtccgattcaatcccacgggctgttgagctgtttatggagaagaaacgagcaaggatttcaaaattcctgtacacgtacaacggcaacttgcaattgaatttgccacaattgcacgcatttgcatgctcaacgggcggactgattgatgacgaatttagagaaaggtgggaggaacaaacctcgtaattctcccatagagatctcagtttacaattgccatttttgttctggcttttttaaaaaaatgcactcaaattggttcggcggataagtttttaattatttggccatcatttttctttttactcgaatgaattgtcaagcgcttttaaatagattttttatggcttaaaaatagaagttgtggtcaaaaaattcttacgttgtgttgttcttttgtatttttaaaaccaaaaatcaaaacagaagataaatctaaattgatggaaaatttattgttttagaatttggccaattctcgcaaaaaatctcccacaagcaaaacgatgtaaagatacgcaatgggacgccctccgctcggaggaatacaatgaccaaacaaatcattcgagcgacgaattgcaacaacaacagcaaacccttttcctatcagattccgactttgaatctgcactttccacgttcaccccgtccatttcgggctgtgatgatcaattgatggatgcggaggacgacgccgagggggtcgacgaccaaagaatggccccccaaaacgcaacggtactccgctcatttgggttgataaacacaaaactataaaaattgaaaagaaccgatgacattcgagtgagtcaaggtcttcgacttctctcctgaccagctgcgtgcccacaaggaatggaatcaggtcgaattggacgtggcacggacattggcacggtttccaccgaacattgacgaggacgaaagggcatgtctgcagaacgagttgaccccacttattgtgaggatattgtgcgaaaatgaagacttccgttactatcaaggtgagtgtttgttgtcgatcaactaatccttgaaaaaaccctggcgaaatttgcgttcacaatttaacccatttggcaaaatccgtcctcctttccccaggctttcacgacgtgtgtctgacttttctgttggttctcggcgctgattcggccctccaagttacgcgggacatttgtgcccgaggcgccttccacaattatttgtgctgttcgctcgaagagagtgcaatgcgcgagttgcaggacctgtacgtgttgctgttcctgcatgaccaagaagtggagaagcggctgagaagcgccgagttgggcactctgtttgcgctcagttggcccctcacttggttttcacatgcactccaaaattactcccaggtgaattttatttctgcatttccttttcataattaatttggttctaataactgttgcaggtggtcctgttcttcgaccttttcctctcttctcatccgctgatgccaatttatgtcagtgccgcgttggtcagcgaacgacgggaagaagtgttgggttgtgaagtcgacatgccatcactacaccaactgctgaaccatgtttgtctgttgttgtgtttggctgcgttatttttgacttttaccaaatgccttctccttttaagattccttccaccattaattgccatcgcgttgctgacgctgctcgtgcgctaatggaccgttacccgccgactgtcatttgcgagtttcgagaagagtaccttcgcatctgcgacaggcataagcggctaattgcggtagaacggctgcaaaaacggatggagttatgtgaaactaaaaaatagcattgtttaaaaagcagggacatttttcttgtagcagtccttccttcccccaccaatttttttttgactctaatttattattttctaggaataattatatgaatttttcaaaaggattgcttatagaaattattttcaaaaaaaaaaaaaattttttttttatattctagatcaaaaacctacgattagtagaaaacaaagttttctttttttaatcgatacggggtggatgaacctaatgcacctttttctctgaaatggatgttaaattaattatttaaatttcgttcgaatttaatttatttcaaaacgatccataacaaaagtctgtttagatggaacccatcagaagcggtggtgcccgtcgttcttctgcctttctcctccctttgctccaaagggacaacatttacgctttggctggtgcgggtgccgtcgctttgctcagcgcagcaattgtccattattggacctactgattttgggacggtggagactcaacaacatacaaaacaacacatgcacacatacattccacacagaatatattacccatcacatatatataaatacatatttatttctcattttctcaattggaatgatttatgtaaaattaacaacaccatttaatgtaatatgtgaatgaacaataatgtgctttttccctccattattatctaccatttgccgcccttcttctttttccccttcttcgcctgttgcccggccggccgttgctggcgcggtccttcgggtttgggcgacgggtggggggacggagtgccaccgctggggcccggcttggccgaactgctgctgtagtcccttaacaaaaaatcccaccaatctaaggcaataatgccaaaatgtgctcacatattcgccacggcactggccgaggtgccctgtgtgcctcgtccaatgtctctgtctttgtattttttgtgcagcttctttcggtacgctgttcgttcctgcctgggcagccatcgctcggggtcaagcggcacttgtgggtcgaaatttgccggcaaacggcgctttcgcttgcgcgtctttctgcggctttttgtcactgcgtcggctgctcaccgtgcctgggaagagaagaggggagggacctttattat

SEQ ID NO: 694 - DNA, 1789 bp, Heterodera glycines
ttacgggcgttcgaatggactttcgtcggtcttttccctcgtcctttatttaccccgtcctcctccatcggctcctcctcgtcgccatgtgcacttttcatcggtcgccatttcttcccaaattttacgtaatccgcttccaaattctcgacaatcgccgctttcaatttccaatttaaggctctaaaaacagattttatttattagaatggaatgacaataatttacttggttttcagcacattttgatataattttagtgcctctttcttttggtccaatttttgtaatgtgaacgctttctgtgccaaaattggtgccatttcctgctgaatttcctctttgccaaggccgtccgcgttcaatgaccgttcacattcaactgtatttagtgacacatttttgaatagaaaagcatttttggaagaaattgtaaatgctactacctttaatgattcttttcacttaccggccgtcttttcgagcagtcggagggcgtcgtcaaacttttgacatgcgatcatatggcacgacgtattgtacatagtctcgaaggactccaagttggccaagtccaattcttgcgagtcgccttgggactgaagtcgcgctttgactgcgatgagattcgctcgtcgaatgtcgtcaaattcgtcgctgtgagttcggattaacttcctgaaaaatgaaatacagaaaaagaattcgtaatgtggtggctaacttgaacaattcaagagcttcttggtattgttccattcggtacagaatttgcgccttcaattccatcacacgcggcacggaaccatccaattttctgatcactccaagagcggccgtgtcattctttttacggtaaaaagcataggctttttcaaaagacatttaataaagcggcaatgataaaactaagaaaaagtgcttaaacagattttttattaaaaaatattaaaaagttattttgcagtttttaagaggcattgtgttgagtaaaattcaaatattgactatgtccagagaatctgtttttttcgttattaaaaaaattagttaaatcatttcctttagcctaaatgttttccaatttatcttttttttaatgacggaagcaacaaaaatttacaacagactcagtgcttttcaaaagtttcgcatcaatttgaactgccatttgcgtcgcgtccggtcgaattggttgtatcagctttcgacggcgctggtcttcgttaccgccttaaaccatgccagcatttacctcacttacgggcccgaccacccgcgatgcatgcaacagtaaattgaccaattttttgcatcggaattctgtcttatggcatcgttatgcttttctttgcaaatgatgcttttaagcaactacgatgagattaaaaaatggatgtcctgttaaaattctacaaatttttgaaaaagaatgagcattttaattggtttaattcgaaaatgatttttagagaatcagtttgttcaaacccggtgcatattcatggtaggcccgacaccagaaaaaaagcgggaaactcgatgattttttttaaacttttctggccaacaattccaaaagctttttgttttgctatttcaaaatttgccctgctccagtgccctccctgatcaaatatttcccttcagatggaaggaacggaaacagcgcggattgttaacggacgaattgctttggaaggagcggctgctgtacgcccgcaggtgagacccttttttatgcgcccgtcacgaataaaaatgtcagaggggggcgggggggggggcg

SEQ ID NO: 695 - DNA, 3175 bp, Heterodera glycines
  unsure (1)..(3175): unsure at all n locations
aatgcccaccttagagcgtaaaagaaaaccgtcggctcattcaagttattatttctcaccatctgttggctatcaaactgaggcttctgatgcgcatcaaacggtcgacacgatgttccaatttgacacagaaattttcctgtcggtgaaaggcgcggatggttggcgcgccttgaagcgactcgctgaagtgggaatagatgggcgagcgacggttggactccatacgtttcaactgacgagaaatgggcacgtaaagaagctaaatgatatattttgtacatcctttcccgtgagaaagaacggaccaaaaggtacagatagcagagaaaaagtgggacgatgagcacaacaaataaccacgtgcttatgcagatggtcaccagcgttgccatgaccattgagatgcattggacaaaatagcgaatgttcatcgggagaatgctaaattcgaatgaatgaatgaattctctccgactctcctccacctgtccgccacttcgatgtctcgcccgaatcgatttaataaccgtccaattggagtcgtgtcgaagaatgccatcggcgcacggattacgcgacggagcagcggagaatacaaattgcgcgaagcgttcagtccagcgaagagaagcatccaaaggccaagaaggaagaataaagctgacaaaatgacgaaaacattaatataagtgtgtatgtttaacgtttaaattgggaacaaaaccataaaaatgaccgcttcaacacatttcccaattcaacaaaaagacaaactgaccttcggcggtgccaaaagccgcgtaaacgataaggcgttcactgagtccatatgaagaaacattataagtagttgaggaatttaagtcctgttggttgtggtccgccctggacgagaaaatggggtaaaggaagaacaaaaaaaaattttaccaatcggatagccaaaagtttcgactcatttgcatgcactgattcagtacgaaaagcatcaaaaatagcaacgaagatgagcagccagcgacacgaaagtattgcagatagaccatgagtttgacctaatagtgcgttcattttagaaattgaaaagtcaatggtttattaaataattggcataaatgctttaatcatcgatcagtcagtctctcatttttctgcctcagtgttcgtttacccttcccgtttccacgcgttccttctgaatcagtcgctttggcaaaggagtgtttccatttgggagcgtcagttcaccagtggcatttgatggagttgcggttgtaacacggccgctcaaaggttcagcatccggatcattgttcgatactcccggttcaatgtcataattcacagcagtgcgctgaccatttgtgccgttccctattttttctccatttttcttactttcggcaacaaattgtgcaaattttcccccaagcagcgaagacagctcgtcaaaagttccccgttcaacgatacgaccatctgaatttagttagtaaaagtgaatcgaggagcgaacttgggggaggaccttggataagaagaattaggtccacatgatgaaggaagtggagaccatgggtgacaaaaacgcgactttttccatccaaaatactgccggggccaatcacctgaagaaaagaatgaaatggtagcagataaatggcgtccgataaaacgacaaaatctcaatttacatagaaaaaacaattatgagttgtcgactatacgataataaaacactgcgctttggacagatgtcaaattactttttcaaaaatccacttgcccacgtgactgtcgaccgctgacaaaggatcgtccaacaaatacaattcgctgttccgttgataaacagcccgtgccttgaaaatgaggacaaataaaacttacctgaattaaagttacgcaaaaatccaacacttaccaaggaaacccgtgccttttggccacccgacaaattaatgccctgcaagtgagtgagttaaattactcaagtgatttttcgtccgaccttttccccgatttctgtggcgtccccttgcggtagcatcgccaaatcggcacgcaacgcacacgcgtcgagcacacgttcataccattctccttcaaaaggctgcccaaaaagaatgttattccgaagagataaattttgaatccaaggcaattggggaacctgaggaaaggaaaaatggggaaaatcagcggactttgggaaaagttacagaagcaatcgccaactccatcccttccagcattttgagttcgcctttggtccgtttcatctctcccaacagagcggcgagtaacgatgactttcctgccccgactttgccaacaacggcgatcaacttttcgcgtcgtatttccatgccaatgtcggtgagtgtcggccgttcagttgccttctgttggttccagacggaggacgtacgacgatgcacattctgtcgatggccctccttcgactttccattctttccgttgttgtcccaacagaaatcggcatttattactcgaatcagcggagaggtgactgaatattttggtaaaataaaattcgacttcaatatgacaaaatgcaccattcggtgttttcctttgttcgattgtgtttttttccaattcgtcctccaacaaaaactcgcgaattcgtttgttgctcaccgtcgtttgtacgaccaaattgatcagcatcccaattattgtcattggacttcgaatttggttaaacagtgtaagagaaacgaaggctatttgcggcgtcaatgaccgtccaccggcggggtcgagcaaaataaaagtggtgaaagagccaacggcaaccagaaagggtgaagtgaagttgagcatgtcgactaggctgaaaggatgaaaaacggtacaaatttccatattatagacaaactcacctccgaatgactccacttttgaacatacaatgcaactcgagtcttcgaatactgccgaccgctttgagcatcggaatttcccaggcgtacagtttgatcactttgattccgttgaaaatttcgcagagcaattttgcccgctcgtcgcgcaagttcatttgtgtggtcagccaagtgcgagtaaaaaaggaagagatganagagagcggaaaaatgactgccattatcaaaaagcctgnaagagccgcgatgccaagcaattt

SEQ ID NO: 696 - DNA, 4270 bp, Heterodera glycines
aaaaaaaaaattcaattaaatattttttaattttcctaacttgatagcctggattttttcatggacttggatttttgtccaggaaacccaggtccaacatggagcccagactttttttaaatgtcaaattctaaagagaaatatttaattaaggtaaaattttattagaagagatgaaatttccattggctttcttttctctgtgtttatttgcatttgctgaagtggcagccgaccgggtcctccttcttatagacaatcccacaattcgggaatcgcactccgtcttcatcaaatccctcgaagagcgtggccactccgttattattgccatggctgatgacccaaacctttcgcttatcaaatttggcaaatttctctacgaccatttgatcattttcgcaccttcggtggatggtaactaattttttgcaatatttttttcagtttttcttttagactttggtgggaatataaatgttgacgagatcaccaaattcattgacggtggcgggaatgttctcgtcgctgcagacaaaaatttgggcgatgcgattcgcgaccttgcagcggaagtgggctttgagttcggggaggaccaatcgatggtcattgaccaccacaactacgacactgttttggttcgaattctgccccttttcactaaataatgcaacggtcaaattgaggacgatgggtcgcacacgaccattgccgtgcccaacgcacaactgatcaaagcgccccttatcactggcgaaagtgcgcttttggctcccgtcctttaccgcggcattgcgctggtcgcggatgaactgggccctttgcaaatgattttgatgaccgcttcatccaccgcgtactcacataaccccaacaaaacggttgaagaggtgtgttgggacaaatcagtttgatcccattatttatgccttaaattcattaaaaatttgttttctttatgacagagttttcttcacttttcagcgtccttcggctgttggcaagtcgacaattcttttgggagctttgcaggcccggaacaatgcccgtgtcattttgtccgggtctttggactttttttcgaacaaattttttactgcgacggtgaaccaagcggggggccacactgccaagtgcccaactttttttcttatattatttatttggacattttattttatttagtgccgtaaaaagtgggaatcagcaattggctgcgtccgtcctcaaatggttgctcaaagagtccggagttttgcgcataaaatcagtgaaacatcacactgttggccaaaagtccccgcccgccgagtacacaattatggactatgtggtgagaagagcgagcatttttaattattattttttatttatttatttccactcagcgatatgaaattggcattgaggaattgcagaacggaaaatgggtgcccttccaaggcaaagatgttcagttggaatttgttcgaattgacccatttgtgcgcgtcactctgaaaaacaacagtaagtcgaggaggcgggggattataatcattacatctcattggtaattaaaaaattacgtttttcatcagatggcaaattctcagctgaattcaaaatccccgacgtttacggcgtgtacaaatttttggtggattaccaccgaatcggatacactcatttgactgacgttcagcaggtcgttcacgccttccccattcgtcaattgtttctttgttcaattcattcattcatttcaggtctctgtccgaccattgaaacacacgcaatacgaacggttcagtcgctgcgcttacccttattatgtgtccgcattttcaatgatggttggggtgagcaaatttgttaaattatttttcaaaattcaaatgcgtaatttcgggttcatttttgggaatatttgggctacatatatgggttttattgtatttttttgcagttcatagtcagtcattttttggacgcatgccaaattagctaattacctttgccctttggtcaggtggtgctcttctccttcgtcttcctctacttcaaagagtcgcccccgcaaagttcgtcctccgccgccccttccgccaaaggcctccaaaaggcaaaggcttcgtaaaaggcgcatttccatcttgagaaaggcttaatgtgaatgttgttacatattattatactttcctttaacttttgctctgcttaatttatttcattgtttttgtttaagggtctttcgttaataaaattttattttttttcttcaattgtttaaataaattttttcaaattcaaaaattacctaagattttttgccttttatgtgaaaataaaatttgctaagaatgtcacggcataagaagacgcacaaacgcaacagcaggaagggctcgaagaagttcagttgtttaatttctgcactttattttaacttttttcaaaagcgtaaaaatttccatttttccgtttattttccccccaataaagcgctaatcttaaccaaattttgcatcaaggaaaaggggccgagggagcgcttcttccaatgggtcaaccgattcggacggtgccgttggcacttcgtccacccgccgggcaaagagttcgaatagggcaaatggacggcattctccgccgtcctcctacgactcgaccctttccgaatgttccacctcctcaacggcgcattgtcagcattttccggaccgggcaaagaatggaaacaattttggtcaaattcgcattcgaaaaacacgatggggaccaatgttagaggagaaaagcgaagcaaagaaaaggcgaagggaaaagccaacggcgagggaaagcggcggaaggcatcgccggagggggaaaagtgccgaatcaatcgacagaggaaaagacaaagcgacacaaaaaacacgcgaattgcgacaacttttggattttgtggacgaccgaaagcaattggcagacgaagttttggacagtttggacgtgaggactcggaacagaatattcccggaattaaaagtacaaaaaaacagacgcaaaagtgattggcaaatcattttttcaaatttagacaatgtcggagacggaaatgcgaaggattgtctacggatttatcaacggaatatcaaaaaagcgaattgtggcattgctccaacgtccgttgtgccaattttcaattaaatactcgtcatttgcaggaatagacttcgccgacagttcgtcaacctccgattcggaggaatgtccaaattccattccgtcgacttcgtccgattgtcgaaatcgctcaatttcgaacgaaccgaaaaaccctaccaaaacaaagagtaattcattgaaagaaaagcacaacagaaacaaaagggagaaggagttggaggagggcgaattgatttcggaggaggaaatggaaaaaggagaggagaagggaggggaagacggatcagaaccaccaccagcagcagaaagggcgacattcgaagacgacacggggagccaatcggacgacgacgaggaggacggccgattggcacgacgacaaaagaccgaaccgcaattcgtcatttcgcgtaataaacaattagtgttttaattgcactaattgacctttccctccgttcttttcactctcattgaattgtcagttggattttctccgcctcatcagcacaattccgaaagtgtcatcaatttttgtgagagtgacgaaagcggcgacgatgacaaatttggacaaccgcagcagagggtacaaaacattctccgccgggggtttatcaattggcttttcatccccccccccccccccctcatttatcagatcgtttgcattttgccctctccgtctccaacagcgacaattgtcgtcggaattccctctgctgatgagagtcagccaggcgacgaggaggaggaggaggacaaccgcagcaaactgagaactcctcctccgactgatcattacgaatttgaagagcaatcagtgaaagttcaaataacagtaactgacgatggggaggaggacgaaaatgaattggacgaggaagagagagggaggaggcagcggaaggggagtgccgaaccgacagacggagcggaagaagctcccgccgcaagggaaaatggtcggaacttccagaaaccaaaacggataatttcgctattttagttaaaggtgacaaaacgccaacagaggaacaatgaagatgatgatgatgacttgctgatcgaactggttgatgaatgaatcctccaattcattttgtccaaatta

SEQ ID NO: 697 - DNA, 6624 bp, Heterodera glycines
cctgattggtaagatcaccgcccggtagccggcttgttcccccccccacgggggccaacgacgttcccaaaaagtgccaagattggaaagtgatgctaaaaagacagttgcccaaatggtgtgtcaatgactttttgttttggcattcggttgtcagtgccctttggccgttacatttcgaagtgttcggtccctctcctccaaattgtcccacagagacgtcgcattggcattgttccgctgggaaatgcgtcggtggttcccctcccattttttgcctcctcttttctcaaaaacacattcatcccaaagacggagccatagcagcacttggaaaggaggggggaatttcaggaatttatttgtatattttaggatcattttgttgttcgaaaaggccctgaatctatggggtattatgttttcgtttcctcccgattaattcattgtcagaaaaaaattcgaatgaattagaaacaagaactcgtatttttatatagttcgatttcactaataatttttatttttttaattctcatttaaattctcaccgattcgatttgtctcctaaaagtgctaaattttaataaattaacattttgctcaaattgcctcacatctttggtcaacaaatccagaaaggtgctcggcgcgtatttgtcgacccaaagtgtgaatttgtgccatcatttctcgtcgggaacgttcaaagtccgccaaaacgcccttcggccccgtccgcggtgccgttcgtctcgatctaattgcaagctgaacaaaaaaattgggatggtcgtgcaaaaccccctctattctacctctgactgcggaagaacatggcattgcgcctcttgaaaccgcaaactcctcttcatcttcctcagatgaggaacagtaaccagccggaggaccgtccaacaaattttcttcgatggtggtcattatttgaaataacaaacactaaaacacaattataaggcaggaaatttttacaaaataaaagcaaagatgcaatgcaataaaaattaaagggacagaaaattgtccttctttttttaaaatacactcagactgaaagactgggaattccaattcgtacagatcactctttcttcgcgttcttcctcaaaccaaaataaaatgccaaggcgaagagaatgccggggatccacagaaaggcactgaaatgagttagaaattaatttttgtaccgagttcctgttttcgcaccagaaatttgtcgcggcgagtgcggacagaacagttaccggaaatgagagcccattgttacgcgcggtggctaatattgacagcggcttaatcttttcaattacacttattcattatacgaattaacataccgggataaagaaggcgaaacaaagaatctaaaattttgcaaaaattattaaactcttctgtcatggttttaaattttagcaatactcacccaatagtggaaatcgtcaagctgtcgctgaagaattcgttcatgctcggtgcgaagagtgttgtgatcgacaagaattcgttcatgttcggtgcgaagagtgttgtgatcgacaagaattcggttgtgctgtaattgtaattttttttgttatttccccatctgttaaacctctcgagttaaagaagacactctttcggacaattcgtgattgtccgtttgtatttgttgcgcttgtttccaaaattcctccatgtcttcaatttcacatccgttccgaaacacctaaaaagttcatttttgcgttttcaattttatttctgggtattttctcggtttaaagaatccccatctgcgtgtagtactacggtttcattttaccaaattaaaggcgtttcgccaaaaatatgtctatttataaatttctacacctacggtaactaccgatgtaaacatggaccaatgaaaatagatatctggttccaggttaacaggtcaaaattggaaatcaaaaagcaatattcgtccaaggattccataaacacctcgggaggttgtccctgaacttcatcttcaacttctggcgaaatggaattggacgaattggcttgagcattgttaagagaagacctattcgagccattttgtgactgcccattgcccagctgctgctgttcgttggacgaattggacatgaaaagttatttggtacaacaatcaagggctgaaaattggaactttttaaattcaaattgtttgttgatgcatatcaaatggttctataaacgagcttaaggtggatgagattgtctttggatgagttagttggcataaataatagtaaccctaaatttgcataaaatttggtgcttttgacccagcttaaacgactgtattttcatacatttttatataaaaaactaagtaactcccaaatattaaatctcacaagagaaattgaaaaatgtttgggatttactgaattggtagtggaagtgaaaaatgtcggaatgagacagagagaggaatgaaatgaagcatagtagtggatgactatcatctcgcacaaaatctaccgtacactaaatattcaaattgaaaaataataaaaattccaattttaaatttccgcgtaaattgtcttttgtatttttattagagtgccacgggacctggaagcggacaactgagtaccaaggtcccggttttgaccgggactagtccaggttttttcccggttttcccagctaaaaattcccggtttttcaaaccgaaaaggtcccggtcccgggtttgcccaaaattcccggtcccgtggcactctaatttttatgcaataaatctgaattttactgaagaatgaccctcctttagatcaagaagatatatgcacaaacctttttgtttttttaggagattttaacgaaaaatactttatttaaaattagctgatttcaccacaatttcagtggccttttcccctactaaattttaatttgttgagtaccttaaatttcaagaatacctaaagatgtacaaaaattatatctattattcgtcataatgaaggaaaaaaacaatgcgagttaaatacaaattccattaacagaaaaaaacagattgtatcattatttttgatcaaaagtggagaaaagtgtgccaatgcgaatgtctcgtcgtacggcctgggaactgccaacggaatgccgaaaagtgaacagcggcccctgcacagacaatgaggatgagacggaggaagatgaaatcggacggcgttcggtcatccaattctgctggtgaattagcgtcaccgccgccaccggaccacaactagagagcgcatcacttgctgattctcgcgttgctgctccacaaatggctaaataattggcaaaaaatgaaattaataactaaaaatgccaatgccaaaattcggctgtgtgtggcaccgacctgaacattcaagttgaattggagtcggcgggacacgtgcagggcacagtgtaagtgaacaaaagcgggcgcaaagggaatgtaacgggtgcgaacacaaagtgttgggcacgttggagcagtgtttggagtgcgtccaattgggtgaacagagcggagacgaaacggcactgaaaatggagggtgaattcattcccgaccgtcgtttccaccgcccgaaattaaaaaaaattaaaatttaaagcgcttttttgaaattcgaaaaaaaatcgtcggttgacctgcgccatgttaagtttgaggacggcggcaaagttgttgaacaccaactgctcgagacggacaaactcttcggaggacatttggccaaacagtacctggagcgtacgcgagcgaacgggcaacggacggacgatgacacggctgaacaacgtgacggaatcggtggaagcacgacggcacacagacaacagcacacgcagtgcctgattttgtgaccaatttgtcggcgtggaagtccagcgtgaaaatggcggacaaagtgtcgaacagtgacacggcgacggccgtgttcagtggtgacggcacagcatttgaggaggacactttttggtcgactgacgaaccgttcacaaaggcctaattaaggaaaattagtcggtataaaaaaggttttctaccggacgaaagcaaaaatagtctcacaaaattggcatttgtcgtcgttgtcgtcccggtggtcgtcctgttggcttggattcggtcggaagtgtgcgttttcagcgtgctgaattggagggtgttcagacagaggcgaatgtcactgccgtgggaaaggaacagttcgtccagctgatcacggccaattcgcacgccttcgtaatggcaaatctgacaattcaaaattaggggagtaatttcaattctggacagttttagttctgcctttcgtagtctgtttttatgaaaatgaaacaaaacaaccaaaaacgaaattcgtatacctctggtccattcaaaatgcaagcgtttgtccccacctactcaagccgtcgctgcatccgctggcgattgcaccgctgcacgcgcacgggcaagcagttggcgcgcaactcgcgcagcgcgggcgcacgccaaagggaggcgcaagtgcaaatgacgggacaccgacagacgacggaggaagcgcgggaacgacggacccatgaacaaaggaattgaacctgtacatggggtgaggagggaatcaatgctcgaattcatggcactgtccggcccgtccaccaaccatttccggcgacgcttgttccaccgcgtccacaatgaaacagcacggccgagtgccgacgtgtggtggcggtgcttcacctgtcgaagcggcggagacggacaaattgtggaaggcgcgtcaatggacgtgcaatcggtggcattttcaagacgcgacttcagctccgccatgttttgcagttcactgacaaatgttcgatttgtgtattaataaaacagaaatttcatggttagcatatttttaaaagtggaaatgcgtagattgacgttacaaaactattatttcgacgaaggaaaaacaaagaattgcactcctaacaaaattaaatttttcatgaaaaaatgtctatggaattttcttttaattttgcggggggaaacaaccgggggataaagtacagcttgaaaaactgcgttgaatgtgaaaatgcgcttttgtgccactcacgacactgtgccgttcgttctgtccccgcgtgtttacctgatcggtatgatcaccggccggtagccggcctgctccgccgccacgcgggccaacgacgttcccaaaaagtgccaagatctgaaagtgatgctaaaatgacagtcgaccaaatggtgtgttcaatgactttttgttttggcattcggttgtcagtgccctttggccgttacatttcgaagtgttcggtccctctcctccaaattgtcccacagagacgtcgcattggcattgttccgctgggaaatgcgtcggtggttcccctcccattttttgcctcctcttttctcaaaaacacattcatcccaaagacggagccatagcagcacttggaaaggaggggggaatttcaggaatttatttgtatattttaggatcattttgttgttcgaaaaggccctgaatctatggggtattatgttttcgtttcctcccgacctcgaaagggcataaaaattattttaaaaattttgaattatacaattgatttgacttaaattcgaagattttgaaaaccagaaagtgtttaagcaacattttcgtcctcactttggctgttcctcaaccgttgttcctgctcccgctcgtgaacgcgctcttccgcctgcattaaattggcaaatgctaagtcggcgctctccaattgtgcagtgtcctgttttctggtagtggcactttctgcaaggaattaattgaagacaaatgcgattttcgagaacggaaaagtttccgggaattccttattgtcgatttcccaattaaaaagaattccctggggttcttggagtccatgacctcgagttagatgtcaaattcgtgatcagcaacctctaaaaccccggataaaaaattttcatagtttttattacaaaaaaattttgcacaacaaaagggttcccccttttgtttttgataaaattcaaaagacttcttttaagtataaatacccaaaaccggactggcgtccattttcccttttcaaaacgaagctgaccctaaccattttttgagccaaaaacgaaatgaatccgcttttgtcacctttaccttgtccaaaatagcatctgtcaacttttcttgccggaaatgctcataacccgctgtttgactgactgctgactttcggccgcagattaacgttggactatagctccaacaacctcaaacacagcaatgcccctcatattgctcatcagagtatgaacaatatccaactgagggaccgtccaacagttttgtccacacttccgtttgacctcggcttgaatttgagtgaggaggagcgcaaagcgaaggctcgcgtgcctttgccttatttggacgcgcaaacagagaaaggtcaatactttggaagtttttcatttgtttggacagctaacaaaatgcccaaatcgaccctttaaagggtttgattggtctccacatttcacacaaccggcccaatttt

SEQ ID NO: 698 - DNA, 4602 bp, Heterodera glycines
  unsure (1)..(4602): unsure at all n locations
tttgctgacgctgcgagtccttttgaccaacgccaaaattattcattttctgaaacaaaacaaaaaaagacatattaaatgtaaatgtcggataaatagaaaaactgacaaaacaatttgtttttcttttccattaaaaaaaaaaataaattttatgtgttgaaaataaaattcaatgcataaaaatttagtgccattattttttcgctaaaaaataaaactgtaataaaaaaaattttccccctttttagttaatttggtaaaataaacatcttattaatatatttgttttgtataaaacattatggacatttctcgacttcgaaggatttgtgccatttacgcttccgatgggattaacggatatccattcagtttggcggtgattaagaaggcattggagtcaaaattaaatgtgtgctcattattgttccttcatctccggagggatctgcccgatactctcaaaaataacccaaagtaaggcaataaaaattgtaggaaatactgccgagtgacccccagtcataaaatttgttttactagtagagggttttcggagtctcagattacagatctgacattgattgtcacaaattccggacccggattcaaacagaaagttgaagtttcaaattttgcgagtttccgacttaggttctaaaattgaataaaataatggaaaatcaatcaggcaaataaactatgcctttggaatgtccaataattgacttgtttaaacagcaaaatttgattgttcattgtgttatttccccaccatctttaaagtgcagattcgtcgcgttggaatgttttggtttcgattcattagaggcaattcgcaaaagattggcaaaggaagacatttcgcgcgaatctttggtgttcatcgactcgcttcccgttctgatcgagcagttctcgctgccctccacctcgtggttcctcacccaaattgccgaactgtccgcctgcgttttggcattggttcacagctcagaatccgaagatgaccaaaacagcgaagattggcgacgaattgaatcaattgcatcgactgttttcgagcttagggcgagggataaacacacattgtgccgaacgaagaccaaaaaaaggaatggcaccgcagaagagaaggcaatggcaattgaaaaatgcacaattaaaaacagacatttggaagttactcgtttattttactttcagcttgaacaattctccatcgaagaagactattccatcactttttctccatttgattattcttctgatcggactgacgacaaattcgtcgagaattccatttcggcaggcggaaccgtcggcaatggcaccgccactcatttgtccacacttccgtttgacctcggcttgaatttgagtgaggaggagcgcaaagcgaaggctcgcgtgcctttgccttatttggacgcgcaaacagagaaaggtcgactctttgggagttctttgccttctcatccaaacaaatttgcccttttccatttgtttggacagctaacaaaaggccataaatcgactcttttaaggtttggttggtctcaacatttcattcaacaaaaaagtgagggtcggcggtcgcattttgtacgtaccggacaaagaggacgacttcgacgagagcgacccggacgacgatttgacaatctgagaacacggaggagcgacgctgccttaagagccaaacatttcaaattctattggacgaacactaatttcggttttgcagaaatcattgattctatcattgattttgaaatcataaatttttggaattttgtcaaatgttgcaccctttttcgaatgaagcaaccatttatgagcagcactttttactagccaatgagatgatctcattgtacaatcacacaaaacattagcaaaacacttatgtactaccctgccaataatcaatttatgaacatttgaccatattgacaaaatttcgaaaatttatgattctaaaaaatcaatgataaaatcaataatttttacaaatctgatattatattcgtgatcagaacccccgaaaacccccgggttatctttttataacagaaacaaaaaaaattttgtttgtgggtggagcccagattctccagtattaccgaaaaaaccaagcgaagctttgggtcataaatagattaccaaaaggggggcgtcggtgggcggggggggggcgggcgactgccggcgttttggccatttttgtctgtgtgaattaagcgaaacgtaaataaaacaattcacataaattaattggatgacttaattaacacatacattttaccacatttctcctaaaaatgaaactgaatacttagcttcattcattttccttcaaaatttaatttatttgttttcagcgttaagaatattccatcaattcagaagtggaccacagaatgaatgccaaacgtcagtgggagtgtttgtcatgcccaattgaccaacaggtgatggagcattacagaatgacctcacaataaataattatgctaatttgttcagttccaaatcagtgatttggtccacggctccatcgatattttccacccaattaatttgatcatcgacacgccggaattccaacgtcttagacgcgtcacacagcttggtgggttagcacgcgtttttttccaatttcgcttatagactttaacttttgctcaaaatatgcttttgtgataaggtgtttccaatttggtctatccatcgggcgaccacagccgtttttcgcattctttggggtaagtttaaatggctcacattttaccttttcaattgcaagtttgcttttagcaataagatgacaaatattttattgggatgaacgattaacaaaatgaaatagaaatcgctattttttgaattaaaaaagtcgacaacagaaacaatttgaatcaaatgagctaattgttgagagactcttttggaatggtgcacttaacggcctttttcttccaccaaatcttttgtccgttctctttttcttcattttccattctctttcttacatctttccttccctctccttcattcagtgtctatcatctcgctcgtcttatggttgcgcatctttccggcattcaaccggncccttggcattacgccgaatgatcaactttgtgtttccattgccgctctcatccacgaccttggtggctacggatacacacgttcttcccccccccccccaccacaaattttttagactgttaaaaaaccgcctaaacttggcgtttgccttttcatttttccattttaagtttgccactttttaggccatgggcccttctctcatatgtttgagtcgaagttcctccgggaaatgggcgtcaaagattttgaggtgtcgtcaaatatgaaaagggaaatgaaaaatggataatttagcatgaggaaatgtcacgcaaagtgttcaaatttatgttggagaaaaacgacggatggttgaaaaagaaattggacgaatatttggaggagaacgactacgaattcatcgacgaactgatcaatccgccaaaagacatggtgaacttctccacgacaacactttcgatgcaaaataatttggtgttttttctattttcagatgagcaacgaccattggaccctcaggggacgaacgcgtgaaaagtccgtcctttaccaaattgtgtccgagccgaccgccggattggacgtgggtgagtgatgcgttcattcaccgacaacaatgaatgatccgctgaaaatgggcctttttatgaagataaaatcgactatttgcttcgtgattctctgctgaccgatgtttcgatcaatttgagttcggtagggttttgaaaattgcaagagacagtggcaattaatagtgaaattaaattaagaacgaatggcaccgcattttgggcgctgtcggtgtcaccgtcgacagcaaagggttcaatcgcatttgccacccacacaaaatcgtattacaatttttaccatcggaattcattatactaaatccatttccttaacattttcgaaacttggccgcgtttttgattcccgcaaattgatgcacgaatgtgtttatggacacaaaacggtgatcgccgcagaaatcatgtgcgttgccttcgcatcctttttaccatttttttgaatgtttctaaggtacgtccgagcacttagggcagccgacccgcacctcgaatttgtcggacagaacgggacaaagtataaaatgtccaccggtgatcactttaaagggcaacaccttaatttacctaattcaaaattgcagcacacaaagacccgcaggcattttgtcgcctcgacaataatgtcatttccctggtagaaaatcgtccatttttcaaattccaacagacaaattgttaacagatccgctattcgaacgatgtgcgattggacgcagcaaaaaaagtgatcgatgcgattgacatgcgaatgttgccaaaatgtgtgatgaaaatgcaactgaacgcgatgggctcaaattgtgaagaaatgcaaaagaaaattgaggccgctttggccgcgtactctgaaggattgccaattatcgtgaaagtgattagttttcca

SEQ ID NO: 699 - DNA, 582 bp, Heterodera glycines
gtctcccctccaatgggctcatgctttgcgcaagcgcaacagccgccgaatcgaacgtctgctgctgtgggtgagcctcacaattgcgatgagtagcgccggtggcggtgttcgactgttgctgtcgcagcacatggcgaccaccgccattcgtcgtcgacgtggtcggctggccgttgtggttggtcaacggctgtttccccccccccccccaccgaaggcgaaattaaaaaaaatgattggaaatttggggaagcaaatttaaataaactgaccaatttgaccgggggatggaaaacaaatgaaagtttctttaaatggattattgttaaatacttcgagtttaatgaaaataaaattgattaattttaattttttctttttggtttatttaaaatttattatttgaatttattaattaaaatccaattaaaattagcaaagaatgggaaaatgcccaagtgaccggccacccaaagcgccgtcttatttttttttgtgacacggatttttttttctaatacctcgcacaacaggaaaagaatgagaaccaaatcaaatgaatagataaaataaacttat

SEQ ID NO: 700 - DNA, 2237 bp, Heterodera glycines
  unsure (1)..(2237): unsure at all n locations
taattgtctttcgatgttttattccgattcttcttctgtctctcctttcattttcacatgtgtagaatctttcaaattgtctaaatgcttctttcncagattccaagccgattttgataattaattttacaaaataactcgtatttttgctattccatgggaaccagtcaaagaaagaacatttgggggagcggagggcgaaatgacgagtgagtaattaatggagttattgggcagggcgcggaaaggataaattgggaggggtgagagcatccgtagaaggcggagattccctgtgattagtcgaccgattcccgtgtttttgcgaaagaaaataacttgctgcgccttgtgattgaacttgacatttcttcgttttccacaatgtgtggcattttgagtgggggattaattaacggaaaggacacggcttttccctttttctaagccgctccataaaaaacacccaaatacaaaaattgttcccaattccgcctgtctccgattagttttctttttctgtcaccgccctttttcagcggatgtttaaaagtgcccgcggcaaaggccttcgtcgagtcaatccgacaacacttttgtattccacaaaaagggatgggaacgagcgttgggaggaagaggtcgcaatttgggaaggaataggcgacgaaaacgaaaatgccaacggaggcgaaatgcttttgacgcccattttcgctatgccaccgaatcaaagcgacggagcggcacaaatggacgaacatttgcaccaattggttcgcatttgtacgattgtccaccgccaagcgtacgctgtgacacaaaaattgggaagggcggtggacgcggtcaatgcgacggacggcgaaagtccgcgaaaagcatgcgaattgttgcgcatttacgaagtgagcagttacagaaaaaaaccaaaatcacaaaaacctatgtatttttaaattgaccctcccaaaatttgcagcgcataatttggcggtccatcatagaaattgaccagaacatcaaaacactttcgagttccgtccgcggtgaattgcaaagaaatgctatgaacctaatttttttcttgtcaccacagaaagcattgactcgtgcaaaatcaatgaaccgcgactcgaatggctgctgagcatcagcaaatttcgggtcaccgtttttgaccaaattaaaatttaaaaaataattttaatcccattttccgttggcaggtggaaatggaaaatgccattgacagcgaaattggcatttgtaaagaaattgagcgcattctccgaattcgtgcgaggggcgaagttcgcggactccggattaaaggggaaacagtcgcaaaagtcaacgcgataacaaacgaaatcgccaacaaaacaatgaaaatcattgaaaaatgaaatgctatttaatttaatctttgtttttattgagcataatatctaaattaagaaattgaggtattcctaatcaccggatcgttctccttctgcttttgttgtccatcacctgaaaacagcgctttacattcggccattttttccgggtccaatttgttgatcaaagcgaatggcttaacgagggaaataaaatgttaagagagaaagcacaaaaattaaatgtcagaacatggcatacctgtgcaagggggggggggctcaggggggggggtctattagtcgaccgtaagggttcgagacagtcgatcttacgaggtggggggaaggaaaattgggagggaggaaaaaaagagagagagagaaaagtcagcgaaaatgtcgatcgtaactatgaaaaaagaaattctataaagaaaaagtgccttattttttaacaaatttcattaaaaattccgttttacgatcgactaatcccgatttgtgaggaaaattgtcgatcgtaagaggtgaaagagtagaaaaatcaaaaaattttgccgttttttaaaaaaaattccaaatttttacgatcgactaaaatcaactttttcccactcgtatataattttctttaaaatttggcttaaaagcataaaattggtaattttttggtgaaaatttgccaaaaatataaaaatttagtcatttttggacaaaattcgttaacaaatcgcattaaaaattcaaaaattttcccggtggggcctatcggcaccgccaaaccccctttttctcagttttttttgttgaaaaaagcgccgccaaaaaagttgttgcccgggtgggaac

SEQ ID NO: 701 - DNA, 1668 bp, Heterodera glycines
  unsure (1)..(1668): unsure at all n locations
ttgagtcggtccaagtccaagaaaatgtgtcgagattgctcaagtgttggtttgccaccgcaaatgcgacacttcggttcgaccaaatcgacaccatccaacaaatggccacaccctaaaccattgcagattttaaaataaaaataaaaaagcacgatggaccgtcgcattggtcgccccgtgcgtcggcgaactgacaatggggacaaatgccattgacaaaacggtcggcaagaaaccttttgggtttattttttgttatttaaggaacaatgttcgttgtttttttgttctacttgttgcaattcgcacaatgcaattgcatttgcgcgtcaattgaagtgaatccgttagcaaacaatttgttgaaaatgtcctgcgcaattctaaaccattaatttaaacaccttgtcgctaattaaaccactcaattaattaattactctgtctgatttgggttcgatgtccgtccgaaaaagtcaaaatcaatggaaaaccaatcgtacgttttcttgtgcaactcgtaaaatttgtcacaaagttgtcgcggtgtaagtccctctgaaaaggaagaaaatgaaacattctgaggacgactgcaaaaaaagacccgaaagtgccttcatttccgtggccgtcccatattcgtcggtgccgcaaatgaaaagactttggtactctctcatgcgacagtaactgaaaatgaaagttatacagggaaaagtgccacaaaataagggaaaaatatcgaaagcaaattaaaaataagaattgttgggacgaccgtggaaaaaaacgtcagcacacttacacggannccaaatgatattccccaaatgcggcacattattaacgtaaggcaacgcggaggcaatcaaaaccatttcttcgtccgtccaaaggaagtctgaaatgggtgagtaaatcttgcaaaaaaaattnatgtcatataaaatgaactgaattcacacaaaaatgaaaaacaaccatcaaaatggggaagttcaatttcccaggaattaaatttttctcattaggttctgatatttttatcatgaaatttctaaaaaaacaaatttttaaaaattggcatgaattgtgtggccctggtcactgtcagtcggacttgcgtctgtcaatggcaaagactgtcggctgtctctctctgttgcttcggttggtctccgtttccctctgctctctctcccaacgttccatcagttctttctccaattctctcagtgttttccccgccgcaatctgtcgcacttcgtcctgatcctcctccgccaactttcgaagttccgtttcctccgccatttgtcgttcgaactgtgcccaatttgaccaattctcttccaacaacggcagcatcggtttccgtgcaaaaatcagctgaatttccctcgcattgctttcaccgttcggatttccttttttgtcgattttttcgtagaccacctgtaacaatttgtcagaatccgacccaattcccgcggtccgttcgtccttcacttgaatgtccacgaatccgaccctctccaaacattcgatgtatcgcatcggattgaagtcgtcctcttgcaaaatgccatattcgctcaatttgcgcagtctttccaattccaaggcgcagacgagcgaacgcaacggtcgaagaacacggaa

SEQ ID NO: 702 - DNA, 1271 bp, Heterodera glycines
tttacagaatttctagaataacttttttcatatttatgctacaaaagccaaataaaacccataaaattctcctgatttttctctatttttagagctttatttaatcaaaattggtcaaaccttaggccagatatgaattttcaaatattaacccaaaatcccaagggtcaaaaaattgaaaaatattttcgaatttttaaaaaattctaaaatttccaaaactgaaaacaaacatcagattcgtgctcagcacctcaaaatagcccagaaaaatatttttcacaccctttttcgaccccaaaaaaatttttgaaaatttctagggggcctagctcgaaaatttttgaaaatttccgaacagattgtataccattagatagagtttaaaaagttctacaattttgctctaagacaatttttcgctaaaatcaacccctgacgagttatgggcccaggactcaaatgtcccgctgaggccaaaaattttttctatttctggaaaaaaatcgaaaattttccaaaaaaattaccaatcgatagagctcgaaaaactatgttttggaagtggtcttcgtttttctgggaaaattcgttaaaaaatcctaaaattcaaaaacccgaaaaccgttttttaggcctagctcgaaaaattttcaaaattttcgaaattttaaaatttggaaaaatcgagctttctaagctctacaatagtgccgctggcacccctgcgctcaggtcaaagcctaatgagttattcaacggggactgaactggacaaatttggtactgaaaagttctagaagcacccagcccagggggttagagatagaggcctggaattttttttaatttttagccaacatttcaacttagggccctcacagcgggaattttttgatccgagttttagaaaaaaagttacgggccctaaactgcaagaaaaagtgagaaatcggtccccgggactcagttgggcgtcgagaatttttttctatagttttcccggattctcctcaaaaagttgtaagacccttccactactttcagggcgctcccggccttcggccgggagattttgttttttgaaacgaaactccttgtcaatataacgtatatactagcgggtgcgtgaaccgtcggctatttagctgggaaaaagcgcttcgcgctttcggagcttcgctacctagactgtgaagcgattcaaattgatcgaattggttggagatttttttttgaatttttaaaaaattattatgggtttttagtcc

SEQ ID NO: 703 - DNA, 5091 bp, Heterodera glycines
  unsure (1)..(5091): unsure at all n locations
atgagaagaggtacaactgtgataggaggaggtacancagtgattagaagaggtacaacagtgattagaagaggtccaacagtgattagatgagtccagcagtgattagaagaggtgcaacagtgatgagaagaggtacaactgtgattagaagaggtacaacagtgattagaagaggtccaacagtgattagatgagtccagcagtgattagaagaggtacaacagtgattagaagaggtacaacagtaattagaagaggtacaactgtgattagaagaggtacaacagtgattagaagaggtacaactgtggttagaagaggtacaactgtgattagaagaggtacaacagtgattagaagaggtgtaacagtgattagaagaggtacaacagtaattagaagaggtacaactgtgattagaagaggtacaccagtgattagaagaggtacaactgtgattagaagaggtacaccagtgattagaagaggtacaagtgattaaaatttgaacaaaagtgattagaagaggtacaatcatggtttaaaatgaaataaataagaaaattgtattattggatgtattataaatttatcaaattaaaaaaatccttttacttattaaaaataaagttagaaatttataatatattgtagaatatttattgaaattgaaaggaattaatttctcgaaaattcaaattaaataaaacatttattcatcagaaataatttaaaataattaataaaacaatattaaattaaataaaaaattaaataatttaaattaaaacatttgttcaccaaaataatttaatttaaattaaaatttaaattaaaaatttttatttattattaataatacaaaacaaattaattaaaaaatgtaaaagtaagcaaaaaatgcacagaaaaaaatggtttatgaaaaaatataattaaaaaaatgtattaataatttttaaaaaattattaaaaaatgctttcttttattaattaaaaataaactttaaatttacaatgattgagtattattgtattgaaaataaatttttgacaaattataattaaaaaaacaaataaattctttaatttaaaaataaaaaataattaattttaaattaatacatttatttaccaaaattatttacttcaaattaaaaatttttatttattattaataaaagaaatctattttttattaataaaaacattgaaaataatgaaaaaatgcacagaaaaataatgttacaccgcccggattcgaacttccccccccccccctcaaaatgatgcctcagaatccccaatcacacagggattctgaggtcttaacgatgtcaaaagtaaaatgtgatcacgtattcgtgatcagcgtcataaactacccctaaagacatgtttttggaagatttttgtcgaaaaaattttttcactcaaaaatcctggtcacccccctgtggtcccgaacaccaaaatcacttttatttttataacaattcgcaaaaaagagataaaaatgtaaaataaaatttatattatagagaaaataattgcggatttttgtagtatattacttttacagaatgacttttcagaagggagttatgaatttttttctgaaaaatcgaaaattttcagaaattctggaataactttttttctttttaagatagaaatcccaaataaatctcataaaattctcccgattttttgctatttttaaagctttattgtatgaaaaattaccctctctgaggtgagttatgaattttccaatattcgcccaaaatcccgagggccaaaaaattgaaaaatatttttgaatttttaaaaaattctaaaatttcctaaactgaaaatgatcatcagattcgtgctcagcaccttaaaaatacccagaaaaaaattttcaccctctttttcaacccaaaaaaaaattccgaaaatttctagggggcctagctcgaaaatttttgaaaatttcccgccatatggcacaccattcgatagagcttcaaaagctctacaattttgccctaaggcgttttttcgataaaaccaacccctaacgagttatggacccgggactcaaatgtcccgctcaggccaaaaattttttctatttccgggaaaaaatcgaaattttttcaaaaatatcaccaatcgatagagctcgaaaaacggttgcttgaaagtggtctccgtttttctgggaaaattcgttaaaaattcctaaaattcaaaaacctgaaaaccgttttttaggcctagctcgaaaaattttgaaaattttcgaaattttaaaaactggaaaaatccagctcattgaactctacaataagtctgctggcaccccctcgctcagttcaaaccctggcgagttattcgcctgggactgaagtggacaaagttggtactgaatttctccatttttctgcagcccttcctattataggtagaggcctggaattttttttgttttttagaaaacacttcaacttagccccctcacagcgaacattttttgattcgagttttagaaaaaaagttatgggccatcaaacgcaagaaaaagtgagaaatcggtcgccgggactcagtcgtccgcgctgaatttttttctatagttttcccagatgcgcctcaaaaagttgtaagacccttccactactttcagggcgctcccggccttcggccgggagattttgtttttgcaaacgaaactccttgtcaatataacgtatatagtaactagcgggtgcgtgaaccgtcggctatttagctgggaaaaagcgcttcgcgctttgggagcttcgctacctagataagctatggttgtggagattttgaatttttaaaaaattatctgggacttttaggccgcttcgcggcctcgaacgggcgcttcgcgcccgtttttttaattttgttgggcttatacgggcgcttcgcgcccgtttctaaatttgttgggctattaaggcagcttagagacctcagacgggcgcttcgcgcccgtttataaatttgttgggctattaaggccgcttcgcggcctcagacgggcgctttgcgccggtttttcaatttttgttggccttgaacgggcgcttcgcgcccgttttttaaatccgttgaactcatacgggcgcttcgcgcccgttttttagcttgttaggccgcttcgcggcctcagtcgggcgctttgcgccggtttttcaatttttgttggccttgaacgggcgcttcgcgcccgttttttaaattcgttgaactcatacgggcgtttcgcgcccgttttttaaattttgaggtacaacagcgattagaagagtgattagaagaggtacaacagcgattagaagaggtacaacagtgattagaagaggtacaacagtgattagaagaggtacaacagtcatagaagaggtacaaaattgttagaagaggtacaaaagtgattagaagaggtacaacagtgattagaagaggtacaacagtgattagaagaggtacaacagtcatagaagaggtacaaaattgttagaagaggtacaaaagtgattagaagaggtacaacagtgattagaagaggtacaactgtgattagaagaggtacaactgtgattagaagaggtacaacagtgattagaagaggtacaaaagtgattagaagaggtacaaaattgttatcagaggtacaaaagtgattagaagaggtacaaaattgttagaagaggtacaaaagtgattagaagaggtacaacagtgattagaagaggtacaactgtgattagaagaggtacaactgtgattagaagaggtacaacagtgattagaagaggtacaaaagtgattagaagaggtacaacagtgatcagaagaggtgcaaactgtgattagaagaggaacaattttcaatagacgtaaaagttgagtaaatcaataacgcacaccatctcaaacatgagaatgtaataaacagatggcatataaaaaaatacaaattatggacaataaaattaattaatttgaaacaaaaaatttattcatcaaaaataatttaatttaaatttaaaattatttattaatttttaataaaacaaaaaggttcaaattaagtaaaagcattgaaaatgacgaaaaaaataaataatgaaaagtttttataaaaatttaattcaaataaaaaaatgtaatttattattaataaaataaaaaatattttaaatgaataaaacaacgaaaacacgaaaaaaatggtagttattaattaaaaacaacgttggaaattattaattgaatatttatttaatttgaaattaaattttttacaaattcaaaaaaaaataatgaaattctttaatttaaaaaaaataaatttaaataatttaaaagaaatcttctaattaattaaaaacagtcaaaataacccaaaaatgcacagaaaaataatgttacaccgtccggattcgaactttgcacccccccccccaaaaatgatgtctcagaatctccaatcacacagggattctgaggtcttgactatgtcaaaagtaaaaactgattacgtattcatgatcagcggcccaaataacccctaaattcttaaaaaagtgataaaaatgccaaataaaatttatataatagagcaaaaaactgcggatttttgtagtattttatttttccagaatatcttttcagaaccgagttatgaatttttttctgaaaattcgaatttttccagaaattctggaataacttttttccttttttagatagaaattccaaataaagtccataaaattctcctgatttttctctatttttaaggcttaattcctgtaaaattgatcaacccttcgatttgttatgaattttcaaatattaggccaaaatcccgagggccaaaaaattgccaaaaaataaagaatttttaaaatattccaaaaaatctgaaacttaaaataaacatcatatttgtgctcaggaccctaatttaccccagaaaatatttttcaccctctttttcacccaaaaaaaatttttgaaatttctagggggctagctcgaaatttttgaaaattt

SEQ ID NO: 704 - DNA, 3548 bp, Heterodera glycines
  unsure (1)..(3548): unsure at all n locations
ccccccccagaagatgactcagaatcncccaatcacacaggattttctgaggtgttgactatgtcaaaagtaaaatctgatcacgtattcgtgatcagcggcccaaataacccctaaagacatattttttgaagattttgggtggaaaaatttttccactcaaaaatcctggtcacccccctttggtcccgaatcccaaaatcacttttatttttgtatctttttttaaaaatgtgataaaaatgtaaaataaaatttatattataaagaaaaaaattgcggatttttgtagtattttaattttcaaaaatttcttttcagaagggggttatgaatttttatctgaaaaatcgaaaattttcagaaattctggaataacttgttttctttttaagatagaaattccaaataaagtccataaaattctcctgatttttctctatttttaaggctttattcctgtaaaattgatcaacccttcgatttgttatgaattttcaaatattaggccaaaatcccaagggccaaaaaattgccaaaaaataaagaatttttaaaatattccaaaaaatctgaaacttaaaataaacatcatatttgtgctcaggaccctaatttaccccagaaaaatatttttcaccctctttttcaacccaaaaaaaatttttgaaaatttctagggggcctagctcgaaaatttttgaaaatttccctacatatagtataccattagatagagcttaaaaagctctacaattttgccctaaggagttttttcgataaaaccaacccctaacgagttatggacccgggactcaaatgtcccgctgaggccaaaaattttttctatttccggaaaaaaatcgaaatttttccgaaaaaaataccagtcgatagagcttgaaaaactatgttttggaagtggtctccgtttctctgggaaaaatcgttaaaaaatcctaaaattcaaaaacccgaaaaccgttttttaggcctaactcgaaaaattttgaaaattttcgaaatttttaaatttcaaaaaatcgagctttcaaagctctacaataagttcgctggccaccccccgctcagatcaaaccctggcgcggtattcacctggtactgaagtgtactttttgagcacgcttcagttgccattttttgcaggccaggggtttgctcaaaaaaaattttaaaaaataccagcatttagaggacactttggcggagtgccctcacagcgggcactttttgattcgagttttacaaaaaaagttaggggccttcaaatgcaaacaaaagtgagaattcagtccctggtactcagttggctctcgaaccggaaaacctatatttttcccggatgctcctcaaaaagttgtaagacccttccaccactttcagggcgctcccggccttcggccgggagaaaatggttttagcaacgaaactccttgtcaatataacatatatactagcgggtgtgtgcttacatgtttctttagtgcttaaagcgcttcgcgctttgggagcttcgctacctaggccttgtgttagggtctttgcgtcagccgacatgcacttggtttcactcacgtgatgagctgacacattgcatttatcagtgcaatggaaaccggaagtgccctaactcgcacgtcatccctcctccctcccttagtccaggtggcagcactttttgtatgtgtatccgtttaaagtgcagatgagaacggggcgacatcagtaaagtgccacacacgctggactataactcgtttgctttattgcaatttgagcatgtttttggccacaatgttcaacactttggtttgaccttgtgcatcggtctcccttctgggagcgtacactcggacgttgttaccgtccgttgcccttgaaaaggcagtgtataattgaccatgggaaaatacatccctttcaaggtcaattccgaccgtgttgattgtttggccttgacctttgagaatggtcatggcgaatgcaggttttatggggaactgcaaacgctcatattttaagccgccaggcgttttgtcttcatacacattacgtgttctttcaatgaagaacttaacttggccaccaacagcgttgctgttgattactcgaccgaccaggcgatcgtcaccaagttcttcaagaacgatgcgcgtgccgttgatcagtccttctttatcacttttgttgataaggagaacaacgacgcttccgactttgagtcgcagacggtggggaggcatcccagagtctgtgcgccggttcaacgctgccacttcggactcgatttcatcgatgtccagtggacgctcgtcaagcggcttatccgaggacaaatattcgcgcacttgaccaggcacattcgccatcatgatttcgttgatctcatcacacgtgtcaatgtgaggtgcgaggatcagacgattgagcagctccttgtcattgccaaggagtttttggaagtcgggatagacaaagtctatcaactcttccctgctctttaccaggaactgcggaggaatccagaagtgttctccggtctctccgagcccaatttgacgacacatttgtaagtatgcttgttgcccttgacccaacctctggttgatagtcaatttcattgtggtgaattcaccaaacaatggggatgtttgaaagcaagctgttacttgcgcagtcaggccctcgtgaggaacgaccggcagcgactgtttaaagtcaccgctgactatgaccgtttttcctccgaaggggaggttcttgtactgtgagattgccatctctttgcacacgcggttaatgacctcaatcaccgtattgtgcagcatggtgatctcatcaattatgatgagctgagcctcacgtatccgtcgagcaaagaagctctcaagcggaatgctgggaagcttgtccaatgagacatctctaccgagacggaacgtggaatgggccgttttcccatatggcagcaaaatagctgcacaccctgtggatgccgtagcaagcactttgtaggtgtatgggggcttgcgcaagcgccttatgatttggccaaacaggaatgtttttcctgtacctccatcgccgaaaatgaagaaacggcgcggcacagtctgatctcttggatcagacttaattgccttaacaacagcatcaaagaccgtttgttggtcgctgttgagtggaggtggagcgttttgctgctgcctaggattttgctggccaggcgacatattcagatcatcatcaccaaagaaagcttcttcaactgccaaattgatatttttggcttttgaatttggtggatctgggaggccacagtgcacgcagcttgagttaaagaagtgcaatcgccaatcaatgtcggctagcgcttcctgctcccgtgcttggcgtatagcgcactggtgtgccctgtggatgtacatttggtcttgtacttgttcacagttctagggcattgctcggctgcccaaagacgaggatgctcacgaagagccatctcatctggtccggncagcgatgca

SEQ ID NO: 705 - DNA, 4494 bp, Heterodera glycines
  unsure (1)..(4494): unsure at all n locations
ttgcacactcggtcgatgacctctatcaccgtgtgntgcagcatggtgatctcatcaatgatgatgagttgggcctcacgtatcgtcggggcaaagaagctttcaagcggaatgcttggaagcttgtctagcgagacttctctgcctagacggaacgtggaatgggctgttttcccatatggcagcaagatagccgcacacccagtggatgccgtagcaagcactttgtaggtgtatgggaccttccgcaatcgccttataatttggccaaacagaaatgttttcccggtccctccgtcgccgaatataaagaaacggcgaggtacagtcgcatcccttgggtccgactgaattgccttaacaacagcatcaaagaccgtttgttggtcgctgttgagtggaagtggagcgttttgctgctgcctaggattttgctggccaggcgacatattcagatcatcatcaccaaagaaagcttcttcaactgccaaattgatatttttggcttttgaatttggtggatctgggaggccacagtgcacgcagcttgagttaaagaagtgcaatcgccaatcaatgtcggctagcgcttcctgctcccgtgcttggcgtatagccgcactggtgatgccctgtggattgtacatttggtctttgtacttgttccacagttctagggcattgctcggctgcccaaagacgaggatgctcacgaagagccatctcatctggtccggccagcgatgcaaggctgcctcgccgagcgttttgtgccaaatttggtcatcttcaagaagcccatgctgtaaagcggcctctgtgaaggtgttgtactgctgcccattgaccagttttaagtggtccggatcaccgggaaagtgacgcattaacgcatagagcgcaaatctttcccggtccgttggagggacaggtacaacacgaccgattgggggccttttgctaggcttctttttatataagacccatcggtcctttgcccagcgaaattgctctgggactttttcaaaaagcatgtccttaagcgaaggaacatgctgccattcattttgccattgcttccaataggcagagcatggcgtctctgggagttcgcctcgctgaatttcctcagctttgctcaccagttggaatgccctgtatacaacgggctgctggtttggcaaatgaattgacaaatgaacaacgtgatgcgagagttttgcaaatggcattgaatgcacaactgcaaaagcttccgtagcaccacggaagttcattttggcatattgagccggctcatcgataccgattttgctgccggactcctctttgcactcgacataacaatgtcctggccctttgaaagggtatttgagtgcatatttgatgttcgctttgttaccgtatgcgaataacacgttgtggtgtactcggtaacgcagcaaaatgtatgggttgtacggcacgacttgcgagttgtcgtatattaagccgttcacctcaatttgggcaccaccgtcggttgggctaggccggtaatacaatgcgggcctgtccgggtgtagtatcgtacatttcgagtacggggctgggaagccctttttacaccgcccaaagttggggtcacgtggaccacaccaactatcgctgcatctgtgcagttgcatatgcattagttcgcggacttcgcgatgcatttgcgctatgggtgagtcatcgtctttgcacggcaaagatggaatatgagcccatatgtattcctggatgacttctggaactgcgtccaggtcagtctgggctacaatgtgtgcgtgtgggccaccacgcccctggaactccatggactctcctgagccaaggatagtcccaaagaaacccttctcgtagagctcttggtggaagacagcaattttgccgcaccacactcgcatccacatgtcaaaacggtcagtgaacatttgaccatttttgtaaatgttttgcttgaactctggccactcacggttgttcgtgaatgtgatgaagagccgcgccttttttgcgtcgtggcaacgagcaaaaatggtgttgcagtcttcatacctttttttccaatactgaagagaattaatattcttttcagaaaggcgaacaacactaccaatgtcatcgacagtcttttgtcgtgcattggggttttgccgagcttgctgcttattgtattggtttaccaaataatgcaacaaattttttggagtacttatgcgcaggtccatgtctggacggcgcaaaaaactggcaatttgccaatcaattttggccgcttggtctaagacccagcgctggccaagaccaccgccacatgacagaatgtggtgatattgccactccaaattttcatcccttattgcgagatggtacttgcagtaatctcgcagagaaatgaattttctcgtcttatcaatgcgatcaatcaatgattcggtcgattcgaccgactcagcatctgatgcagcaattgactcagtctcgcatgagccatcgtcggacattgcatcagtgtcaaacatttgatcgacacattgatcgcttctccgctttttttgtgcgggtttggcatatggaataccaatttgatatccatcatcgcccttaggcttaattaatggataagtcaagctatcagtccatggactgaacggggctatttcgtttaactgcccttgcttgttttcgacccatatcccttttggtgccggggcacctgtgggatccgcgtgtattgcgaacataccttcacccgttgagggggtgattatctggtggggatgcaatttagggtctttcataccacccggagcagagcgctcattcaacaaagtcattctgaagaaccgcagctcttcagtcctttgttgtcttaacaactcttgtagctgctcacgagcctgcttgtaagcagatgcagccgggtgattttcttggatcatttgttccaaaatttcaagggtctcttcattaagctgatgaccctgcacaaactcttcctcgtttgtgattttctctcccgtaaaggtgggattttttcgtcgctgctccatggcttcaactggatccagaatgtacaactgaccgaagccaggtatctgtgttgtacccgcctgcatgctgctaatgcggcgatggaattctccgttgagaattactgccatcggtccgcctgcaggacttggcttatggccagccgaaacacttgcaaattggagcaaattattgtaccgcgacatttgtcgtacaaattcttttcctttacgggattgtttttcctccacaattagctcttcaagctcttttgggtgagggttgagctttggcaaaacaacccttccctgacgacagcaaatgctgctgtcctcgtgtgggaaatgtaatgctccacagtgagaacacttcttgtcaccaagcttaccagaatctgagtattctggataatgctttgccgctgctgcagcacagcaccaacccttgtggacaaggtagcaacgccgcgtaaatgctgtgacttgctcagcggcatttgtcgatgaccgacgtctcggcgcgggtgaaggagaacggctaatcgaagctgattgccgtctcccaatgcgcgatgaacgccttggaggcgtctttggtctgacaaatattgaatcgtcagtctgcgcaattggctcttgcgggacgcaagtttccgacaccaatccaagcgtgtcagcttggttttcacctgccacttgggcttgtgttggaatggcaacaactgcttgtccactcgtctgtggttcgatgatcattatatcatcatgatcatcaacttcaactggctcagcggccttggatgtcgatggagcctcatccgcatgtcgatagacaattgggcacggagtaggtaccccttcccttggatgatatggaacattatcagagttatacagctcgttaatgtgccacaatatgcgccgcttttcataattgatggacaaatctggcagaacaaacgtgcgattgttcatgagccatgattcagcatataggcacacgaagtacccgcagctgttaccatcgtgttgtaccgtaagatttacggcattaaaaatcccggtcaacactgttgacggcaaaatgtcagaaatgatctttccaattttttccgtcagttgccaatccaacctgccataaggggtaggcaaagaatcggcaaaatgtgtaccgcactgaacatcatggataattagagtccaatgtccagggaaatgtactggcaaaagaatgacttctgcctgaacatttgggtcataccccaaatgtcatatttttatattgcatgacancgtccaagccattttcccataccattgnngtcacacgaccacttttcgttgtgatatgcttgnncagtatgncaaatatgtggcagcaaagccgtcattgagaaactgggtcagatcattccagcacgttttcatgaatctt

SEQ ID NO: 706 - DNA, 5348 bp, Heterodera glycines
  unsure (1)..(5348): unsure at all n locations
atttcttggaaattttcatttattttttgatacttttcgtcgatcaattttcccattcgctcgctccttttttatgactcagctctttttctcttcatttttcactatgagtcaccatttttaatggatttttgtccatctgtttgtgcacatttttcacgtgcctggccccgcccccatcgattgtgagggtataaaagcacgccccattctccattttcttcactgatcactttttgattaagtcagtcgggacagttttctgtccaagcatttgcattaaattgtaattgtgcaattgaattgaataaagattaagaaagagtcttagtcttttctctatctgtaaaagggacgctcaggagccctttcatacagatcattaagccattgacccccgttgggtcaaagaaaaggcttacaaaaggaaaggagaagcattttcctcctttcaaattgtcccttcagtaaaggagaggaatttcctcctttaatttatccctttggactctgtgagtttctgtcttttggacagaaattcgctttgcttaaaagactccccccttctgccgggagagtctgcttccccttctgccgggaagtgcaaatttttgtggccctttgcccacaaaattgagcccccgtanggggtcggcttccagttgtaagcctaccctccaacccttaagccaaaagcaaatccaaagcgcagccgtagcgcttggatcaaacgcaacccaaaggggtatattgcgttttcctcaaacgtaagagcaatgagtgagctcctacgtatttccattgcaccaatggtggtgcgtctcaaaatgtatattgagacagcccaagaaaacttgggcaaagagctgacggaccaaagtgtccgtgcagacttaattgcagagagacaaaatctctgcaaaaccatttctcttttggagaaatacaatggaaaatgggaagccattttcttgagaataaagggaccagctcttcaggaggaagagcaaaactatagggactttaagccagaaggcaaagccttcatgcattgggtcgaccaagcccgagggcttgtcgacaccattgaaggggccttaggcctctcagagctgggggatgcaattccccagccaaaccagccagcacaagttgtgcagcagcaacaacttgtgcatcagcgtcatgatgtgacgcttccgccaataacattgcccaagttctcgggggaaccccgagagtggcctttgttttggaagctctttgagacttccgttgaaagtcttcagattgaagactttaaaaagcatatttatttgctgggatgcctcccagagaagtcaattgctcggagagcaattgacttgtatccaccatcagatgaaaattatccaagggtagttgaaattctgaaaaagcggtttggggatgaaaaaacgatggtggagtccctccaagcggagttactccaccttcccaaaccagcagaatccgttcagtctctgagacaattctcagagtccattgaacggatttgccatcagttgttggactatggagaaaatgaacaaaataagttcatggcctccactattaagtccaaactgccttatcaccttctcacccaagtggtggagagggaaatgagggcaggaggtgcctttaattgcacagagctccgaagagctatcacttcaatcgttgaagtgaaagaagaagtacagagatgtactcaggtttttcgaggtgaggaaaaaccccggaattttcccccacattcaaatgggggaagagctaaccaagggagaggaacaccgttccgtttctcccagccgttccggcaagaacggcagtggaggccaatggaacgaaacgaaccggtgaggaggatgtctcctcaaccgaatcgttccttctcggccattaacaaatctcaaacccctatttcagatagggggtcaaatcgcttatgctctctttgtgaagcaaaggggcatgcaccgagtcggtgcacgaaatacaccactccgggggctcgaaggaagcgccttacggaccaagaccggtgtataaactgtcttattacgggacataattcccaaaattgtacgtccttaagtaggtgcggtaaatgtggggaaagacaccactttatggtgtgttacggggaaaggtctcgagagggaacctctcggggcccatcaaataatcagataaaaaaagaggtgacaaaatcctctcatagtcatttgactatgtgtgagcaaacacatgaaaatgtgccggattcagaagtttttccagatatggaaggcttatccatcactactaatgtgatggcaagcgtagtggcgaaaaagcctcacgcatatctaatgaccagaaaaatactggtcagaaccaaaaacaatagaagagtttggatgaaagttccatttctctttgacccagcgagtcaagctacctatatttccgaccctctcatcgagaagcttaagccacccaaagtatcttctgaagaattggaagtttatggctttggtggagagagaactggaccaataaggttccattctcccgtatactccatccaaatcaaaaggacggatggaaagtgggaagatatccttctcaataggacggaaagaatttccacaccatttaaaatggcagagtggaattctgaagaattcccattggtaggcaaggacgcggcacacgctttgagcttttctcgggaagagcccgaaatacttataggtgccagacatttctggcaattcttccaagcgaaggaagaagtttctcccgggttatttgtaattcaaacaaccttgggccctttggtaaacggagagtccgactttgggccggaaattccgaacccggaactatcaatgatggtcattgatgagtccaatcaagggcaaatgcctaccgttaaagaaattgaatatttctttaatttggagtctttgggaatcaaagacgatccaaatgaaaatgatgaccaaacagcaatgggtctatttaacaagtccatccgtcgagaaaaagacggaaggtactctgttaagtggccatggaaggaggaggtgcctgacctcccttccaattaccgcatggccttttcaaagctaatgtctacttttggtaagcttcgtaattctccagacttaatggagcaatacgatgctaccattagagaccaattgcaaaaggggataatcgaagaggccaggaaagcccctggcactcttgagcattatatccctcatcagggagtccttgccaaaggcaagaaattgcgcgtcgtttacgacgccagtgctcacaccagaggaacaaacagtctcaatgcctgtttgtatagaggcccggtaatactgccggacctggtcggaatgcttatgcgtttccgatgcccaaaattccctctcctctccgacatccaagctgcatttttgcaaattgctttggaaccggaggacagggaagtcaccaaattcctctgggtgaaggacgccagtaaaccactggcaccaacaaatttgagcacttacagattttgtcgtgtggcattcggagtgatcagttcccccttcattttggctgcgactttgcagcaccatttgaaggggtatgaatctccagtggccaaagaattggcccaatccttatatgtggataacacactccttgagtgtgaatccgcagaagaggctttgcataaatatgcagagtccaaagcaatccttaaagaaggattttttaatttaagggaatttgttacaaattccccggaggtaatgaaggcgattcctgaggaggatcgcctgaacaagcctaaggtaaaagtcctagggctcatttgggacacagacaaagacgaaattgtctttgagttcccaactaatggcttagaaaaggtggcaacacgccgtcttgttctaagcttccttgcctcattatttgaccctctcggtctaatggggccgtgcattcagcccctgaagcttttcttccaaactctttgggaagaaaagaagggctgggatgatgttctttctgagaaagaacaaactcaatgggaatccttccaagaaaattggaaggatcagaccattagaatcccacggagatcaatgctacaagggaacccatcccttcaattacatgcttttgtggatgcttcgatccacacatttgcagccgcaatttatctaagagcggcagaaggtaaccaaatttcagtttggcttattttctccaaaaatagactcaagcctaaaaatgcctcaaaagcattaacaattcctagaatggaactcatggccattctaatagggataaggggtcttaaatttatcgccgatcaaattcggcgaccaatttctaatctccatctttggggcgattcacaaatcgctctaaattgggttgcttcaaaagaagcacaaccgaaattcattgagagacgagttaaggaaattcgtactctcaatgaatgtgcctttcactttgtccgaacagccgagaatccggcggatatagcaacccgaggcgcaaaaccaggagagcttagggataagtctctctggtggaatgggccttcctggcttaaagaaggccataaccaatggcctaaagaaatagaatttaaaataaaagatcctccagaaaatctggaggaagtgtctctggataacgaagagaaagttttcttcgttaataccagaacaaaggaactgattgagagtcctctgattgaccccaaaagattcagctcttggacaaaaattgtccaagtgacactctatgtcttaaggtttctccgtctgaaacttattcagaggggaaatcctcatcagcttttcgagagtcatagaaaagaaatcgtgaaagtgtccgaaaagggaccattttcagcagaagatgttcacctagcagagaaccttctgatccgcatagaccaaataaaaaatgctgaagatttcctcagctatccttctcttaaggatagtgaagggattttgaggctaaaaaccaggttgggacggtgtgaccaaccttttggttttagccatccaattattctcggaggacaatcctccatccgagacttaattatcttaaaatgccaccagaaaaggcatcattttgtggggtggaaggcaccctcactgagttcttactcggggtattggacacctcgagcaagaactaaggtcaaaaaagcactganaggatgccttcggtgcaanaggatgcaggcataccagttngcattgccnaaaatgcctcctttacctgacgagcgagtatgccgtcaggctcctttcaaaaca

SEQ ID NO: 707 - DNA, 7684 bp, Heterodera glycines
  unsure (1)..(7684): unsure at all n locations
cagaggaacaaacagtctcaatgcctgttgtatagaggcccggtaatactgccggacctggtcggaatgcttatgcgtttccgatgcccaaaattccctctcctctctgacatccaagcagcatttttgcaaattgctttggaaccggaggatagggaagtcaccaaattcctctgggtgaaggatgtcagtaaaccactgacaccagcaaatctgatcacttaccgattttgccgagtggcattcggagtgatcagttcccccttcattttggctgcgactttgcagcaccatttgaaggggtatgaatctccagtggccaaagaattggcccaatccttatatgtggataacacactccttgagtgtgaatccgcagaagaggctttgcataaatatgcagagtccaaagcaatccttaaagaaggattttttaatttaagggaatttgttacaaattccccggaggtaatgaaggcgattcctgaggaggatcgcctgaacaagcctaaggtaaaagtcctagggctcatttgggacacagacaaagacgaaattgtctttgagttcccaactaatggcttagaaaaggtggcaacacgccgtcttgttctaagcttccttgcctcattatttgaccctctcggtctaatggggccgtgcattcagcccctgaagcttttcttccaaactctttgggaagaaaagaagggctgggatgatgttctttctgagaaagaacaaactcaatgggaatccttccaagaaaattggaaggatcagaccattataatcccacggagatcaatgctacaagggaacccatcccttcaattacatgcttttgtggatgcttcgatccacacatttgcagccgcaatttatctaagagcggcagaaggtaaccaaatttcagtttggcttattttctccaaaaatagactcaagcctaaaaatacctcaaaagcattaacaattcctagaatggaactcatggccattctaatagggataaggggtcttaaatttatcgccgatcaaattcggcgaccaatttctaatctccatctttggggcgattcacaaatcgctctaaattgggttgcttcaaaagaagcacaaccgaaattcattgagagacgagttcaatggcctaaagaaatggaatttaaaataaaagatcctccagaaaatctggaggaagtgtctctggataacgaagagaaagttttcttcgttaataccagaacaaaggaactgattgagagtcctctgattgaccccaaaagattcagctcttggacaaaaattgtccaagtgacactctatgtcttaaggtttctccgtctgaaacttattcagaggggaaatcctcatcagcttttcgagagtcatagaaaagaaatcgtgaaagtgtccgaaaagggaccattttcagcagaagatgttcacctagcagagaaccttctgatccgcatagaccaaataaaaaatgctgaagatttcctcagctatccttctcttaaggatagtgaagggattttgaggctaaaaaccaggttgggacggtgtgaccaaccttttggttttagccatccaattattctcggaggacaatcctccatccgagacttaattatcttaaaatgccaccagaaaaggcatcattttggggtggaaggcaccctcactgagttcttactcgggtattggacacctcgagcaagaactaaggtcaaaaaagcactgaaaggatgccttcggtgcaaaaggatgcaggcataccagtttgcattgccaaaaatgcctcctttacctgacgagcgagtatgccgtcaggctcctttcaaaacaatcggcattgactttctcggtccaaccgaaacacggttggccggagagaaagtcaaggcatggatacttcttatgacttgcctcgtaacacgagcagttcatttggaggccatgcttgacacaactgccgagtcattcctcaatgttctccgacgtttcataagtcggagaggtaagcccgatttaatttggagtgacaatgccacttcatttaaattggctcaaaaaaccattgagcatttgaccactccaggagtggatcaaaacacgcaggaatttttcgcacttaataaaattaagtggcgattcattccacaaatcagcccgtgggcaggtggcgtttatgaacgccttgtccaattgtgcaaaaattgcttcaaaaggactttggggagaaaagtcctcagttatgatcaactcataacttttgtggctgaagttgaagccacattaaaccatcgccctattacttctgtgtcagaagggatggatgagttcctgccccttcgtccagtggacttccttcaaccggaagtccgaattcactgggacacgaatggtgaagaattcgatccatcggatcgaaatctttcatcccaccaaaaattagttgccctttttcaggcaactaaagaatcccatgaatttttctgggaaatgtggcaaaaagaatacctcctccttctgcgggagagaggtaaatgggaccacaagagtccccgtcttcaggacagaacagaaccaaaggagggaatgatcgtcctcattcatgaggagttcactccccgaaaccaatggtctttgggaaagatcattgagcttaatggccgaccaggggccattagaagcgttcagttggaactcccaattcatgggataaaatcaaagaggtatggaaccatgcctcggaaaatcattatcacccgtccggtgaataagattttcccattggaagtaggattagataatcctacagaaaatgaagaaaaatttgaagagagttcaaatggaactcctcaaataacaaatgagaaagaaatctctcatttggaagctccaatggatgaaaaggagactgaaactcttcaattggttgatcaaccaattgaccaaaaccggcatggcatgatcactcgcagcaaagcaaagatggggacagttttgaactgtctttccatcctttttgctatgtttgcgttggttggagcttatccaaccaatcattgcaatgaatgcaaacttctttgctttaacaaaggcgttaaagcaaagattccaaaagaaatcaacaaagttgagctctgctgtgcagagaactgttacattcatgcgaatgtaaagaagctcacttacgagctgcccaaggagatcctcctaaatgacttcaaatgcgaaggtcatttctggatggattcgaaacacatgttcaaaaaagacattttatgtccagcagttgatgagtgtgaactcatcgaatgctatttttgcattgaacagttagcgaatccaacctgttatccattgatttcatcaatgttagcagggggactttgcttatcattcataagcataagctttgtggctttttccatattaaaagtcctgttttcaggactttatatggtcatttggctgataattcaatttatcaggccaataatttatttagctggcccaaatcggcctccgaaagataggaggccaagggcaacagcttctcaaaattggacatcacgccgtgtttacagaacaatggcgtttgttgtccttatggctaactctctccagaatttgactggagcagagaccatagcagtcatggccaaatcggaaaaatgcattaaaaatgcgacaagcatgagatgcattgttgaaaactcagcaatgctgacgttgctgccagttggccaaacaaacactcttcttctgaaaacagaggaaggtgttctccttggctcaattaacgttgtgctgaaggctttagctttggaatgccaaagcttcactaaagcctggcaacgttcatacgcaattaatgtgttggccggtaaaaggtgccctaagatgggctcctgtgaaggaaagtattgtagcgaggttcgccacaatacttccattcctgagctaaaagatgccaacgatttaccaggcaattcattttgcctggacagcacagccttttggggcaacaaatgcctcttaggcggtagtgcgtgccttttttatcgttggtatgctcaggaaaagtccaagacagtctatgaaatcatgggctgtaattcctgggaatttattgtttatacaataattcgcctggaaactttgggcgaaaaacccaagtccactcaggtgttcctttatccaggaagaaccctgaaatggaacaacatcagtattactccgatcggagtaacttttccgcccgctcccgtcttaaactcagattttgtttttgacgggagcaatatggctctgacccgagagccattggcaattgacttcaactgtaaaaatcggcaagaagcaattgatttcaattgcagtcttggagttcaggcatgcactgattgcatacctgaccattcatcaggtttagtgaactgcaattgccgttcacataaccttgaaaagttaatggaaagtccagagaggagacttccattaaacatcaaaaattaccaactcagaaatactgggagaaaagtaattgccttgacaggattcagtcctgtccaattaaaccttcaaatcgaaggtcttcaaatggctttggaacttcaccaaagcctttgcaccattttgccgttgaacatatctggctgttacagatgttcaacgggagcacaattccgttatgtgtgctcgactaattttggcaattctcttgccgaaattaaatgcgatgatggaacacatttttcgacaaaatgtgattccaacgcatcaatttaccagacaattttggcttttgataaagccagaattgacacaaaatgccaaacaaaatgtttggctggaaatacttcttttgttctaaaagggacattacactatgtccagcccgaacaaatagaagattacagtccaaatcactccgaaagagtgataaacagccaatccagttggccgaactggaattttgattggaaggcgaccctttggtctttgattggcatccaatcatcacttgccttcataatgattatttgtgtaggcattgtttgcctaacagttttcattaaactttctcctttctatagactttggaaattaatttcctggtctttaacgagaaagggttatggtaatgtgcctacagtattggcaatactgtacttggccgggggaggatccttcggatgtggtgttgaatcacgtcctatcccctcggcattcaaaaaattttgtgagtcacccctcgttcaggggaatgattcatctcttccattggatgatggtataaaagggtggcggatttgccacccaaccacactcttcaaatcatccttccacggaatgcctattcctattcgagaaggaccttatttctcggctcgccgggtggtcatacccgaaaatgccgaggtcttcaatgatcgcctttacggacttggcgatccacgatttgaagaggaggagagagttcctcgctggcaggaacctcctattcctcgccaaattgagtcattgagctcatggattgagcagtcttatggaccgcattggtatgaaacagcacgggagcgccgtgctgtcgaagtccgcctacgcggagaacttagcgaaggagccacgctacttggcgaacattttggcagaattgccgagatccattttgatggattcacctgttatggtccggagggtctcttcatctctccgggcataacacttttcgatcattttgtacggttgggtcttcaagtagacccagtaaaaccgtgcatacaagaatatgtagggtttagccctcgcgagcaagggatgcttgtcgacatttatccgatcgaactggtcaacatccgaaccagaatcggagttgcttggagagcgccagcagttttggaggaacctcaccctcctccacgtgaccaagcacagctaccagatggacgtttggagaatcgtcctcctagggtggctcgtcgacttccaaaccgacgatgaaaagaattttggcgaagagacggcaacagatgccgccatccttgaggcccggagtatgtcgccaaagcgacacaaatttctttgaaatttcttttatttttgatccttttcgtcgatcaattttctcccttcgctcgctcctttaattatgactcatcttttcttttctccatattttcgctatgagtcatcatttttgagggaattttttccctttgcttgtgcacatttcttcacgtgcctggccccgcccccatcgattgtgagggtataaaagcccggcccattctccattttcttcactctgatcactttttgattaagtcagtcgggacagttttctgtccaagcatttgcattaaattgtaattgtgcaattgaattgaataaagattaagaaagagtcttagtcttttctctatctgtaaaagggacgctcaggagccctttcatacagatcattaagccattgacccccgttgggtcaaagaaaaggcttacaaaaggaaaggagaagcattttcctcctttcaaattgtcccttcagtaaaggagaggaatttcctcctttaatttgtccctttggacattcagtgaatttctgtcttttggacagaaattcgctttgcttaaaagactccccccttctgccgggagagtctgcttccccttctgccgggaagtgcaaattttagtggccttttgcccacacgtgtcttggtgacgagcccgggtcttgaaaaggccgggtgtccaggtctggacccggtcgggtaggtgatgccgtctaacactaatttcttattcgaattttaatgttgacagttaatttgattccattaaataataataaaaaaaatttttttttaatctattgttaaaaaagtaaaggctattttctgctgaacactttctgatgaaagtgcgaattttaaatataattacagataaatactttagtttatttctaaatactcacgaatatatgattagtgcggaattccttgatccatcggcttaagctcattctgtcgatacccaatttttcggcaatttttctctcactcatcattggatttcgttctgccatttcttcacttcttttcactccgagtaaattttggacgttccttaaaataaaagaaaattaattttttttaacttaatttaataattaaaattattactagccatttttatttaattttctttgtcgtttccaaattgtttttttttaattcttctttcactttttcaaattgtttaattttttttccttttattataaacattttcttttcgcaattctatatattcattaaattaaatttatccaacatttccatttccatttcgtttattgtttcttcctcctaaataaatatagaatttataataattaaaaatcatacgttcgaattttattttaaaaattatttttctgttagctttattattcattaccatatttttataattataatttttttctacctcgtaaacggtcgaatgaattttttcgttagtgctcaatcatttttaacttttaattttcccataaagttttctgataaaatttctaagtttcttcgtgtagaaataaattaataatttttaattagacagaanagtatccaagctaattacaaagataaaagttcct

SEQ ID NO: 708 - DNA, 2453 bp, Heterodera glycines
aatgtgggatttttcgtcgctgctccatgctttcgactggatccagaatgtataactgaccgaatccaggaatctgggtcgtaccagcctgcatactgcttatgcggcgatggaattctccgttgagaattactgccatcggtccgcctgcagggcatggcttatttccagccgaaacactcgcaaactggagcaaattgttgtaacgcgacatattccgaacaaactccttcccttcgcggggttgtttgtcgcagacgatgagctcttcaagctcttttgggtgcgggttaagctttggcaaaacaacccttccctgtcgacaacaatggctgctgtcctcatgcggaaagagcagtgccccacaatgagcgcattttttttcgccaagtttaccagaatcggagtattccggaaaatgttttgctgctgcggcagcacagcaccaacccttgtgcacaagatgacaccgtttagtgaaccgtgtaacttgtccaggtacattttccgatgtgcgacgcttcggtgcaggtgaaggagaacggctaatcgaagcagactgccgtctacctatgcgcactgatcgccttgtaggcgtcttaggtctgacaaatattacatcgtcagcctgcgcaataggctcttgcggtgcgcaagactccgacaccaacccaagcgagtcaacttggttttcaccagccacttgggcttgggtgagaatggcattagcagcctgtccacttgtctgtggttcgatgatcattatgtcatcattgtcatcaacttccattgactcaacggccttggatgtcgactgcgcttcatccgcatgtcggtagacaattgggcaaggagttggcaccccttcccttggatgatatggcacattatcagagccatacagctcattgatgtgccacaaaatgcgctttttttcataattgatggataaatctggcagaacaaatgtgcggttgttcataagccatgattcagcatacaggcacacaaagtacccgcagctatttccatcgtgttgggccgtaagattttggacatcaacaatcccggtcaacattgtggacggcaaaatgtcagaaatgatctttataattttgtccgtcagttgcacatccaatctgccatatggggtaggcaaagagtcggcaaaatgagtaccacattgaacatcatggacaattagagtccaatgtccagggaaatgtactggcaaaagtatgacttctgccggaacattagcgtcatacccaaatgtcatatttttatattgaatgacacggtcaatgcccatttgccatacaactggatcaacaacgaccacttttcgttgtgatatacttgccaagtatgccaaatactcgacaacaaaggcatcatttagaaactgtgtcagatcattccaacaggtctcaatgaatcttgggccagagcgtgggccttgtgatgtttcgccatcacgctcgtaaaggccaacatcggcccatctccgaattttgcaggccatatttcgcgatgtggcgaaattaattggcactgtgctgaaatttatcttttcaggcacagttggcaaaacggccactgatgttgtagcttcagagctctggtccattgacgagctctcgctcatggagtcattagctttgctcctgcctgagcctgcatggccacctctttttttggctggtcgtcctccacgatttctttgcgtggtagtgggcgtcgaagcaattgcttcgttaactgccaaggctcggccaacatcagtgatcttcacttttttgctggccggcgaaaaatcggccttttgagaggacgattcaattggaatgtcaattgttgacacactattttgcgaagccgtgataggctccgctctggctttcgggggtctaccccttcttttacttccaatggaagaagccggcgtgctcaattgtagagcacttatgtttggggtattgaagcccctgggcgatgccgccccattcccatctgcactcccgtcagggacgggtgagcaacctggactgacagatttctccgccggtcttcggtcctctttcatcttctttctcaaatttttcgctttattaggcattctgaaacaaaaaaaaaataagaaagatatgaaaagtggcaaaaaatatgaggcgaatgaaccgttaaatgcacacaatacaaatatttattcatataaaatatgcataataaagatcaatcgacataattcttcgccgcaatgtgtagtcgtcctgctgaatccatcagccaggttcacacatcccattcaagaatgcagatattaaacaaccacaatccccacaggtaaagtctttgtcagactacaatccttcgaaggggcaggtccttttacaggaatgcagaaaataaggtaggtccagatacccatttctggtacgaatcccacgacg

SEQ ID NO: 709 - DNA, 1464 bp, Heterodera glycines
tttgagggtctgccccttcttttacttccaatggaagaagccggggtgcttaattgcaaagcactaatattgggcgtggtgatgcccgggggtgatgccaccccattctcatctgcactcccgtctgggacgggtgagcgatccgggctgaaagattgctccatctgccctcggtaccgctcttgttccttctttctttttattttttgttttgaaggcatctgaaaacaaaaatgaaacattgatgtgttcatgcggtaaagtatttaggaaaagcaaccattaaaccacattaaatcaaacatttatcgaaaaaattgaaaatgtgataaatgaatgcatattccttgaatgccatcatgatgccgctgcgaatccataagcagggctcgcatgtccaattttcgcacagtgtgttgcgaagaaagagaccggctcacacatcccgttaagaatgcagatgaaaactaagcattgattggcgaattcaatcagcttattaagaaccacaatccccgaggggcaggtaatcggaccaaaatccttaaagggcaggtccacattttggttgactccaatatcctacgttacctctcaccagtccactggtcttggtaaagtgcgggaccagcttcgcaccggatgttggccggtaacgataaggaattcattgtaaacctttcggaccacaatcacccgacggggcaggccctcgaaccacaatcctcaaggggcaggtccgtatttatttaggttaccgggtaatcctacgttacttctcaccagtccactggtcttggcaaagtgcgggaccagcttcgcaccggatgttggccagtaacgataaggaaacctttgtaaaccttttggaccacaatcacccgacggggcaagtccttttcagaaccacaatccccgaggggcaggtcctaagctgaaccacatccctagagggcaggtccacgtttgcgttagggtcttagcgtcggccgacatgcacttggtttcacttctttccaagaagctgacacattgcattatgctgcaatggaaaccggaagtgccctaatatgcacatcattaaaaaattatactgttaagcattaacatcatattgtgcataacacttttgttaaatggacacatgatcccccgctggggcaggtccttggccggtgaacacaatcccccgctggggcaggttcttggcaagttaaccacaatcccccgctggggcaggtccttggcccgtgaaagggatgggtaccatccctatagccgttggtatagggatgggtaccttccctatagccgttggtatagggatgggtaccatccctatacccgttggtatagggatgggtaccatccctatagccgttggtatacggatgggtaccatccctatagccgttggcatacggatgggtaccatccctatagccgttagcatagggatgggta

SEQ ID NO: 710 - DNA, 5278 bp, Heterodera glycines
taataaatttagcgtagattcaatagaaccaagcattcttggtttcattagctcactcgcatcaatatgcgtttaaagaaaccaagaacgtttgggtctgttgattttacgctaaatggtaagaaaaaatagtggtaaacaatttctaaatttggtgaccacctatttagcacatttttaaataaaaaaatttgtcaaaacccaccaaaaatccacctccttgacgatttcgtacacaagagggcaattttggatgatcacttcaactccaaaggacgatttggtacaaaaaagcgaaattgttggctgatcaccgcaacaccaaagcctttgaaaatcgaacaccgccagccaacagtagaaacttacaaaataaaataatattaaaatctttaaaataataatcatggacaaaaagcgaaagatatcgacataaaactggtggacataaattttacaattaattttttattagtaaaaacatttaaaaagactgatacttttaagaacgttttataagaaaaaactaaataactaaaatgtttcttagtaaacccaaccaaaatcgtcattatacgcagggattctgagcccttaccggtgtcctaaattaatgctaaccttttcggtattttgtccgtcagctttcacgttaactgcagtcttatttttggatgcgagccatccccataagagtgtttaaggggatgggaccatccccataagagtgtttaaggggatggtatctatccccataagagtgtttaaggggatgggaccatccccataagagtgtttaaggggatgggaccatccccataagagtgtttaaggggatgggattcatcactactatacgcagggattctgaggctttaccgaaatccaaacggaaatctgattacagattcgtgatcagcgtcctaaaatacctgggaccatccccatatgagtgtttaaggggatgggaccatccccataagagtgtttaaggggatggagccatccccataagagtgtttaaggggatcggaccatccccataagagtgtttaaggggatgggagccatccccataagagtgtttaaggggatgggaccatccccataagagtgtgtctagataaatactggatcattaaaattttaacagcaaataaatagcaaaacaaatttcaattaaatatttgattttcgcatcttttgcgtattgcaatcttgagcagtttcttggtttttacgtttcttcgcttctgcagtcttcattgtttcctcgtaaagtacgtgcgcgaccaaacgattaacagttgcgcgcacaatttgttcatcactgagctttgatttagctgcattgatttcctatagtgggagggatcatcctcttaaaactgattagcgggatagtaaccatctccatgagagcgtttagggtgatgggatccgtccctatgagagtgtttatggggatagaatttttcccttaagattctttagggggatggtaatcttcctcttaaaactgtttagaggtatagtaaccatcccatgagagcgtttagggtaacggaatccattagcatattgaggaaccttttttaaacagcctgcagtctcgtttctttcctgcaacacgaccaatgcaacggttcggctcaatgtagcacgaataatttgctcatcggttaagttttccatgtgttttgctttaaagttaatgtatatcaaaataatttcaaaataaaatttccgaatcagctcaaattcaaattaaacacatatttagccgaacatggagcattcatgttctcattaggaacgccgtgaggctgcagtcttccaccacgctgccactgacgccctcggctctgaatctggctatcgtgagattcttgctgcagcctttttccacgattttcttgcgacaaaattttttgctgtcggcgttccttattgaatcgtcgtcgacgctgattgttgtatttctaagtatttaataaatttaatgccaacgtttagggggatgggatccatccccataagagtgtttagggggatggatccccatcccccataagagtgtttagggggatggtatccattccccccaataaatcttaggaggatggattcatccccataatagtgcttagtgggatgggattcgtcattatacgcagagattctgaagccttatcggtttcttgagttaatgctaaccttttggttattttgtccgtcagttttcacgttaactgcagtcttattttttccaaatcctgaagtttgctggctgcgttcctgatttccttggcgctggttcgtctttttctaataattttaattaaaaaatacaacattttcgactcaaaccttttggatattttttccatccgctttcataactgcgagtctttttcttttcgaattcagtggatgtaccaaggttttcttcaggcacggcattaggtgttttttctgttgttgctctaagcttcttggtttgactccgatttgcaatcttttgttctctcttttttcctttcttcgcctttgtgatgataattctcgcatctgcttcaatcgctgctgcagtctgtgaagacaacggctccatggttgctgcatccaacacttcaagaacaacattttcgtcaacatttttctcggcattcttgtttcgtctgcttgcttgatccttaatttaaatttattgaaggaagtgtacatataagtacaccttttctgcagtaactgcaatctttttgctggaaacgccgaatttgccagaatgtttttttgtttttgtcatctcctcgcttaatgcattctcattcgggatctttacgtttgacttgcccccatcattcaatgttctgcgctcatggcaccattcctatattttataatttaaatatatatctactgaatgattaaataacctcaaaactcgcagattttgacatttttttaggaattttgtctgtaagtaaaaatgtataaactacaaaaatgaataagcttacatgtcttatcaaaatttttaataattttatcaaaaataggtgtcatgaaaatctaaagatttgtttgattaattaaataatattcgaagtagtttgtcaacgctattgattaactaactaaaagtaacagaaaaaagcatatcccaatttgacacaaaaaatatctgagatttatattacataatcttattgtttgcataaaaaataaattggcattctgaaactttttttttaaatgtttaaggggatgggactatccccataatagttagaagagatacaactgtgattagaagaggtgcaatagtgattaaaagaggtacaacagtgattagaagaggtacaacagtgattagaagaggtacaaaattgttagaagaggtacaaaagtgattagaagaggtacaacagtcattagaagaggtacaacagtcattagaagaggtacaacagtgattaaaagaggtacaacagtgattagaagaggtacaatggtgattagtgtgcataacacttttgttgaatggacacatgatcccccgctggggcaggtccttggcccgtgaaagggatgggtaccatccctatagccgttggtatagggatgggtaccatccctatagccgttggcatacggatgggtaccatccctatagccgttggcatacggatgggtaccatccctatagccgttggcatacggatgggtaccatccctatagccgttggcatacggatgggtaccatccctatagccgttagcatagggatgggtaccatcactatagccgttggcatagggatgggtaccatcactggcgtgttattcgcctggtactgaagtgtactttttgagcacgcttcagttttgtggggatgttgtccattttcctagcaaacggtatggggatggtggccatccctctagcaaacggtatggggatggtagccatccccatagcaaacggtatggggatggtgtccatcataggattcatcactatacgcagggattctgaggctttcccgatacgtcttttttttccatttttcatatagggatggaccatccctttagtcaatgttaaagggatggatcaatcactttaacattaactaaagggatggctacatccctttaatattgactaaagggatggcttctatccctttaacattgactaaagggatggctactatccctatccctttagtatggggatgttgtccatcctcctagcaaacggtatggggatggtggccatccctctagcaaacggtatgcggatggtagccatccccatagcaaacggtatggggatggtggccatccccctagcaaacggtatggggatgttgtccatcctcctagcaaacggtatgggatggtggccatccctctagcaaacggtatggggatggtagccatccccatagcaaacggtatggggatggtgtccatcataggattcatcactatacgcagggattctgaggctttcccgaagagctaaacgaaatttgcggatttttgggctatttttattttacaaaatatcttttcagaaccgagtagtgaatttttttctgaaaattcgaaaatttccagaatttctggaataactttttttatattcttgatagaaataccaaataaagggcaaaaatttctccgattggggatggtggccatccccatagcaaacggtatggggatggtgtccatcataggattcatcactatacgcagggattctgaggctttcccgaagagctaaacgaaatctgatttcagattcttgatcagcgtcctaaataacctttaaagtttttactaaaaaatgataaaaacatgaaataaaatttatcaaatagagcaaaaaattgcggatttttgggctatttttattttacaaaatatcttttcataaccgagtagtgaatttttttctaaaaattcgaaaatttccagaatttctggaataacttttttcatattattgatagaaaactcatataaaatgcataaaattctccgatttttactccattttttgagcctctaaacactaaataaaatagacctgatctaaactgagttatgaattttcaaactttaacccaaaatcctgagggcaaaaaaagtgaccgattttcaaaaaattttaaaaaattccaaaatttccctaacaaaaaacaaacatcatattcgtgctcagcacctcaaaataaagccagaaaaaattttttcaccc

SEQ ID NO: 711 - DNA, 1093 bp, Heterodera glycines
accatccctacatactttggtaaagggatgggtaccatccctatagccgttggcatacggatgggtaccatccctatagccgttggcatacggatgggtaccatccctatagccgttggcatacggatgggtaccatccctatagccgttagcatacggatgggtaccatccctatagccgttagcatagggatgggtaccatcactatagccgttggcgtagggatgggtaccatcactggcgtgttattcgcctggtactgaagtgtactttttgagcacacttcagttttgcggatttttgggctatttttattttattaaatatcttttcagaactgagtagtgaatttttttctgaaaattcgaaaatttccagaatttctggaataactttttttatattcttcatagaaataccaaataaagggcaaaaatttctccgcttggggatgttgtccatccccctagcaaacggtatggggatggtggccatccccctagcaaacggtatggggatggtggccatccccctagcaaacggtatggggatggtggccatccctctagcaaacggtatggggatggtggccatccccctagcaaacggtatggggatggtggccatccccctagcaaacggtatggggatggtggccatccccctagcaaacggtatggggatggtggccatccccctagcaaacggtatggggatggtggccatccctctaacaaacggtatgtggatggtgtccatcataggattcatcactatacgcagggattctgaggctttcccgaagagctaaacgaaatctgatttcagatccgtgatcagcgtcctaaataacctctaaagacatttataactttttactaaaaaatgataaaaacatgaaataaaatttatcaaatagagcaaaaaattgcggatttttgggctatttttattttacaaaatatcttttcagaaccaagtagtgaatttttttctgaaaattcgaaaatttccagaatatctggaataactttttttatattcaagatagaaataccaaataaagcgcaaaaatttctccgatttttactc

SEQ ID NO: 712 - DNA, 1433 bp, Heterodera glycines
atcctcctagcaaacggtatggggatggtggccatccccttagcaaacggtatggggatggtggccatcctcctagcaaacggtatggggatggtggccatccctctagcaaacggtatggggatggtggccatccccctagcaaacggtatggggatgttgtccatcctcctagcaaacggtatggggatggtggtcatccccctagcaaacggtatggggatggtggccatccctatagcaaacggtatggggatggtagccatcccaatagcaaacggtatggggatggtgtccatcataggattcatcaatatacgcagggattctgaggctttcccgaaaagctaaacgaaatctgatttcagatccgtgatcagcgtcctaaataacctctaaagactaaaaaatgataaaaacatgaaataaaatttatcaaatagagcaaaaaattgcggatttttgggctatttttattttacaaaatatcttttcagaaccgagtagtgaatttttttctgaaaattcgaaaattttcagaatatctggaataactttttttatattcaagatagaaataccaaataaagcgcaaaaatttctccgatttttactccattttttaagcctctatacattaaaatagacctgatctaaactgagttatgaattttcaaactttaacccaaaatcccgagggcaaaaaaagtgaccgattttcaaaaaaatttaaaaaattccaaaatttcccaaacaaaaaacaaacatcatattcgtgctcagcaccttattttaccccagaaaaatatttttcaccccacttctcgccctaaaaaaattttttgaaaatttctagggggcctagctcgaaaatttttgaaaattttccgacacatggcacaccattcgatagagcttaaaaagctctacaattttgctctaaggcaattttttgctaaaaccgacccctgacgagttatgggcccgggactcaaatgtcccgcttaggccaaaaaaattttctatttccggaaaaaaaccgaaatttttccaaaaatcccaccaatcgatagagctcgaaaaacggttgcttgaaagtggtctccgttttccccggaaaaatcggcaaaaaatcataaaattcaaaaaccccaaaacctcttagggggcctagctcgagaaattttgaaaattttcgaattttttaaatttggaaaaatcgagctcattgagctctataataagttcgctggccaccccccgctcagatcaaaccctggcgagttattcgcctggtactgaactggacaatgttggtactgaatttctccgcgcacctacaggcttttctattataggtagaggcctggaattttttttgacttttagacaacacttcaacttaggttcctaccagcggaaactttttgact

SEQ ID NO: 713 - DNA, 8721 bp, Heterodera glycines
tcacttctttggctgctgataatgctcaaagacttgtgcacattaagaagcatgaattggcattgaaaaggaaaagcgaattcgatcagaaattgattttctgctgaagagaacgacgctttttgtcaacgcatgacaattcatctaatgggataaacttataaagctaacaccgctgatcagatcagatcacaatgcgtatttgtggagtccatccacgcacaaatgaacaaaaacccgatcacataaaaaggtcaaagccaagccatcaatcagtcgtcagtctctgtcattagccaaactatggccattcctcataaatttgtcactgtctttttgtcctcgccaaatcccatcaaattattcgttgcccctccccccttcttttgctacttttactcaactctctcttccgcgcactgtattgactctcttttcagatagtcaataagaattaatttaaatatttattttatttaaattaaattaattttattggatttcccaatacttcaattatatttcacactttattagtgaattttgatcgaacaaatatatttattaatgaacgatttcaacgattgaacgataaaaaaatggtgattttacaatggtttaaatacggcaattttacataggcgggctgacagaaatttaaatgtaaacaatgctgactaataaaaaggcttaaaatcacaaaggttatgaatttggcgtaaaattattttaaacagatgaatcataaaattttaaattttcgtcgctaaggatgaaattagagacacactgcctccctcttccctatccccaaaacgagttaacaattaataattaattaaatttatttattgtgaattttctcatcaaatttttctatcaggtcaaattaattccaatacccataaaaagggctaaacaaacaatcaattatgaaaggaaaagagtgtgggaagggtgccccataaagaaaacaattaatggaatttttctaattaattaaaaatatttatcaaattgttattttctcaaacaataataataataaattttatttgaaattcacaaataaaaaattataaataaataattaattattataaaattaatttaaaaaattccatggaagggtgcccaataaaaaaagcaattaacgaaattttccttgattatttaattattaagcaacaacaataataatttttatttgaaattcacaaataaataaataaaatttatttttctcattaaaatttattattttttgtaacaattaattacctacatccttacttttgaataatattaaaacaataataatttttgttttaaattcataaataaataaataaataatttatttaagctcaaattaactccggtaccctttaagggggctaaataaaatcaattatcaaaggaaaagagtgcgggaagggcgtcaaataaacaaatcaattaacattatttttgactaattttcgcttttgaatggaacgaattgggggactgtaaaataaaaattaataaactaaatttaatttaaaattgattaattaattattattctaaaattaataataaaatattcatttactcttataaataattaaaaaatatttttttcttaataaaatttatttttaatacataatttagtttactgcctcctgtttaacttttgattttaaataaattatcaaaagggaagggagcccaataaacaaataattaacggaattttccaaactttaaagttaaaggaaatggtggaccaaataattaaaataatatttataaattaaattaagtaattaaaaagatttatcaaattattgttatttctgaaataataattatattttttattttaaatttacaaataaattatttatttttctcataaaatcttttttttataacagttttatttatctacatgattacttttgtacgattttattatatatatatattttgaaaaaatttctcattgtttattcgatttttccttgttttcattggcggtccgtcgttctcatctaacaaccttattcatttccctatttttttcaaatcaataaggttctttattctttgccattttcggatgatcatcaacacttaacccaccaaaacaaatgaaccgaattcgaaaagcattgacagtacacagcagaaatgaatcaaaaattccggtgttgaaccctaaagccgatgtttgtaaaagaatttgaaaaatatgatttttagaatattaatgataaaagagcaaattaaaatgagtcatttcccagtcttataacctcaacagcaaaacattgagaagccggtgtactctttgaaattcgttggtggcacaacattgttccccactgaatacgccaacgacgttgacctctacttgcgacaactcgaaagacgcagcccgctggactccgactttttgtccaggcacaaaaccgtagatggacgaatgcgacaaattcttgtcgcttggcttgtttatgtccattttaaaaatgttgaaaactcggtgaaacggtattaattcaggtacaagttcgcttaaagctgacatcgaaaaaactcgaggagttggtgaagccaaatgttgacgactttgtctatgtagcagcaaacatgttcaagggggagtacatcatgcgcatggaaccgcgggtgaataggaaacataattttgaattaccggatttttatgtgtacaccccaaatctcaccggcgaatttttttaaataattaaacttatattataaaattttttcaaaaaataaagttgaaatgtttttcacgatttttcttgaaaattcaaaaaattagtcataactttgtgtgcgcattataaaggtgttgtccgggctcaagttcaacctcagcatgccgtacgctgtgcagtttcggcatcgatatcgcttctacacttcgccgtcaaagagtgtgtgggcatttgcgaattcgtcagcgaagttgtcatggtctgctacgcgctggcccacatcccaccttccgttgttgccgccgtatccctccatttggctgcgtttgcgtacgcatgttcgctgcggttgcccgagctgtttgtggacacgttccgaatgcccgaggcggtcatggatcgcatttcacgctcattcgtcgaccatgttgttttacttctaaaataatcagcccgggccggccttttttttaaaaatttcgtccttaacaggcactacaaaaaaattttgctttccgttgcgcgtttttgcttccggcctaaaaaggctgaatcttcccacccacacaaaatttttttttcacctaacagtgaataataatgcatgtaaaattgggtaagctgttccggtttgttgtccaacaaaccccacggtttgactatatttcatttattcgtacccttgctatttaattatattttcctcaaattttccagggcgtccactttcttgaccccatcgcgtagcttggggccctgcgcgagaagaaccgacaccactttgtcaacaccaacgaggccttggggacaaccatcgttagacagaaaaatgacggactgctcgctgattttttacttcattctaaccttcgctgagttttttcgcccacatttgagaaactgtccaaacccttttcgagccgtttttcgtcattaagtttggggaaaaacaaataaatgaaaatgtgtcacattaattgtactttttcatctgcctttgccactctctactcttcaacctttgccattctcgcaaccgcaggctttttccccaaggcttctttctcacttccttcttttcctagccaatttctcatcccctgccttcttttccctagccaatttctcatcccctgccttcttttccctagcctcatcccctgccgtcttttgccttgccaacttcttatcccatgccttcttttgccttgcatttttttcttttgccttcaatgtcctattctgccatgcgccacttctcatattcctcgagcgtttacgttcattttctcttagttttctctgctgctcttcattttgccttcactcttcttgtgtctgtttgcccctctcatgcaattgtggcgacagaaagcttaccttttggtacacggaaacggtatttcctgctgctgtataggtgaactattacatattgtgggttccatgtacccaacttaacacaaaaaggaccccaaagccatgtttttccccagcctgtttgggcaaattatgcctgacggtccaaccatccacccggccccatcgaacaccaacttctttgtcaagtgtactttgaatttgtttgttttatttccaacaaagcctggcgtattgctcggcagaattacaaagaaaaagtttgtcatttgaccaacaaatataatttttcaaaaaaaagtccttatatggggtgtgccaagtcggttcatttttcttcatccttggtccagcggaaactctttgccatcgtcgtcgtcgtcgttgccggttcatccttctttaggtgcttcatgatcagatcggtgcaatcaaagttcagctttgcacagtcttggcaaaacgattgggtgaactcaaggcgttgctgctcgccattctgattgatgagtttgaatcggctgttcccctgccggaaattgtcatcacgacactctttgcacatgaacgtgaacactccgtacttaagaaatttttctatttttttcaaattaaatattagccaaaacctttgggcgggccaatttccaaaatatggtcgggtactcaaacacattggtcggttgttttttgggcgattcatccactaaaatttggctaatttaaagaaatttgcagaaaaagccaaaccttcagcttcatggcttttgctttcttcattgcggaagcaatttccttatggattttgtccaaacgaggcttgcgtcccctttttgagggccccggttgcaggtcaagcagtgtttgagtgttgttgttgtctccaattgtgatgacgtcatcatcattttgaggggaaaaattttcccgtttcgactcatccatttctttaaatttaaaaaaatttaaaattattataaaaaacccaaaaaatgattacttttgttctcaaacaccaattgatcattgatttttctcggggccattacgattaagaaatagtttatgattataattgttaaaagcataaaatgaacctgcgaaaaaaaacacgtaattattgattgataatgagaggggtgttagcgcgcagcgacctccagacgggctgtcccttcttaatcgataggccacgccatccacaaacacatagacgagagagtagtggttagagaaagatacaaaagggcgccaattcaaacacacagtgaatccccaagccgatttatttattttttacagactatggtactccctctgactgccgccctatccaaattgctaagctgtaaacccgaaaatttatcagaatatttgaacaaccccgaggcggtgaacaaagcgaacgcctacctgtgtggcaaaaaactcaaaacaacctatcagggtcctgattgcaagaccaaagatgtcaaatttggcacattttcgctgaaacctgccgctgaaacctacgcctttgagggatttcttggcaagtttccgaaaattctgtttcggtccaacaccatgcgttcagatgtcaaagtccaacagtatttctacataaaacaccggattcgcctactgtaccctcagctcaagtgcattgttgagtaccacaacaagggccattgcaaatactacccattgggtacaaatttgtatccgaaaaaaataaaataaataaaccccattaagagttgttggccattgaggagggctgtgagagtgcacccatcgaaaaacctgccgctgaaacggactatctggactacttgaactttcgcagtgggtggcaatcagcactctactgatcaatgaagcgtgcgagacaatcggaaaagttgggcgccttccctgagattgagttcgccgtcaacacaatgggcgtcacggtgtattgcccacggcacctgcaaacgcctcggtttgtgccatgggaccagcccgggcggtgcccgagctgcagaagcggaactgttgagctggactacatcatccagcccgagggggtgaccatcttttcgaatcggctaaagacggacggcgagaactttgtgccatttgacgcaattggtaagcttctgcatctgtttgccaaaaacctaacccttttcttaagtggattttgccgatcgtgctaaattccgcataagggcacggaataaggtgttcactttgccgctgcgacacccggaggtccacgccgcaggcccgagcttggaagaagccgtaaaagaacagaaggaaatgacgcagatgccataagcacttgtccatttttccattatttttgttcttgttctgatggattacccaagaataatcgaaagtgaactcgcttttctcatcccttcggggattattgtcagcgggccttcctcatcaggcaagacccagctggtccttcgcctgttacggcacgccaacgtattgtttgatccaccgccaaaggcaataggcgtgtgtaaaagggttttatgtgcagtgggctgttgctatttagtatgggcatacggtgagtactcgacgcagattcccgatctggagcggcagggagttgtcccccacgcaggtgccccgtctgacgagatgctgaaaaagctgccaaagccttgtctgattgtttacgacgatttgatgggtgacattgaggccaagaagttggccgatctgtacaccaaaaagtcccaccataacaatttttccgtgattttcctcacgcaaaacctgttcgataaatcaatgcgggtgccaaggtccaacgcccagtacatcttcctgatgcgggctcccaacgacatgcttagcattcgtaatttggccagccagatgttccctcgcgagcagggattcctgatggatgcctaccgacagacatgtgccctaccgtacggctacctgttggtgactctccacgcgaacaacattatacgcctaaggacaaacattttcccagacgacgaggagagaatcatttttgcccccaaaaatggttaagcgggaacagaagatcggtgagcgggttgtgcacaactacgactatttgaagaagttgggaaagacaacgtcggagaagaagcgccgtcatttgttgaacagtgccggttgtgaggaactgttaacgcttgtcgagatttgtctcaacgttttgaacgggagtttctgtctgagcaggaaacaaaagcagagacttgcgccatttgcaaaagacatcagacagttggcacgtgtgcgaagcgaaaggggtgcgcgaaaactagtgcagcagtcaggcggatcactttttgcccctttgttggcccccattctgattgaggctgcccgatacctgctttcgcgcagcaataatggccaataaacttattctgctgccgtacgagcactaaaaggggctggttggagcgagggagacaaagaatgacgacgacgacattgctgagcggacaaacttgggctttgtcaaacgacaagtgaccgctgcagtacagaagcggaagggaaacgtcagcgaacggaacgcaatgtacaaccagcacctgcgccggtacctgaagatgcgcaaggaacataaggagcggcccgtcctggtacagctcagcaacggcgctcaactgctaaataaaacagtggagacgggtgtgcaggtacggcctggtccggacgaaccgaaggacaagtccgtgatggttaccgacgaagatgaagatgaagaaattgaagtgccaaagtttttaaccccaacaagccagacgcagggaagcaatcgatcacccaggaccaataagaaagcagcaaaacagcaaaaattgatcgagaagaaggaccacctgttggccatcattatgtctgatccgcagagattcggcgcaaatgaaaatgtgtcacattaattgtactttttcatctgcctttgccactctctactcttcaacctttgccattctcgcaaccgcaggctttttccccaaggcttctttctcacttccttcttttcctagccaatttctcatcccctgccttcttttccctagccaatttctcatcccctgccttcttttccctagccaatttctcatcccctgccttcttttccctagcctcatcccctgccgtcttttgccttgccaacttcttatcccatgccttcttttgccttgcatttttttcttttgccttcaatgtcctattctgccatgcgccacttctcatattcctcgagcgtttacgttcattttctcttagttttctctgctgctcttcattttgccttcactcttcttgtgtctgtttgcccctctcatgcaattgtggcgacagaaagcttaccttttggtacacggaaacggtatttcctgctgctgtataggtgaactattacatattgtgggttccatgtacccaacttaacacaaaaaggaccccaaagccgatgtttttccccgagcctgtttgggcaaattatgcctgacggtccaaccatccacccggccccatcgaacaccaacttcttggggcagagtgtactttgaatttgtttgttttatttcctaacaaagcc

SEQ ID NO: 714 - DNA, 1333 bp, Heterodera glycines
  unsure (1)..(1333): unsure at all n locations
tcaagcagtgtttgagtgttgttgttgtctccaattgtgatgacgtcatcatcattttgaggggaaaaattttcccgtttcgactcatccatttctttaaattaaaaaaatttaaaattattataaaaaacncaaaaaatgattacttttgttctcaaacaccaattgatcattgatttttctcggggccattacgattaagaaatagtttatgattataattgttaaaagcataaaatgaacctgcgaaaaaaaacacgtaattattgattgataatgagaggggtgttagcgcgcagcgacctccagacgggctgtcccttcttaatcgataggccacgccatccacaaacacatagacgagagagtagtggttagagaaagatacaaaagggcgccaattcaaacacacagtgaatccccaagccgatttatttattttttacagactatggtactccctctgactgccgccctatccaaattgctaagctgtaaacccgaaaatttatcagaatatttgaacaaccccgaggcggtgaacaaagcgaacgcctacctgtgtggcaaaaaactcaaaacaacctatcagggtcctgattgcaagaccaaagatgtcaaatttggcacattttcgctgaaacctgccgcggaaacctacgcctttgagggatttcttggcaagtttccgaaaattctgtttcggtccaacaccatgcgttcagatgtcaaagtccaacagtatttctacataaaacaccggattcgcctactgtaccctcagctcaagtgcattgttgagtaccacaacaagggccattgcaaatactacccattgggtacaaatttgtatccgaaaaaaataaaataaataaaccccattaagagttgttggccattgaggagggctgttagagtgcacccatcgaaaaacctgccgctgaaacggactatctggactacttgaactttcgcagtgggtggcaatcagcactctactgatcaatgaagcgtgcgagacaatcggaaaagttgggcgccttccctgagattgagttcgccgtcaacacaatgggcgtcacggtgtattgcccacggcacctgcaaacgcctcggtttgtaccatgggaccagcccgggcggtgcccgagctgcagaagcggaactgttgagctggactacatcatccagcccgagggggtgaccatcttttcgaatcggctaaagacggacggcgagaactttgtgccatttgacgcaattggtaagcttctgcatctgtttgccaaaaacctaacccttttcttaagtggattttgccgactcgtgctaa

SEQ ID NO: 715 - DNA, 12102 bp, Heterodera glycines
  unsure (1)..(12102): unsure at all n locations
acttcagctgctatgtttgttacgtagggcttcgccttagcgatcatagggcggagataacgccaaaggttccgcactacggctcccacccccgctcccttctgccgtggaattccaaggaagtagccatagccacgctgaaaggttggggctccctcaaagtacgaaatgcttccaccctgctgatgataattctccaaccgcaagttcgacgcgttgaatataactcggaccattgtatcagaaagttacgacttttttaaactgaagagtcagcacaacttggccaaattcaaatcgttcctcctccgccttctccttggcgagtcgttcttcttcctccgttgccaaccgctccttttctgtcttcttctctttggctaatcgttcagcctcagatttctttgccttctcttgctctttttctcgctgcttttgctgctgttcttctcgttgctttctctgctgctcttctctctgctttctctgctgctcttctctctgctttctctgctgctcttctctctgctttctctgctcttctctctgctttctctgctgctcttctctctgctttctctgctcttcctgctgctttctctgctgctgctcttctcgctgctgtcgccgtttatcctcctcctccctctcttttttgtctcgctcatgcttcaagcgaagttgatcaagttttgtgcgatttttcaacggatttaatggtgcttcttcaggctcttcctcctcaacgacttccatgtcaacaatctccccctcatccgggtactgtattgacctttttcgggtcaggtgtcgttccatttccgctatcatgccgtggtgcattccccgttcaagctgctgaggcgaaaggaagctgccccttggcactctgaaccggaacttgcgaccatcgcgcaggtgcaccactacgtattgcctctccagggttcctacagtcgcccagctaaactgtacaagggcaatgagaactgtgcaaacccactcacctgttgggatatattatgccagacatgcccaccatccatcccggcccatcaaacactaatttctttggcaagtgtgctttgaatttattcgttttattgccgacaaatcccggcgtattgctgggcaaaattacaaagaaagagttactcattttaacgaaaaatcaatgaatgaatggtcaaagatcacttttccgtcttgaaaaaggtgctccgtcctccgttcttctgtggtccatcatcctttttttggtgtttcatgatcaggtcggtgcagtcaaagttcaacttggcacagtcttggcaaaacgtttgggtaactccagtttctcttggccactgccagtgttgaggatgaagcgcttgtcgcctcgcttgaagttttcgttacggcattcgttgcacataaaggtgaacaccccatactgcaacggaagaagaagaacattgtagggctgccaccagagcaaacattacctttgggcgtgcgagcttccagaaaattgttgggtagtcgaagacgttggctgctttgcgttcgtcgacatctgtgacttcaacctctgcggggttggacttctttgcgttgttcacgtcctccagcagtttttcccagcgagactttcggcccctcttcttgagcgcaggacgttcctctgcgtgagatgactgcgagtcaaccaatatgacgtcatcatcaatatctgaaaaatgagaaaaaatccaaaatttttgtaaaatttgtgaaaaattttacccattttatgttttctttgattgttttgtgcttcttccacgtggttcgcttctataaaatgcttatattttgtgttttattttaaaatttactctggatttcgtccaaaaactgctcattctgcttacgaggagccatttcgaggaatatttttgtgtgttaagatgaaaatgagaagggaaaagtgtgggggtactgtatgtgacgtagcggagaggggggtgtcacgtgggaataggccacgcccactcaagtgagagcacgcagggacctccagacgggaggatttcgaaatccatccacagtatgccctcctatgccacgccccttatcattcacttccctgtcagtcatttagatgcccccactgacaacagccttatccaagctgctgaactgtaaagctgagaatttggcagagtacctgaataacccggaagctgtgaacaaggcgagtgcatacctgcgaggaaagaagctcaagacaacctactcgaacaagggcggcactacaaaggaggtcgagtttggcaacttctcgctaaagtctgcttcggagacgtacgccttcgagggattccttggcaagtgtcctttctgcaagcattccctcactttggaaagttcagaggtcaaagttcaccagtacttctacataaagcaccggatccgcctgttgtaccctcagctgaagtgcatcgttgagtaccacagcaaaggtcattgcaagtactatccgttgggtaagctttaggctgcgatgaaagcccataatctcgcacggtttcagagttgttggccatagaggaaagtgcagagataacaggcgaaaagccaacagacaccaactacttggactacctcggcttccgaagtgtttggcagccaacccccgtctattgacccgcacagagatgaagcgttcgagaccgtcgcaggagttccccgagattgagttcaacgtgaacacgatgggtgtcacggtgtacagccctcgccatctgaagacccctcggtttgtgccatgggatcagcccggtcggtgtacacgctgcaagagtgggaacgtggagctggactacatcattcagccagagggagtgaccatcttctcttcccggctcaaggatgacggagagaactttctgccatttgatgagatcggtaagggtttggactactgctcaaaagtaatcagcagcttaagtggactttggcgacaatgccaagtttcgcgtccggtcacgtaacaaaatgttcacactgccactgagacacccggaagtttaccaggctgcacaagtcgcagcggaagcgaatgaactgctggcagaagttccaccaatggctgagaacaatgatgatgatgataatgttgacccaaagtgataactcagtttgttgataagccattttgttatcattcgtgatggattacccgagaataaatgagcgtgaactcaaatttcccattccctccgggattgttgtcagcgggccctcctcttcgggtaagacgcagttggtccttcgcctgttggcacacgccaacgagatgtttgatcccccgccgaaggtgataggtaagtccccaatgccacgagtaatgagcagtccccttgggtttagtttgggcttacggtgagtactcctcgcagatacccgagctcgagaggcagggggtagtcccgcacgcaggcccaccctccgaagaaatgatgaaaaagttgccaaaaccctttcttattgtctacgatgacctcatgggcgacattgacgcgaagaagttggccgatctgtacaccaagaaatcacaccacaacaacttttcggtgatattcctcacccaaaacctgttcgacaaggcgatgagagtgccaaggtccaatgcgcagtacatctttctgatgcgtgcgcccagcgatatgttgagtattcgtaatttggccagccaaatgtttcctcgcgagcaagggtttctgatggacgcgtacaagcaggcgtgtgccgatccgtacgggtatctgttggtgacactacacgcaaacacagacaacctcttacgactgaggacaaacattttcccagacgacgaagaaaagattgtctttgtacccaaaaatggttaagaagcaaatggttggacagcgggtgttggacaactacgagtatctgaagtcccttgggaggacgacatctcacaagaagaggcgtcatttgttgagcagtgcaggttgtgaagagctgttgaccctggtggagatttgcttaaacctacttaacggatccttctgtttgacgcggaaacagaaacaaaaattgttgccttttgctgacaccattcgacggttggcacgcgtgagaagtgagcagagtgcgagaaagctgatcttacaacaacaacaaccacagcaggagggaggttcactgtttgcccctttgttggcacccatactgttagaggaagcacgttatctgctgcgcaaagatggccaataagctcattcttctgccttttgagcattaccgaggattagttgcagcgagagagggtgtcggcgttgcgaaaggagacgacgatgtggcagggcagacaaatttgggattcgtcaaacgacagctggagaccgcgaagaggaaacggacagcgaatgtcagcgaacgaaatgtattgtacaaccagcagctgaggagatatttgaagctgagaaaggaggtcaaggacaggcccctcaaggtccagctcagcaacggtgcgcaactgctgaataagacggtggaaacgggcgtacaggtacggcctggccccgacgagccgaaggacaactccgtattgattactggcgaagatgaagagattgaagtgcctacgccaataagtaagacgccgggaaacagccgatcgcccaggaccaacaagaaagcgatcaagcagaaagaaatgaacgaaaagaaggaccacctcttggccatcattatgtctgacccgcagagattcggcgctacggaccgtgggaaaatattaaatccaaagacggggcgggagttcatcaactcggacctggcctggtcaattgaacgcctagtggaccctcgcccggagaatgccccttcaccaagcggaaccaaagagttgatgaggaagctcgcacagaatccgctcgccagtagcctacttaatcgactattcgttgggtctggacaagtcaaacaaacgggaggatttgttccctctaaatggacgaaaaaataaacaaaatatacaccgacccggccaatcccggtgggtttgcgggtgcgagtgcactctatgcagcggtcaagaagaagcacccaaaactgaagaggaccgactttgatgactttttgcagcggaacaccacctacacgctgtttaagccaaagagggagaagttccgacgccttcgcacagtccccggagggttcatgaccggtgagtttgtccacgttattttcacgtgatcggctcagacgttcaggcggacttggcagacttccaagccctttcgcgaaagaacagcggctatcggtacctgctgttggcggtggatgtgttgtcgcggcgtatgttcggctcacccgtaaagagtaagaggccggcggacgttaaaagggcatttgaggaggtgtttggccaaatgccaaagcttccggaaacactgtacacggaccgtgggctggagtttgtggccaagcccatgaaggagttcttcgctgagaatggcattaagaagtatgagaccagctcaaagaagaaggctgccgtcgcagagagagccatccgtacggtgaagactcggctgtacaaatatttctctgccaaaaacacctctgcgtgggtggatgtgttgcccaagtttttgtctgcaattaacaattctgtgtgccgcgcaacgggacttaggccaaacgaaatcagtgacgtcaatgcgagagaggtgtggaagagggtctatggtgaaggacttgtaccagcggagaagagaccaaagatcaaagcgggagaaactgtcagaatcccagagcccaaacacatattcgagaagggtacagtgactccttcatttttttttctgtatttttttttgtgcttaaggctatattccctactattctgaccatgtgtacaccgttgatgcggctcgcgcaaccaaaccccagcactttttctcaaggactattatggcacaaaaatgaatagaaagttttatttgccagagctaacaaaagtacaagtggacgaaaacacaatgtataggatcgagaaaaaatacaaagaacgaatgagggatggaaaaaaggaaatattggtgaaatttatcggatttccagagaaatattgggtctcaaacgaagattttgaaaaataaaagtacaaaataaacaaattattccttcttacagagacaatcataggggttatgggctttgcaatactcatatgagctgtaaccaaagggcacaattttcagtccacggtcccggagcaccccgttattcacggtggggttgaactgcttggtgatgggcaccgtcagaatgtcgccctgcttcgtgatgcggaagttcttcgtagggtagtcgaaccgcacatggttgccgggcgtgccccacttctccagcaccatttctttcatcttctcaaagttgatgtgcgtgcaggcgttcgagtccaaggtgatgcctcgcagcttcagcttgtactcgtcctcgccggttgcgttgttccgaagccaaagagcgtaggccttgggtccagctgaaaatcgatgaaatttattcaaattattttggccaaagtccttaccacagatgaactcgtcgatggtatggctggggtactcgtccgcgagctccccaagttggttgcctcccttcagcgggtcccccagtgcagtcttgaagtcatagaagatactgtcggtgtcctgaaaaaagaatattttattatgaatattttattgtcacactcttaccatgtataaaatgcgcgtgtcgtagcgctcttcttcaggctcttcctcctcaacgacttccatgtcaacaatctccccctcatccgggtattgtattgacctttttcgggtcaggtgtcgttccatttccgctatcatgccgtggtgcattccccgttcaagctgctgaggcgaaaggaagctgccccttggcactctgaaccggaacttgcgaccaccgcgcaggtgcaccactacgtattgcctctccagggtccctacagtcgcccagctaaactgtacaagggcaatgagaactgtacaaacccacccacctgttgggatatattatgccagacatgcccaccatccatcccggcccatcaaacactaatttctttggcaagtgtactttgaatttattcgttttattgccgacaaatcccggcgtattgctgggcaaaattacaaagaaagagttactcattttaacgaaaaatcaatgaatgaatggtcaaagatcacttttccgtcttgaaaaaggtgttccgtcctccgttcttctgtggtccatcatccttttttggtgtttcatgatcaggtcggtgcagtcaaagttcaacttggcacagtcttggcagaatgtttgggtaaactccagcttctcttggccactgccagtgttgaggatgaagcgcttgtcgcctcgcttgaagttttcgttacggcattcgttgcacataaaggtgaacaccccatactgcaacggaagaagaacattgtagggctgccaccagagcaaacattacctttgggcgtgcgagcttccagaaaattgttgggtagtcgaagacgttggctgctttgcgttcgtcgacatctgtgacttcaacctctgcggggttggacttctttgcgttgttcacgtcctccagcagtttttcccagcgagactttcggcccctcttcttgagcgcaggacgttcctctgcgtgagatgactgcgagtcaaccaatatgacgtcataatcaatatctgaaaaatgagaaaaaatccaaaatttttgtaaaatttgtgaaaaattttacccattttatgttttctttgattgttttgtgcttcttccacgtggttcgcttctataaaatgcttatattttgtgttttattttaaaatttactctggatttcgtccaaaaactgctcattctgcttacgaggagccagttcgaggaatatttttgtgtgttaagatgaaaatgagaagggaaaagtgtgggggtactgtatgtgacgtgacggagaggggggggggagggggtgtcatgtgggaataggccacgcccactcaagtgagagcacgcagggacctccagacgggaggatttcgaaatccatccacagtatgccctcctatgccacgccccttatcattcacttccctgtcagtcatttagatgcccccactgacaacagccttatccaagctgctgaactgtaaagctgagaatttggcagagtacctgaataacccggaagctgtgaacaaggcgagtgcatacctgcgaggaaagaagctcaagacaacctactcgaacaagggcggcactacaaaggaggtcgagtttggcaacttctcgctaaagtctgcttcggagacgtacgccttcgagggattccttggcaagtgtcttttctgcaagaattccctcactttggaaagttcagaggtcaaagttcaccagtacttctacataaagcaccggatccgcctgttgtaccctcagctgaagtgcatcgttgagtaccacagcaaaggtcattgcaagtactatccgttgggtaagctttaggctgcgatgaaagcccataatctcgcacggtttcagagttgttggccatagaggacagtgcagagataacaggcgaaaagccaacagacaccaactacttggactacctcggcttccgaagtgtttggcagccaacccccgtctattgacccgcacagagatgaagcgttcgagaccgtcgcaggagttccccgagattgagttcagagtgggaacgtggagctggactacatcattcagccagagggagtgaccatcttctcttcccggctcaaggatgacggagagaactttctgccatttgatgagatcggtaagggtttggactactgcgaaaaagtaatcagcagcttaagtggactttggcgacaatgccaagtttcgcgtccggtcacgtaacaaaatgttcaccctgccactgagacacccggaagtttaccaagctgcacaagttgcagcggaagcgaatgaactgctggcagaagttccaccaatggctgagaacaatgatgatgatgataatgttgacccaaagtgataactcagtttgttgataagccattgtgttatcattcgtaatggactccccgagaataaatgagcgtgaactcaaatttcccattccctccgggattgttgtcagcgggccctcctcttcgggtaagacgcagttggtccttcgcctgttggggcatgcccgcgagatgtttgatcccccgccgaaagtgataggtaagtccccaatgccatgagtaatgagcagtccccttgggtttagtttgggcttacggtgagtactcctcgcagatccccgagctcgagaggcagggcgtagtcccgcacgctggtcctccctccgaagaaatgctgaaaaagttgccaaaacccttccttattgtctacgatgacctcatgggcgacattgacgcgaagaagttggctgatctgtacaccaagaagtcccaccacaacaacttttcggtgatattcctcacccaaaacctgtttgacaaggcaatgagagtgccaaggtccaatgcgcagtacatctctctgatgcgtgcgcccagcgatatgctgagcattcgtaatttggccagccaaatgtttcctcgcgagcaagggtttctgatggacgcgtacaagcaggcttgtgccgatccgtacgggtatctgttggtgacactacacgcaaacacagacaacctcttacgactgaggacaaacattttcccagacgacggagaaaagattgtctttgtacccaaaaatggttaagaagcaaatggtcggacagcgggtgttggacaactacgtgtatctgaagtcccttgggaggacgacatctcacaagaagaggcgtcatttgttgagcagtgcaggttgtgaggagctgctgactctggtggagatttgcttaaacctacttaacggatccttctggttgacgcggaaacagaaacaaaaattgttgccttttgctaacaccattcgacggttggcacgcgtgagaagtgagcagagtgcaagaaagctgatcttacaacaacaacaaccacagcaggagggaggttcactctttgtccctttgttggcacccatactgttagaggcggctcgttatctgctgcacaaagatggccaataagctcattttcctgccttttgagcattaccgaggattagttgcagcgagagagggtgtcggcgttgcgaaaggagacgacgatgtggcagagcagacaaatttgggattcgtcaaacgacagctggagaccgtgaagaggaaacggacagcgaatgtcagcgaacgaaatgtactgtacaaccagcagctgaggagatatttgaagctgagaaaggaggtcaaggacaggcccctcaaggtacagctaagcaacggtgcgcaactgctgaataagacggtggaaacgggcgtacaggtacggcctggccccgacgagccgaaggacaactccgtattgattactagcgaagatgaagagattgaagtgcctacgccaataagtcagacgccgggaaacagccgatcgcccaggaccaacaagaaagcgatcaagcagaaagaaatgaacgaaaagaaggaccacctcttggccatcattatgtctgatccgcagagatttggcgctacggaccgtgggaaaatattaaatccaaagacggggcgggagttcatcgactcggacctggcctggtcaattgaacgcctagtggaccctcgcccggagaatgccccttcaccaagcggaaccaaagagttgatgaggaagctcgcacagaatccgctcgccagtagcctacttaatcgactattcgttgggtctggacaagtcaaacaaacgggaggatgtgttccctctaaatggacgaaaaaataaacaaaatatacaccgacccggccaatcccggtggatttgcgggtgcgagtgcactctatgcagcggtcaagaagaagcacccaaaactgaagaggaccgactttgatgactttttgcagcggaacaccacctacacgctgtttaagccaaagagggagaagttccgacgccttcgcacagtccccggagggttcatgaccggtgagtttgtccacgttattttcacgtgatcggctcagacgttcaggcggacttggcagacttccaagccctttcgcgaaagaatagcggctatcggtacctgctgttggcggtggatgtgttgtcgcggcgtatgttcggctcacctgtaaagagtaagaggccggcggacgttaaaagggcatttgaggaggtgtttggccaaatgccaaagcttccggaaacactgtacacggaccgtgggctggagtttgtggccaagcccatgaaggagttcttcgctgagaatggcattaagaagtatgagaccagctcaaagaagaagactgccgtcgcagagagagccatccgtacggtgaagactcggctgtacaaatatttctctgccaaaaacacctctgcgtgggtggatgtgttgcccaagtttttgtctgcaattaacaattctgtgtgccgcgcaacgggacttaggccaaacgaaatcagtgacgtcaatgcgagagaggtgtggaagagggtctatggcgaaggacttgtaccagcggagaagagaccaaagatcaaagcggaagaaactgtcagaatcccagagcccaaacacatattcgagaagggtacagtgactccttcattttttttctgtatttttttttgtgcttaaggctatattcccaactattctgaccatgtgtacaccgttgatgcggctcgcgcaaccaaaccccagcactatttgctcaaggactattatggcacaaaaatgaatagaaagttttatttgccagagttaacaaaagtacaagtggacgaaaacacaatgtataggatcgagaaaaaatacaaagaacgaatgagggatggaaggagaggaaantattggtgaaatttatcggatttccagagaaa

SEQ ID NO: 716 - DNA, 1957 bp, Heterodera glycines
cccttccattttcctttccttttttttcacttccatttccctttccttttcctttccctttcctttccttttcttttttttcacttctatttccctttccttttcctttcctttttccttcccttttccatttccctttcctttttccttcggtttcctttttcttttcctgttcttttctttttccttttcttttctttttgatttttaggggcggttttgtcgggaccgatttcccgctctcgggatttcgatcccgaactgctctccacgaagcggcccaaaaaatcccaaaatttattttattactataataatcatgctctatttgtttgcactatttttggatttttagggccggttttgtcgggaccgatttcccgatctcgggatttcgatcccgagctgctctccacgaatcggcccaaaaaatgccaaaatttattttattactatatttaatatgctctatttgtttgcactatttttggattaaagctccggttttgtcgggaccgagtctctcgatctcggaattgtaaatctgatcaatcccgagctccggtagcacgaatcggcccaaaaaatcatagcgacgagcgagtacgccgagcacgcgccagccgctgctgctgcacgaacatccagacacgcatctgcgcctgagctgctactgcactaacaacctgacgcatctacgccgttactggctacaactcgacgggctagggcaagcaagtgcacgctccccacgcatgcccttggagccggctagttatctatatatataaaaacggggggggcccaacctaaatggtccatgtgctaatggatgccgttgagttagcgggtcgcttttttttttaaaagatagctgagctcaagctcttcaaaactgaccgtaggcttttaaattgctcttgcactttttttcgagaaaaactaacttttttgaatttacttttttttttttgccactttttcgatttttgcacatgttcaagttatccgcagggtttgaatgttgcttatgaaaagatgctcctaacgatgccgcgtcttttaaaaaaaaaattggcgcgccagcactaagttgaagggccggaccccctttagcccctggggtgggtcggggtctaaaaaagttagaaccgggggaagtgtgtggttaatgaatcgggaggcccggcgctattggctattattgtagagctcgccgaggcgaacattttaaaaaaaaatttggacccctagccccaggttgagtaggtcatttgtccggaaaactggtcaaaatgggcaaatttggctgggagtgcggggttttgggggtaaatgagtgcgggaagtgcgaataacggggttttaagtgttttagacttttttttgacaggtcaaacaatgttcggggagggtgggacaaagtgtcgacaggtttgacaaaatgtcgaaaattttttgtgtggaaatatgaatttttttgcttttttatggttcggagcataggaaagaggggttttaaacggtttagactttttttgacaggtctaacaatgtttggggagggtgggacaaagtgtcgacaagtgcgacaaaatgtcgaaaatttttttgttggaaaatatgaatttttttggtttttctgtgtttttgaggcatttttgggctggggagggacctaaaaaagaaaccaaaggcctaccacgagccccgtgtgggcggcgcatccaggggggggggcgggggggggggaaattccctccctccgtcaatcaatcattcattccctttctttatttatttcattatctgcttgaggcactgcaacgacaaacataaataatcgagagaaaaatgggcaaaaaaatatcctgcaaaaagagggtgggggggcacttgggagcaaaagggggagaaatgggtccaaatgggggatggacgatgagcgggggggggg

SEQ ID NO: 717 - DNA, 2421 bp, Heterodera glycines
  unsure (1)..(2421): unsure at all n locations
ctttccctttccctttcctttttccttttttttcacttccatttcacctttaccttttctttccccttttcctttcccttttcctttcccatntccttntcctttcctttcctttccttttcttttttttcacttctatttacctttccttttcctttcctttttccttcccttttccatttccctttcctttttccttcggtttcctttttcttttcctgttcttttctttttccttttcttttctttttgatttttagggccggttttgtcgggaccgatttcccgctctcgggatttcgatcccgaactgctctccacgaagcggcccaaaaaatcccaaaatttattttattactataataaccatgctctatcgaatgccactatttttggatttttagggccggtttcgtcgggaccgatttcccgatctcgggagttcgatcccgagctgctctccacgaaccggccccaaaaaatcnccaaaatttattttattactataataaccatgctctatcgaatgccactatttttggatttttagggccggtttcatcgggaccgatttcccggtctcgggagttcgatcccgaaccgcaaccctttatctttgtcacaaaaatccaaaaatttattttcttgctatatttaatatgctctatttgtttgcactatttttggatttttagggccggttttgtcgggaccgatttcccgatctcgggatttcgatcccgagctgctctccacgaatcggcccaaaaaatgccaaaatttattttattactataataatcatgctctatttgtttgcactatttttggatttttagggccggttttgtcgggaccgatttcccgatctcgggatttcgatcccgagctgctctccacgaaccggcccaaaaaatgccaaaatttattttattactataataatcatgctctatcgaatgccactatttttggatttttagggccggtttcgtcgggaccgatttcccgatctcgggatttcgatcccgagctgctctccacgaaccggcccaaaagatcccaaaatttattttattactataataaccatgctctatcgaatgccactatttttggatttttagggccggtttcatcgggaccgatttcccggtctcgggatttcgatcccgaaccgcaaccctttatctttgtcacaaaaatccaaaaatttattttgctactaaattcgctatgccctatttaatggcagcaattttagattttaatttgttttttcaatatttcgtttatttccatttgactcttataaatcaatccatacccccccccaacttcgcttcgcttctttctttttcgttgacacctcatcccccccccagcgatgctttcgctgctcctatgcgttgtaggggcgggatggggggtcggcgaaagtgagcagaaatttcctattgattgctctttcattcataggaaaaagtaaaaaaggttttagctgagcggtttatgtgccgccaaaaccttttttttataagtattttataaatttttttaaagtgatactgtagaaaagaaaaaaaaagtgaaatttgaaaattgaaaatttgaaaaaaatttttgaagaaaatccgaaatttaaatggtgttttgaatttttttattagcggttataaattttttcaaaaaatgaaaaaatttaagaaacttttcggattaattccgaaagctggcactgacaaaaaaatttgttaatccagcaccctgcctggctgtgaacctttgtgttaacgccgggcagggacgcgcgcgcggggctggatggtccttctgcagagcacctttgtgtgatcgctaaagggccagatcagtcagtcctcccccagcgtagcccctggataggatttaaaaaatgagtttttaggcaaaaatttagtacaattaatggaaaatagcaaaaaattaagactgtgtttttagaaatttgtacaattttaatgatgctctatcgaacggcatcattttctgaattttaggttcgtttttggcgggctcaagatcattttaagacctcgggatcaggaaattcgacccatcaaaaccggccctaaaattctgaaactgatgccgttcgatagagcatccttaatttagtgccaatacgatttttcagaattttagggccggtttggctggttccattttcccgatcccgactcttttaaacggtcttggatccaaccaaaccggtcctaaaattctaaaaaattatattggcactaaattaaggatgctctatcgaacggcatcagtttcagaattttagggccggttttgatgggtcgaatttcctgatcccgaggtcttaaaatgatctaaaggccgccaaaaacgaacctaaaattcagaaaatgatgc

SEQ ID NO: 718 - DNA, 701 bp, Heterodera glycines
cgatgccgactcttttatccggtctttgcatccatccagaccggtcctaaaattctaaaaaattatatgggcactaaattaacgatgctctatcgaatggcattaatttcagaattttatggctcttttcgatcgcccgaatttcccgatcccgaggattgcaaacgctctgcagccctccccaaatgctcctaaaattctgaaactaacaccattcgatagagcatccttaatttagtgccaatataattttttagaattttaggcccggtttggttggatccaagaccgtttaaaagagtcgggatcgggaaaatggaaccagccaaaccggccctaaaattctgaaaaatcgtattggcactaaattaaggatgctctatcgaatggcgttagtttcagaattttaggatcatttggggagggctcaagaccttttgaaatcctcgggatcgggaaattcggccgatcgaaaagagccataaaattctgaaattaatgccattcgatagagcatctttaatttagtgcccatataattttttagaattttaggaccggtttggttggatccaagaccggttaaaagagtcgggatcgggaaaatggaaccagccaaaccggccctaaaattctgaaaaatcgtattggcactaaattaaggatgctctatcgaatggcgttagtttcagaattttagg

SEQ ID NO: 719 - DNA, 5909 bp, Heterodera glycines
  unsure (1)..(5909): unsure at all n locations
gactatgactccttcatttgatgcattagcaagagatgaccaatgcaatgatcattactggccaatccctgacaatgagactttgtgatttatacatcgcaccgcaattggggcgaggcctgctcgaacaccgcctgatccactgaatcaatctttgtgcacgagctacagaatccctcttaaatagatcaccgacaccaaaatgaacgttgattctacataaccaatatctattgtaatataagtatttgacaacggttaacacaatattttaaggccttcccaagcatttcaaccggggcttttcgctttccccgaaaggaagcaacacaaatcgccatttcctccatcttgaattggctttctgcgcgtcctcagggctctcctgacattgacgaaattcgtctggtcgcttttcaagaggctgacttcaaattgtacaagttgatgcttgaacaagtacgtgccgttgggttgaggatttgtgttattattatttcttttattaggtgaagcgccagctgagcgctgcaagaaggtcaacgccgttaagcacggacccttcccagctttcttcggtgctacaattctttataaatttttattatgagtcattttacagagtgtggcagtgactccagtaactggattgtcccacaaaattggccggttgctgtttgacaggacgacccatgccaccagtccacctgccaccaagaaaagggcaacacaagcgacaacaccaacacaggacactgatttggagataatggatgtggtggaagcggttcctggcccatcacacatgcgaacagcccaagtctcatcgcagcagtcccgtcaagtgcaaattcagaacgttattggggatggctcttgcttcttccggttttaataagatttaggggcttttttgactaaatcttttcagtgccatcgttaatgcacttgtcggcgaggacagcgaagagtttgctgccaatttacgcaaacatctgttcacgacattgggccgcatggttggagacccgaattgttatccgaaagggttcacaagccgagaagagttcatggatttcgcgcaggcatttttcttggaacaacgtgacactttcgagcaatacatcgcaaggcgtctgcgtcccaatgactgggctgcgagtgctgatgcatttttggcagcaattttactgcaacagacaattgtcgtggttgtgcctttgtaccacacacgacttttgcctgggcaggagcgagaatcggtcaattactttgactcccgataccggcataggctcgagatctattttgccgacggccagcgaatggtagtgtattttaagattttctaaaattgataatttttataacaaacacagatggtgcaccaagacttcccggatgatcagtttggcaattttacggcgactcaaggcccaggtcaacaaagacaggtcattgaccccgttgtcatctggtacaatgggacaaatcactttcaaaccgttgtattggtaagttactgaccgtttaattcaaaacacataaaaattctatgtccacgtttacagccgtccaggccgtctgcctctcgctttgcagtcgaaatagtcacttcgccgcagtttcctccttcgattcacctttttggtgaagaagttgaagctatggaaattgcagcgcctgccgctgccccttctgcgccaattccatcgacgtccagtgggattgaggagaagcgttcgaccaccgtcacagctccatcaatagtgactgaagaagaagatgtgttcctggaagaatcgttgccgaagatggagtcctgcaaatgctgtaatagcgctgttgtgccaccggcattagaagacgccaatgtccatctaaaacaacagtttgcctattacggctacattagcactccctgttgtggcgacttccatctgagatgcttcgaaaaatggtcgcatttgtttttcgaagtctgtgcaaattacttctatctttaggaaccaaagtccgccctcttatgcgctgaagcgccttcacaactacgatggtgttgatgacaactgtccaaattgtcacaggcgtattgtttcgacattgtctgatgacgtggccactgaacatgccaaagaggagcgcgcagattcatctgagcattctgatgtgaataattaaaacaaaaaaatagctaagggattactaattttaggaaccgactgagccagaaagccagcagctaactgaagcagttgatcttgctctgaacatcaacgaggagctttatacgccgatcaaagttgagtatgacaacaccagcattgcttacttcgcagtttacaatgcaatgatccgtgcgaagaacaactgctacagaaacaggccgacaccaccgcctgagatgctggctgaattgagggcgtgctccgaaaaggagaaaagcctttactgggacttcagtgcgtcaactaaacgccatcaatatgcaacggagcagatgcttaagatgcaggactacttgaaggctacagcgcagcccaaacatcggcaatgtgtgaaggagcaactttgcgactctttgaaggaggcaacaaacaacaaggccccaataatacgggagcagcattgtttgctcatccaagcgctcgaagaacagctttacgacatcatcaagcagtttctcatgctctggcactccatgcaacagatcagtcccagcactgcgtcgttggaatcaatgcaggaatggctcctttcttcggaggacaacggtatggaactggcgcgtttggccgacagttgggtcgaacatctggccctcatcaacgaaaacatcaaaagttgtgtgaagaagtgcaataaggcgaagaggaggacgagcttcatgtcggttggccaacttacaggcctcctccaagcaaagctaaagtagatattaatgtgtagcaaaaaaataacttaacaattaaggattgtgcgtaagaggtcaaaaaagaaggctgtaagggttgaacgccatccgctgctcgaccatgtttttgaagacctgcgtcaaaaacatttccagctggaagcagccatacgaaagcaggaagaagctcaaaacacaacagacggaggacaaagaccgcgggccaattccatcggcaaaaaacggcgaattgatgacaaatcggtgactcgtgaatcgcccgtaaagcgacgggaaaaggccgcagatgcagcagaacatcgtatgcagcgaccggttctgatgacagctgaacaagcaaagacattggaggcggagcgaatcgaggcccagaagcgcatggctgcagaccgccgagcgcaagagagattgcgccaggctgaccaattcctcaagcaacatcttgctcagcagaagcggcttaagcagcggaatctggtctggggcaggcaagccgcatacgagcgatacatcaatgagcggttggagaagctcaaggccgaggtcaacgctctacggaaatctgcacgcgagtcgatgaacttcacagaaattgacatatgtcagctgaaaataattattttatcaaatagcgtcaaatatttagttctgccaactcgccaagctgttgaagcatattgcgctgacatcattcgctatgccaatcatcatgctgaggaggatgttcaaaaggcaattaaggaacatcagcagattctcgagcgacgacagcgtgccttggatgaggagcggcagcgacaaaaattgcttagcacatggcggggttaacaaattaaatggaattgcttttaaaaaacaactttagacgaagatagacaatgggcatatcgagaagacccagtgcttgctgccgagctcgaaaagataagacagcagaaggagcaaattgatgttgagtatgcggaagagcaggccaggcttcgtaacatcagaagagccgaggaagatgcacggtcgcgagcccgcaatgagttgcttggcctctacgattcaccagaatctggtaaaagcaaaatttgtagtttcgttcgagaccaaaatttcagagggttggtcggacgaagacctgttctacaacgtccgtcaagccgacagaatgcccatcatgcaagaagtgggagtggcgcagatgccgcgggaggcaattcgcgcaagagaggtcatagatcggcgcttgaacttccaagaggccgactatgttggtgagatgacgccagctaacaaaggcgacgacaacagaggtagccgaaagtaaaaaattttgtaagatttgtttttataaggacccggttcgcatccgcactttacatctgtgaacatgcgcattctgggaagaagagacgaagaaaggcatcgaagagcggacagcgtgtgcctcatctgccacatgcagcttcttcgtgggcagctgatcagcgttctgccttgtcaaccgtcagttagccacatcttccactcgatgtgcatcaggaggtggctggcgacaaatcgcacgtgcccagtctgcagacgggatgttcgaatccgtcctttgatgtatgagtcgactcataaactgtcacaaatcaaggaattaagggaccaaacggatgatcatctgcgggcattcaacgagtacgctgagggcttgtccaaccagccgatctcgacacaacggcaggacgacgactttgtggccagggcttggtatgaagtcgttagaacaaataggacttatcgggtttctaggcggcactacgagcagcttctccggcctgaacacgacagaaacggagcagtcatccgtcgaccgatgcggccacggctcgcctacagacaggtcatgcaacacataaacagaggaaacttcgacagatttggtggccaacatctcacctgggacatcaccgacccgaggaacgacgaagaagtcgcataccagatgtgccagacacttcttcaggaacgagccaaagaagatgataaaaattggggatgaatttggaaattttttttgataatttttatttaaacatcatttaaccattaattttcctttttatcttttcttcctgtattttatgtttcacaacgcacaattatatatttatctttctgtcttatctttcggcccaatgatcctgagccattgccttttaaattagcaaaaacacattacttctaaaacaatggctcaggggagggttgccttgcgcaaagagaccaccttcccgctggtgtgaggcgtcagtacttatttgggcaaagctcaagtaaggaagccaagagtctctccattcgaatttgtaaatctgatcaatcgcacgcaccggtagcaagagtctctccttgaaatcattgtctctcacaagtcttgcacacaccggcagctgctgctgcacgaacatccagacacgcatgtgcgcctgagctgctactgcactaacaaccgcgacggtgcacacgttacgcatctacacctcgacgggctagggacagcaatgggtactttgcgcagccctctaccgcgcccggctagttatctatatataaaaaaatggggggggctctttgcaaatgtggcccgcacattgcgaattctgcacctatcgacccaattctttttgcgttagccaactgatctccccttactccaacttcaccgtgcaaaaaaatttgggaggccctcggcgctgagcaacgctaacctgttttcgctaagtgttgcgcagcgcccggcggcgcacagctagcggctgggcgccgcttggcgaaatgcgtgccatgccgtgnggagcatttnaaaaaaaaattggcccgatcccgacacttggcgccgagatatgctaacttttattnggctgtttgcgccatgtgcagccaccttttgcgccccgtatgctagagagtcagaattttttccccgcgcgtcccc

SEQ ID NO: 720 - DNA, 195 bp, Heterodera glycines
gggggcggcagcccccccccaggagaacacccatactaaaaaaaattatttatattatttcctttttcctttcctttttttttcacttccatttccctttccttttttttcactccccttccatttccctttccttttttttcacttccatttccctttccctttcctttcccttccctttcctttttccttctc

SEQ ID NO: 721 - DNA, 4235 bp, Heterodera glycines
ttatatactgtaattatggaggagggggattaatagagatccacagggtgtctccagttaaaattctcgacgcattcagacagcttaaagtcatccggcttaatcccagacccaggaaagtctgttctcgtgcgcagaattgcctggatcagatggcgcataacgcgttcatcagcccgaactccaagcagtgatggcgcatacaaggaaggggtcaaaatgccctcgatcagagagcacatcatctgcaaaacggacggcattcccataataaatttggatcggaatttactgtttatggttttcgacatttttggtggccggaattccgattaccggttttggacatagttgggaattccgattttatacatatttggatgtcggaaatccgcttttcgacttttgtggccccccggaatgtcccatccctggtgtagagaatattttgaattttcggcttttttggctccggcgccaaaagtgatcagaaaaaaatcgatcaaagtttcgacaaaattacttaataaccccgaaaaattggcccacccaaaatgtgttctcctcacagcacaccaacagcagcgaggcgacaacaaatgccatgccttggcaatagccaatctcggggaacagaaatgccagggcacggagcacacggcgcagtggcgcaatgccaacggaatggggccggccgaagcagaaatgggcgggcaaagtgcgcagcaggtccctagtcccggaaattatatttaaaaaaaagtcggaatcggcactcggattggaaccaggccgggatgggatttccgggattgaaattctgactttgtcgggatagtcctggtcccggaattgaaatcccgattttgccgggatcccgaaccgatccggttttctcgtgattttaatcccgaccctgggacccaaatctcgattttgtcgggatcccgatcccgtcccttttcaaaaaaaaagccaggatctggacccaaggaaaatcccggcaggatcccgatcccgcccgggcattccaagattctcgagcccgctaagtgccaaaaacatttttctgcaatttcataaatttgttagcttgacggagtttttggcacttcaaaattttagactgtggtcgagactctcgaactcgttgagtgtaaaactcacttttcaatttggacattgatgcacgccggcacactgtccttggtgcacttccggacaattttcgcgtaatcacatggggctgaaaaaagcaaaatgcttaattaatatatgaataacgacccaagatttgactaatctctgagataattgcgcgaaaaattcgcggaaaattccacaaagtttgaagtgccaaaatcgctatggcacttacggtgcccatgaaaatgccaaaaacggtgccaacaaaaatgccaaaatgacaaaaacggtgtccaaaaaatgccaaaaacagtgccgaaaaatgccaaaaaacagtgcccacaagaacgccaaaaaacagtgtccaaaaaatgccaaaaaacagtgcccacaagaacgccaaaaaacagtgtccaaaaaatgccaaaaaacagtgcccgcaaaatgccaaaaaacgacgcccagaaaatgaaaaaaaaacagtgaaacaaatgcgcaatgcgcacgcacattttttgcgcttttccgcggcactgcacagccgtggccataggaacggcctcaacgagtgcggaatgccaccgtcgttgaccatcggcatgaatttgggcgtgtgccgcaaccgttgcatgtccaccttggcccagcacagttcgtcctccacttgggaatgcgcactttcgatcagtgccaaccaacgcattctgattaattttattttgccatgcatgattaattgccaaaaaaatgtgccatcattagcaaaattttaaatttgatttttagcggtgtatttttcttttttagaaatcccgaaccagaagtatgtttttaaagtaattaatagggttataagttgtatgcactaaaaatccctcaaatatgccctaaaaacccgaaaaatgcctaaatatgcactaaaatatgccttaaaaactgccaaaaatggtttttaaccctcaaaaaaatgccaaaaattgtgtaaaaattcagagactttaaaacaccaaaacaatgactaaggagcgttttcagacaattacaaaacattttaattttaaaactttatatatgaaatttagaatttataaaatttttattttgtgctaaaacaaaattacattttttatattaagaaatttttttcaaaaattttcacaaaaagttcaaaatttttcgatttttaaaggtatttttttataaaaattctcaaaaagtccatccttagggggtgtatttttcgctttttccatttttttacgaaaatttccaaaaaatgagccgaaatatgctctaaaaacccaaaaatggcgaaatatggatttattcccgaaaacccccaaaatatgcttttatatgcactaaaaacattaaccaaatcaaaaaattttaacgtagaaatgctatttttaagcccctttcttcatagcatatgcgtagaaaaaatatgcaaaatcatacaacttataaccctagtaattaacaatatttctttttattataattttttttttgtggtgcgttttttcaaaaactttggaatttttgaaagatttaacaaatttcaccaaaaaataaatttatttgttgtatcaacccttcctttctttaaaaaagcaaaattatttttcgttgaatttttttttttaattttttttttggatttcggaacttttggcaacaaagccgagaaaaaattctggcctcggcatttttatgaaggtaaattgggttctgtggtgccgaaaatttggaaaaattcttgattccaattcaaaaatcaaattgcgcaggacagtgccaattcttttggcattttgtccggtttgaaatcattgattggcactttttttgtgccacctgtgcgacgagctttcaagcggcggcttctccagcgttgggtccaccgtctgctgctgatgatcgttctccgtttcttgcgcgagccgaaaaccaaactcgtcgaacctttggcatttaaattccaaaatttatttcggtttttggcatttaaaaaatgccaaattttgaaatttttacaattccaacggctcctcaaagtattgcggcaccagctgaggatggagtgccgtgaaaggtcgtccgccgagcgggaaaatgctttgaataatttccaacgcgtcctcctctttggcaccgcttttgccaaaactgtcaaatttgtcgagactctcgaccacctcgtcgacatcgtcgtcatggtcagctttcaccaaattggcggcgggaatgccttcgaattaaacaaaattttgtcagtagtgcctaattagggcaaatcggctcagcccatgggaattatttggaattttttttagttttaaacagctcaattttttttttaaaataatgacaaaatgtttcaaattaacgcttttatcccaaaaaatattccaaaaaaaaattattatttttttttacataaaaaattgaagaaattatacaaataatgaaattataaataaattaaaatcatatttttacattgtcaaaatattttcataaaaaaattcaaaactaagacagtcttagaatttttcccaaaaataagcacaaaattcacttgcaaattttgttttaaaatgatggcaaaattcagaaaatagggaagaaaaaaaaaatttatctttttagatttaaatacagaaaaatttttggcgattccgataaaaatgctgtttttccttgattcttttttgaaaattaaattttaattttaaaaagtttggtggagaggggaaggggctgtccccgaaaatcaaagcccccgccgaaaagtgtgccaatgccaacctttttgatattttgccatccgccgacgaaccgattttgtgggtgatggtggttgattcaaaatttgaacaaacaaatacgaaataataatgtccagccgcagaagaagctgggaaagaatggcacacacagcgctaaaaataatgccctgagggcattatcgacggcattttgtcctccctcccctggcaagaggaagagagtgcagagaaagaacacaggggggagacgacacgcaagagacagtgcagtgcgcagagaaagagagtgacgag

SEQ ID NO: 722 - DNA, 3149 bp, Heterodera glycines
  unsure (1)..(3149): unsure at all n locations
ttcctaacttgattacattttctatgcttttaaattagatggttgcaattcatagccaattaaaaatatttttattttttaactctttaagttggtgcccaaacttcccggtgcccaaatttctggtgcccaaacttcccggtgcctccgccccccaattaatgagggggaagggagtgataaacaaagtgctgccgacaggtcaaaaaaaaacggaaccaaaatttcttgaaatttttgcgaatttttaaaaggaatttaaatacaattttattataaaaataggtaatagaaataaaaaatattttggcgctactgtaaaggttaccgattttgaaacaaaaggggggacccttttgttttgcaaaattttttaagataaaaaaccacggactgggacagtttagtctggccggtttagtctgaaccaagtttagagcatcataactcttttctttgttgaccaaatccaacaatattggtatcattcgacagctcttaacaagctctatcggcttcccaaaaaccacaaggatataccgacatatgcaaaaattctgactttttggtagtattcatcttgcaacttttttataggtttttcaatcgcttagaaatagcttatcaaaagcttctaaacatatagggctttagaatgatgccaaatttataaaatttggccagctgagaaaaaagttatgatactttaaacttggctcagactataactgccagacttggtgtcccccacccttctttttcacctcctccccccccccccgttcagttgaacttttgtctgtgaatgacgaactcaacaccaccttcgaaaagtacgaccgatgcatggccaattacaacgcaaaaggcgtcgacctttcgatggtggccagcggaagtgggacaaagcgacaaaaggagggggaggacgaactgttgatagacttgggaggagcagcggatggcatcgggacgaagggaattgcggacaaaatggcacaaatcggtgggggagagagggggggggggagaacggactttaatcgtggcacacactccggcacagacattcaccgcgacagaaaccaacgcgaagggaaaggcgccgggatgaggtgaacagccaacgaaactgagtttatgggattgcctgaattgggaaaggacgaggcaaaagtcaaaagttttggttggaaaaaaggcaaccggataaaaaaacgaacaaaatatttcacagagaccggaattttgaaatggccgggacccgggccggtggaaaatgaccaggacgggatcccgggcccgagactcccggtcccaatttttgggccgggggacgggaccccggtccctaataccttatttattgtgccgtcatttctccttttcccattgtcagcaacgaggcgtacgtccacgaccaggccgagttgcccatgcgtacggttgtctacaacaaaacggaaatggcggacgaaaagaacggcgaggaaggtcacacaattaatacacaacaaaggagttcagtgttccccgtttttagcgccggaattgccaaagaaaaagccattggtcgacgacggactctgacgattttagttcaaccaaagccccggaggcaatttgttggcgacatttttatactctttggacagagttccccccccccccccccccctctccgtcccataattttccaattttaactttaaattcactctcctcctttatattgctgcagctttgtgataactaaatattgacacgatattttactgtactgcttgtgtagcgattcgaatgcatcaaatccaccgtatctctgttctatttgttttgcagctaactttggaaatttcaataaatgtttgattatcattacacacagcgtttcaactttggcctttcatttagagacacagctgtgcagggggacggaaagtcgagaaaaagaaggaaaaaattaaaccttttccctttaaaattgagagaagggaacctaaaatgagatggtgctgaaattcagtactgctggtctgatttggccgattggcgagcccggggctgcgccgaggggcctcgaactcataataaagaatactgttagcgttgaagcactaaccaaaaaataaaagcaaaatttactttattgcgtaaaatttgtcaaaatggtttaaaaaaattcaaaattatacaaattatttgcatatgtacatgaaataaaaaaaagtggggggggggggtcagtggccaattttgcgaagggtccgtctggccatgtaaatcgacattttttccctttccaaaccatttttttttggttcgcctgaccctggaacaatgcctggaaaaaaatttcccaaacaaaaagcattcgctttccatgactaattttcttaaaattttggagaaaatcaagtgtttgatgaaaaaccttagacaaaatcagtgattttgcaaaacccgagctcagattcgtgatcaggcttttctgtttcgacaaaactcggcactttttatccgtttttatggtgccatttcaaacagagacccggaaatctccgaaaatatctgcctttaaaaaaattggttgttcaaattaaaataattagtatttatgcatatttatgtaatctgcaagaagtcggaatacacattggaaatcatcagcattttccgtcacttttactctgccgcctgaatgcgtggtgcgactatcagtcccccgcggcgacgttccaagtaacgctgcttcgcttcttcgattgcgttttcgtcgctgcgcttggccagcacttgtctgattcgtgccattctctgtgcctcctcgtcctgcttctgctccgccttctctctgctgcccccgctttcgtcgcccttccgcgctctcttccttccgtcgtctgtcgtcctaccggtctctctctcttccttttcttctgtcctctcccttcttcgacgatgtctctcttcttcgggtcgttgttgtacttcttcccctccttttcccccttcttccgctggtggcgttggctgtcgtctctgtctttttccatctgtcttcttctctttctctccctcctgccgttttctctcgtcccttccttctttctcatgccgntcctcttcctctgttcttcctttttcct

SEQ ID NO: 723 - DNA, 3142 bp, Heterodera glycines
  unsure (1)..(3142): unsure at all n locations
ttttccgttttaatccgtttttcttccgctccgtcgtcttcttccattttcccctcttcggtcaatggaccgcgggaaatattctcaagcattgttcgattgaatgcttgctgccacattttctggtcccgcacgtctcgcatctctgacagtgagtttggtcggttaaatcattttataatcatcttccccaattgtgccccccccactcttcccgggcacactttcgagtgcctcctcccgctccatctccgttttgtgccgttccctctcctcaatttgctgtcggtacgcccccgtgacgaacacttcttcgtcctcaaattggcccgcctccttttcgcgttcctttttgtaagtgttctcctccaccaacagtttgctcagctcgcgctgtttgtgcgctttggccaacaaatgggcgtatttgggctgaaattgtgccatgaatttcttccaactcaacaagttcaatccgcccattttgtccacctttttctctttgtccgcctccttttgcgccgccactttttggtctctctgctgctgtatttcctcataatgcgtgtcgtagtcgaaaatgtccgggttttttgccaattccttctcaacaattcgctgttctcggcttaaacaattgtttttcccattgtcccccattccattttgtttttccctacgcttttgtcccggccgatgcggcgtatttccgctcgaatttctccgccgcattttgttgttcgtcgtcgtccgattcgtctccaaaaatattggccgtctttttcggccctaccgccgtctcaacgcttttgcgcacattcaatcccatccgaaatttgccattggcactcattttgaagaaaactttggaaaaaagtatataaaatggtaaaggaaatggaatcagtaaaaaaaatttgaaaaaaacaaatgcataataaaacaaacaaaaaaaaagttgaaaatttaatcaacaaatgaatggacccgtaaaaattaacaaaatatatgaaagaaaagaggaaaatagcgacacaaaagttatggagggaaatgccgaagtcaaatggcgtttgaccaatttcaaaaatgtctcttcatgagagttcggcccgttatctgaagggaatcggtttaatacttccatttaaaatcctctctcgtttaaagcattcactaaggcaattattgctaattaatcatattcgttcgatccaacccgtgtccgcattttctgctcccgcttttgcaaaatgcgttgtctcagctcctcctcctcgggcagtccacggtcgcgcgcgtattccgatgccaattcatggattgactgtttggactcgaccgcgtgttgttgctgcgccttaaaacttttaaataaaagaaaaatgccaacaaaacaattaaggcaaaggaggcttctgtgaattctccaatcataagggtcaaccaaaatgttggtctgtcggccactgttcagtccgctcaccctgtacagttcggcaatgtatcgcagcagtgccttcgcctgccgtcggcgctctctccacgacgactccaaccgatggtccaatttccgcttgagttttctgcgcagaatctgctcgaagttgcgctgttctcgctgcaatttgttaattaaaattcaaaggaaaggaccaaaagaattgacaaatttcaaaaattaacaaaattcgtcaagatttaaacaattttccggcccattcgttcctttggggttactactcatttttttaatttaaaatttagttttgtagtcgtgggtttggcgtttctctccgcaccaatcgctgccgtcgctccgctcgcaaaaggcgtcgcatcactctttcgcgttcctcgtgctctctgcgcgccctctcctcgctgatcatttcctccagtcgccgctcctccgcctgcgctcgctgctccgttttgtcgcgttcgtattcgatgcaaatgcgtcgcaggcggcgctgagtgattttgcggatgctcaaatgggcacttcggtcgaagtccacctgaaaatagtgaacaacgctttggccaatgcctttgtgtccgtctcactttgattttcgcctcccgaagtgacccgctagcgcacttttgcaccaacattttgccgcccaaaaaggccatgacattcacaaaggcgccgtactcgcggaattggacgtacacttcgaaaaaagggtcctaaaaagaggcgaaaagggacagaaatggattaaaagttaagcgatgcctttgaaaacaaattcactcattacaccaaaattgctgtccctctgacctgtcccaacagccacgaggagatctgaatgccggagatttcgggctccatttgcttccgcaacgggtcgcactgggggatgtccacgcaggcgacctcgccaaagtcgctgaaaatacgcaaaaatgtccgttccattgtttcatcgacggacgactaaaagagggaaggggaggggataagcattgggaacaattatttatttatttatgcaaaaaagaaaaaagtccacaaaagggagtaatccacttactctgcggacgtgtcatagattaaattgtcctcgagtaatatggattaaacattaaacaaaaaagaaatcacaacaaaattacatataagaatgaggtcaatgattaataaaaccaaatcactatatcactataaaaaccaaatcactatataaaatatataatatctttaattaaagagataattcacttttccggtcattttatacgttaaggagtttaattttagttttaaattgatttaaagaaatttattttaatgattttctttatccagctgattcccacatttttgtagcccctccccgcaagggaataaatttttttcctaatttatatttttgtgttaaacctataaaggggacattanagcgtttagaagggttgaaaatttttaatatatctagatctgttcggccataaacaattttatgcgccatgaacagatcaaacagctttcgccttttctcaagtgttggcagttgcaggtattctaatcgattttggtatggaattggcggaaggctgcatttaaaaaatactcttttggtganatatttttgacacttttcgatttttttaatattttttt

SEQ ID NO: 724 - DNA, 2540 bp, Heterodera glycines
  unsure (1)..(2540): unsure at all n locations
agtntagaaaccaaaaatcaaaagcttacaaaaagcaaaatntaatgaggccacaactgtattaaaggcttgtatcgatagttaaatagagtttccgcttcctttatcgattattaagttattttattcaaatgcaaagaagtagacaaatatttgaattatatttgaatttgttgttgactcactcgaaacgtatgaaaaaactatttgcaaaaggatcaagcaattgctccattttcttgatcactcaaactgacctttttttgcctatttacgtgcaattgctaccaattaatttgacccgaatgtatttttaatatttatttatttatgcaaaaaagaaaaaagtccacaaaagggagtaatccacttactctgcggacgtgtcatagattaaattgtcctcgagtaatatggattaaacattaaacaaaaaaagaaatcacaacaaaattacatataagaatgaggtcaatgattaataaaaccaaatcactatatcactataaaaaccaaatcactatataaaatatataatatctttaattaaagagataattcacttttccggtcattttatacgttaaggagtttaattttagttttaaattgatttaaagaatttattttaatgatttctttatccagctgattccacaattttgtagccctccccgcaaagggaataaattttttgcctaatttatattttgtgttaaacctataaaaggggacattaaagcgtttagaaggtttgaaaatttttaatatatctagatctgttcggccataaacaattttatgcgccatgaacagatcaaacagctttcgccttttctcaagtgttggcagttgcaggtattctaatcgattttggtatggaattggcggaaggctgcatttaaaaaatactcttttggtgaaatatttttgacacttttcgatttttttaatatttttttgaagagacggattccaaacctctggagcgtattccaataaaggcctaatataagttttatataacgtaatccaaatcttagatgatttggatttaattattcggaacaaggaacgcatacgtaaatacgcattccttgttatttggttaatatgatcggaaaattgtaatttgttatcaatgtttactcctaaatccctaattgtatccacagcatttattgtattcccataaaatttataagtttcttttgggttttttgaacccaaataaagtacaaaagttttttgaattgaaacttttatttgccattcgcaccgacttggaaccagtcgaacggcagtccccccacgtagacggtgtccggcctttctcccggctccctttcgtccattgggcatttgccggcggctgaagtgaagaattggtcccaatccacgcgggtgggaaagtccaatttggcctcgtccgctttgactgtcaaagggtcggcgaaaccaatggcacggaaagaagggccattcagcagcgaaatgacctgcaaagggaaggaaattgggtcaaaatgaacgagcaaaggcgaaaaaagccatggtgcataattaacagcactattttaatacttgtgaccaattaagtcccaatcttaaactatttttagcaaattgttttgctatttggcattggtcttcccatttttgtactgctccaattttatgcatgaaattgaaagagtacaacttaaagacgaattctgactttccaaatgtttacaagggcgtagtcagaaaactcttggcttcggggggggggggtgaattcaaaaattcgatttttaggggtgtcgggtgtattttattttttcagatatcccgaattaaatggattttgcagggatttgtaccgttttcaccgcccaaaaagctacgttttgccattttcaaaaatatggtaaattagaggcccctaatgtcagccccctggctacgcgttgttgttcattaaattgtgttttttcggcttttccttcgtgcccgttttctgttcgtcccactcacttttttcatgtctctgtccgtgcccaccgtggcgatgaaatgcacttcctccagcgtactttcgtgcactttgaaatcggtcaactgtgtatttctttcttttttatattcacctcccccccccccccttttccacctcaattgggtgcaacattttcttaagccgttcacggatctcccaattggacctaaagacaatacaattgtttttaatttttgatgccattccgtcgtttgctcacacggactgtcccatttggcgcagtttgggcagtgccacttcgatcatcactttgtaaacgggacgaaggtacaggtcattgtgtgtgaaaaagggtagcaattcggtggaagaagccgaagccatggccaaaaggaaaaattgacaaataatggaaaaaatggaaaaggattaataaatattgagagaatttgtaactaaaccaaataagagtcactaataaagttttatttgaattataagtattatctaattgagaaacaaaaaataacaaaatcaa

SEQ ID NO: 725 - DNA, 6411 bp, Heterodera glycines
aaaaaattccccggtttttcggccactatggaaccccaagaaatcccacccttcatgggaatatttcaggtcgcgaattatttttgccttcattattaacacttggttaggtatttgctcggggttatgaggaaggaatgacataataacagaagagaacagtgcatttgttgtggaggcttcgtggcgatctcataagttttgatttggggcgatctaaaagatgggacggtcttagagttggttcccattttgagcgtttttccgatttagcattttcaggttattcctcgaacgtaaaaatgttttatcaccatcccccccccacagaacgcccttccaaaatggaggtccacggcaaagtaatgtaagtgagcagtgcattcagttgctcgccgccctcttcctcgacaccgtcctctcttcggtcacgcaaaagttgcaaagccttgccaatgccgcgcatcgaccaattgccgggcgtacgaaggcccccagccaaagtatggacatctaacaaaaataacacgaaatatattatcgaaaattccaaaaatttcaaaatggaagacattttagcaaagaatcgagtggacagttcgtctgtttctttgctttccttcccattttcccacccgttgcgctcgccccttccgccgtttcgcttccgtccgttgattctccgctgaaccatcgcgtcgccgtccgttggccgccataaaatgccgtcggcgtcaccgacggcggcggtccgccgggcgttgccgcaccgcgcgagtgccgcgctccaccgttaagcaaacgcgagaagagacgcctaccgccgaacgaagcggcgccaacatcagacacacgacgggagagattgaactgaagggaaagggaacagaaatgaaagggcaaaggacgaaacgaactcccccgactcgtactgttcatgtgtaaattgtatgaattgtctaacagtacggaccgacttagtacgaattgcatttctccaaataaaaatgagtgaattgagtaataattgtttcgactgtaagcattatttaaaaaagcatacgtcaaaacgaccgccgacattcatttctaatccgttttcgctcatcggagtctcaaatccgcagttggccacccgagtgaccgccatttcggcgaaccctctcccgcgagggccgcgcattttcacaaattcaagccgtttcggtgtcattgacgagccgataaagcgttgggcccaattccaagcgccggaagaggaagtttgctgtaaaaaaatgaaaaaattacactaacaaataaaaaaaatacccgcgaatcatagagctttttgagcacatcgaaacgaatggagccaaggaaaatgacggcctctgcgtttcggtaacggtcccggacgaccaactcaacgcagacgcattcgccctcggacacgaccatgtcggtgaacaccttggaagcggcggttgttggtcacactccaaaaatcttattagccagggggcgtgtaccccgaaacgaaaaaagttttaaaatcgcacgccatctgtcgaatttgtaggctaccaaattttactttactgtcaaaaatgaaaaaaacgtaaatataatcatacggtttttttaaacccgccaattttctcccattttttattttgtggctgtttgcttggcctttttattcggcaaaatacctcgtcaaaactgtcgatggggaaaaaaatcttcgggtaagtgacctcctcacattcgccttttgcgtccattcgacgacgactcggcgaagggtaaaccctctgaaaatgggagcatttgaaaagagaaacggcttatgtgcaaagttgcgacaaacttgacaagttttgcgatggatttgcaaatttgtcggcgaattttttgtacacaccgcaacagtgacaaaataatccaactaaataaatgtaaaaattgaaaattacgaatttggggaagaagcacctgctgaaggatcaaatttagacaaacggtctcctgccaattcacattttggtctccgggcatcggtttgtttttgctctgtcgacggaacacttgcaaatgactgatctgacaatgaaatggatcgaagatactcaacaagtaagtacgaggaaaagtctttttcatactcaatacatatgatcccaaaaattttccccggcctgcctattggtatcaccgaacactcctcctcccaaaccccaaaaatttactttaagttcattacaggaagacaattaactgttttttcagtaagttaaacatgaattatttaaacaaaggctcattctcgatttattcagcaagaaaaaactaaaaaaagtctataaaaactgtcttttgcccacctccgagccgacggcacaagcaccgccgttggccattcgcacaatcggcacataccaaagcatgtcgtcgctgtgcgccacacatttttcccatgaacaattggccgggtcgagaacgaactcgcggaacagcgtggaccaacgctgctcaaacggaccgacgacactaacggagggcaaatcatcatctgtaaaagacaaaaacaatcaaatggaaatggcattttaaaacggcacccaatgcattcggtcggtgctttatcagtgcacaaatttgctgcaacagtctcgaaatgcacgcgcattttccgccgccaccgctcggagtgccgccggtcagtgccaacggtgccatcacatttctctttgtttggctttcgtttccttttgtttcattgcttttcagctgatcattagtgttggtggcatttgctgctgaggatgaagccgctgccatctcattttccatgaccaaacgaagcggggagggacaaagagcccatctcaatggcaagcaattaaattaatcgacatggaaataagtataattcggcattaaatgctttcaaattccgagacttaacatgaagcatttaaaaatcagatgtataggcctttcgttctttaaaaaaaaaccaagatgtttgaatttttaatttttgaattgaaaatttaaatttcttgacggatttttaaatatgaaatgggtactgtccaaatttcaagaaatattttctccagtttgaattattattttttattttttttataattttggaggggtttgaatttactttattcacttcatttttattattttttattctccccatttctcttttttcttatgtgttcgctgttttaacaatgagactcgcaataacaacattcttgattttttattctcttctaattaatggtcatgaaaaatcgaatttaattacttgtgtcttttctctttataaaaagggatggattcattcggcagggaaacactgccgccgaaggtagcacccctttaaaaaaattaactttcaaatcactgaaaggatattactagggatttcgggggcgttgaacacgaatttgtcatttattttagccattttcgaaccccattttgaatctacataaaatgacacatttttaatgttgcaatgttttgggattgaatttttactattttaatcaaaatatgaattgtgccggtcccagaatcccctcttgctcagtccgggcgccgtagcccgccggcagaacactcccaaattgaagaagggggatgaatcaatggatttgaatatattttttaaaatgggatctatcatcgacagattaccgggcagtcttaggtaaatgactactgaaaaagaatcatcgagtggctccgacgatgtgattaatgccagcgaatttgccagtgaggaaaccttttactcgcctcctgcccaaaaatcggtgaaggaaatcatcgaagctgaccataacgacgaaagcctgaaaaagtcggaacatagaaaaaacaattaaattgcctcactaaatcttcgagatttaagatataaagagcaacttctgggcgagaatgcttcaggcccggtgttggtggagcccgacaaccccaaaaatgtgcttgtaagacgcatttcgctggtttcggacgaccaagtcaagcacagcatggacctccccggttggttttcacgcattacaatatacaatacactttattttgaaaatgagttactaataatttgttggctctattgcagttcacacgaccataaaattttaatgcatcacaactttttctagaaacatccaaattaaaattattggtatctttcggttagcccaacgagtcctctgttcgtttactaaatttcaaaaaattcattatgtttcaaaaaagctatggccaagaatgtttagaaaaccaaattttcgaaattttctggccataattttttttaaacacaatcaattttttgaaattttgcaggataatagaatgtttaatttggatgcttctagaaaaaatgttgtgcattaaagttgcaaaaaattttatggtcagatgaactggaataaagccaatatgttccccataattttcgaaaaagtttctgaattagaggcccggaatcgaacgaaaagtaaaattcactggtcccgatagcccatttgtggtaatgaatgtatttttaattttttctcaaaaagtggacttaacattactgttacctaaaagtttgttttttctaaatccatgtttatgggtcaaggttaaaatggttattaccatttcgaaaaatggcctcaaaaattcagcaaagggtgacttcgtcttctgcgtgaaagaaagctgcacctatcggatacgcttcgaattcgttgttcagcgtgaaattatatgcggactcaaatacgcacacaaagtgagtcggcttggcgtcggaggttggtgaatttcgccaacccttttataatatgtctttttttgaagtgccaaaagagttgtacatgctcggctcctacggtccccggcacgaaccgtacacttacgaaacatcaccggaggaggcgccttcgggtttttgttttttgaattagaaatttaccactcaaatatattgcgcttgcgggacaaagcgtcacctcaactttattcatgaacaacgccctaaaaaaacccacagaaatatttttaaaaaagttacaggcatatggatttgaacccaggccccaaaagcctatttttaaccaaccgagcaatccgttccccttttttttcgctccgtcgagaatgggtccgaggcagcaaaatttcaagtttttgaggccctgtagcttatgaactaaggtgtatgcaccgctaaaataaaaattctaagagaataaatttaagaaattatttaggaatattaagccggggaaaatatcgagtacattccctcatcaccgacgacgacaaaaacatttggttggattggtcgtggcacatcgaaatcgcaaagagttggtaaattgttaagcgtcgatagattttgtggctcctttttgaatactcaattcattatcaaaatttcaaaaatcaaaaaagggccataatttgttaaatttgttccacctttgcccttcacttattccttttattcatgtgacattcttgtgtacttcatccgttaattgcccaaaccaaaagttgttagagcacgaaattttgcaagtgacccctttacctactatatgttgacctcccgcattatgtcttgttctgtttcgctgccatttcatttattcatttgaaaattcaatcaatcatttacaaatgtttgtttttggttgaagcgggtgttaaggataagaacctggattgagagagaaatgaaaacatagaaaatgtaggggaggggaaaaacggacgaagaagaagttgaggatcatcaacggaggtggggaggagtgcacgcaaatacaaacaaaaagcaatacggattggaaaagtacaactgcgcacagaaagcaaactgggagacatttagaataagaggaggctcaataaaagaattcgatgcaacaatatcggatgaggaggtggtgaagggaagaagggcattttacatgacaaggctttgacccaaaatgcatattttttgtctgctgaaatataaatcatcgaaaagccgaagaatctttggaccaaagcattgacagtctacacaaacaaataaaagtgtctaaatgtaaatacaatattttcaacatgttaagaagaatgctctttactggagggattgagtatgaaaaactataaaagggaaaagaaaaagactagaaagaggggagatttaggtggttaagaactgtgaaccgtgatcgaggcaatgcatttaatattgattttgtatgttttatttatatcattgggatggctagccaaataagcctattaagaaaaaggaatatgaaagcacgcgttttctcgatcctccgattacttataatgtcaacttttcttcggttgtgcgacatttctcccctc

SEQ ID NO: 726 - DNA, 3755 bp, Heterodera glycines
aattaaacaaagctggcacacttttgtcgtaaatgtgattgcaaaaatgaaaataaccaatgaacggatttatatgtgctaaaagacaacccaaatatgtgctaaaactcaaaaaaagtccaaaataagtgccaaaaacgaagaaaaactgttcagtaatacgtgaatttctcaaaaaaaagtctaattttttatccatttcgctagcacaatgctgctaatcaaaagcaatttaatgctttttgacgtaaaattttttctttctctcaaagatttatttatttttcggaagtttcatcgctcaaattcaaatttagcattaaaagtagagagcggtattttgggcaaatacggatcaggaccaaggagtacggactaggcacccatacggactacggactaaaaacccgtaaagtccgtactccgtataaatccgtatcggcccaaaaaaatacggactacggagtacggacccgtaaaaacccgtatacgggtccgacccgtactcgctctctaattaaaagttaaaaaagttttgaaaaatgtaaaagctagagccctggcgggatcgtaaagacaagaaaatatacaaagatcgatttgactcaaacgaaatacttcccaaatatgtggcagacacaaatagtgaattctttaactttgtcgtgttcaaagaatttgagaaaattaaagtttcaagttcaaatatttgggtatattttttgtcaattatcgatttggtagtggtcatcatctgtatttcagttctcagaattttaaaaataaagagaaaaggtaaaaattcatcatacggcggtgaggtaacggtatataaggattttcaacgaatatgagaatgcctactggtgctcaaaatgaattctctcattgaaattctatgcgattttaacgaatgcgaacctcacgaattatctgaaattctacgccagcgaaagaaacaaaatttgaaatttttgagaagacacgcccttataacgagacaccttaggcacaatcagtttatctcaccggatgacattgcatttaacggttctaataggctttttgcctaccgaggttttctaggggttactgtcgaacagcatctctactcgagacaccgtgtcaagctacaattccctcaactcccatgtataactatgtaccagaataacggtcatagatgctattttccccttgaactgctggattttttataaaaatattacggctaacaggagtgggccttcacgttagaccgttccacccccgctagtcctaatatcactttaattttaattcaactttatttaacaaaaaaaaacaacaataaaatacaaaattaacaaaatccaaatggcatcacattaagctcctcatcgatgatccccttctggcagaccggcctgtacattttatgcttctccctcgtcaccactttcgaatcccgcgttggcctaaatattgatttattagtgatgcaaatatttttttttgaaaaactcacccaaaatcattcttgtagacgaagaacgccgggtcgacttcccctttcccgtaattcaaaaccatctccctgaatgtatcgtagtgcaaagtcttcctgttgtccacgtcgaacgtaatccctctaattttcataacatattcaatatcccccgtctgcttgtttctcatcttcagtgcgtactgcttcgcccctccgcaacaatattcttcaatctcatagccgccgtattcctcgctcatctctcccaaatatttccccgtcgtgatcggctccacatcccgatcgtgcctaacaaatatactgtccgtgtccgtgtacaatatttctcctccatttccctccgcttctctcataaattccaataattttaacctcgccatactcgtcgtcctgaaaattagtttatatacaaatttataatttttgaactcaccataaactgataacgatgttgctggacttgtgctccatcacaaagtcctccttgtccctgtagatcaatctaatcgcctcatccgaatactcaacaatatcacataattcaattttatggtcacacgctattttataaaactccgacgccctatctatcaccgcattcttgttcaaacaatttctcatcgaaaactttccctgaaagtgaaaattacctatcgtaatttattttcaattttcttacccataaactatttagcatcaacttgcttatgtaccgcaaccccggattcttcttcactttagccaattcaatgtcgattccatatttttccttatactcttctctccacatatccttctgctcccccgtctcaacccccttcgggaaaccgctcgcctcctccttcagcttcaaaaataatcgcacgtatcccttgaataaatcattcgcctcctcttcgtagtgccacgctctataaaatctgtccacagtataaccgcattccaacgcctttgcctgaaatgtcaaattttcttaaaattttcccacataacttcttaccaattcaacgctggtgtacgtcgccacgtatctccgctgtgccccatcatgggggcaattgtaattacatctcgtagtttccttcttaaatgttgacgcacatctccaacacaacgggaataataatctctcatcacacttcaactgcagaaccggaatccgcaaaccccgcggcgggttgaccctcactttatacaacccattatacttcaaatcctccggtctcgtccaatttacattaatctcatcactcttcggtataataatctccggcaaaccaatcgggtaagctgtaccgtaattcactgacggatacagactcacaatatcgtaaacactaatctttttcttctcatccgatttcgcaaacaatttcatcggcccagtcctccctcccgcataagccatccgcggatcaatcggtcccttctcatttcctctgtccgcgaagaagtctctcatttcctcatcctttttcaattccttctcaatttgacacccctagaaaaaaccggagataaaaaatgcaaaagtcaaataaacatacccaaacttcttcgacgtccaaagtcttccacagctccgccaatctctcctgcgtctcatcattcaattcctgggctgtccttcctccaatcagttccgccgcggggtcataacaattcaaacacccatgtatgtagcatcccatcacttcaatgcacttgtccatagttccttcattcacaataaatccatccaatttatattttccaactttgacctctcgtccattccctgcgtgccgtatctcaactccatctcgctggctccgccactctaaatacttaatggccaccacactggcccgatcacaccgctcatatcccttatccgggacaatcgataattgctcattcaataaaaacattgccttaaaaatattcatcgcgacccccgcattcgtacaactcctcggcaaggggtcaaatcctttcgtaatatcgttgatcaatattctcctaaactcaataatagacaatagcaaaatctccgtgtcgtttctgcaataattcatcaattcatcgttcaaataaaagggcgtctccttgttttcgttatacctgaaaaaaaattttttgttatgctttgtccctcttttcttaccatttttcgaatttagcgtatttctctttattcatagatcctggtgcgtaatcctccatcggtggtagaattgatgtttctcgagttcgcactttgaat

SEQ ID NO: 727 - DNA, 2966 bp, Heterodera glycines
  unsure (1)..(2966): unsure at all n locations
agagataattaaatacaaaaatgtcctgaaatttaggggttaaaaaaaattaaaaaaattaaattttgaaattaccgtcaaaacgcccggcgntatgcgcaaaaatgtacgtatcgtaattcgtaaaggccattaaaatccattccacaaaatcctttgtcggctcgtgtccctccgcctcgctccaatccttggtcctctcatccccgcaaattttacaatttgtcctatttttgtcgtcacagcattccgtacacgtcactctcaccgaaatatatttaataatatgttccttctggtcccccttatacattgtatcctgcgatgtttccgaatcctgaaattaaggcgttttttttttgtatatatatatatattttttttttttgcttaaacttacccaaacgacaatacggtaaacatccttttcctctttttcctctatcggcatgatataacaaccccgtttggggtcgtggcacacactacaaagctggcaataagtctcaccgcattcatgccccttcttcggattaaataaataagtcttatcgcacatcacgcaacgcctccataagttacaagtctgatgtccatgatgataattataacactcccaattgtaaaagtaacgtcgacactttgggcactcaatcttcactccactctccttttcacatggcattcctccaactctattgcagtaataacacctggcccggcactccaatgtgtggtaaacatcacgcgagtaaaagcactcacagtcaatacagaacttcctcccacgattgaaaaagcaaacataattctttaatccatcccaatgaccattctccaaaaatatcggcactacattttcacgacccatagggcccttccacaaaactcggattgatttccgcggatccgcagatttctcaaatgcaacaacccggtatttactggggtaaatctcatcctaaaaaactcattatttgagaatctttttttaaaaacccacccaataattctgaacactcgataaatgctccactccataattcatttcatttccattaatctcacaattccgtaaaagttcatatgccgtctctttctgtcgcacaacattcttcataaaacgaataaacgaatatttatccataaccaaataattcatcgacgaagccagtgcgtagaacaaacaaaatttatccccattagaaatccttaataaatattattattataattattttaattatttcaattattaattttttttttgatttaaaaaaaatattttttttttttgttttgcttattttaaataattatttaaatttattattatttttttttctgtttttctattcaaatattatttttattttcttttttattatttttttttctgttttttttattcatatatatttttcaaattttcattatttatttatttttattttttttgcttcaataaattttatttaaaataattattttaaatttatttttattttttctgttttttccatttttttttttgtttttttttattcatttttttttctattcgttttttttcccttcattaaattatttgaaaatacttaccttatccgctgatgctccttgaatccaaaatcaaatttatgaacattcctcggcccctctccaccgggcattgtcacacacgttattttcatcgtaatttgctccgagagcaacagcattttcttattttcatctccgtccccgctctgccccaacttattaatctcctccagaatcacatccgcattattctgggggaacgcccgatacggcacccacaccgggaaagcaagcccggcgcccgtaattaccactccaaacatcctcactttccgattcattttttcttccgtagtcttaaaagccactttgatcatgttgtcgaccgcgtccttaatcgcttcatcggggcgtcccacatccgggttgatcgtaaattccgcaatgttcttcgtaaatccaaatttttcgcaaatcgtcgaacgataatccatcaatttaaaagtttccatttcttcaataaaattgtttctgaaaaattattgaataaaattgtctcttaaatatattattaaaaattacttacccgattgatctaaaatcccattttttagtcgacggtccgctttgttgagaggttccattgcgttttgcagccatttttaataatatttaataatttctaaatatttacgcacaatcttattttagcaaaatccaacttttggttgaactgattgggggtgaatttggagagcttttatatggggtgagtgatgtgcaaaattggacctgtcaatattttgattgacaggtgacctaattttggtccagattgcgaaatattgggaacaaaaaaaacaaaaaagtcacgtgcatatggcgaaatgaacggggaaattgcgaaataagggaccaatcaatcattttttggtccatattgcgaaatacttggaccaaaaaactaaaaataatggttaaatttaaataaaaaaaccatcaatcattttttggtgacaggttttcaaaaatatttgtctcatattgcgaaatatttggatgaaaaaaaaaacaaaaaaaaaagtcagttcagattgctaaataatggaaaaaccatcaatcaaatttattggcagatgacctacttttgaaagttttttttcccatcctattttatttattcattttcaatttatatttaaatagttaattttattgcccaattcattaatttatttatctgcattaatttgctgcaattattaattaaatttacacttctacaattccattattgattaatttgcgcggcggcggcatcgggcgcggggaaggagggcgttgaggaaatgcaaaaaaaaacgccctttggccaatttttcaaaatgggttttaatttccgggataaaaaatcctaaaaaaaa

SEQ ID NO: 728 - DNA, 9787 bp, Heterodera glycines
gacccttagggggtcctagggccatgcattttcccaaccaatcgactcttccaagaactttggaaggagggccactcttgggatgatgccctctcagaagaggactcaatccgctggaattctatccaaagccaatggaaagaagaggaaatcagaattcctcgccgcgcaatgctcaatgacacacagtcaattgagctccatgcatttgtggacgcatcggtccacacattcgcgaccgcgatatacgtacgctgcgccatgaacgaaaagattcaagcgtggctgattttctccaaaaatcgtttgaagccaaagagtgcctcaaaggcactcacgatacccaggatggagcttttggccatcctggtgggcaccagagcactcaaatttgctcaaaggcagttgcgccgtccaattgccagccttcatctttggagcgattcacaaatcgctctgtcatgggtcaaaacccatgaaactcaaccacaatttgttgagcgaaggctgaaagaaatccgagaatgtctcggatgtaccttccactttgtccgtactgcggacaacccagcggacctcgcaacacgcggagcaactccttcggagctccgcaaccatcatctctggtggaaagggccaacttggctcacacaggagagccatctttggcccaactaactctgtttccaagtaacagagtctgaccaacaaatctcggagaatgttggcccgagtggtgcgtttctcgcatacactcactcaaagcagccaaatgagcaggtcttaattgacccctcacgcttcagctcatggaagcgtctaatgcgaacgacaatgttcgtattaagattcctcgccttaatgtttaaaaggggcgaggaaacggttgcttcacttgcgaagcacagaaaggaaattcgccagatttccaagtctggggacttcaaggcggaagacttcgcactcgcagagcgagttctcatccgcctagaccagatggatgacgctgaagaattccagcactttaaaacagtgattggagacgacggaattctccgtctgaaaaccagactggagatgagtgagaagccatacagcttctctcatcccattcttctcgccaaacattccgctttggcaaagctgatcatcttggatcggcaccaaaaaaggcatcaccttggagtggacactactctgacagaattcctgagcgaattctggatgccaagtgcacgtttaaatgttaaacgagctcttcgggactgtcttttctgtcgccgaatgaatgcacaacaatttgcattaccaaccatgccacccttgccgggtgagcgagtgcgccgacacgcgccatttcagtccattggaattgactatctcgggccaacgacaatctcgttggccggagaaaaaataaaggcatggatcctcatcataacatgcctcgccacgcgcgctgtctaccttgaggcaacattggacctcacatcggaatcattcatcaatgttctccgtcgattcataagtcgacggggaaaacccgacatcatttggagcgacaacgctacgacattcaagctcgctcagaaaaccctggagcttctcagtgctccggggccggatcaggaagtacaaaacttcctgacccataatcgaatccagtggcgattcattgcccaaataagtccttaagcaggaggcttttacgagcgcctcgtgaagctagtcaaggactgcttcaagcgaactttgggccgaaggattctttccttcgaccaactcaacacattcgtggccgaagtggaggccaccctcaattacagaccgattactgcggtctcagacgcagtggatggaccaattccactgcgtcccattaatctcttacaaccagagattcagatcaattgggaaacaacaacagacccaattgattcagaggaacagttttcctccacgcacgaacgtttagcttcccgaatacaagcacttcgggaagccaacgacgttttctgggccaaatggcactctgagtatttgacattactcagagaaagagcccagtgggaccacaaaggcccacgactccaaaacttcggagaaccgaaggaagggatggtggtcctaatctctcaggacctcgtcccccgcaatcaatggccaatgggacgaattgttgaaacacacggacggcctggagccatccgaagtgttaaagttgaaatccctgtccgagggaccaacaacgggaaaccaaaggacatgccacgaaagacagtccttactcgtccagtgaaccgcatcttccccttggaagcgggtcctgaaatgaccaaccaagcaacagaggctgtttccgccgttgaacaaccaaatgaaaaccaacccaagctcgctcaagagccaggacatcaaatggtcaccagaagaaaggccaaactattggaaatacttccagtagtggctttgaccatcctcgcgcttgcatttccatttgcaagtggtttcccaatcgggaaatgtgatgagtgtggcctcacttgttacacgaaaggaatcgttgtgacagtgccacccgaaatccaaaagttcgaaatatgctgtgcagaaagctgcatagttcggcaaggcatcaaagccttgaacttcgaactaccaatcgaagtcctactcaacaatcatcactgtgaggccagattttggactgactcacagcacaccttcacatcaaacacgacctgccaggcagtcgatgaatgtgttctcatcgactgctacttttgtttcacacaaattgtgaatccaacatgccagcccgtcattgcggcaatgctggcaggaggcctgtccctaagcctcctgtgcttcatcttcaccatgtgttccatggtgggatacgccatggcaggactgagaatccttttttggattttctcagtcttgttcgcgcgcttattcaagccgcaaaaagagacatgggtgttgagtgaagaagaggaaaacctcctctatcctcaccgacgaatacgccggcacaggccagcaaacaagtaactgggccagtggccgagttagccaaatgacaatgcttgtcatggcatctcttccgtttgtacacgggggaattgagacagtggccataatggccaaatcagagagctgtctcaacaacggcacaacgaaaatgtgccaagtcaagggaagcgtaacccttgcgcttctcccggcaggacaaccgaatgtcctgtcaatgaagaccgatgatggtctcattttgggaacccttcaagtgatcttgaaggggctctctctcgaatgccaagcatacaccaaggcttggaaacgatcatacgagatcgcttccgtggccagcaaacgatgtccgtcggctggctcatgtgtcggtgacttttgcacaaaagtccgaccctccacagccatccgagagctgagggagaccgaaacgttccccgggaacagtttctgcatagacagcacggctttttggggaaaccaatgtctcctagcagccagttcatgtctcttctacaagtggtttgccaaaccacgctcatcagccatttacgaagtcatcggatgcaactcttgggagtttggcatccatattcaacttcgcctcgactctaccactggaagaagtgcgacagtcgaaactgtgcttcttccaggccgtgtgctcaaatggcacaacatcagcatttcaacaataggagtgagccaagcaccggctcccctactgaacgctgacttcctgattgaagggcgaagtgtcgcccttgtccgtgagaaaatcacggactctttccattgtacagacttgaaagccgcccaagctttcaattgtactctgggaatcgacgcatgcacgggctgtcttcccgatcacacagacgggacagtctcgtgccattgtcgcgtcgccaatctcgagggactaatggaagaccctcagcggagacttccgctctcattccgccattacgaactgcggaatcacggaaggcgaatattcgccataaccggatatagtccggtccaaatgaacattcaaatggacagccttcaaatgtccttggaaatgcaccagagtttgtgcacaatcacaccaaagcacatctctggctgctacaaatgtgcgacgggagctcagttttcctactcgtgccacactgacattggccaaacatttgccgacattcaatgagaagatggttcgcatttcacgagcaaatgtggcccgaacataacggaccacactgtcgtgctcccattccagcatcccgaaataagcacgacatgccaagtcatgtgcttggctgggagaaccaaattctccttggtgggacaactccattacatcccactccgacaacagtcagaattcggagcccgagtctccgaaagcctcgaagaggccagcaactcaggctgggctgacttcagtttcgactggaactccacttttcatgctctgtttggccttaaaacaggcctaattttcttcattgtcttgatgatcggcattcattggaagaggctccctatgaccaagaggggcccaacaggggatccccgtctcgacggttcttcgaggccattggcctccgaagaggcaatccgaatgttggcgaaatggcggaaaacaatggccgccaagcgcctctccaacgcggagagcgagccatggactatggccgccccaattcaccggacggcagctttgagaatcgcccacgaagggcggtccccaaccgtccaatgcgccgttggcagaacggccttttcattgtggccgtggctttgtgcctcggcaatttggcggagggaaaggaattcccttcgccaaggacttgccatcagccgcttgaagcggcggacatggcacgtgaaaatcaatggggattttcaccaatgcctttcccatggccattttcccacgatcagaaagcaaatctgatcaagggaccccgccctttaaatggcagtcagccctatataaaggcagggattttccatgtccccacatcattccacaccccaaccatgccaaaacccatcaaaatgccctcctcgtcgccctctgcctactcatcatcatcatcattagcatcatcgccggatcgccagtcgccgccaccgccccgcaaaaaggcggtggaattgttcaacatcgccgcagcgacaccggaaagggacgcaaaaagcggacggaacttttccgtccgcgatttcatcgacgcggaagcgaaggaggagtcgtcgtcaaaacgcatgccgacatgttcggcgtgccaactctctggccatcgccgcggggcaaaggcctgccccctttatgttcctcctcaaaaggagcgaacggcggcagcgagccgccccggcacatcaaacacacgccgcgactcccccgaggaaggggagatcaccgccgataaggcgggccgcgatcgcccaccggtaagggctccctccaaaggttggagggcagagccctcgatcagtcccccccgtaaaacgggggacaccaacaaacagcggggaaggtctcggaccctccgccatttcccaatggacaccattctgaaagccatggggccgatcgccccaatcaaaaaaattcccgcacaggacaatacgggaactgtggcgaacacgcagccaccaaaggccgccgcggacattgtggccattctcggagagctttccgctctccgcgcctctgtggcgtacttgacggctgagcaggcccgcctggctcagttcatccgccaccgcctgggcacaccgccaaacatgtcgggcggaaatgcgatgccttgtggccccgggcgtcggcgccaccatcagcgacagccaagctcggaggacgacgagcacccaacacaaaagcgggcaaagcaccaccaccatcgccgctcgccgtcgccggacacgcaacacaaaccaaagaaagagcgccgacaccaccgcgaagaatttcgatgatgccgcgggggggagtttgtcgctgacagcagcgacagatcttatcgatcgccagctgtttttgtttttcccacgctttttgctagtgatagtctaattaagttttttcctctgtgcccgccctcacattttcggcttataaaaagggcacccttttcattatatgctcacttccacatttccattcattcatttctgctgctgcttaataaatatatatgtgtgaaaagagtccgggggatttggtcgggacggttttcccctcccccttctgctgctcagcgtctgcgtcgtcgtccgccccgcgtcggtcttccccgcaggagtctctcactcctgcgggccttcgcttccaccggctcgtccgtcccttcccccacatttgggaaggcacggccgagaaagggaaagggggaagcaaacagctgattttgcccttggcaaagtcggctctcgcctccctcgctccccacaaagtttttgtcgcctccttggctgcgacaggtcagccccaatgttagacaaaattgctcataacgccaaataacgcaattggcgtaattctttgagcgctaattcattacactggtaaatgcatttataaattttttagtttatcgccggcaaaagataaactccgcaacttcaatttttttccaacgacgccagcacctccaccgatggggttggtgggggggggggggggggagaaactgttaataggtttttcataattgattatttttaacgctttttgggtgtcttttagaatcaaatttaaatttttttgttttttgtgttatttagtaacagattttgcaccaataatgcgataagctaataatttggtataaaagttcaaaaattgtaatgctcatttttaagggcatcttgaattcaaggatactttcaaattttcaatgagagagatatgggagagagaaagtgagtaagaataaatacctatttgtggtccccagagagaagaagagagacataataagatacagagagagagagacaaagagagtgagagagaaagtgagtaagaataaatacctatttgtgggccctaattacttatatattttggttcaaaataaccaatcgtgggtttttcgagggtgctgctcacaatctaaacatatgtatgcctaattcagaaccccggactcatatttcgaatatttatatttgagggaaagagcgcatgagagaggtatagtgagtcaaagtgagagggagagatagtaagtgggaggagataacagagagagattgagtgaaaagtgattggagcactatgggtcaacccagtgttagacaaaattgctcataacgccaaatagcgcaattgcttaatttttgcgcgctaatttaaattgtacactgttaaatgccttttttattattttttttatcagccataactcgcttagttccaaccaaaccggacaaatttaatatctaaaaaaatttttgcaaaggagaatttttttctaatcgaatgctaagcaatttgcgtctcagaaaaaagtaaatttttattaggttataactcgtctaaactgttgttttctaccaaaatacgaaaactaataattttttattgattctaaatgtccaagttattttgtacccttataaccaaaagtattcgaatttgcaaatttctattttttcatgtgctagagacatgaaaatagtacgccaaaatgagggaaaaagaaatgcaatgcctttatattatcattttaaatgagataaaagcgattatttcatttaaaaaagtgaatagtaaatgttgttttttacaccattaaaaacgaagagatagtatgccaaagtgagagaaattacaaagaaaaaaagaaacaacgatatagtactaggcttttatttgcacagtggagttagcccatagtgtttgagtaaaagagagagtgagagaagttgggcattttgaggaaaattttacaaaaaagcagagagaatgaaagagagtatttaaaagagagagacaaagtgagagggagggagagataacagaaagagatagagggagatggagatggaaagaatgaaagggtgaatgcgaaaaaagagagagataaaatgaaaaaagagagagagagggaaaaaatgaaagcgagagtgagaaagaaaagagagagagaaagagagagataaagagcgacaaaaacaaaagcgtgagagagatacagaaaaattgagggaaagagcgaatgagagagttagacaaagagagaggaagagatagagaaatgaggatagataacagagagagagagagagagagagcggaataaaaaggaaagagagagggaaagagcgacagggtgaaataaggaaagagatagagagggaaagagaaaagatagaaaagaaaaaatagagagagaggtataaaggaaagagagagagaaatagtgaaagatagagtgagaaaaagagagaggagagggagagataaaaaggaaagagagagagagagagtgaaacagaaagtgagaaggagagagagagcgagagggagagagagataacaatgagagagagagagagatggaaagagtgaaagggagaatgcgaaaaaagagagagcgagagtgagaaagagggagagagagagagaggaaaaaagtgaaagagagtgagaaagaaaaagagagagataaagagcgagagaaacaaaagcgtgagagaggcacagagagagtgagggaaagtagcatgagagaggtagagtgagacaaagtgagaggaacagatagggagagggggagatagagagtgggaggtgataacagagagagattgagtgaaaagtgattggagcactatgggtcaacccagtgttagacaaaattgctcataacgccaaatagcgcaattggcttaattttttgcgcgctaattcattacactggtaaatgcatttataaattttttagtttatcaccggccttaaaagataaactccgcaacttcaatttttttccaacgacgccagcacctccaccgatggggttggtggggggggggggggggaaactgttaataggtttttcataattgattatttttaacgcttttagggtgtcttttagaatcaaatttaaatttttttgtttttgtgttatttagttacagattttgcaccaataatgcgataaaaaagcagagagaatgaaagagagtatttaaaagagagagacaaagtgagagggagggagagataacagaaagagatagagggagatggagatggaaagaatgaaagggtgaatgcgaaaaaagagagagataaaatgaaaaaagagagagagagggaaaaaatgaaagcgagagtgagaaagaaaagagagagagaaagagagagataaagagcgacaaaaacaaaagcgtgagagagatacagaaaaattgagggaaagagcgaatgagagagttagacaaagagagaggaagagatagagaaatgaggatagataacagagagagagagagagagcggaataaaaaggaaagagagagggaaagagcgacagggtgaaataaggaaagagatagagagggaaagagaaaagatagaaaagaaaaaatagagagagaggtataaaggaaagagagagagaaatagtgaaagatagagtgagaaaaagagagaggagagggagagataaaaaggaaagagagagagagagagtgaaacagaaagtgagaaggagagagagagcgagagggagagagagat

SEQ ID NO: 729 - DNA, 1561 bp, Heterodera glycines
  unsure (1)..(1561): unsure at all n locations
aaataaaatttatataatnagagcaaaaaattgcggatttttgtagtattttactcttctctaatgacttttcagaaccgagttatgaatttttttctgaaaaatcgaaaatttccagaaattctggaataactttttttcttttgaacattataaaaccaaataaatctcataaaattctcccgattttttgctatttttaaagctttaattcacttaaattgaccagtcctccattgagttatgaattttcaaattttaacccaaatttccaaggaccaaaaaaattaaaaatattttcgaatttttaaaaaattgcaaaaaatctgaaacttaaaataaacatcatatttgtgctcaggaccctaatttaccccagaaaaaattttttcaccctctttttcaacccaaaaaaaatttttgaaaatttctagggggcctagctcgaaaatttttgaaaattttcgaaaatgaagtataccgttcgatagagcttaaaaagctctacaattttgctctaaggccatttttggctaaaaccaacccctgacgagttatgggcccgggactcaaatgtcccgctcaggccaaaaattttttctatttccggaaaaaaatcgaaatttttccaaaaaaattaccagtcgatagagctcaaaaaatgatgttttggaagtggtctccgtttttcctgaaaaattcgttaaaaattcctaaaattcaaaaaccaaaaaaccgttttttaggcctagcttgaaaatttttcaaaaatttcgaaattttaaaacttggttggatagcctttcaaatactacacatttttgctcagaaacaatttttcggtcaaagcaacccctggcgagttattcgcctggtactgaagtgtacacttttgggtaaaaaaaattagccaaggctacagccttgggcgcccaacgtagggcttaggttttgctggcaaagttgtcggggatagtctgacttaaaatcctaccagcaagagctaagcgatcccggtccaaagaaaaaatttcgtagaagaaaaactgccagcccgagtgacaaatcgcttctcgggactcagtcgtccgcgctgaatttttttctatagttttcccggattctcctcaaaaagttgtaagacccttccaccactttcagggcgctcccggccttcggccgggagattttgttttttgaaacgaaactcaaaacctatataacatatatactagcgggtgcgtgaaccgtcggctatttcgctgggaaaaagcgcttcgcgctttgggagcttcgctacctagatttgatcgaattggttggagagatttttttgaatttttaaaaaatgattaggggtttttagtccacatcgaggatcaagacgggcgcttcgcgcttgttttttaaatctgttgaacttacatgggcgcttagcgcccgttttttagcttgttaggcgcttcgcgcccgtttttcaatttttgttggccttggacgggcgcttcgcgcccgttttttaaatctgttgaacttacacgggcgcttagcgcccgttttt

SEQ ID NO: 730 - DNA, 2917 bp, Heterodera glycines
agtgattaaaagtggtacaacagtgattaaagggggtacaaaagttattaaaaaacgtacaaaagtgattaaaagaggtacaacagtgattaaaagaggtgcaacagtgattagaagagttacaacagtgattagaagaggtacaaatttgatgaagaggtacaaaagtgataaaagaggtacaaaagtgattaaaaaacgtacaaaagtgattaaaaaacgtacaaaagtgattagaagaggtgcaacagtgattagaagagttacaacagtgattagaagaggtacaaatttgatgaagaggtacaaaagtgataaaagagttacaaaagtgattagaagaggtacaacagtgatcagaagaggtacaaagtgattagaagaggtacaacaatgattagaagaggtacagcagtgattagaagaggtacaacaatgattagaagaggtacaccagtgattagaagaggtacaagtgattagaagaggtacaacagtgattagaagaggtacaacagtgattagaagaggtacaacagtgattaaaatttgaacaaaagtgattagaagaggtacaatcatggattaaaatgaaataaataagaaaattgtattattggatgtattataaatttatcaaattaaaaaatccttttacttattaaaaataaagttagaaatttataatatagaatatttattgaaattgaaaggaactaatttctcgaattttataaaaatttaattcaaataaaaaaatgtaatttattattaataaaataaaaaatattttaaatgaataaaacaatgaaaacacgaaaaaaatggtagttattaattaaaaacaacgttggaaattattaattgaatatttatttaatttgaaattaaattattttttttacaaattcaaaaaaaaaaatgaaattctttaagttaaaaaaaataaatttaaataatttaaaagaaatcttcaaattaattaaaaacagtcaaaataacccaaaaatgcacagaaaaataatgttacaccgtccggattcgaactttgcacccccccccccccaaaaatgatgcctcagaatccccaatcacacagggattctgaggtcttgactatgtcaaaagttaaatctgattacgtattcgtgatcagcgtcataaaatacccctaaagacatgtttttggaatattttcggtgaaaaaatttttccacccaaaaatcctggtcacccccctatggtcccgaaaccaaaaatcacttttatttttataacaattcgcaaaaaagagataaaaatgtaaaataaaatttatattatagagaaaaaaattgcgaatttttgtagtattttacttttacagaatgacttttcagaagggagttctgaatttttttctgaaaaatctaaaatttccagaatttctggaataactttttttctttagaagatagaaatcccaaataaatcccataaaattctcccgattttttgctatttttaaagctttaattcacttaaattgagcagtccttcattgagttatgaattttcaaattttaacccaaatttccaaggaccaaaaaaattaaaaatattttcgaatttttaaaaaattccaaaaaatctgaaacttaaaataaacatcatatttgtgctcaggaccctaatttaccccagaaaaatatttttcaccctctttttcaacccaaaaaaaatttttgaaaatttctagggggcctagctcgaaaatttttgaaaatttcctatacatatagtacaccattcgatagcatttaaaatgctctacaaaaatgttctaaggcattttttggctaaaaccgacccctgacgagttatgggcccgggactcaaatgtcccgcttaggccaaaaattttttctatttccggaaaaaaatcgaaatttttccgaaaaaaataccattcgatagagctcgaaaaactatgttttggaagtggtctccgttttgccaggaaaattcgttaaaaaatcataaaattcaaaaacccgaaaaccattttttaggcctaactcgaaaaattttgaaaattttcgaaatttttaaatttcagaaaatcgagcttccaaaactctacaataagtccgctggcagcccttcggtcagatcaaaccctggcgtggcattcatctggtactgaagtgtactttttgagcacgcttcagttgccattttttacaggccaggggtttgctcaaaaaaatttttaaaaaataccaccttgtagaggacccttaggcggagtgccctttcagcgggcactttttgattcgagttttacaaaaaaagttaggggccttcaaatgcaaacaaaagtgagaattcagtccctggtactcagttggccctcggatcaaaaaacctatagttttcccagatgcgcctcaaaaagttgtaagacccttccaccactttcagggcgctcccggccttcggccgggagattttgttttttgaaacgaaactccttgtcaatataacgtatatagtaactagggtgcacagttggctttaaagtagaaaaaatacttctgtaaccccaatataatcggtattgacataagcgcttcgcgcaaaggactccgttgctagttcttgcgcggacatgaggccagtttattaaccgtcattagcggttagacaattttttttgtaaatttaaattgtccaacccccagggtccaccacgcggaggagcacggtgggaaactggcaaaaaccatggaccccactcgccggggggtgagatccaaactggaatccccggcgaggagctaagctctgaagaaagtacctgaaaaggacggggggtgaactccaaactggaatccccggaaatgcaatgtgcgctatctctcctcgaactctgaaa

SEQ ID NO: 731 - DNA, 3902 bp, Heterodera glycines
  unsure (1)..(3902): unsure at all n locations
gacgacngatatacatttctgcataaaaaagctggctcatcaatacttatcntttccattgctttcattggtcttaacgtacgaaaaacttgggcctttgaatggatatttatagagatattttaaatttgtgctttgcccatatgcgtattccaggttatggtgggtctcaaaatgaaccaagatatatgggttataggaggaaatacgagaattattataaatgacttgcgctttgcctcgctttacggataaggtttgcccgccatcttccgggctcggacgaaaatagatcgctggacggtcatcatgaaggatggtaaacttactaaacggcttggggaatcccttcttgcattttcctttattattaagacaatgtggaccgcagtcatggaattgaaatttcggtaataattcacgtactttacgaatgaaatttgcccaatctgatttatcattttttgctggttcttcaggtatatgcgcccatattatattatcaacattctcagggatggcaagcaaacttgtgtgataaacacgatgggcatgaggaccgccgtatttcttttggaactcacggcattcttgaccaatcatttttcccaaaatatttttctgatctatcaaataatgtaaatggctaagtttatcctcataaatacgacatattaaatcgggccgatctacggttttctgacctttatggagaaaattacgggaaatttcacgccaacgcggattggttgtgaaagtgagaaagaatgaagcgttgcctggttttttaaagcgtgacattattgtggtagcatcataaaatttgtgttggaaatacgctcgtgtgcctggctctgatctgcggaacataacaatactccccaagtcttctgtggagctaagaccagcattacgtgaaagccagcgaagggcattttctggaagtgtactacgcaaatttaattcgggacgacgtaaataatttgcaacattcgtatcaattcgcgccgcgtaatcaagtgtaaatttctgacttagtccgccaccggaactccaaatgttgtgaatgtttttgtgttttcttaacgccatacgatagcggatatacgacctaatagataaaaactgccgcggaccgcgtttgtcaacagaatcaaccgaactggcaacggactcattgtcatcatctgatgcatcagcatctgaatcaccagtgttctcatcagattcgacatcaatctccatggcctcattcttttcgggcttatttaacggattgtatggaattttaaggtgaaagccatcatcaccatgtggaaacatcaaagggtagcaaagagaatctgtgagtggatgatgtggagggaattttttaagttttccttcgtcattggtaatccatatccctttcaaaaagggtggctgttcactttcagcccaaacggcaaacaatgaattcccctcatcgggtaaattggcttgtctcgaatgaatagaaacgtctcgaacacttgccggtgcatctcgagcctcgacgagcgttaaacggaaattaagtacagcctctgggcctttctcttttagagtattctgatattgtttatggaagtttaccaactcttgggcaagagggttatattttcgaataataaaatcaagcttttttattgtggtttcgtttactcgatcaccaccatacgctatgttctgagtcctttgcatgaaggctgtaacagggtcaagaatgtataattgcgaaaaggatggagaaaattttccgggtaaagttgagcctatttgacgagtgaattcaccatttaacaaatagcaaacatttccatcaagtgatgactcacggtatccaaccgaaacggacgcaaatgctaacaatgaattataaacattttcattagacaaaaattccttagcctctgggtcttgccctgacaagtagcgttttaatgttgggggatattcttcgtaaggaggcaaaacaacagaaccatgattacaacaatgacttgatgaaaattttccattctttttttcggcctcgctattcagtaaaagagcattacaataagcacaaattttatctccgagatttcccgaatcataataatcagtggtgtgcctggcacgtacatctgcgcaaggaattccctggtgtttggtatggcaacgcctggttatatcattatgaggcatttttggaatagtatctatgttatcatcggaagatacttcattactaacacttttttgaagacggagcgatcgacgggtagcagtactcaaattacttgtagaaggtggcctcaaaataacatcaggggttctatcaatatcaggttctacgcaaataaaggctccatctccatccctcggacatgtctgttcaatattcgactccacattatacaaaggcaatcgttgaggattttgaggtccatttgtcaaatttcttccaatatattctacgtcatcattatttatcaggtgcgccaaatgccacaaaattctccgcctctccaagttaatgtttaaatttgggaatttcagtgaacaatgatttaagtaggcctcagaataaagcagaacaaatacgccacaattaattccgtcatgttggggtgtaaattctgatggacttaatgtcctaattaccacatcatcatgagaaagaccaggtgtcaattcacaaattccgtttttaattatttcaattcttctcacatcatagccagggtattgaggatcaaaaagtctatcataatgcggcaaagaatcaataaatagacaaatcaagttatctcggtcacatcggtcaaaaattattaaagcaaaatgaccattaaagaaaatagtcatcaacaaaatgtcatagttctctgaataattaaagcagttatccatcacattatatgggaaagcatgagggccaacatgaaaattttgtaagtctgtgtattgtggattaacaactgtaactattttgtcaactatttttgatgaaagataacgttgaaaacaatagactaaatcatcactgaacatttcgttaggtatagaccacgcctctttaatgagatctttatttattgactgaatacatacacgtccaggggctataggttgcgagccagggatatcaatagaaccggaattcaataaggtcaataattcattagaaattatagattgattttcttgggcttgattaatattttcagtatttgagttcatatttccaacgttcatagacaaattgatgctatccggctttttaaggcgacctggtccgccactccttttctttgggcgacctcttcggttgccactacattttgaagaatcagaatcagagcagtccgaataatttaaaggttttgaaagagaggatccacgagaaaggtcagacattaatatttcattattcacttgattataacgggaacggaattcgacattatctgaactgcataatgcattcacatgccacaaaattctttttttctctgaaataatatgaatgggttcaagaataagtgagtgatcattgaaaatccatgattcggcaaataaacaaatgtagtatccacagctattaaaatcaggctgttgtgatacatttttatcagctatatttataacatcaatatcaacaccaacaaccatggaaattacatttttaataagctgacatctgtcatgttgaaagtttttattcaaaggatccattncgggaaggatcttgcttcagagaaatcatganataagtgccaatctcttggtctaaatggcaagtgcccaaatgatttgaagaatacggaaaacgattatttctngtgnaaatattgngtcaaaataaaacacgctcttttaagtgtgcgtttattcct

SEQ ID NO: 732 - DNA, 3162 bp, Heterodera glycines
  unsure (1)..(3162): unsure at all n locations
atcatcatgagaaagancaggtgtcaattcacaaattccgtttttaattattcaattcttctcacatcatagccagggtattgaggatcaaaaagtctatcataatgcggcaaagaatcaataaatagacaaatcaagttatctcggtcacatcggtcaaaaattatgagagcaaaatgaccattaaagaaaatagtcatcaacaaaatgtcatagttctctgaataattaaagcagttatccatcacattatatgggaaagcatgagggccaacatgaaaattttgtaagtctgtgtattgtggattaacaactgtaactattttgtcaactatttttgatgcaagataacgttgaaaacaatagactaaatcatcactgaacatatcagtaggacaagaccacgtctctttaatgagatctttatttactgactgaatacatacacgtccaggggctataggttgcgagccagggatatcaatagaaccggaattcaataaggtcaataattcattagaaattatagattgattttcttgggcttgattaatattttcagtatttgagttcatatttccaacgttcatagacaaattgatgctatccggctttttaaggcgacctggtccgccactccttttctttgggcgacctcttcggttgccactacattttgaagaatcactaacagaatcagagcagtccgaataatttaaaggttttgaaagagaggatccacgcgaaaggtcagacattaatatttcattattcacttgattataacgggaacggaattcgacattatctgaactgcataatgcattcacatgccacaaaattctttttttctctgaaataatatgaatgggttcaagaataagtgagtgatcattgaaaatccatgattcggcaaataaacaaatgtagtatccacagctattaaaatcaggctgttgtgatacatttttatcagctatatttataacatcaatatcaacaccaacaaccatggaaattacatttttaataagctgacatctgtcatgttgaaagtttttattcaaaggatccattcgggaaggatcttgcttcagagaatcaatgaaataagtgccaatctcttggtcatagatggcaagtgcccaatgattttgaaagaataacggaaaaacgattatttctgttggaatatttgggtcaaaattaaaacacgctcttttaagtgtgcgtttattccttttaacatgaatatcagggtcagtcagtacggagtcgacgaccactgttcggcgagtggattttattgcaataagacagagatatgcaaacgttagctcatgatttaaccaagaatccaaattataaaatgccttttcaatcacattttgaccagaattaacatcaggaacattcaaatttgcccagcgggcaatttttgcggactcatcaattcgctgaataaattcaaggcttgttaaattagcaaaatctatctcttcaagtgattcattcaatggacaaccaaacgatttatcttttttaggaacgggagaatcaggacaaatgttttgttttttccaagaactttgaggtgtattcaaatgaaccttttcaaaggaattggctaatggtgtgtgtatattctttggtggtcttcctctcttacgagagtttgaattttgtggtgtgcttaaaacaaagtctgaaacaggggaagaagcttcactatggtccgaggtccataatgaggacaaaggtcgttccacgctccgcttcttccgcttgttcttttcattccattgctttgaaggcatttcattcactaaatatatgaaaaattaagccaatttaataatgcatcataaatatatgaagaaaataactttgaaagatgcaaaaataaaattatttatcaatagaaaaataatactaacgatgaaaataaaaacatgaaaaagaccatagtgaagcttcgtattttaaaaagaaatcgtataaaatcagacaccattagccaactctatttctaggtagccgcctaattctgaatcccagttctcgatgtttttctcgccttaaatccctatatttttcaattgtatcgagtaccgaatccgagtactgtctgtataccgacgttttcctcgtcctgacccaaattttttatttaatgaatattaaatatattacagcaccccaccccatcgcgaggacgcaattttgtcggaatcaattaaaaatcattcctagaatggcatacaagacgaattaaactttcgaaaaaccaacactgagtgggaaactaaacccaagagatacgaggattgatgcacccctaataaggaccgagagaaggaagcaaatatttcagcaaattactatctcaatgaaaaatgaacgacagtgaattcgttgaatataatctgtcacccccccccccccggtaccgccgtcgaacatgacgaactgagtacatccatgatgtaccaaattggaaacgaagagggcaacgaatagatgctgcaaattagtaaaaataggttaccaagccataaaatcatataatattgaaattgacatttctggccaaaatggtaccgaaaatacacaaatctattcatttaaatgccgtaagtgtcaatttcgatgaccactgatttttcaaaaaaaaaattgacactataggaatttgtggaagactgaacagatttgttgattttcggtaccattatattcggctcgacaagctggtaaaatagtgcctcattcgcacggttttgtccacttttcgacaaataccgaaaagtgtcaatttcaatgaccactgatttttcaaacaaaaaaaaattggcactattggaatttgtcgaaatccaaacatatttgatgattttcggtaccattagactcggctcgacgagctgagtaaaatggtacctcattcgcacggttttgaccacttttcgacaaataccgaaaagtgcaatttcaatgaccactgatttttcaaaaaaaaaaaattggcactattggaatttgtcgaaatccaaacatatttgatgattttcggtaccattagactcggctcgacgagctgagtaaaatggtacctcattcgcacggttttgtccacttttcgacaaataccgaaagtgtcaa

SEQ ID NO: 733 - DNA, 2501 bp, Heterodera glycines
  unsure (1)..(2501): unsure at all n locations
tcgctcccccacaaaagttcttgtcgctcccttggctgcgacaaaatgggagccccgtaggggtcagttgttccttgccgaaaggacctgacctccatcaatcggccgtagccgccgatcaaaagtcttcgcccgctaaggggtgaagaacatcggctacagtcgccgatttactttctccctaccgaaagggaggaaggctcattcggccatcagcagccgactcttcatcttgcccaaccagtggcaagacactcggccatcagcagccgactcttcgtcttgcccaaccagtggcaagacactcggacatcagcagccgactcatttagcctaacccaacaaagggaaggctcattcggccattgcagccgctcattagcctaacccatcaaagggtaggcacattcggccaccagtcgccgacttctccatcttgcccaaccagtggcaagactcattcggccatcagtcgccgactcatttagccgaacccatcaaagggtaggcacattcggccaccagtcgccgacttcttcgtcttgcccaaccagtggcaagacacattcggccatcagcagccgactcatttagccgaacccatcaaagggtaggcacattcggccaccagtcgccgacttcttcgtcttgcccaacaagaagcaagacacattcggccatcgccgccgactcatttagcctcacccaacaaggggagacacaaacggccaccagcagccgaatcttcgagtcttcaccaacaagggttaaaggactccggccatcagcagccgaacctcccaaagcaggagaatcaacatgagcgggccaatccgctcaaaaatcgggccttgtgccgcccgtaccaaggcctacattgaggcggccacggtcaatctcggaaaggacacgacagacgagagcattcaagcagacctcacagcggagcgccgtggactccgccgagcgattcggcttttggaggattgcaatgacaaatggcaatccctcctgctcaaattcaatggagccgaccgccaacaagaggagcaacgctacgatgactttaagccatcgggaaagcacttcatggaatgggcggacaaagcccgaggtgcagtggacacgatcgatggagtgatcggtccagaggatgacgacgaaataactgggagcattatctctcagcccgccaatcctccacaaattcaacatgttcagcctcacccacctcgccatgaggtgaatctccctcccatttctctccccaaatttgcgggagagccaagggagtggccgatgttttggaggctcttccgttcctcagtggacaaccttccaatcgacgacttcaagaagcacatctatttgttggggtgccttccccacaactcgccagctaggcgggcagtcgacttgtacccaccctcggacgaaaattatccaagggttgtcgacatcttgaagaagcgatttggtgatagtaaaactatcactgagtccttgcaggcagagctactgcacctccccaagccgggagagtcagtgctctcgctccgcaactttgcagagtccgtggaacgaatctgtttccaactaatggacttcggcgaatctgaggacaacatgttcatggcttcgacgatcaagtcgaagcttcctttctccatcctcacccatgtggtggagaaagagctttcctcaggaaagacattttcgtgccttgacatcagaaaggcacttcaaacaatagtggaagtaaaggaggaagtgcagagatgtgcacatgtcctccgaggcgatgaacgaccacgttcatccgccttcaattccccacctcaacagaggggtgcctgggatcaaaggggtgaccaccgtcactccaacaaccgacggagccaaccaccaaggccatttaatcgcggaggaacgcctcagccagaatatagggcgttctccgctattaacaaaaatccggaaagggccaaaaccccagcaagaaaatggggtcggtcctgctcgctctgctcgggaactgatcatctcccgagcgagtgcccggcattcccaacaccgggagctcgtcgaaaacggctgaaagaacagcagcgctgcctcaactgccttgtgcaaggtcacaacactgaggagtgcacctcaccataccgttgccgaaactgtggcaacaaacaccacttcctcatatgcttcaagagggaggagtcccattcacggtcaaatgggaatcgttccgcttcctcccccaagtcgggaagagagccaggagggcgaaagttccatcagcggcaggtggaaagccagacccacctgatcacggctgggtttcaacagaacgatcagtcaaaccctcccgccagagaggnnggagatcgttcaatccatggggatgtccaccgtggacaccagcaaagggagagcnncacaggntccccagtgcaaaagccgcacgcgtatctgatgacgcgacggctgctggctaa

SEQ ID NO: 734 - DNA, 6651 bp, Heterodera glycines
  unsure (1)..(6651): unsure at all n locations
cggacatttatataaagagtcaatagtaaaaataatcctctaagcttaaaagacccagaataataggatgctgtttccgtaggcataaaacattaattcattcattttaatcgacaggattttattagagaatcacgcagaaaatatttaattatttttaaaactcaaaaaataaaatagtccaattgctcctcagatatatgatgttgtctaggatttccacatgaggaggtacgacttaagagaaatagcaatcgttaccgaacatttatataaagagtcaatagtaaaaataattcaaaaatgcttaaaagacccagaataataggatgctgtttcagctggcataaaacattaattaatcgacaggattttattagagaatcatgcagaaaatatttaattatttttaaaactcaaaaaataaaatagtccaattgctcctcagatatatgatgttgtctaggatttccacatgagggggtacggcttaagagaaatagcaatcgttaccggacatttatataaagagtccatagtaaaaataattcaaaaatgcttaaaagacccagaataataggatgctgtttcagctggcataaaacattaattgattcattttaatcgacaggattttattagagaatcatgcagaaaatatttaattatttttaaaactcaaaaaataaaatagtccaattgctcctcagatatatgatgttgtctgggattttcacatgagggggtacggcttaagagaaatagcaatcgttaccggatatttatataaagatgtcgcagaagcgacagatcttatcgattattttttcccttcccgcatatttttgttccctcccccttttcactgtaccacccgcccccgactggcctatataagccagtcaatttcgcttatgtcttcagtcangtttttgtgttccactgctcacttccacatttccattcattcattttctccttctgcttaataaatatatatttgtgaagagagtccgggggatttggtcgggacggtttcccccgcccccttctgctgctcagcgtctgcgtcgtcgtccgcccagcgtcggtcttccccgcaggagtctctcactcctgcgggccttcgcttccaccggctcgtccgtcccttcccccacatttgggaaggcacggccgagaaagggaaagggggaagcaaacagctgattttgcccttggcaaagtcggctctcgcctccctcgctccccacaaaagtttttgtcgcctccttggctgcgacaaaattggagccccgtaggggtcagttgttccttgccgaaaggacctgacctccatcaatcggccgtagccgccgatcaaaaagtcttcgcccgccaaggggtgaagaacatcggctacagtcgccgatttactttctccctaccgaaagggaggaaggctcactcggccatcagcagccgactcttcgtcttgcccaaccagtggcaaggcactcggccatcagcagccgactcttcgtcttgcccaaccagtggcaagacactcggccatcgccgccgctcattcgcctaacccatcaaagggtaggcacattcggccaccagtcgccgacttcttcgtcttgcccaaccagtggcaagactcattcggccatcagcagccgactcatttagccgaacccatcaaagggttggcacattcggcctccagtcgccgacttcttcgtcttgcccaacaagaggcaagacacattcggccatcaccgccgacccaagtctcacccaacaaagggagacacaaccggccaccagcagccgaatcttcgagtcttcaccaacaagggttaaaggactccggccaccagcagccgaaaactcccaaagcaggagaatcaaaatgagcgggccaatccgttccaaaatcgggccttgtgccgcccgtaccaaggcctacattgaggcggccacggtcaatctcggaaaggacacgacagacgtgagcattcagcagacctcacagcggagcgccgtggactccgccgagcgattcggcttttggaggattgcaatgacaaatggcaatccctcctgctcaaattcaatggagccgaccgccaacaagaggagcaacgctacgatgactttaagccatcgggaaagcacttcatggaatgggcggacaaagcccgaggtgaagtggacacgatcgatggagtgatcggtccagaggatgacgacgaaataactgggagcattatctctcagcccgccaatcctccacaaattcaacatgttcagcctcccccacctcgccatgaggtgtacctacctcccatctctctcccagaattcacgggagagccaagggagtggccaatgttttggaggctcttccgttcctcagtggacaaccttccaatcgacgagttcaagaagcacatctatttgttggggtgccttccccacaactcgccagctaggcgcgcagtcgacttgtacccaccctcggacgaaaattatccgagggttgtcgacatcttgaagaagcgatttggtgatagtaaaactatcactgagtctttgcaggcagagctactgcacctccccaagccgggagagtcagtgctctcgctccgcaacttcgcggagtccgtggaacgaatctgtttccaactaaaatggacttcggcgaatctgaggaaaacatgttcatggcttcgacgatcaagtcgaagcttccgttctccatcctcacacacgtggtggagaaagagctttcctcgggaaggacattttcttgccttgacatcagaaaggcactccaagcaattgtgaggtaaaggaggaagtgcaaagatgtgcacatgtcctccgaggcgatgaacgaccccgttcatccgccttcaattccccacctcaacagagaggtgcatgggatcaaaggggtgacaatcgtcactccaacaatcgtcagagccaaccatcaaggccgtttaatcgtggaggaacgcctcagccagaatatagagcgttctccgcgatcaacaaaaacccggacagggccaaaaccccagcacgaaaatggggtcggtcctgctcgctctgctcgggaactgatcatcttccgagcgagtgcccggatttcccatcaccgggagcccgccgaaaacggctgacagagcagcagcgctgccacaattgccttatgcaaggccaccgaactgatgagtgcacctcaccacaacgttgccgaaattgtggcaacaaacaccacttcctcatatgcttcaagagggaggaatcccattcacggtcaaatgggaatcgttctggcccttcccccaagtcgggaagaaggccaggagggcaaaggttccctcaacggcaggtggaaagccaaaaccacctgatcacggctggatttcaaccaaacgatcagtcaacccctccgacaacagaggggcagatcgttcaatccatagggatgtccaccgtggataccagcaaagggagagccaacaaggctcccaagtgcaaaaaaccgcacgcgtatctgatgacgcgacggttgttggccaagtcaaatcgtgacagccgaaatataatcaaagtagcagttctctttgacccgggaagccaaacaacgtacggagcggatccgcttatcgagaagctccgcccgcacaaactcacctccgaagaaatggaggttcacgggtttggaggaaaacgggagccgttacgcttccattcacccatttactcggtccttctccaaagggaggacggaaaatgggaggaaattctcctcaatcggacggagaaaatctccactcacttcagcatggtcgaatggaccgctgatgaatccgtcacgaatcatcacgaggtctgtgaagcaatgtgcttcaccaatgaggagccaatgatactcctcagcgcaagacacttctggcaattcttccaagggaagagagaagtgtctcccgggctgtttgtgatcaacacatcgtttggcccgctgataaatggcgagtccaacattggaccgccgaactcaaatcaaaaagctctgtcaatgacggccatccaccgcacaaatgtggaacaaatgccaaccatcaacgaggttgagcatttcttcaacctcgaatccctggggatccaggatgatcctgcccaggatgacgaccaaacagctctgaagctgtttaacgaatccatccgtcaggaagctgacggaagatactccgtcaaatggccgtggaaggagtccaatccggacctctcttccaatttcaaaatcgcccacagcaggctgtcatcggtgctaaccaagctccgacattctccagaaattctggagaagtacgatgccaccatccgcgatcaactgcaacagggcatcatcgagaaggcccaaagggctcctggacagcttgagcacttcctcccgcaccatggagtgctcaccaaaaagctacgcgtcgtttatgacgcgagtgctcacacacgcggaacaccaagcctcaacagctgcctcttccgaggcccagtgcttctgccagatttggcaggcatgcttcttcggttccgttgcccgacctttccgcttctcgcggacattcaagccgcatttctccaaatttcattggagccggaagaccgggaggtcacgaagttcctctggctaaaggacacttcaaagggactgactcccgacaacttggcaatatttcgattttgccgagttgcgttcggggtcgtcagctcgccattcattttggcggcgacactccgccatcacttgcaacagttcgactccccactgtccagggagatttcggagtccatttatgtggacaatgtactcctcgagtgcgagacggtacaggaagccttggaaaaatacaaattttccaaggacatcctccaacaaggatgcttcaacctgagggaattcatctctaactcaaatgaggtgatgaaacaaatccctcaggaggatcagcttgataagccgaaggccaaagtccttggccttccttgggacaccgagaaagacgaaattgtcttcaaattcccaacaactgatccattgaggccagtcacacgaagactggtcctcagccatctagcatcgctcttcgaccctttgggggtccttgggccatgcattttgccagccaaacgactcttccaagaactttggaaggagggccactcttgggatgatgccctctcagaagaggactcaatccgctggaattctatacaaagccaatggaaagacgaggaaatcagaattcctcgccgcgcaatgctcaatgacacacagtcaattgagctccatgcatttgtggacgcatcggtccacacattcgcgaccgcgatatacgtacgctgcgccatgaacgaaaagattcaagcgtggctgattttctccaaaaatcgtttgaagccaaagagtgcctcaaaggcactcacgatacccaggatggagcttttggccatcctggtgggcaccagagcactcaaatttgctcaaaggcaattgcgtcgtccaattgccagccttcatctttggagcgattcacaaatcgctctgtcatgggtcaaaacccatgaaactcaaccacaatttgttgagcgaaggctgaaagaaatccgagaatgtctcggatgtacctttcatttcgtccgtactggggacaacccagcggacctcgcaacacgcggaggaactccttcggagctccgcaaccatcatctctggtggaaagggccaccttggctcgcacaagcgagtcaccattggcccagcgaactctgttttcaagtaacagagtcggatcaacagccatactcaacggagaatgttggtccgagtggtgcgtttctcgcacacactcactcgaaccagccaaatgagcaggtcttaattgacccctcacgcttcagctcatggaaacgccttatgcgaacaacaatgttcgtattaagattcctcgccttaatgtttaaaaggggcgaggaaacggttgctttactcgcgaagcacagaaaggaaattcgccagatttcaaagtctggggacttcaaggcggaagacttcgcactcgcggagcgagttctcatccgcctagaccagatggatgacgctgaagaattccagcactttaaaacagtgattggagacgacggaattctccgtctgaaaaccagactggagatgagtgagaagccatacagcttctctcatcccattcttctcgccaaacattccactttggcaaagctgatcattttggatcggcaccaaaaaaggcatcaccttggagtggacaccactctgacagaattcttgagtgaattctggatgccaagtgcccgtttaaatgttaaacggactcttcgggactgtctccattgtcgccgaatgaatgcacaacagtttgcattaccaaccatgccacccttgccgggtgagcgagtacgccgacacgcgccatttcagtcaattggaatgaacttttctcgggccaacaacaatttcgttggccggagaaaaaataaaggcatggatcctcatcataacatgcctcgcaacgcgcgctgtctaccttgaggtacaaaactttcctgacc

SEQ ID NO: 735 - DNA, 3238 bp, Heterodera glycines
  unsure (1)..(3238): unsure at all n locations
ccactccgacaacagtcagaattcggagcccgagtctcccttcaaggcgaagaggncagnaactcagggtgggatgacttccttttcgactggaagtccacttttcatgatctgtttggccttaaaacaggcctaattttcttcattgtcttgatgatcggcattgtgatcatcattttcgttgtacacttctctcctgtgtacaagttatggagaacatttgcttggttgctcatgaaccaagctccgcgacccaacaacgccacaactttttccgtggctgccattctctttttggcggccggaggatccttcggatgggaacctcgaaaaggggattctttccccgtttcatgcggggaattaagaatccccgaccccgaattttcattcagggaagcagaggggaatacagtacccctccatcaaaaaatcgattaccgtaatcgatcgccaaaaactgatataaaagaaggaaatttgatgacaatttcattccttcgccatcatcaagctccaaacaacacccagcgcctcagcaaaaccatgccgattccgttccgagaacggccaccttttttctcggcaccaacaatcagccgacccacaaacgaagtggtcattaatgaccgcctcgtcatcgacatcatcggccaatacgaagccgagaacggacagagagcaaacaatgctcctcaacccggggctgacaatgctcctccgcccggggccgaagaccaaagaggcccctggtggttcgaccaggattgggggccccagctcccaatggtccctgaaaacaatggccaaaatcgccaaatggacgatcagcgagacgattggggagcccatgctcctccccgacgggaaccatcgccccgtgaacacacggagcgcctgaactcatgggttgagcgacaccacggccaacaatggtatgagacggctaccattcgccgtgaagcggaggaacacctccgccgagaactgcgcaccggtgccacgctttttgcggcacacctcggtccattcgctaatgtccgtttcgacgggttttcgcgctttggaccggctaacacgcaaatgtttccgggacggactgtccgggaacatttccgacggcgcgggttccaggtggacccgaatttgccatgcctccaagagtatggaggcttcagcaatagccaacaaggaatccatgtcgattactttccaatcgacatggtcaatgtccgattccaaatcggagcttatcaaagggaagctgagccccctcgtcttccccgaataagagcatatttggcattggaagaggctcccaatgaccaagaggggcccaacaggggacccccgtctcgacggttcttcgaggccattggcctccgaagaggcaatccgaatgttggcgaaatggcggaaaacaatggccgccaagcgcctctccaacgcggagagcgagccatggactatggccgccccaattaaccggacggcagctttgagaatcgcccacgaagggcggtccccaaccgtccaatgcgccgttggcagaacggccttttcattgtggccgtggctttgtgcctcggcaatttggcggagggaaaggaattcccttcgccaaggacttgccatcagccgcttgaagcggcggacatggcacgtgaaaatcaagggggattttcacgaatacttttcccatggccattttcccacgatcagaaagcaaatctgatccgatgactccgccccttcaatggcagcggaacctatataagggcagggataaggtatatcccaccatcacttgcccttcccaaaatgccgaaacccatcaaaatgccctcctcgtcatcgtccgcctattcatcatcatcatcatcatcatcatcatcatcgccggatcgccagtcgccgccaccgccccgcaaaaaggcggtggaactgttcaacagtctcgactcgagaaaaatctcgggtttttttggtctcggtctcgagtctcggtctcgggttttcaagtctcggtctcgattttcgagactcgagaccgagacttttttacacccctaatgattgttggcctttggtaaacttctattttataaattttaggttcttttttgttcaaatttgttaatatatgtgtggtccagcgggttgtgttcttggttttgttccttatttttgcgttggatcagttcccctccaagttttattttttcttctcatttttcaaaattaatgtttttttcgatgggagttcaaacacaattttaacaattaaaatcgtaaaaatgtcatttttggactaaatctattgtcgctgacagcagcgacagatcttatcgatcgccagctgtttttgtttttcccacgctttttgctagtgatattccaattaagttttttcctctgtgccccgcccctcacattttcggcctataaaaagggcacccttttcattaaatgctcacttccacatttccattcattcatttctgctgctgcttaataaatatatatttgtgaaaagagtccgggggatttggtcgggacggttttcccctcccccttctgctgctcagcgtctgcgtcgtcgtccgcccagcgtcggtcttccccgcaggagtctctcactcctgcgggccttcgcttccaccggctcgtccgtcccttcccccacatttgggaaggcacggccgagaaagggaaagggggaagcaaacagctgattttgcccttggcaaagtcggctctcgcctccctcgctccccacaaaagtttttgtcgcctccttggctgcgacaaaattggagccccgtaggggtcagttgttccttgccgaaagaacctgacctccttcaatcggccgtagccgccgatcaaaaagtcttcgcccgccaaggggtgaagaacatcggctacagtcgccgatttactttctccctactgaaagggaggaaggctcattcggccatcgccgccgctcattcgcctaacccatcaaagggtaggcacattcggccaccagtcgccgacttcttcgtcttgcccaaccagtggcaagacactcggccatcagcagccgactcttcgtcttgcccaaccagtggcaagacactcggccatcagcagccgattcatttagcctaacccaacaaagggaaggctctttcggccatcagccgccgacttttcagcctaaaacaacaaagggaaggctcattcggccatc

SEQ ID NO: 736 - DNA, 1430 bp, Heterodera glycines
  unsure (1)..(1430): unsure at all n locations
ggtaaaagttaagtttaccccccccccctttttcgaaattttttttttgtttttaaaagtcatgaaaacatgtttccatgggttttcggggtcgctgatcacgaatccggcacccatttcggccaattccgaatcccgtacccgaattcgaacaaaaagccgaacattcaaattccaacatgcacaaaaatcgcaaaatattcaccaaatatgcacaaaaaaaacttgagatttagaggtgcaaaataatttaaaataaaattttttcctaggattttcaaatcggaaaatatttgacaaaaaatggtaaaacatgcatgaaatatgcagaaaattcaaaatatgcataaaatccggaacccgtcagttgggtcccagcggttttttggctacaacttttttctttgtcttccaaatcaaacattgttggtatcattcgaaagctgtaaatgtcctctattagcctgcaaaatgttgaaaaattaagtaaaggttcaaaaaatgatgggcagaataacttaaaaaaccagattttccaactttatggccacaaatttgttcaaaattgacgaaattttttgaaaaaattcaggctaatagagcatctgaagggctttcgaatgataccaataatgtttgatttggtgacaaagaaaaaagttatagtccaataacctgctggggcccaactgacgtagaccgtaaaaacccaaaatctgcaaaaatatgcaaataaaagtcccgactattatacgcaaacacaaaaagaaagtgtttttccctactatttagagcatgcagaagccagggaaaaaaacatttacatattttttgaacgcgtaaaaagttaagggcattttttcagataaaatattcagttttttgaatgcatttttatgctaaacatatgaacacccattttttttaattaaaaatgtgattgtaatttttctaaatatttttgatcttaaacatatcgcgaaaaacgaatggctttttaccgattgaaccaaaagttatgaattttggattttttcattttatgaagctttgaatgtgtctctcaacagttgcatttttttacaactctaatagttttatccgccccctagtcattactgctcatcttaccaaaatcactgctcattgtgcagttcaccgagatccccactctcagggctgcatttttatgtctgcaatttatgttaaaataagtaaaaataaaatggaagttcgtttttcgatcgttttttcactaaaatcagtaaatttatgtttatttttttcttctaaaattactttaataccggattcgttcattttatatgttttacgaaattaataaactgagaaatattattcctaaattntgtaaaaacacatgcccgacattagccatcctgataggaatcagcagctttaaaaatatt

SEQ ID NO: 737 - DNA, 1588 bp, Heterodera glycines
gcaatagcttagaaaaatcttttaaccatgttaagctttcgaatgttaccaacaatgttggattggttgacaaggaaaaaagttatagtcgaaaaaaggtgatttgcaacacaaaaatcactgccgcaatcgcttatgctttctttgtggcgtatgcctttttcttgcaaacaatttgctacagacatttcatttgccgtgtttgggaaaagagaaacaaaatttagggcatttgtatttaaggggaagaaaaatgcgaaaagaatcgatcccgtcctttcggtcgataatttatgcaaatggggaagggcgggaaaattcatgcaatatcgaatttacgaatgattgatcaccaaagaacataaatgactaattcatttaaaatgctaattatttaatcattcggcttatttggtaatttaagttgttggaatttgaattaatcaatttcaattctttttaaacatgtgtttttatgatcgataaacttcaacctatttaattgaaaaataaataaatattaaatcagccagcaggataaatgagaaattaatatccccagattttggggtttaagccatttaaaattatcgcttttagaggaggattataattaggatgcgatttataaaaaggtataaagcgtatccctaattataataaaggaaatcaatgacaaaacgaatctgcatcaaaaaccgggaataaatttgggttaacaacaatttcatctcagaacatttttgatgaatcaatgcaattattatattcatttggaaaaagattgccatagacaaagaaggggaggcaatttttggagaaaagggataatgacagcacaaaacacaaatggaagaagagggaaatgaatggctgggaaaaagaatattcggcaagagaacatttggggatggagcgaatgattaattagagcaaatgaatttgacgaaacggaagaaattagggaaaaatttaacattatgcataaaattatgaaaatttgaatgctgcggacggacacagcaaaaatgatgaaattaatgtgcaattatcaaattggtcaatttgggtccacaaacgctgtaagaaagcagggggacacaaaagaggtacaacaaaaagcagatgggcatgtaccaaaattgagcaaatttttaaaattttgcattttagtcaataaaaaaacggatgggaaaacccgacggcgggcgcactaattgatgtatttgtatcaaaaatgaacgaaataattattttgtttcggaaaaaattaccaaaattaatgagcaaaaatgagacatcaaaaatgatcagctgatcaatttgtccattcaataatctcaaaaacagctgatcatttctcaattatatttcactttcgcacagttcggcacccttttcagccgctttttcttttgattgtggagataattgcctaaaaagtcaattcatcaaaaaaataatttaaaaaaactttgcttgagtccatcaattccttcattaagcatttgtttggaaaatgttgaaaacctagtcttttaaattcttctggttataataattaattttaaatataaatttattttat

SEQ ID NO: 738 - DNA, 1320 bp, Heterodera glycines
aacaggcttggcaacaactttcgttcagcgaagtaaccttctcaccataataaccaaggacaggctattgaatgaaccaaattccggttggttgatatccgttccccattctttaatcaataagcagacggacctgaacaggtcattaattcggaccaacgtggccagccacacagaattgtagacaccattcaatttctctgatcgtccaattgtcaaatcaacgtggaattccaacttaatttttaataccggggtgtttcctctcgctctcaattccatctctgttcgcggatatttttgccttaaaatttgtcgaacctttcccaattcgtcagcaagacgaactgatgtttggtcgaacttgtagatgaaaaggtccaagtccgaaccgtgtcgagccaattgacataatgaggaaccaaaaactaggacttgacaatttattcccgcatatttgagccactggttcatcctttctgacaatgcaaatttctcatttgtcttttcctccgtctcggccacttcgtctgcgtggctcatcaatagttcactgattgagttggcttttgtcgaattttttggtttatctttagcttcgtctgtgcttgttatttcgagattttcgaaactttttaagtcgaatacctcttcctcaacaggaatattttgaaaattttcttccctattttttggccatccataatttggctgaacagcccgtgttgtaccttttggtgttgcctccttcacatcatctctgagttgcatcaacaatcgtcccagtgtgttcgaaccgttccactgttgtatgtccgctgttggccatttgtcataaatgagtcctggtctacaacccaccccccaaaactggtcgggtgataattcgcaaattatggccgatccagtgctcaacagcacatctttaagatcaggcaccgaaaacttggctttaagtgcttctttcatgatgccaattttgagctcagtccattcttggacagtcacttcgtcctccccgttcatgtttgcgaatttcttcatctcaaatgcgcttattcttttgccatatctatttgtccccagcataatcgcatccgccgcgtcgaaacgtttcagatacaacgctttttgggcacagtaatactgctccacacatcggtaggttcttccgtggatgacgaattcatacgcttcgttgaaattcgaaaagtaaaattgctgattaaaaaatcctagcaattcgcctctttcttcacccggacacggcggcaaaatggtgctctgtcattgatgaacggcggaattggcgggatactt

SEQ ID NO: 739 - DNA, 8125 bp, Heterodera glycines
tttccaaaaatcgtaacggccttgacccggaaactgctgtggcgggtggaaacgtggatttgagctggactgatgttgctgtaagtcctcaacaggacggattggtcgaattgcctgagtccattcgctgtgcgatggttggtcctcaacaggacggaaccttttcgactttgttgcgcccgaactatgatcatcagaaaatgattgttggcatcgcttcttatacagcgcacttcctcccctttgagtgattcgcggagcacccataaacacaagtctgttgatgtcaagttctactgtctgtgccggttccagccaggcgacgccttcaacatgtattggactaccaatccagaccgccggtttggcccatcttcccaaaaggctcaaaaatggtctgatgtgctcggcccattccgtcgtccgcacgacgaccatctgacaaacatcattaatgatgacgacctctggtaaccgatgccaccaggcaatgtccctgagtgagtgcaccagaactagggcacggagcccgttgtcttggaatgtccgtccaattggttccacttcgtcatccccgacgaatgcgatgggagcgttaataataacccttttttctccaacgccatcccaggggcgcctttcctcaacaggaatttgtgaaatgccctttctctcatccttcgattcttcctccttgtgttcgtcctcgagatctctttccatctcttcacaatcaagagacacggcatcgaagtctctggccatttctgaaatacatgtcacattagttataccatttatcactctcggtggttgttttgcccatttatagtgatttggggaatttgccttaacaagcgccttattttgaggaggttcctttgcccaattataatgaatttgtttcacagaactgtgttcctgctttctaatgccagagtcagaattattggcattttcggctaattctaagggatataagtgcttaatagcacgttcaataattgatttttccgaaattctgactctcgcagttcgttgtgacaaaatttcttctattttcctcaatttccaacaatttcttggagtttgtggttcagaaatgatcaccacgtccccaagttttggtgcttttcctggcgtgtgtttgttcccttgatgacgttcccttagacccaataaataggaatctttccaattttgccaaaatttttcagccatattcattgccttctggtatctttgcactacattagcagtgtttgaattttccaaaatataatcattgtatgtgttctcaacagatctagtgtttatttccaatctattgttaccaatgttgggtaaaattagatcaataggtcttaggggctgaataacttcagattgggaagtgtaagtgattggtctctcattgactattctctccacctctgaaaacaaagtccataattcctcaaaactgaggagtttatttcttatttcacctttttaagtggtacttaacagtcccaatcatacgctcatattgccctcctctccaaggggcaaaaggcgaaataaaaacccattcaattttttgttgattcgaaaaattctgcactttctcgtcctttaaaactttgagccaatgctccttctctttaatgctttgttgaacaatttcggttaaggctttgttgcctaacacgaagttagtgccattgtcggacacaattctctgaggaatcttccatcgtctgacaaatctcgtgaaggccaacaaaaatcttttcgcagtcatatccgtgactaattccaaatgaatcatcctcgtgagagcacatacgaatatcgcaccccaaactttatgtttgccttgtccgtctgatgacttaacagtcattgggccgaaataatctaaaccaattgtttcccaaattaaattgccacttatcctgtatgacggcagcggaggagcttcaggatatgcgtaagctttggcgtgaaaacgcgcgcagatccaacaacgagtattcggattgattctcagaactgagttcactttgcttcggactgaaggaatccaaaatttgcttctcaatgaagcaaccatattttccattcctgtatgtttcctttctcgatgaatgtccatgataattaaatccacaattggacaatttttattcaaatatataggatgaatagcataatggtccatgccactattttgcatacgcccctttgctctccaaattccgttctcttggaaaagattcagatttaagatcgtctcattagatggcggaaaggctttttgagcttctttccacaaatggacttcggcacgttcgacttcatcaatcgttagaggatttatttgcttactgaatgatttgacctcattacttggcttaacagctgaaatgataattttattcgctgagtttttgaaattttgaacggctcttagtacataagccaaagtatttcgacatcttcgaaattgtgaaaattgctcataattgagcaataattcaacttgttccattacactgcttttagtgaccaaactcatttctatgaatgagtcttggtgtttattttcattcggtgccgtcggatcatattccttgatgcttttgggccattctgatttgtctttatatagccaatttggaccgtaaaaccagcatttattctccatcagttcttccggtgaacaccctcggctggcatagtcagcaggattaaatttaccatcaacatgagatactggaatcatcttatcttgaatgaattttgttcgatttcgaatgaatcgatcctttaatttagaagagtttaaaaaatcaattacgtccgtagaatctgtccataaatgaacactgtcgattgtgattgctttttccaattctcttttaacaaagagaagattgttgcaacaaatttttgctgcgtgtaattcaagcgacggaattgttctgctggctttgctgagctgtgtcggtacgaccaggcttttggcgaatgctaactgagtttgtgctccttcattagtgttggctctgatgtaaatagcgcatcccaatcccgtttcggacgcatccgaaaaaccgtgtagctcgtagttgcgaacttctgttgcgtcgaaatattttctcgtaaatgaaagggtttttgcatcccaactattcatcagttttatccataccgaagccagatttttgtcaactattgtgtcccatttcaattttccattttgttcgaccgattggcggagtaatttgcctttcagtatgactgggctgacaatacccaacgggtcaaatgatttggcaatttgggacaaaattgtcctcctagttatttttccttctttaggaaatcgggctaacttaacagttaatttgtcagattctaagtcccacccaactccgagtaacttcgtctcttccttcttcccttggtcagtttctggtaatttttcaatctcagaccagtcattactgacgaattcgcggacattcattccggcatctcggaatactgcttttagcaaccggtatgtttgtccaattgttttgtcttggtcaataccaagtacaatgttgtccacataagtgtccttttccatcagacgtatctgtggttgccgatatttagcgaaatgatgtttcaatacaattgataaatgagcaggactacaaattacgccaaaagtgacgcgtgaaaatctgtattctacaattggactattttcatcttcaggattttcgtaccaaaggaacctcagtgcgtctctgtcatcgggatgaatagaaatttgcaaaaatgccttttctacatcacaagtgaccaaaactggcttaagtctggcccttaaaagtatacctgccaaatcgttgtataaatttggtcccttgttaagacattcgtttagacttggaaattcttttctcaattttgaacttgcatcaaacacaacgcgaattttggtgaattgtttgtcttgcctttctacaaaatgatgtggaagataatagaggacgccattgagttcgtccctttctttggttccttttaacttccaatagttaatggagctgtcaactcgttcgatcattcccttttccaattgatcatgaatgatttcatggtattgctttaataagcatggtttctcccttaattttttaaaattcgacttcagtcgtccgagtgcgagataatagttatccggcaaactcgtcacttcctccttccagctcagccgaacttcatatctttcaccattaaaattcaggttttgctcaaaattttggatccatttggcattgtcgtctctatcattggcgtctcccaggccgatcgtttccaatttgttgtgttgttcaaccataaaagtgagttcatcgtcgtcgggttgaagcttgttcccaaatttgggtgaaaattcaacaattttctcgactgaagttgtagaagcggtattggctagttctttagttgataacttaacttttccttcacccgaaagaatattgcccaacttcgattcactaatccaaaaaccattagccaattgctgtactggcttaacagccaagtggttataaacgtcaccaccaattaataataatggctcttcaaattttggaagtacttgaagtttgttggacaataacttgtcaattttagcgccctttatcttaacgtggggcaatttgggcatcactttatccagctgtcgcgcttgaatgttcatattaaaattctttcctaacaaattcagttccacaaccgaagtgacaaagtctcccaactttgttccctgtaagccctttgcttggaagtgaacttcgttgattttcattaagttcaattcttcaacaagaattttagcgatgtaagttttttcacttccgtcgtcgaggaaggcaaggactcttttcttccgttttggaaacatcgggtgacgaatgattacccacacacatttgagaagagaccaaatttcttttggatttttcatgcagctttgtatggcaaacacattggttgatgtgttttcttgcttctcagttgtggtggttgcgacttgtcctctggccactgatttccgtctttcgcataatgccgggtgatgtccggtacgttgacaaagaaaacattttctaagttttcttggacaatttcttgccatatgattattgaataagcaaatgtagcacattgctttcgcttctatttgttttcgcctgttcacaactgaactaaatttgtcacaatctaaagcgaagtgtttttcagcacaaaactggcatggaaatcgcgacggacttctgctttgactcgggcttgggcttgatgaatttgattctcttcttcgactttgattgggccatggtgaaccgggttttcttcccggagatcgtccgtatcggctcgattgtgaggatgagcgtaagcttgatccttccgatgaagttgaagtcccacgccatggctttggcttaacagcacccgatgattgtcgattatcctttttctcttggtctttgtatctgatagccaagtttaaggttgattccttttcttcactcttatgcttctctcttttggatgtgtgatgagtctgttcgggattagccctttgaactatgtcattgatttgtttaagctgctcaacagccgctttaaatgtttccctaaataggttggttgaccaatccgaaccatgaggcattgcactcagcttgacgttttttaagtctacatatctggtcaacacctttttggacaatttctgttccagactcatataaatttgaggtgaactcaaatcctgattataatgctcgagttgtcggcaaactcgttccaattccaactgaagtttcatgtcgtctccaagagatatcgaatttgaaagccgggccaattgattatgtaaatctctgattaaattttcatttttcccatacttgtcctttaataaggacaccgagagatcataattatctctggagaagggcaaaagtccttgaatgacttttttggcttcacccccaacagggaatccaaataactcattttttgtacgtaatccaaatcggcatcagcatgtattgtcgattcgaataatggccaaaagtcatcccaattactgccatcgaactcctttaggcttaattttggcaaggcaatgtttcggcgtgccgttcctccgggcccatcttgaagaagacgatcaatgttccctttcagcgtgcgggtatcggccaatttatgatttgcccttcgcaaaaaattttgcagatcgtttgcattgaccgatgcacgaaactggcgttgaaactccgtttttgcatcgccttgaagcgcagacagctcttgattgtacaatacccttgctgcttttatttcatccacttgcgtttggatttcgtccgcaatctctttccactccctttgatcacaaatcaaattgtgtctctgttgggaggtcaacacccctagaggaaggatgggcaagggcttgtcgaggtataattcaatggcatatttggcagtctctattcgttcgacataaatgtccgacattgagagtcccttttaaaattttatacagattttatttaatttgactgaatagtcacgatttaattcgtaaaatttatcaaattggtaattcgggagccccttggttaatagtatgaattaaacaattatatggttaaataacaaattgtatgtgtattaattgaatgttcaaaataaaatttaaaaatttaaattttactccattggctttggcgaagtcttatatgtatggtggagttactgtagaatgaatgaaatatttaattgattagtcagaactgaataatcaacactccccccaaaaaggacaaataaaataaataagttcaaattcaaataaagaaattaagtacaatttaaaaataaaaatgaaatcttaataaattaatttcagatcaaaactgatttgaaagaaataatagaaaggaacagattgattgtttgggttagtgtattgtttcccaattactgtaccctgattttgaaatcaaactgatttgtggggaagatagaaaacaaaacaataataaatgtaaacacaaatatgatttgtaaatttgcgttgtttattggtacaccggtagcaataggttttgggattattaccaagctgatcagcttgtcaatttaataattgaggattgctgtctccggccctacggcggcgggtcgccactaacgaaaatggccgtgtgcgaatgagaaaagcccgggcgtgagatttgaaggccaattgatcaattgaacaattgctcaattgaattccaaattgggcgattgttcaattaaacaattcgccggatcaatgagaatgggctaaccaggccaatttcccgtgatcaacacacggttcgttataccgaattgtgggcgccccaaataccgcccacaacacttggacctgatccttctcggcggttctggttctccggagtttgtgtgcagcaatcgtcaaggatccaaattccaatccggcgctcaaacggcaaatccggcacggcggtgcgaagtgtcaacggcgaattcggcacggcggtgaaaagtgtcaacggcaaattcggcacaaggcttcaaaggcaaattggcgtgaagagcaaagggtccacaggtgtatccggcttggtgatcagattccaaaaaggggaaagggaatggtcagaaatgccaacaatgcaaccacgagaaaacaaatgagatggaccggtcgctgatcagctaacgggttttccgatggggcaatcggagcctggctaaaaagccaattagacaacaaattgaagtgaggcgaaattcacaactgatcagtccaaaattggactgatcgaattgtccctttgggtctttcgggactgatcagaaaattgttctgatcagcgggagggggagtcccgcaattttgaagtaccgaaaccaataggctattccccgatccccgggattcgaattggttaagggggcagaaactcggtgttgttttcgtgcctcaggcaaggaaattttttccctccccacaagaaatttgtaagacaaatttatt

SEQ ID NO: 740 - DNA, 4332 bp, Heterodera glycines
  unsure (1)..(4332): unsure at all n locations
ttcctttggttttttcgtgctgctttgtctggccgtctccgttggttgctgtgttttcttgcttctcggttgntggtggttgcgncttgtcctctggcctctgcttttcgtctttcgcctctgccgggtgcgtccggtgcgttggcctcgtccccgttttgtcggttttcttggtctgtttcttgccttgtgtttgttgcgtgcgctttgtggtctctttgctttcgcttctgtttgttttcgcctgttctcgtcgtgggctggctttgtcccttttctcctgcgggtgtgcttttccgctcttgtctggccttggctntcgcggcgtgtcttctgcttcgactcgggcttgggcttgatgaatttgattctcttcttcgactttcattgggccatggtgaaccggcttttcttcctggggctcttccgtatcggctggatttggaggatgagcgtgagcttgatccttccgatgaagttgaagttccacgccatggctttggcttaacagcaaccgatggttggcgatcgtctgttttcccttgatctttgtatctgacggccagatttaaggtcgattcttttacttcactcttatgtttctctctcttgtatgtatgttgagtttgttcgggattagccctttgaactatgtcattgatttgtttaagctgctcaatagccgctttaaatgtatccctaaataggtcggttgaccaatccgaaccatgaggcattgcactaagcttgacgtttttcaagtctacatatctggtcaacacctttttggacaatttctgttccaaactcatataaatttgaggagaactcaagtcctggttgtaatgctcgagttgtcggcaaactcgttccaattccaattgaagtttcatgtcgtcgccaagagacttcgaatttgaaagccgggccaattgattatgtaaatctctgattaaattttcatttttcccatacttgtcctttaataaggacaccgagagatcataattatccctggaaaagggcaaaagtccttgaatgacttttttggcttcacccctcaacagggaatccaaataactcattttttgtacgtaatccaaatcggcatcagcatgtattgtcgattcgaataatggccaaaagtcatcccaattactgccatcgaactccttcaggcttaattttggcaaggcaatgtttcggcgtgccgttcctccgggcccatcttgaagaagacgatcaatgttccctttcagcgtgcgggtatcggccaatttatgatttgcccttcgcaaaaaattttgcagatcgtttgcattgaccgatgcacgaaactggcgttgaaactccgtttttgcatcgccttgaagcgcagacagctcttgattgtacaatacccttgctgcttttatttcatccacttgcgtttggatttcgtccgcaatctctttccactccctttgatcacaaatcaaattgtgtctctgttgggaggtcaacacccctagaggaaggatgggcaagggcttgtcaaggtataattcaatggcatatttggcagtctctattcgttcgacataaatgtccgacattgagagtcccctttaaaattttattcagattttatttaatttgactgaatagtcacgattttattcgtaaaatttatcaaattggtaattcgggagccccttggtttatagtgtgaattaaaaaattatatggttaaataacaaattgtatgtgtattaattgaatgctcaaataaaatttaaaaatttaaattttactcaattggctttggcgaagtcttatatgtatggtggagttactgtagaatgaatgaaatatttaattgattagtcagaactgaataatcaacactccccccaaaaaggtcaaataaataaataagttcaaattcaaataaataaattaagtacaatttaaaaaaaaatgaaatcttaataaattaattttagatcaaaactgatttgaaagaataatagaaaggaacagattgattgtttgggttagtgtttgtttcccaattactgtaccctgattttgaaatcaaaactgatttgtggggaagacagaaaacaaaacaataataaatgtaaacacaaatatgatttgtaaatttgcgttgtttattggtacaccggtacaataggttttgggattattaccaagttgatcagcttttcaatttaataattacggattgctgtgtctccggccctacggcggcgggtcgccactaacaaaattgccgtgtgcgaatgataaaagcccgggtgtgagatttgaaggccaattgatcaattgaacaattgctcaattgaattccaacttgggcgattgttcaattgaacaattcgcagtgacaatgtgcttgggctgaacaagccaatttcccgtggttcgcacacggtttgttataccgaaattgtgggcgccccaaataccgcccacaacacttggacctgatccttctcggcggtttttggttctccggagtttgtgtgcagcaatcgttcaggatccaaatccaatccggcgcggcgcgcgaaagtcaaacggcaaatctggcacggcggtgcgaagtgtcaacggcgaattcggcacggcggtgcaaagtgtcaacggcgaatttggcacaaggtttcaaaggcaaattggcgtgaagagcagagagtccaacggcggatcaggcgtggtgatcagaatccaaaaagggggaaagggaacgatcagaaatgccaacaatgtaaccacgaaaaacaaatgagatggaccggtcgctgaaaagctaacgggttttccgatggggcaatcggagcctggctaaaaagccaatcagacaacaaattgaaataaggcgaaatttacaactgatcagtccaaaattggattgatcgaatttgtccctttgattcttttgggactgatcagaaaattgttccgatcagcgggaggggaagtcccgcaattttgaagtgccgaaatcaatgggctattccccgatccccgggattcgaattgattaagggggcagaaactcggtgttgttttcgtgccttaggcaaggaaaaattttccctccccacaagaaatttgtaagacaaatttattgttgttaaatgttcagcaaaataaaaagaatgaaaatgcaaaaacggggggaaaacgaagaagagacaaatgtgggcggatggatcgcaacaaattgaaatggtgagaatggcgttttatctgatggtcggtcatcatcgggacaaagggcgacgacgcggcgatgaagcagagagcgaacgagggaaagcgagcgagggaacagtggcagggggaagacaagcgaacgggggaaacagtggcgagtcgaagggcaaacgaacagtgcattggccaaggaagggggtgggggtgtttggccgccgtcgtgctgtaaacggagagacgattggatcggctggggcgacggcggtggagaagagcaaattgtgaaggcgtcgctgaggcggtgtacggctgaaagcaaaaaaggggggaataaggggatgaatgcattaagcgcagcccgcggcgaaccaccggctaaacagccaggcgaaatagttgaccaatgggagagaaccccctttctatgctttcttcggaaaggaaagcatagacaactataaatcgaaattgctagaattagcgattttcgacaggtagcaaaattttagaatattttttcgataaatcgcgcaaatgctcaccgtttgggcctgtatctttgcctgtataagatcactcgagtcccccagtgcactcccgaagaagattttttccgcaatgccaccacctaggaaggccatcactacggcaaaaaggtcgaaagttctgtagccaccatttttcctctcaaatgttgtttctccatcaacgcctctctttcgtaagcagttgacctaaatacagtgacaattacactcacattacgcaataaaactttcaaaaaataaatttccaagaaatagcaaaattttgataaatcagaaacatgaacacttcacccaaactacctctataaatttatcaagatgctcggggttcatgtaagctgacatgaaatgtccaatttcgtgcacacacacccttatttcggtgtaacaaccatttgttcttgttgttttgttaaatcctttattgaagcgtgaattcgattttgcctcatctcctctgaacactgcatacaaactcgcaggaactgagattgtgatgaggcacaaagggcacgaagtgcgaaaggctcgggcgagttccaattctgaatcaccg

SEQ ID NO: 741 - DNA, 3595 bp, Heterodera glycines
atgaaattttcttagcttataacttggtggaatactagagcaaataaaaccattttatcgctcattttgaagggaaaattctggagaatattgtaaattttatttgggttggccttaaattgtggacttggctaaaaaagaattaaaattattgaaatttttactagggtcaaaaaaattttcctcgggtcagattttcttgaaattttgtataggcctatattttgacctcctctagcgattccaagtttattttatggaacttaagtttttaactctagatcggctcttctatttttacaagggaaaatccccaaaaaattttaagttttgcaaagttttggcgtgctgattactaaataaataacactatgggtcaagcccagtgttagacaaaattactcataacgccaaatagcgcatttggcgtaaatttttgcgcgctatttcaaaatttacactggaaaatgccttttttgtattttttattttgatctgccataactcgcttcattcccaactaaactgaacaaatttggtatctaaaaaaagattttgaaaaggggaatctttttctaagcgaatgttaagtaatttgtcatctcagaaaaaagttgtgggaatttcaaacttttatcatgttataactcaagtcctaggcagctctttctaaccaaaatgctaaatttattcttttttctattgattctaaatgttcaaagtgattttgtatccttataaccaaaattattagaattttcgaatttggtgttttttcatgtgttagagacatgaaaatagtacgccaaaaggagaggaaaagaaattattaattttgtttgagttaaaattttggatcggagcgtaaaaaaataaaacttgagcgttaaaaatgttcgtaatttttttctctatcgctatgcaaaatttggtacggatttaacataaagaaaaaaagttagacatagaaaagtaaatgttgttttttacatcattaaaatgaagagatagtacgccaaagtgagagaaattacaaagaaaaagagaaacgacgagatagtactaggcttttctctgcacagtggagttgacccatagtgaaataataaacttatttgtacttggagcccaaaattgaatcgctatgtatacaaaaaatattcaccaattcccttttcatgactataaaaatcttttgttttccgctttgactctcattaaaaaaataaagcttccaacgaattattattctgctcttttgtttgaaatcattcggaactcggccaaaattgtgctaattgccaaaaatgaaccgacggtaatgaattttaaaagtcacaaattcgtcgtttatttgactaaactgtttttccataatttcagttggatttgcaacgacgtttggatggacattttccccagttttgaccgtcctcaactcggcctcaaattggcacttctttccccacgttttgatgcgttggtggacaaacatttcaatggcaaaagcgaattgacaatttggagacaaatcaaaattcgcaaggacaaaggaccaggaccgaagctgtctgtacgaatcgatgacaaaattgtgccatttccattgccggaccgtccgttgcccagcaaaatccgttttaagcgccttcggatgtggtaattaaaaatcagagctatcgcaataaaagcattcatcccattttcacagttacatcgatcactccgtcatcgcttttcttcgttcaaatcaccaaatttttgacaaaagaggcaccaatttatatttgtcgattccatcatcatactctacgaatggccagcagctgatttgggacatttttgttcgtgaaatttggccaattttttcggcaaatattcgccatttgcgcattaccaatggtgatgatttggaccatttgcttcgtcgcacttcgccgacaattctcactgatctcaatcagttggtttcaatccattcatttgatctgttgcccgctgcgtttggtgatggttttgatgggccaaattcaacaatttctgctggccaagcattgtccaaatggttgcactctccgagaaaagatggccaacccaagcgattgcgttgcggtaattacaacgaacaaacggacttagattggatcaacaatttcaaggaggtgtggccataatctcgacaaatcactgttttttgttttcaaattgtttagcattttctccgtgccaatgccatttcttccgtcagttacgaaattcatttttatgttcatgtgccgtcaatacaaatggtgccatttgatttggtgaacgaatgcacaaaggaaaagctgacattggccaaagcaaatgaaaatgaattggacaattggataatgaaacgatgcaaaattattggggagacggcagcggttcattgggaagacggaaattgggacaacaattgtaacaatgtgttcttttggcttttcggtaccactaattgcattgggtgagcaataaaaaggggatttgtttttatacatatccaaatttgcgatttgcgcctaattaaggccattgtctccgccaccagcagaagaagtggaagaggaagccggacaatgcatcacaaaagggccaaatgagtgacggacaaaacaacaaaaacagtgatcagccgcagaagaagaagaagtgaattaattaagaatgaccgatcgatcataattcaaatcagtgatcaaatgcaattttatgaagaagaacctctcaaatcctatataaataaatcggatatataaaaatggcaaaaacgtggactctgttgcagttaacgttttttctttgcacccaaatccaacaatcttggtgtcattcgaaagctcgtaacatgctttattagccttacaaaaagcaacaaaattttcaagcctggaaaaaatttattaagaaaaaacttcaaaatttttgttaagctttcgaatgatatcaacaatgttggatttagatgactcagaaaaaatgtttagtggaaaaacgagctggcgccgaaacgaagtggaccccatttcacggtcctaataagtttcaaggatctttttaacacatgaaattgcccacattttccagaaatccaaagttcaatctgaaaatttgaaattcaagacatttctcctttataattattaaatattattacatattttcacatctgagccattttcactgatgaaatttgtgcccggtccttatggacggaaccggtatcatagactaggagataggaccaatgcaggaatgcgagagaaatttcccattatctctccctttcctttcttttactctcttttcttttccattgcaatttactctctttttttcccactccttccttctcccacacacacgcacgcgtccaacagactgctgctgcacagcagcacgcgtctgttctctgtatgcccctctcacccgccgctgcccgcgtagacagacaatcagacagtgcactattttcccacctttccctcgctctacttttttcaaattcatttttaacgcaaaactcaaacaaaacgccacacaaattcaaacactggacacacacagacac

SEQ ID NO: 742 - DNA, 4748 bp, Heterodera glycines
cgtatttctcgtgaattatggaatgcgcacacaatcccccttttcggtttgttatttttttgttccaaatacattgttccctttttagatattaaattcaaacaattttatgtaaaaaaactcataatccaatcaatgagagacgaaacgaccctatgactaaaccaacccccaccgagttattcaactatttttgcaaattggcattttaaggattcgaccccttctcccatgcttctttcagtatggcaaagtgatcttctggttttgattgggtattaatccatgcttttccactgatcaaattccgctgagcaatgccattgagagcagacaaagatggagtaacaccaattcggtgattataggccaaatgattgaagccaaacattttgccaatacggttcaaaaattggcacaaatctctcttcaaaaatgggtggcatctaaaattttaattaatcaaatttttaaattttatatttacttacgttataatgaaaagttcgataaggaggccgaagaatgagttgagattaatgcagaaattagcaatcagctcattatatggccaatttaaaaggtcccataacaaaataattgttcccacgaaaatgttgcccaaattcagcgacaacggcggaatgagctgcttaccaatgcgaatgttttccgatagctttcaaaataaaatattttttttattaaatattttatttatgttacctgataacgaattgatagattattcgagccaatgttttggaacattttttgataaattttggaattgtatcggcttaattggtagaaaatgcctaactcaatgcttccgaccagcaattggacggcaattatgatcagattcgttattggttgcttatgatcatgtggtgaaggcgttgtggtggcaatataaattgggatgatcaactgcaaatagaatttttgatcgcttatatcttcttaatgcttaacaaaattttcaagaattccttttggtgtattacaaaataaaataaactttttaggatgaattgataatgtattcataaaatttattctgtatgagtatgccaaaattatgttgttttcgctataattagttataattggataataatttatgattactctcaccgcaaaaggcatccacagaatggtgaacagattgccacgattcttttcatatgttcgaacaaataaagtggccaatatgcgttcaacgatcagaacatgcggcacaaaattacgggcgtaaatgccgatgaaatatattttcaaaagtaccgggaaaaattgcatatgcttggcaccaaattggttcccagtgatgaatttgaacagacaaataacaaaacgacagcaaccacgcttaaaagtagaaaatgttttattatttttttttaaatttgtttttaattgaatttgatttaccaagataataaagaaactctggaagatgagaatggctttcatgttcgggtggatgaccgatgtgcgtgccaccaaaatcaaattggcaatggacaacggaatgccaacaaaatttatcaacagttcaacggcaccgccgaggaacaaaagaaacagttcaatgtcagttggtgccgttgtgttcattttctcatgttagcgtaagttgattatcttaatttaaaataaaaataattttaattattaaacaataaatttatatttttaatctgtcgatatgtaatttttgccttacaattctaatgaatagaaaaaatctttggttatcaaaagtaattaaatcaaaaacgttgttttaatattgttcagaatcttttgttaattaattggcaggtgtaaaatgaaattttgttcttgacatgagattaatctttttaacaaacaggtgcaaatttctctctaaaaagataatcttttaactaaatgagttacttttcagaaaacaaattttatcttttaataaacgatggaaagaagtgacacttaattaattgaaatgaataaaataattgtaattattgggtagccgagtttgaaagtggtatccaaaaacgtcatttttcagaaacatctctgaataaaaaatttgcaatgccatctgaaaacactatattaatataattctatattaggcttttatggccctaatttggttataagaatcatttgaggaatgattaggtctattttcgatcacaaaaataagttgcgaacattgcaataattaaaatttttaaaaaagatcacctcaaaatattaacattcaatgttaaatatatgttatagaggattaaataatataatgatttagtccaatatctcatttatttatcattcattatggatgtttttaaaattttttccatcatttgtgaaaattttctgacaatgatggttattaggtttcgcattttgaatttttagactaatggttatgaaatttgtgaatttgaattggatttcttccgcaatttcgacaggggtcggtgggaaaaaaattcagaatgtctaagaatttttttaagaaaaaggtattaaaaaaatttaaacatttttcattaaattatctcaacctttttttgattctcggaacagatatgtgtaacatttattttctgaattctttttttttttgaatttgtttctctttttttttgaatttgtttctctttttttctggcacgctcgttcttttatgttttttatttaattctgtttcattttttttaggtaaataaaaatattttttggtaaatatataaatatatttttttattttaataattacacatgcagctaattctaatttttggtctcgaatgccctctcgaagatcattcgatagccctaaagattttctattaacctgcaaaatttcaaagaatttcgttaagcttaaaaatttgtttgcttttgggcgatgttatgaattttctgtcaaaatttttattttgatgcttttttgagtaaccacccagcaccattgatttgtgacaaatgaagatcgaatgggcgcgaaattgtcaaattttctcttcattagtttttttttttactaaaaatattcttttttctgaattttcttcaagcgcataattccgacagaggcggaggcagcatatttctctccctattctcaagacctaaattcaaatatgcgtatcccactgcgggattgaattcaaattttttttttcgcgagacggaatcccacgggattaatccgcaaaatccgtacaaatttttaaatttattatgagttttttttattcatcatttttgaagaaatattagtcggggcaaaatggaaaaatcgatgagaaagatttaatcacttataaatcatcatattcatttacatattttagagaagaaaataacttttaaattattaagcttctacgatgaacaaattttttgtttttaaaatttttggccccttggtttaaaatttttgaaataaaaataaaataaatacgaactttaaataatgtcatgcgcatcagactatttaatttgatcatcaaattaccaattctttatttgttggtgtttatagttggttgaacgattttgcttaaatttttttttggtgtttttttatgattttgttttgaaataataaatttcctattttccaataataaatatttcttctatgatcaattaattcaataatgtttttgcttaatattattatttctttaattgttaaaattatgccaaatttaggagatatataaatggattcaaaaaatcctttatcttttgaattggtttattagttttattaatttattaatatataaatatgggcctcaaattggtttgaaacatttcattttaacgtttacacaatacatattgattaaatgaaagtgactttgatcaaattagttgtgttgaaaattacttcaattacttgtctcaagaaaactaaaaaaggaaactcggaaagtttttcttatttctatatttaagaccatcccaatttttacgccttatataaaacgaaaaatttaagtttgaggttacgcacaagtatttattcaatatattttttaaatattattaacacaatttcaggatataaataatgaaagaattattgaatgataatatttgataaaataaaaatcatatttaataaagctttaatgaaaacgcaaattttttaaaataaaatctttggagtttaaatcattatgataataatattaacattaataaaattaattattgtaaaaataattcatatttttaattatattaccaaattatgtaataagaggcaaataatattgtttagaatttaactatattttcaaataagaaaaataaatttaacccgcgccggtctctagtgctcagcgcctcaaaatacccaaagaaacttgttaaagaattcccaaaaaaaaaaaattcgggaccaatgaccgacatgattgctctttaaatttgtggaaaatatagaggaatatatcgttctgcaatttttccttcctgcgttaactttcaatttgaagcatattaaattggagagaaactttgctgaaatatagcacattgaatacaattaactgttaaagaatttttgcttttaatgcatttttttaacgaaatctggcggcgagatagccaaaaaacaaggcgcggcgagttagccccgcggcgagaaggcgcgcggcgagttggcccggcggcgagtttctcgcggcgagttggccgcggcgagttgggcggttcccttt

SEQ ID NO: 743 - DNA, 5236 bp, Heterodera glycines
  unsure (1)..(5236): unsure at all n locations
gagagaaaattacagcacaaaatttaaaattgttaagttgaaaataaattaaaaaattatcattttaaagtatttatgcaattatttagtcaaaatatttggaatatgacttcgaatccaacgagacaattccattgttccaaaaacttcgagatgaaaaaaccgctgactatagtcagaaaacggcagaaattgacacgtgagtttgccaattattaaaattggggaaaaaattaaattattatttttgggttatcaaaaaatcgtctgggagggtatcattgtcaacaatgccattgctgttcattttcattttgatcaaatttttaattttttggcgaatactaaaattttggaatgatgccatacggtgcataaaatttcttaaaaaattttatactacaaattttggttgtcaaattttagtgccaaatttctgatttttaatttgttaaaacttttgcagagaaatggtcttacttattacaaatccttatctggtggctgtggacaaaatcaaacaattactcgccatactgaaaacaataccggacaaacaatgcgatcaaattgccaacgcttggcgccaaattcgaattgagtacgcaaaaagtctcattgagaaggcgcaagcagcagcagcacagcaggaaaaggaggaacagtcaaaacgacgaatttcattaatttaataattgccagtttttatgcatttttaaattagcaaaattatttgcataaatttatgaagaggtgtttttctgagggtttttagaacccggaattttgaaaagtgcaaaaaataatatttaataaaacctaaatttgaacatcttggaaatttgggaagaagccgaaaagcagtcgccggaaagtgattgagcaacatcacaaaatacttttttcatctgagactgtctaagttttcttttaatttgttgaaattttgattaactattcaagcatgatgactatttttaagtcacattaaattctcaaatcattggtaattacagttgagcataaactccaatttcttaatcgcaattagcatgaaagcaaaaaagacttcagaatttctatttttttcaattttttgattggaacatttacttttttctatgtggatgaagtaaaattttgtattatataaaattttaccgtccttaataatctgacttaaaagaaaaaattttcaaaaaataaataataatttgcgaagaatgaacgataaaaaataataactatcttatcctcctcattggcctcagttgttcattaaaacttgaaaaccgttgccattgtgttgaatgtttagcacttctccatagtttatgaatttttttgagaaataagtgctttttggccccggttttttaatgttttgttaaacaattattaattagtattttatattttatttttatttaaaatgatgtaaataaaaaaatatatatttagataaacaaaattcatttcataaaaactaaatcattatataaattgggtattcaaaataataattttttacccaaatttttggtcaattttagtaaaatttctgcaatttccaatatattaactacaggctctggctttttgacaatttaaagattgtaataatttttaattttaaaaatttcctgggcatttttaaaacgtcttgcctttttttcatacccagtaataccaactttcttctaatttttttgggatttttactaagctaagccaagagtgtttttttcggaataaacggtaaattgagtattttaggctttattgatgcttttaaaacaaattttgaccatttctctatcaaaaacctgttgttggttccaattgtcccaactccataattgaatgtcatatgcattttttgggcatttttgttcatccacattaattattctttggcatcctccgttccagcatttaaaggatgcatgataaaatggttgtgtattcttgtcatggcaatacacattcatctcatagaattgatcattattctgctgctgatcattcaaagaaataatgttgacaaaaaaaagattcagcgttatttcccaatttgttgtgccatttggttcggcaattttaccgccattgaaaaccacctgttttaattgatagattttttagaaatggcaaaagcaatttgcaaaattgagcattcctgttttggggtggcaggtcaaaaataaaaaataaaatcaacaaaaatgcacgcaaattcacaaattcgggtacagctttatctttggtacattaatgcaaaaatcccgccaaatggatcagattaaaaagatgagttatatgaatttgtgcgcgaatttttgtttgtttttaaaattttggtgtgcgaccaaaacaaaaaaattgccgaaaattaccgtagaattctcaaaggcaattttgcctcctgtatttgccattctgctgattcggataaaaactgaatagtgcctacattttatctcattaaaatcaactaaattcctttcaaaatgttgtttttctcctaaaaaggccatcgaattgtctgatgcgagacttttgtgttgtacaatggtcttagctacagtagcatgttcatcatgacagttcaccgtgatatggtaactaaaccataaaatcattagatattaccgtatgattcgatttttttctgtaaatttaaaatttaataaaaaaagaatgttgaaaacatatgcaattttttaagtaaaagacaaaaatatcttaaaaaatggcataaatttaaatgcaaatttttagacttgtaatgacttgtgcatttttgggcaaatatacatcttcgtccaacaattaaattaattatgcataacttacctaatttgactattttcatgaaaacttggcgataggtcaagaatcaatttgttttggccacaatttgcatcctttgaagtatagagaaatataaaaattttaaataaaatcccatatttttttgccatatttaataataattgcaaaaaaaataaaataaatgaataaatatttggcaatgctaatctacattaaaatgccacaagattttgcccacgtattaatttttaattattgataaatcgattgaatatatatatatatatatatattatacatttcagagtatttcacattacatttaaaaattttaatttcaccttaaagaataggtaaagaggaaaataatgtgtagcatgaaatgaaaataatggattttcacggatttcgtggccaatcaaaggaatttttgtcccacgaacaaaatggatgaattaacgggagatgatggcgttgctcatccaagcgctagaagttctcaggttgaaacaaaaattgaaaactagatcaaagttctaagctttgttagtgaagatactgttgaagattcagatgaagattaaggaataatttgtttcgtaccgcgcataaatatttatcttttaaatttattgtaagggattggccaccctcaaaaaccaatttttattttcactcagcagtcgtactttccactctttattatcacattttctcatctcatttattccgttcatccccgccccttttccgttcgcttcacacttttccttcccccagcgatcagttagtcagtcgtcagtcagtcgagtcgttaagcctattcgatcagtcgttcgtcatggaatatttcaatcaccattttatccggagagaataaattattctaataacatcgaggctttttggggaatttcaccaccaatcctgggcccgggattccttccccaaatcgtcctcccatttattcttcgaacggtgtgtcgactgggggacccaacacacctccctcactggtagcaccggatggttcgacttcacttcgggtggaaggtccatcgacgacgacaaaacgactacgacagcagctgtagtgcctgcgggcaaaataatggcgccggagagatgagaagtgtgatcacgcctgcgggcaaaatacagcgcgcttatggccagagaaataatgaatttagattgaatattcggagagatgttaattttatttgagaagatgattcaacaatttatgatgaaaaatgattcagcaatttatctccaaaagaacggccatgaaaagaaagagaaatgggtacccgcctgcgggcaaaatacagacaatgcgcatagtgcacttaaaaatgagatttatcagaattaaaatgagttaaaatgaaacggtaatttaaatgcactttattatgagactgatcagatttttaatttgagcccaagatgaaaatttatgcactttaaatatgagactgatgaagaaatgtaatttgaatcaataacgtgagattaattatgtgatttatacagtgcatcgaaaaatattaattagagaatatgaaaattcagaaagtgccaaaagtgccagcaaaataatgctcgagaaaatttctagggactaagttaaaatgactgccaattgtgcaagagaaaattcaaaagtcgaatgagaaattatttttactctgatcgcttaaatttcggccaaattaatgatttttgagcctatttgagttatttttttagggtgagtccatgttcggctaattagtgcccatttcaaagctcaaagatcaatccgataattttcattgcaattcgccatttatcagtcggccgtgagaacggaagccgcggcgactttttcatttatcggagattcgatcaattacacttcatgtgaacattagcggacattattgcacattcatttgatagagacgacattaatggaattcttttatggacattttatgtgagaattagcaatttattccggagaagaataagcttaagtccattttttttaatgtgatgcagtgaataataagctgatttggcaatatttggttttattccagcattaaaaaaaataataataacttgcacaaattcaccgatttctgaatgtatgccgacaaccctcggggggtcagcaccaactctgcctgcgggcaaaatacagaatttaattggagcaaccccgcctgcgggcaaaatacagatttanaggtgaaaagtgaggatcaaaatgaagtgataaatcgacccgtgtggcgcataacatgctgagccacatgactcgagtttgaaattattggagaagagtcagtcacgcttttgatgatggggctgaccgatttaaggactatttgtcactgacagggaaaaa

SEQ ID NO: 744 - DNA, 1942 bp, Heterodera glycines
attcgccatttatcagtcggccgtgagaacggaagccgcggcgatttttttcatttatcggagattcgatcaattacacttcatgtgaacattagcggacattattgcacattcatttgatagagacgacattaatggaattcttttatggacattttatgtgagaattagcaatttattccggagaagaataagcttaagtccattttttttatgtgatgcagtgaataataagctgatttggcaatatttggttttatttcagtattaaaaaataataataatttacaaaattcaccgatttctgaatgtatgccgacaaccctcggggggtcagcaccaactctgcctgtgggcaaaatacagatttaaaggtgaaaagtgaggatcaaaatgaagtgatcaaccgacccgtttggcgcataaacatgctgagccacatgaattcgaatttgggattatttggagaagagtcagtccacgcttttgatgattgggctgaccgatttaaggactatttgtcactgatagggaaaaattggaccgaagaagaaaatgtcactcgccttaaactggcgctcaaggacacgccgagggaactattcaaagaactcaagtctaaccaaatcacgacattcaccagcgctttggaagcactgagggccaaattagactcgcctcaaagacgagaagtggcgaagcggaccctttcagtttgccggcaacgtgaggacgaaactgttgcccaatttttgagacgtcttacgccattgattgactcaacaaatccttcttcaacgggtgatttgcgcaaagaaaaaatttgtgaggaatttttggaccggttaaagcctaacattagttttttgattcgtttggtcgggcttacgcaacccaaaaatttggaaacaatctgacaaaatgagtacaaagtgaaaggtgtttcaaaaatttaattagcgccaatgacagctcaaaaaaaacttttttttattcggtccttaattcggcagtccttcaaaaaaaaagattaggtgtataataaaatttattatttctattactgaattgtcttttggatggcaatgaattgtgataggcccgagggcccaatattgacttggattctatttttttaagccctaaaccgccaaaatatataggtttttggctcaaaaaaaaaatcaaaatttttttttgcactaataatgcaaatccaccttttggagctcaaaaaaggggggaaaagctaaaaatatcacccctaattaataataattaattcatttctttaaccttttccattgtttcccaatgcttcaaattgtccttggcctttggtgtcaattcggtgccccaattcaccatttgccgtcgcaccaattctgctgctatttttgcgtcaattgcctttcgctgggcgttcaaccgttccaattcatttccatcgtcggacagtgcaaaagaggacatagattgtctataatgggaaagaacctatagttcataccaaattatatatatatatattttttttgccaaaaaaaagtttatttttttacaattgttaaaaatggtttattccaaaaaaaatctttaagattgagttaactctaccaaatctcaattgcccttttaccaactaaacatttatttttttcttactttcaaaaaacctttttacaaaaaaaacctgataggaagagttgaagaaccacatgtgcagcgccaatgcagtgccccccccccccgcaaaaccccagcgcgagtccaatatcagcagaaaatgctaattggactgcgcttctcgccaatttattttatttaaacgatctgtcgtccgacggaaaatcattttttgccttttattcatctattattaatttttatcattaaccatttatattttagaaatctttaattaataaatagtacaataata

SEQ ID NO: 745 - DNA, 6906 bp, Heterodera glycines
gtccttcgacccaccacggtttttgagtttgggaactcagataaatattttcccacggttttattacccattccaatgaggacgattgattgagcaatatgtacattacttcatttttttatttattatagaagagagccagtccagtcattcatcatttttgcaaaatattagccgggcaaatggaaaaatcgattgggaaagatttaatcacaacaaaaaccatcatattcatttacatctctaagagaggaaataattattagtttttttaaaatttacattccttcttttttaacgtttaaattgagaattttagcgctttcagttttttaaactttttaatttttttaaatttatattcaagttttgatacaacatttccgggctggtttcggttaaacaatttcagttttaaaaaagcactttttgtcatttttaatccttgcttttgatttgattacattcttgaattcgtttttaggaattgatcaaatttaaattttgtttttagcattgatcaaatttaaattcgttttttaggaattgatcaaatttaaagtgtttcaagggctctttttattttttaaatggacaatttctaccaaaatgcagagcaggtttatttatttattgtctatatttttgcaatttctatattcgctctttttggaaaccaaatttatggcaagatattttgtggtttctatggaatttctgccctagttatgaatataaaaaataaatttgagcaagagattcaaatttaaagcaataaaaattttaagacaaaaattaccaaaaaaaaaaagtattttatatttcccaaaaaaaaggaaatgaaaatattgtagaatttgctcattaaattttttcaacaattttagggggatgatacaaatgagtccgaagaaagcagtctggaactgagtaagtttagcaaattttcgattttttaaagaagataattttaaaatatttaattaagagaataagttggcatttgcggtgccgacacaaaaaaaaattttgtttaatgcataactgaaataaaatgtttttttataaaaaatattacatttaatcaagcacaaccattcatccccaaattgttccaaattgtttgtatgcttttaagcagtaattagttaggttcaaatttagtcaaatgtatggtggaaaacacgaaaacggaggcggatatcgatgccgaagacaatgatggcaattctccatttatgctggctgtcatgaaccagcgcactcaaattgttcgttattttatctcgaaaggggtgcgaattgatcggaccaacaaaaatggtgaggaaaaatgttggatttcgaaacgaacgatattttagaggttttttttaatattttaacgaaaatatcaattgaataaaaatatttatttatttcggtattttaccgatggatccaatcacttgtacgatatctattaggttaaacacttaaatttattttttgctcagttggaattttgaaaaattttattacgaattccaaaatggaatttttgaaaaatatcattagaatttccaaatggaatttttgaaaaattttatgtcgaatttctaaatgtaatttattttgaaaaatacattagaatttccaaatggaattttgaaaaatattattaggaatttttccaaaaagatttttgtaaaaattttattacgaattccaaaatggaatatttgaaaaatttaattatgacattcaaacatttttttaaatttttcatttaatttgggtaattcaaagccattgcaggcatgtgcgcgctgcatttctgtgctggcgctgacgacagatttgagttgtgcaaattgttggtggacaacggggcaaatgccaacaaaaccgatggcattggtcatggcgttacgcccttgcatatcgcatgcggccaaggcgctttaaaaaatggttagaaaatgaaaattggcatgcgcatcctatggattggcattaattagggattactaggctcaatttgttaacggattttcttagaaagaattattaaatattttaataaccacttttgcattttgactaaaatttttacattaaaaattatattatgtataaaaaaaaatcaaatatatttaattcctgcggagggttgaaccaaggaaaacaagtagtaaatcagaaagattagccactaggccatttgcacagttgacagtctttttcttataaaatataacaaatccaacattgttagtatcattcgagagctgtaaatgttctctattaacctacaaaatttaaaaaatatggcccaaaaatttctgaaaacctgtttctgatgtacttttggccataaatttgttcaaaattgaaattttttggaattttgcaggctaatagagcatctgaagggctttcgaaagttcggtttttctaaatccgggtatgggagcggaacccgggaaatcccgttccgatttcggtcccactctatgtactctaaaaaatgaaactatttacttattcagttaaatttttggtggaacaatgcggaggcgacattgaacttgccgattctgatggtgcttcagcgattttttatgcagtggcgaaagagcaattcgatgttgttcaatatttggtctccaaaggagcgcgcattgatcaactcaaccacaaaggtgaggatggattggatatgactgatctggtaaatagtgaatattactagctagggttaagcctgaccccgtcccgaccccggaccccgagattttaggccatttattgcgagttgtaagtagggaccggacttttaggcacgaaaaattgcaaataggcacctaaaataggcacaaaaaatgtgaaaaaaagcacaaaaaattacaaaaagcgccaacaaaggcacaaaaaattggaaaaggcagcaaaaatcaacattttggacaactaaaaatataaattatactgggggtccggcggtgccgataggcgcagcagggaaaatttttttgtaaattgtaagaaatatgataagacaaattgaaaaaatttcaaaaaattttccatttttttcaaaaatactgaaaaaggcatgaaaaaaggcacgaaaatcacgtacccttgcataaggcactaaaattgcataaaggcaccaaaaagtccaagctagaagcttaaatcaagttaaaaactcgtttttcgtgcgtattaattaggccatagcaagttagcaaaaaaaaaaaaggcataagcctcaaaatccgaccctagttataagtagggcccggattcttagttttttaactattttttctgcggctttattttgatgagaaatgcacaaaaaacacatttttaattcggaaattcttcgttttaacgccactattcatcactaggaatcactattttggagcttcgccactaaaaaaaactattttggaagttggccactaaaatagttttttgccactattttggcgtttcgtcactatttttcccactattttggcattttttttggaaaatttcccaaaaattcaataaaaacgaaaaatataccccaagaatcgacctaaaaaaaaatcaaaaaatacacccctaagaatcgacctaaaatttttcaaaaatacacctctaagaattggaaaattttttcaaaatttcttccccaaattttttttcttgctcaatatttgctaagaaaatattggaaaggaaatgttcctcatttgtgactgcaaacagtgaataaaattgtttgccttaattttaaattattttcaaattaaaaaacagctatttaaaaaattacacccctaaatttggaactttttcgccactattttggcatttttttgtcactatttagttaattatttggggattttttatcactaaaaatccgggccctagttataagcaactaaaaaccaccgctggggatatacgatcttttttcctaaatttttcagtactttcctgttatgcgactacaagccaaaattttaaaaaaacaacaaaagggggcgcaaaaggcggtgaccaccaataaataaaatgggtgatacaatccaggggaagtcttgaagtcaatacacagggttttatatgcattacatgcgcgaattttggtttgtagtcgcataacaggaaactaccaatttttcaaaatttattatatgtacaattgatttattatatacgcacaggtcgttcgccattaattgttgcgtgtttggttggacatttgcaaattggtaatttaatgaaataattattggagcaggattttgtgctttttgaaaagggccgatatgaatttttattttaatttttaattaaaattcaattatttctttttttttaattctggtttttccaaaatttctcatttttaaatttataaacaaacaacaaaacaactttatgaatgccgtaaaatccccaaaactttaaccttacttaaaaatattaattgttttttaagccaaatttcttgtggaaaacggcgcggacatcgaagttgtcgcttctgatgggcttactgcggtgagggccgcaataataaaggacagtgttgaaattctcaaatatttgctcgtcaacggcgcgcgcattgaccgctgacgagtttttaagaacaagaactttattgatgagtttctaaactttgggataaaactgagaatttgtcattttacccatgctcataacttgaaaaattagctggaaacccgccgaaggttttttttacacttcgccttaaattttattccagtttattttatcgaattggtcggaataataggatgaaataattttttagcccatttattaattgatttttgccaaaaaatgactaccttttcttttatttatttatttattcaaaaattaaaaaagttaacaattgataaaaatttcaattacctagttttctttagttttcatttcatgaatgcggttgaattctttcattttctttgagttatgggcctgaattatctattattagaacaatttatttattttttaaatttatgctttcgttttattatcataaaataaattaatcatctcttttttagcccacttcttgtgtttttaagttttttaaaaatttttcacatttttttttcattgaacgtattcctaattaggtaaatcaaatattttttagggttttttgtatttattttaaaaattctacatgcataatttttgatctcaaatgctctcgcgatttattgatttagagaagagcgaagagcgcgaaattgtcaaaaatttcttgttcattagtttttaatcattttgttcttttctaaattttcttttggttaatcctttttcccaatttttttttgaagcattaatcccgactgcaggattgtaactcattttttgcgggacggaatcccgtgggattagtcccgcaaaatcccgcgccggtccctacccatatacttctgcatttggttcattctcaacagttttaggaattttctcgcattctcgacaaaaatggtcgaatatttatatttaaatataatatattttttaatcacacagtcaaagctcgctttgttaatatttatctgagctcccaaacccaaaaacacacaaaaccacttacctataggttttcttatgcgctgaaaacgatagaacaatccaaaaaatttaacgcgcttcaactttaaaccggtttttgaacgggtttaaaactcgaaaaattgaggataaaggtggggcctcctgaccttttaaaagggtcaaaccctgacaaatttttgtgaaattttattgttcgatcgttttcagcgcataagaaaatctataagtggttttgtgtgtttttgaggatgctaggtcgaaggactaaaagtgcaaaatttgctaaaattttgaataaatccactaataacttttctcagacgcaacctccttcgccagatttgcactttctgctcgttcacacccacccacgaccatcagacaagaagaatacaagtgattttgcgccccgacgttccaccatggcacacgagtgctacggctttggcaatgtgcgagcaattaagcacgcacatcgggccagatgctggggcatttgtgctgcaccgcaagcggcgcataagtagtgcctcccgacaccggggagcaagaatattgctatcttgcctaggcgggattctgacttagaggcgttcagtcataatccctcagatggtagcttcgcaccattggtctatcgaccaagcacatgaaccaaatgtctgaacctgcggttcctctcgtactaagcaggattactatcatagcaacaggtctttagtagggtaaaactaacctgtctcacgacggtctaaacccagctcacgttccctattggtgggtgaacaatccaacgcttggcgaattctgcttcgcaatgataggaagagccgacatcgaaggatcaaaaagcgacgtcgctatggacgcttggccgccacaagccagttatccctgtggtaacttttctgacacctcttgctggaaactttacacattcaaaaggatcgataagccacgctttcgcggtccgtattcgtactgaaaatcaggatcaagtaagcatttgcctttttgctctacgagaggtttccgtcctctctgagctcgccttaggacacctgcgttacgctttgacagatgtaccgccccagtcaaactccccgcctgacactgtcatcggcgcggggtcgccgggccaccgggtggcccgacttaacaccaaaatggacaccctttcgggcgcactcccgttttaccgattaagtaaggaatcgatgaaagtagtggtatttcactggcgccttgcggctcccacttatgctacacctctcatgattc

SEQ ID NO: 746 - DNA, 1075 bp, Heterodera glycines
taataatgcaatagtcatcttttttaatggaaccaaaacggccgcgccaattccttcgactcatcctttttaaaaatttattgtcataaacaaaataagtatcttacagagacaatttatttaatctttttgaaagtatcttaaaaaatatttttgtgcaaacaatgcgtgtaacaattattgctggtgaaaatgttgcttcattggagatttcggcagacatggaactggaaaacttcttggccttgtgcaagttcgaactcccctccattgccgacacaccaatcgaaagaatcgcgctcaactgcagcggtcggcaattcatcgccaatgctggactagcaaagaaacagcttaaggttggctgtctgtttattgttgaacaatgggtgattacaaatgcttttaaaaccaaaatcttgtctctcatctcacaactggccaattttaatgcattttttataatttactattgtccatagactcaaatttacagctttaaggatttcccccaattatcgtttttcaggagttgaacattcaacatgaagacgcgattcatttcgaaacgatcaggttctttgattgtcaaccctgtttccttttgacattttaatacggcactccaccgaaacttctttggtatttgaaaatgtcaaataaaaagaggggggggggtatcatcagaaaatgttaatggaccatcacccaaattgctttccgttgctgacctcactctgttgttcatttgatgcatttgctcttttcgttcagtgcttcttccaccgcccaaaccccccactcgtccctttccacgccgtcctcagccgcttcgtcctccctcggcgctccgctgcaaacttccaatttgatctcttccctcgtccaaaacatcaaagtgccccagaagcaaaagagcgtggcggaagaccgcgccatgtccgaccaaatcttcaccatgctccaacacccggcacggctcgacttcctccgggtggaccaccccgagttggccgctgcttatgagaaaaaccaacggacagaggttcttgtccatcgcatcagtttgtcttga

SEQ ID NO: 747 - DNA, 5167 bp, Heterodera glycines
  unsure (1)..(5167): unsure at all n locations
tcccggcctttcaattccgggctctactgttgacatcatcatgaattttacgtaaaattgacaattgggcgatttttatttatcagtgccacctcccaatttgaaatgcaatattgtgtatttttatacaaaataaaaaaagggatttattcattttatgaaagaactatgcttgcattgataaaatattagcaaaaggcatttaggaaaaagccaagttaaaagttgttggaaagatagaaaagtgaaaaccttactcattttgtcatccttttcctcttctctcttccctctctcattgcctctaattcctcctctcttccctctctctctccatcccttccgtctcattgtcccacttccaaccccgtcagttcaatgtctccttcaacgcgcacaaatttgtagtcggtgttcggcgactccacacggtgtgcaaatgcgcagtaatggtggccgttgatgaaaatctgcagggagtacggctcgttgaacacggcgatgtccgccgcctgttccttcttcagtgggaaggcgccctcgcgctcttcctcgccccacacgccgtctttttgggagccgcggacaatctgttgagactgtaaagcatttcctttccatttgcccacacctttttctcgctaaaacgcggattcaaatggaaaagtgtgtccccgttggcaccgatcaaattgatgctgaaattgcccttcggaatgccatagacaaaaagacgttggcctgaaaaaacggacccactcaaacatggaaaggaacatttgtgctgttgcaattgctaaacgtgccgcttttgagagaagtgccgtggaaattcgcttggaatggaagttcgaagtagcgaccgccccagtgaacgccactcaatgtgacgtcgccacggaccttaaaaattgaagtgcctcgggcgggggaatgaatggccatttgtcaatgttttaaaaagggcacaacgccaacaaacagcaaaaaaaaagacatttctcaattacctgaatgtggtcaacgttggtgtaaaggattcttaaacattttcttcacaactgttccctccccaaaattgccactgaccgatgtttgaattcggtgatttgtttttgattggcgaatatttcgattcgatcttcgtggacctaatgacgggaaaatgggcgggaaatcggttgcaaggggaaaacaaaatgaattacgcggaatcgcaggtcgaagggctgtcccttggtgaaagggttcgagtggcgctcttccttcccccattctccggcctaaaatttcaaaacatgcaatcgaaagcattcattcccccaataaatgtatcgacaaaaacggagagcaagcagtacacgtacagcaaatgagttgagcacgactttgccttcgtcaaatcggacgctgaagtgcagcggcgcggagcccatgtgggcatcaatttcgacgcaattgctcaacaaattgacctcgaaacggtgcgcatccgcgttcacattgccatgaatgttcagtgtttgaccgggcgaaatttcggacatcaaccgagaagtgtaggggacgaggatggaccggtcctgggaagggggggggacaaaatggaggaaaagactcaaatggggggaattatcattttcagtttacgcaccatttttgttggagtttagaccaagaaataattgtaattttagaataatttaaggggtgtttctgaaaggataaattttggaaataaattttattttttatttatttttggcttggggcagaatgatgtgtaattggcagaataaacgagcagagagcagcaaacagcggtggttaaaagggaaaatatgaaaacaaacaaacggacaaacaaacaaaacgagagaatgaaattttgcgggacgacgggggaaagtaaaggaattattgcatttatacatagtggttgagaaatactttcagctcggcgtatataaccacacaaatatctaatgaaagaagttttatctttgtttttctgtttgcaatatatgtacctaattaacaatgagtcaccgctttttgtttttgttgccacataaaaaacgatcaaaaatttatttgagaataataaaaaaggacaaaacgcaaaatgggacatattttgagcgctaatcaaaaacacaaaattagataccaaatttattcagtttagttgggaatgaagcgagttatgtctgatcaaaataaaaaatacaaaaaaggtatttaccagtgtaaattttgaattagcgcgcaaaaattacgccaattacgcttttggcgttatgtgcaattttgtctaacattgggcttgacccatagtgagatagttgtctttggtaaaaacctatgtaaataaatgaaattttttggcagtaatagtctttttgagagatttcaaaagagaggcacgcccataaaaaatatacctgatcaaatatgtgttaatataacacaaattgttcttccgtttccgaaataattctgtttagctgttaataaaagcatagaaaatgccggaacgtttgacttatcgtagaaggctttgctacaacacaaagtccaataaaacgaaagtggtgaagacgcccgggggacggaatgtgttccactaccgcaataagcttggttcaatcccaaaatgtggcgacaccggtgtgccgttgaagggggtgagcaacgcaatgtcattaatgaaatgattggttaacgggaaaggcgaggtttaatttctgtttttggttgtttaaactgggctggacatacttttgcatgagagataaatctcccgtgggatatgccgacttatctcttcccttcagattaaagccgcgcgtccgcgtcaattggccaaaatgacaaagcgaaagaagacggtcacgcgcgcttacggcggttgtctcagcgctgcggctgtccgtcaacggatcatccgcgcctttttggttcgtacttatcactggactcaaagaattgttttgtgttgagattgtcaatattttacaaattaagaatatgaactccctaaattggtcgtttattttcatggttaaggtggaggaacaacagctggccaacaaaatactgaaggcgaaaagtggcggtgggaagaaataatgcggaagacggacggacagttcggtcattttaaggacggaattatttttgttgcttttttgttacctttgtgagtaaaagcattgctctgttcacaattcttcaaattacataaagggaggctaactttgaacatttttttaggggaagagtattaagaaaaaatcagcgcttaagcttattgggtatatgttctttattgagctggatccatggcctggattttctggctttttcgggatgtcgaattctgctgttcttgtcatatatttgctagacatctatctttatcaaaaaacaacaataacaaaatgatttcttcactcgagatttgttaactgaaatgcaatgtgaaagggaatgccctctttgaatttggcgtgagaactcccgcagatcagtccattctcaacacaaattgcgccattctcattcaattgtagtgtaaattttggtgtttttccgtaaatccattcgtcgctgcgcaaactgctaaaaattgcatcgagacctaaactgaatgaaaagatgagaacaaatttgtttgacatttaaattgccttcaaatttgtccatttcgccgttccaccgaaccaattcgctgcttttgtactgcaaaacgaacgctttgagaacagaatcggccaccttttgtagaggcattcatcattttgtgaactgataaaatattttaaagtgccataagactcgaaactccaaattgatcttcttacgaaaataaaattatttcgtgccgtaccgtttcggcatttccttctacattttgttttaaatgtcgtgccaaacagtcgacggattttgcgcggacacttcggctcgcattggtttgaatccgctgatcatcaaagggcgacttgagtgcgcgtcggacagtgccaatgtcaacatccaccagcaaagtgaagtgatggtatgcgcgtccgcgtgcaattcgtgcggctgtgcccgacactttggcaccgcttggctcaattagcaaatcgtcgcgttcgtttgcgatcagtcgcggagcggtggcagaagcacaaccgccgaacaatttggcattcagaaaatcggccacaatttgcaaattctttttgcgcgaatgccgttcatgtgtggtcataagactaatgttcaggttacctcaaagaaagagaatttttaaggttgggatttatttataaaaaagatggattgggcatttcttggcaaaatactccgttcttcctcgaaaataccttcgtcgtgataaacagcgcctccgccgctgtaccgtctcgaaattcgaatgccattggccgcacagaaacggacatcgctttccaaccacggattttgatacctgccgatgacaaccgctggagaattccttgaaaaataattattggcaaaattttgctgatttttgggataaaatcagtagattaaaacatataatatattttttggactgacctccaaatgagaagagaatcaccgtcctccttcacgccattgttccgaaaaagccattcctcaagggcgagattctcgtaaatacaacgtgacgacgaaatgaaaactgtgagtaaattgggaatttggtggatttttgttggaagtgccattcgcagaaaagaaaccgtttgtaaaattttcaaaaagaaatttttaatttttaaaattgacgttttgttttaaatttttgcaattaaatttaaatgcttaatttctttttaattttttggaaaaaaagaacagtttatacgtaaattgcttatttgttttattgcctcagatgcccaaaaaacatacgcaatcgaataaaacgaggaaaaggtcgggaagagaccttgacgagatccatgctgatctgatcaggcccgacaaaatgcaaagaattcaggtccttttcatcagtcattggggtgttttggcaatttccaattaatgtctaattttaggggngatggggacgttttgttttattnaatggngttctaaatggactttnctcccatnnttttaggaacggcctnntttgacgacg

SEQ ID NO: 748 - DNA, 2789 bp, Heterodera glycines
tttaggtcacaagcgtcgcctgcgcgccctcggagaaaaaccgtacacgcaaagagaggcggaattggccggcggattgggcgtggaagagcaaatcaaattggaaagcctggcggatttgacattttagcacccatttcttatagggtgaatttatgtttttttttgttgttgtttttgagttctttatcatacaaacagaaaataataaataacattttcgcaaaacaaaatatcaaacaatttcgatggatttcaattaacaacaaattgaaaaggttaaaccaaatgtgcattggtcatcaacaaaatcattaatactcaccaattattatcctaattctgaggggaatggaaatacctgagaatgagagatgcaactactgtttaagaatgctataaaatagcaaaaggaatgaaatgcacagtccattctatttcaaaacattgttttttgtgctaattaattactcttatgttgaatttaaaaccaaaattccctaacacaacgaaaattgactgattgtgagctgtgtcaattattacttttagcctgtctattagaagcttaaaatgtgctggagaaaattgcgttaacggacattgtaataaatttaatgaggacagcagtaaaaaacagaattgagatggcgaaggaaaacaaacaaaaggagcgaaaaacgaaagcacaaaaaataatgatggaagaacattatgaagaagcagtttggaaattaaagcttattcttctgatacgaaagattgtgtgcttccgctctgtcagctgttccttccgtgctgaggctgaccgatcgactcgcccgactttcgtttgagcaatgcttggcgaatgtattcggggaaaaggtcgtcacggcggaagatcatttcggaagtgaccttgggaagaaaaggaatttaagtcaccattccaatttccatttttgatgatgcatttgttaatcacctcaacttcgtcgtctctccgtttattttttggcgtttcgcccccatcctccgccgcctcttctgcccttctccgttccttcatttcgaagctcaacggtgggtacagcttgaccttgtactttttgcgcgggctttgtccccggtaataggcttggtacgtttttccgtcctcctcccaattgacatacaccttgatgaaatgagaggctaaggtattagccaaaatgcgcccagttaccagtgagccgggaatgtgtgcgcctccgttgcagccgaacattttgcactcgcagtcgacgatgtcacttgggaacacctcggaagaggaagtgccgtccaagaaatccacggtggcgtacagatgttccgagatggagtatatcagcccgtatccgatcagtcgctcgtctttcttctcctcctcttcctcgtcgtcgtcgcccgtctcttcgttcaggtccacgaccacgcgctgtttgagttcaaacacgcgcgagtctgttggatctgacaaaaaacgagggttgataaaacagctgtagcaaaatgccaatttttttcatttcctttgtttgcgtcatttctctgtgcattttgcaaaatgcacaaatgggtttcagacgcaacggtcattttggcacacacacaaaaggaccaaatggcacaattagcaatttcggtccaaacccgagtgtgcgagaagcgattgggagggaaagcaaaattgaatgggctatattaccaaaagcaccggcgaattgagcactgtggtgaaagacacaaatgggcaacgccccggggaattcgcggcgctcgaaaatgacatcggccagcggtgcgcaagtaacgtggaaacgcaatttagcaccgagttccttctcttcaacgcaaatggcacatcgaaccaaatgttccgactggtggccacaaaccttaaaaatgaatcgaattctccggcctgtttcggttttttgcattgataaaggaagttcaattgctcagaaattattacttcgcattggtacgaagtcggacgttcctcgccattatttctgacatttgggacctccggcgttgtacagtgttcgtctgctgcgggtacagtggcacggtcatactgtaggggaacacaattgttgttgttgcagcttctcacatgcggtagtgatgcggaataagaacagaagggagtgtggggaggaaggacggcgggcgacaatttggcggaggacaatttgaggaccaaagaaaggctgttgttgggctgcaaattggcgccattcagcagaagagggcaattgtagggaacagaagcagcagcggcactgtctgggtctgtctttttgggcgtaatggcattggcacattcgctggtcgaaaggctaaacggagggagaaatgaaaaaaagaaaacaattatatgaaagaattcttccatttcttaaataaattttgataaaatgaaaaaaaatctagcttatataagcaaatatatcaaaaaagcgaacgtgtcagcaagtcccgagtcaatttgtctgctgtcatcaaattcaaaatattttgtggaattttccggtggaacatcgacagattgcggcgataagtctggaggcgttgaaggcggacaatcggaggacgcaccgcgaaagccattgtaagcgatgtttgtcagtttggaaatcggcagaaatcttaaaatttgaatggcttttgtcgggaccctggatacttggatagagaattgccagccaattggctttttgaatggggtattgttggcatacagcgttgaaggccggtctttgactctagagatcccc

SEQ ID NO: 749 - DNA, 1329 bp, Heterodera glycines
  unsure (1)..(1329): unsure at all n locations
ataggtgggcactgctgctgttgctgctgattctgctggtgttgtggcgttttgctttcaccacggggggtcgtcatgttggcgtcgaacgaagcgcgtgtttgggtccatcagtgcgcaaatgacgtgcacaaagccaagggttttgagtgacactgtgcattttgcgcatcaaagcgccactccgaagttcacacaatgcgcacgaggcggtgcgaatcagcacgtcgttggggtcgtcgcaacgttcgcacagccattcggcggacgacgacgacgacgaagttgagggggaagagtgatctgacgaggcgaaaacgatggcattgagcaatgggaagactctcattcggacaatcccttccctacccacactgacagtctttctgttcctgcttaagggtgcattggctcggataacacccaacgtggaccaccactttgcaattcgaacattccctcagttggtcgtccctcagtttcgaacgacccaagtccaacgtgtccatccgaaaatccttctcgaacatttggtcggatacaaatcgctttgacctgaacacgaaagaaaattctttttgttggattttaaagatttgattgattaaagggcactgacttttccggcactttctccaccggtgtgcccttcatccaaacggaacgttgcaaaaagaattgacagacggcacagtgcgggtacagtcgtccgctgcgcgagttgtgcaccttccgagcatttgatttataaattaaattttactatccaacaacataataaatatgtttgaaaatttagtgattgttcactttttgcaatgcgtggtgaaaatgcaccttttccgcgtacaaatccaccggtttgttggcccaaagtgcgtccatcagtttgcgtgccttgaaaatggctttctgtcgctttgtgcacggcactggcaaactgtcgtcgctgttattcgtctccacactgcccgacttggacgcgggttgggaggaggtcgaacctctgcgaacggacatggcacgagtttttgggcctggaaatagtaaagaatggaaaggaaagtccgaattaaaacacaccccatccctcccatttaaaatgaaacaaatttgcaatcacttcttaaaaagctcgacttaactttgcccgcactgtacggagtgggcgcttccccgtaccaatagtcgagccttaacgggaaacaaaaatcaaacaaatggtaagaaacattctttcagatagaggctgncccctctttgtattcgtttggtcgatatctctcatatggatgggcgccatgtcaatctccacacaatcgttcgaca

SEQ ID NO: 750 - DNA, 2567 bp, Heterodera glycines
  unsure (1)..(2567): unsure at all n locations
ctccacacanatcgtttcgacaatagcacagcaccgcatttttgcctgcatttttgaaaagtgaaaattaggggtctttctgattaccgtaatcgatccaccgttcgagcgcaaagtttgtcgattctgcgcaattgtaacccaaattgaagcccatgtgataacctcgaggaaatgctggagaaataaaataattagaaatcagaatcaaaacaatcaaatcgacgccagttctattcgaatgatccatctcccgaccccatcctccgtttgtctccacgtttgattttgccgttttcttcaaccattccatttttctgccctcccattctgctcgcttactgatcataaattctccggggtattgcaccattgagccgaacggaacgccattcgtgcgcagcactgacggtgagacgatgtacactttgtggcggagaaatgccttgcaaatttggagaccgtccggaaatcgttgagccgccaatcgttcaaattttgccgccgcggacggaggaatggcataccaaaatttgggcttaaataaggaaaaattgaagagaatttcatggacactcccatcaaaatttattgaaaatgaacttcattgagtttttttaacctcgccaaaatggaggtaattgatggagtacagatccatgtcctcgacatgccacgggaacatcgttttccacatgccaaaatagagaaaaaccgtgttcacccctttgatctcgagctgaatgaaatgtcaaattaaaactttgttcttccatgtttggccaacctcttgctctttgagcaggtccaaaatggtgcccaacccgttcatgttgaactgagagacacccgggtcgtagatggagcccggcgtgtccgccccgtagatgggctcgtggtggagcaaattgcgccaaaaatgtcttaatccaatgattagtttgatgcataaagactaactaacattttggattaaaatatataattctataggttttaaaaattatatttttaaagattatgttttttaagaaaaaactgagggaataattgagttttgtaaagaaattgaaattacttgctgttaactatcttaatcgataaatatctctctgctttttgttgtcccaaccgaacaaatcgcataaagtaagtcgggttaattactcaataaaacaaaaaatgaaatgccacttgataaaactgatcaatttgcctgttttagtacctttccaattcggtgaggtcgtaattcggttttggaggacgaaattgcttggagagtgccatccgccggaaatcgccgacgcgcatttccttccggtaaacggtgttgttcttgacatagcatcccgtgctcgagccgccctcaatccgttctttcctgaaaggcttttattcgaaacgttttttagcctaagcaaagttgcgaaaattattaaatacgagaaaaacaaaaaaaattatgatttttcaattgatcagcagaaggggaaattctttttgagacagcggcgacacaattcggtaagcaacagaactcgccgccctcccgtcgtccgtccgttctgcggtcgtttcccccttcccctgccccccccccctttcgtcgtcttcccttacggcgccattgcgtcggtctgtctcttttcccttcccttctctcctcacttcgctttgtctttcctttgctcgccatttttaatgaaaaaattattttacttaaaccaaaaataactgcaatcactcaataacttttcaactgttgttatagtattattatgacagttgattaaaaatccaagtttcagatgactattattttttgcagaatgtgcagtgctcacactgggcaatgaatgacgaagtcgttcagatcggagtaatcggacggatttttggacggacgcgggtgccaaccgggcggaggaatgacctgtgaaagaaacaagttttgtggcaatatgtaacattgaaaaaataattagcaaaaaaatgacaattaaaaagtaaaatatccgacgaaatgtccgaccttacaaacgccagaagataaatgcgctctgctgcgctcgatagtttcgatgtatttgctgaaattcgaaaactcctccatcgtcggtcgaaaaaccattatctctccgtccgctgtgcccgtgttgacccattctttttccttggtgtaaatgggtctataagctgccattcgaactgtgaaaagattaaaaaagaactggtttaagctaaatgtaccaaaaaggcatttaggtaattaaacaaaagaaagtaacataaaaaacaataaattaatcgatcgcaccgaccgatcgaattcattgctctaaccgaataaagtcaatttgttatataaaaagtaaaaccccaaagtttctgaatgaaagtgcattccaccagcatgattcaccgctgtttcgcttgtcgcgtcactttcccgccgctttttactgcctatgcatttgcatttgtattcgctccctctctcccctttctaattctctccctcatatttaatgggttgctccctccaactnttttctcagctccgt

SEQ ID NO: 751 - DNA, 2969 bp, Heterodera glycines
gtctcaattcatgtgctttgtcgtggaatgtctctttccgacataaaaaaacacattaatgaaaagtgaatattttttgttagtgaaagtccaaagttaaattttggagagaacttttgagaccataaatgcttaaacccatgctcacagtcaaagtgccacacatttgaatacctaattcatttacagtaagcatagttaaaatttgcttgacgacaaaaaaatcgatacacagagaaatttaaatttaaattttatctggacgaaattatgtaaaggcaaaaatgatgtgcgcttcccctaaatctactcctctttgcatttcctttcgccatttcaccgacgacgacatgccctgaagcaataattaatcaccgggctgacccgcattcaaatttaaactacaaaaaatttaaaaaatgtaattggaaggagaaaaaaggaaaagaatagcggtaggggtcaactccgtctggccaactccgtctcagcaatgttcaaaaagctataacttttttctttgttggccaaacttcacaatcatggtatcattcgaaagccctagatgtttagaagatatttataagctatttctcagtgattaatcagctctcaaaaaagttgtcagtttaaaaccgcaaaaaaggcagaattttcaaagttttttatttctatctttttttatagttcgaaattttctgtaatttttagtaggctaatagagcctgtgaagagctttcgaatgatatcaagattgtttgattcggtcaataacttcaagagttatattgactcaaagttggctcagacggagttggccagacggagttggcccgttccgaaagaatagggaggaagaggacgacaagccattcattctttgcttacaaattagtcgaggtttaatttggaatttaatttgtcccagtggtctgcgttggtcttctgaccggtctgcttcttttataaaaataaaagatttgaactgtgatttaacctggacttagcgccttatttcagccttatttcgggctagattagttatgaaatttttctgtatcaatcaaagctctaatgattgtctaattgaatggagtctgtatggaaaagcaacgtcgaaagctgtgcaaaaatattgagccaataacagaattccgatactgactaaaaaatcttttacataaacttggtcacattctcaacatggtgaatgggacacatcaaaaattacataaaatctggaaatttttgaaaaattctaggagcgggttggaaaatgttagtaggcctatcataaaaagttcaaaatttctttaccgaatttcgttttggagtgagtcggtctacgctttttccccactgagatagagaaggtgtcaaaatcgatcaacacaaaaaatgactcctttctaccgtatattaagaaaaaatgaacggtaattgatcattaaagtaatttatcaccctttgtttctctgccgcttcaaatattaacccttcattccaaacgcactccgtttaagaattttaagctctttttgataggactgcctactcatatttttccagagaaaatccagcccactcctagaatttttaaattttaagaaatttttagtgtgtaccatttacctgaagaagtaatttcagcaaattggtgtaaaagattgatttattttttagtcagtgtcgaaaattctgttattggtccaactttaaccactcaaaacggggtgccgttgtttcgaccaattcgaaaatgttttggcccaatgcttttgcacttgactgtaaaatgaaaaagaagctctttttttatttgcttctcttcattgttaaggcggacataaggcccctccaccggtgaattttccgaattggcaatacgtacaaagcgttcgtttgtttgtcctcgatagtgagtgaatctcggattctgttttgataggccaaccgagcaaagaaggtgaaaatgtgtgatttgcatgctgcacttgtcgctgctccacaataatttggccatttcaatcccaacaatcgctcggcaaattctcgatcgatcggtgccgtgccgcttctcccatccatcgcactgatcagcaccaaatcagcaacaacaccttaggcgtgctgctgctgctctgcttgctgtggtcctcccattcgcttctcccctttaatctcttctccctcttccgttttgctgtcgtcgtttgctgcttcccccccctcccctataaataccgtaccgtcccttccctccggtgcccattttggctgtgtgttgattgccatctctgatgaaccaatggattaagtcttcgggtcttctccccgcttttcacccccattttaagctcatcctcgatagtttcgcattcaaattaataaaataattttgaagcaaatttgttgcaatttctccgtgtttttcatatgaaaagcttaaaagcccacaaagtccggtgcttttgtatgaaaaatgtcggtgaatttagtaccaaaaaagttttttcctttttcctccatttttttgtccttttccccgcggcgcataatttcttctccgatcacaaaaaaaggcgcccgtccgtccgtccgctgcgttttgcccgaggcgaaatgagggcggagtaaaaaaggtcccccccccccttttttttacaaatgcgcatctgttgccccccattaataaagtgcccttcccccgcttttacctcttttgccattttccgaccgtcgcaatttttgccgaccaatgcattcattcgtttgtacagtaattccttcctaccattttcagtttaaatttattttgctactctctctcataataaattcctttgtcaaatttttaatgcaatgatattttcctgtgattttttaccgtatgagcccataaatatcaggggatttccttttttaaatgacaaatttattccccgttaaaatggcgcggccaaatttgg

SEQ ID NO: 752 - DNA, 3986 bp, Heterodera glycines
gtgcacaactttctggtggactatcagtggggaaaaacgtaaattgtagatctgcacctgttagacgcaatgtgtaattaccatttattcgatcgctaaaattgaaccggtgtaaacaaaaattacgctcattcaaaagctcagggtcgtgaaatatcaaaccttttttccaagttttgggttacccaaaatcacgcaggtgagaggaaaaataaaagttcgtgtgatatttttgaaattccaaggtgaaatctgatttctatgtttgacatcttcaaatctgctgttctctctcgatttgaagtagaatttggtctggaggatgattatgcattcgagttccgaaaaactcaccattactctcaaaaccccaacctttgcatccttgttggtaaagttcacacttccaccaagttttattttttgtcattttgtgtttgtgataacaatacccgtcacaaaactttccttttgcagagttaacagtgattaattttgccatttttaaatgtaaatctcttaaattcttttattatatttttacatattcgaacatttctttgcctttttaccactttaaaatagcttctatctcaactactgttctgttttgcctttcatcacttaacacgaaaatcagcgtcgttcgttgtattttctgttcttgaaatatttgacttttccatttttagtttcacctcttttcatcacttctctagaatttcatcaatgttcttagacttttcacatcttttcaccacttaaaattgaaaatcacctgttgccaattgtttttcacctcttttcaccacttaccacaggacatttcacctgtcgcatattgttttttcacctcttttcaccacttaccacaggacattcacatgttgcatattgttttttcacctcttttcaccacttaccacaggacattcacatgtcgcatattggtttttcacctgttttcacctatttccaaatgtttttcacctcttttcaccacttaccacaggacattcacatgtcgcatattggtttttcacctgttttcacctatttccaaatgttttttcacctcttttcaccacttaccacaggacatttcacctgtcgcatattgtttttttcacctcttttcaccacttaccacaggacattcacctgtcgcatattgtttttcacctcttttcaccacttaccactaaccatttcgcttgtcgcctactgcgtttcaccaactttcactatttatcagtgaacatttttgcttttaccttttcacttttcaccatatacatttgcttttcacgacttatcacagagttttacctattcatttgcctgtttgaccacatactaacacataattcatctatcccccttgtatcatcattccttttcattctcatttcaccggttttcgttgcatattcatctcttttcactatgaaacaatagcattagacttttccttatagtttcacaactctcttcccttttcgggtaaacatttaaccagtttcccattgactttcccctctcttcaccttgtatttagaattgctttttcttttgcttttcatactatttcctctgccttttcaagcagccattgtccatgtattttacatcgtatgcaaattttgtcaaaagctgaaaatgcttttgataagaagtgattgattaacaataatcataaatatttgaaatattagccttgtcatctataatcttacataaatcggaggaagttttattttagtatgaacggcatttgtgtccctttctgaatttatttctattcttttcccattaagttggactttgggttttaaaatttttgataaattcttttctactcgaggattatcttttttattaaatgtttcattggatttttctttttggactttgggctttaaaatttttgaaaaattcttttctactcgaggattatcttttttattaaatgtttcactagatttttctttatttttcggaggtcttcctctaggctttctttctttattcattttacaaaattgttgtgctttaaagatatttagttttgcaattaatttttatttatacattattaacataataaaatgttattcatctgtctgttattgtaacaataaactttcagaaattgataaaaatttagtgaaatgcaatgcaataatattcaaaaggagaaaaaatttaaatccctttcacggttcataactagaaaattggatgaaacaaatttgcaaaattacgaaaaataattaaagtcatgtaaatactaattaccccttaataaacagtcggtcgaaagaaagatatattttattttttttcatctatattaaaaatccctaattctattggaaaatttgaaacctttaaaaatatttgatcctagattttttgataactttttgatcgaaaataatttttagggagctataaaagtgttatttgaaatgaatggaattttcattcttttttcaaatattcctaaaatatatcattgtagattggaatcccacaaaagcctgctcagaattacattcggtgcctgatattatttttaaatttaatcttgttaaaatttcgctggcggctgttggcaaaataggcgcttcgaatctgcacaggtgttcatttaattttctgtcatagctctgccaatctatgaatggagtgagcaaggtttaatgaggaaaacgagatactcaagccttttaatccatgaaaatgtataatcttattaggtgtaatctaataaatcattacattaaaatgaatttttggacaaaatttgcgattttaaagctttttgtttttactaaaatattaattggggttttaacatgagtaatcaatatcttaatatcgtcccgatctttttcaatgccttaagcttggagattttaaaaggtctaagttgggaagtgttttcaattatctagacatattcaaaagctgtataccatcttatgtcacaaaaaaaagcattttcaagggaagaaaattaatattataatttaaacattcaaaaatgtagaacggttaaaatatatattcaaaagaaaaggttcgggaactcaaaaggattgccttttcatattaaattatttattgaaatatttcaaatttttaaatgcaaaaacaataataaattacgttaaagagttaaaagggaatcttttaccagagcattatttgtatataaattagctcagcgggaaaactttagatgaaaatcccctaccattgagtttgggattcaattaaatttgaaatagaaagaagaacaacgagaattacgtggcaaagacataagagtaattatttttaacttccctaaatccaaaatctaaaaataatgatgaataacagaaaaaaacaatttatggggaagaggtgaagggagcaaaaaaaattatcaagaaaaattattttttaaattgctacgaatgactttaaacaacatacattcagaattttcaattttattattttttttaatgggatttgaattatctttgggtcattgagctgactgatgataattaattaattttgcttaaattttcaaaattttgggcagcctatattttgaactcgttttttatgtgggacaaaattttttcaaaaattgaaaaagtatagaaaattggaaaatccaaaaatattttaaagaaaccctatgggatggaaaattaattataaataagttttgttctcagctttatcctgcagagtttgatgagcttctgatcatttttcggataattatttggatttaatttatctttaaattagtaattaaaaattcagaattacgggagccagagcatcatagaaatagtgcaacaacagttattaaatggaataaacaatttggaatgattaaatttataaccaagaccaataggcatgggtttttgcttaaaggtaatagtcgggtgtctctttacattttaatcgttttc

SEQ ID NO: 753 - DNA, 3857 bp, Heterodera glycines
ctttccttttccgcccgctcacctgatggtccacgcccgaggcggtcgcaagcagtcccccgctgtttgccagctgaacggaggtccgtcgtaacgaatctgtcgcccggacatatccgataaagtgccacctaaaagtggcaaaaaactgtttgttgtaaaaaaacaacaatttctaaaaagtgtaccggcagccattagcaatgcctcgggcgcggcaatgtcccattttttggtgtcccccgcggcgtaaacaaaagcagtggccccctccaaacagcgcaacactttaaagcccgcgcctcctgcgcgttccacttcgctgatcagctttttctcctccaacgcgtccaatgccttttgcacctaaggcggaagaaggaaaaaataccaattatattcaattaaaataaaattgaaagaacaaaaagctgttcgaccaattcggagcggctacggaaggtaatgacagcgacccgcggcggcatttgttcattagctaaaaaaagggggggtgagaatattcggcagctcccggaaaatgcgtcaattccgaattcctgacacaaataaaaagtcgaaatacaaatttaaattttacccatttttggttctaaaatgcgtaaataatctcttattgcaggattggtgcctttcagttttgtttccgtgtttttcaaccgattttgaacaaaaaacgggtaaaattgaaacttggactttcgacttttagttcgaattcggttccgggattcggaatttcaacgaagttcttacagaattttactttgtttacactacttaatgctacagaacttttttaaaaattgtactgatgcattttccggtcacatactcggcacaaccagacaaataaatgctgctttacccttcgggaaattcatattttgttgcgccgttttcttaaggccaaaagtgccaactccgacaattgaccaaacggttcgactttgttccccattataaaacggctgatgcacaatgccggccaccggtcggcctttgtaagtgatgccaatgagcacagtgacatgacgaaggagcgcttgaaatttatttatttttgccatttgtgacctaatttatctgaccccgattatcttttgactttgtaaaatcggaagtgccgtccaacgggtcgacccaaacaacaagctaacacggggacaacaaattatatgcgaaaagcaacgggcaaattaaagccttgcatcttgcaattaaaaaattaaaacaacaaaaggacattgggaaaagaaaaattattcaattggcaaattaattattaaacattaaaaaagccggacggacgtcttttaagaagatgtgaaaatgatgtgaaggcggcaaagcttcaagcggttcaaagggcgtcgatgggagctcaatttcctgcaaaaagggcaattagccgaaaagggatcaaaggcggcattcattcacttcctcgccaacaatcgtaagatttttgccgaatttctcgcgcagtgaccgttcaatgcacaattgagcagatctaaacgtcaatttatccacaaaaaaatggaacaataattaggaggattccttttattgaaagccgaaaaatgcgactaatgaatatggcgttttgcccagaaaactttcgtatttttagggaatttgcgggtgtaattcgcttaatccgcccttccttttgataaaatgccaaaatgtccaaccgatcggcctcggtttgtaaatcctccattagtcccgtttggtccttgttcacaatttgcaggtcaccactgttccttatgtcctaaattggtctgtttttaattgagggcttcgcaggtgattagtgccttaataattccgaccaccgcttcggacagtcgcaccgacgaggcgaccaaccgcgtgagcacacacgcctctttaatatgaaaattattgtatgcaaattaaaaatgcccgatgctgtgagctaggctgctaaccatgggggggggggcatgagggcagttgacccatcgcaccgaaatccgaaaaatgggtaatttttttaaattttacctcaattttcttaataattttgaacaaaaattttctaaaatttaactgaactgccgggtcacaaattttaccgtaatttttccaaaattttaacttaaaatggctaagattttcccttatttttttacggcaccgaaaatttaggtcaattaaactgacaaaagaatttttgacttgaagggcaaaaaaaaaccttcgcttatccctcatccgaatttttttttctgattaccgggcctattgtttagcaattaaaatgaaaaggaaaatcaatgtttactaaaatccattgttaattcataaagtaatggcatatatctttgtatgcctgactatatgcactttggcatgcccatttttggcagagtgtcaatacatcgctgacatgccaaaaagggataatttgcgttatcaaatgcgaagaaatagcacatggaagacggttaaacaaaatttcagatagcacaatccaatgaaaaaagaatgggcagagaaacgaacacaattggcgatgcgttggcatattgcgcagggccagccaaatttacgaaattcactgcccctcccaccccaatgatttggcatgtgtctaatatcaattgataactaactcatcaataattcacgttaaaaatcagatttctgttaacatcaatctgtgtggtaaaatattgattgaacttattaggacaacaatataatggcattccaacaactgtttaagcatatgaaaaaaagaagaaaaaaacttgagttgcagggctgggaattttgggcaaaaccgagaccgagacttgtcgagatttatttccgacgaaaatattaaaaaattaagttttttttatttcataaaagtcaatgaatcggatattattagaaattcataattttaaatctatgaaggtggggatgcagttcctttcggcaccgccctaaacatttttgagcatccttaaattgccaatattttttgttaatagatttgcactttaaatatctatttttgaatttgacagaaagaatacttctttcaaatattgctttaaaagaatatgcatgtaaaaagaaaatgttaaaatctttccccattttcgcaaatgatttttcactcagatcccattcttaccggtgcttgtttttcccagttggtcccggccctaccggcaacgagatctgggcttttcaaaatccgaagaccgggaatcgagacatcggccgtctaagtctggccctcttttaatttaaatttgaaaagtaaacttaagtcaacagttatggcataaatattgagaccatccatataaaattccaatatttaaaaattaattcttctctttggcgagcattttgtgagtctgattatgaaagcacgcgaaattaagagactcgagattgagggacatggaaagaccatttttattcacagtctttaaatttttgtaaattcatggagattttttaacatatttgaataaaagtaccaattagagaacttttggtcaattaaaaagtatattaaattttcccaaaaaacacaagccaacccacacattttgagcccaataatttcattcttcaaaaagggcacaaacgcggaaactgatgaaatggcataataccaagtaattacgcgtaaaatatttaggggtactttaaggtgcagatcaagaatttggaattagatattggttaggactttcgtaaggcctccgaatccctgcatatatggggattctgaggcatcattctgaggggggagtgggtcaggttcggatccgggtgaagaaagtgatttt

SEQ ID NO: 754 - DNA, 6704 bp, Heterodera glycines
  unsure (1)..(6704): unsure at all n locations
atcttttgaattttggtttttgttgatcactcggaaatgggcaatttctgccgcacatttcacaactgttaattgacgtttttacttcttcgaataattattttgagggtatggatgtgacaggctaatactaattgtgtttgaaattatttcacatatttttcatacagtatctcacagtcccccgaacaattacctaatcctaatgttcagcgtttaaaacctatttaaaataagggtttagatacttccatcctataatatttccattggactctcgttcattggcatttcatctgtgatttatttattttaataattttttttttgtgtattcgatccgcatttgtcagaccaaatttaatattccttcaaaatatcaaatcataattttgcctattgtagtaaatgaacgacatcatcagcaggaattgtatttccttttttacgctgcccgtccaagtgcatggacaaagttggagccgaacagtcataaaaatgtccggtacaccttccttttgaaaattgaaaaaggaaaatgcctttctcctacattttaaattaaaaatagttgaaaatagtaatactttttatttaattgaattgcgaatatggaagataaaaatgcagtcacaaatcaaaaaaaattgaatgtaaaattttctcatcccggtatcggtattttgactgactgagcaccgctaattcggcaatttggctttttcgacattgtcatttcagatataaacgcaaaaactaaaattcgctcacaaatcgagatgaaaacgcaattagtcaggcaaaatttaatgaacgatttttcataatgattggactgagtaaaataaattatttgttgattttttccgctttcccaaggttaataaaatttttgcttgctttgtttggcgtttagtctctttttttccattgtacaatctcacaaattttccacattgccttaccaactgctgacgaggtcattttgacctcttttactttacgattgaccccaaaattcataagatatggcgatggacagaaaaaatgataaaaagaatgacaattacttaatttagtcatttttattactctgttcaacgggctcccattctatgttgaatagtctaagaaattgcaataaaaatttccagcgacaattaaacatgtattaagtttaattaaatgatttagtgcgggaaacggtgcacggttcccggtaattggacacttagtgttcaaaattccggcagtgtacaccaattttcaggtctccgcacttacggtacaaaattttgagtctgtcacagaaatgccaccacatacaacccacccataacatttatatatcgttttaatggaaaatgtatagcgtgtttgttcgtgccaaaaatgtttgatttgttgagtaagaaaaaagatatagtccaaaaattcgtccggggatgcttcagtgggcgacgttttgtcctgttccgaattgttttgccacgttttctcgatattcccgcgcgcccgggctctactgcttaatttacttttagtttttccgttaccttttttcctatttaaaactttttccttttcaatagctgttaaattttttttaaataaaattatgaaaaaaaatttaaaatcttaaatcctttaagtctctttcggatgttccggaacccggctttttcccgagccgaagtccggctccgatggtttcagttcgatttcgactaaaaaattttttatagctaaatcttcgtttttttttattttcatggtacaatccccacactgaaaatttttatttttcatattttttttggtaagcttaaggtgcatttataattctctaccttaaaagatcgtcagcgagagaaaatgaattgttttaactgtaaaagccagtctaaattggaatagccaaaaatgttaaaattgtccaacttacagtagttaaacatttctttgcattcattttggtgtttcggttcgatatgaaatttttgttattttttgatggacaaaaaggtccaaaggtttacaaaaatgaacgaaaattagaaacattgaaaataataaataattttattacagaactaatggacatatgaattttagaaatatttccaaatgaatcgcgccagatcggacccagagcttaatgcaaattttcctcagcgaacaaacgatttgttcggtgggagagtttactgtattggcagtcttaggcggttgaccaatgtaatcttccttatcgacaccggtaaagcgtatgacaataattaacatgccgccaaaaaaaattttcaatttttattatttttgatcacgaaattgagatttcacctgacaatcggggattccttgatatttgcttttgaaaaattcaaaaaattcattgaacctgatccattcacaaaaaactccctatattcacaacattggcgtagaaaaattaagaaattctcaatttagctctaaaattcgataaaaaactttggcatggccgcgtccggtctctactaattataattaaggctctcccttttgtttgatcgcggcgcaattcattcgcgaacacaatttggctattgttaacaccaatatcacgttctctcttggaggagttggtggtgttagtctccgaactttgggccggtaatttaagaattaatataaccgaataaaataataaaaacaaaagcaagtctcatcatttcaaattttattttaactttttgtagtgtaatcgatattttttcagggctgaaggtgtagaaatgagaatcggaaggaccagattctcttctgatttggattgtgtcagggatgaatcataccatgttctgtgagcttttaaagttttataccccaatcggatatttgcggcaaaactttttgttttgttttgcggtcaaagccaaaatcggacatttgcggtccgacattttgcgatttcgcccaaatttcatggtcaaaataaaaattaaacccaaaacgagctcattttttacattttaaccattcattaagcccttgtgcaaggtgctacaatgttactcaaaaaatcatcaaaatgggcgttaataaaaaacggtgccgcgcgtttcgcgaaaaccgcaaatatttaaaaagagagactgagccacatcagtacgatgtctctatttgttaaattaataaaaacaatttaatgtgttttaagctactataatcaaacaaagcaaagcaaaggaatattttttaagtaaaataaatataaaaatattttaattagtttatttaaaagtgtttttgtgaatgaggttctgtgatttgttaattaactgataacttatatttttattgataatttgcatgcgtgcatatgtaaaaatatgaatcggcgatttctgtatgcaaccaactatttgatctttaacatccgatagccttaagtgttttctattattctactaaatttcaaagagtttcgttaacttaagaaagttaacaacaaaaaggttcaaaaaaacttgcttttttgagtttctctgattattatttttttaaaacttaatgaatttttttgaaattttgcagaaaaacttcgggctaccgaataacaccaagattataaaatttaattaattttgggcgaacttatgaataatttactgtcaaaaaattttttaagcatttttgagtaatggcctggcactttcagaaagggaaacggttaaaagtgcgctgcacaaaaagcattttttcaaaacaaaaaagtcgtcgccttgctaagaatcgcaaaaaaaattttttcgtttttgatgaaattctgttaaaaattgacaaaaattttcaaaaatttttccccggcggcccaaatgtctttggaaaaactgcgccgagaaaaaatattttgaaaaacaaaaaataacaaaatcgattatactgatcatgatgattttaatgatgatttaaactatttttcctttttttttgttaggcttctattcctgtttacaatttacatttattaactttcaaatggaaaagcaaataatttttaaataaaagttttcatacttttaataattcatttaaattacaaatttaatgcccaaatagccttaataaaaaataaaaattaattaaaaaaaattttatcaaaataataattttatttttcacgttttaagattgggatgcagcattttggtgtctagaggggtggcaattaactgtcaaccgaggactgttacgtttctgaatggaaatgcagttcagtttatgaccgaagaggggttcagacaactcagaacaacagcttctatcagctttggttcaaattcttatggaacattacatggtctgttcacttaaaataggttttatatttcatttccaccatttttaagctattggttattttgcgccccaacgtataaactttattaatgacggtgatgaccatatagaaaagccatacgatttaataagtttgttttgtaacttttatatatagcactaaatttaattttaaaattttcatgtaccgtcacttggacattacaaggaagaggtattgcggtagtaaaaatagataccttcgatccaaaggtagtattttttaataataatttaacagtagaaaataaagctgagcgggactgaaaaattttgaaaaaaaattgaaaaatttcaaaaattttaatctcaattcatagatgaataatcatttaaatatttttttaaataaaactgcattttttttaaattccaaaagactcggtgcttaaaatctttttgagaattgttaattgttttaataaattataataatctcttaaatttatttactacaaatagctttttttcttgcgcagttttccgaaaaactttttgggaacattgtggggggggggggtgggtccggcggtgccgataggcgccgccgggaaaaattgaaaattgagtgaaatatattaacagcttgtcctaaaaatgatcaaagccttggttaaatttgtggtttgggcagtttaaaaaaataatattttaagttgtaatactttttattataaattgaaattgaaataatgtacagaaaatatggaacattttcagttcagttggggaattgcacccaagcgataaatataagtagaaatagggcggctacacgggcccgggtatttaagcaaaaaacgagcccgggcattaccgggtactgaagttttgttacttaaaaagtgtaaaatccacttttttggcgtttggttactacttttcactatttcaacattttttagaaaattccttaacaaaaatgcaataaagtacacctataagaatcgacctaaaaaatttcaaataatacacccttaagaatcgatctaaaaaatttttggaaaattttttcaagagatcatagaccaaattttttcccagacgcccattcttaccagtacttatttagtcccgttgggagcgggactggcaaactgggaccgggatttttttttcagaaactgggaccgtggcctgaaaaaactgggaattcccaatccggtcctgcttagccctagtctaaaataacaagtaacaaaatgggattggagggtccttttttgctttctcttttttgaaactgcttaatgttctattaaattttcgttttcaggaaaacacaatcaatcatgacgtattggatgacttgcacaagacgttcgctgccattgagcagaattcgtcagtgcgtggcgttgtgctgatgtccggcaaaccaaacgtaaggagaggcagaaaattcaaagaaataataattattttctttgtagtgctcaaattcagtaacaatggaaatttgtactgtaatagctaattgagcttttttattgtatattttttctggaaaataaataattttaatttttcttttaaaagtcctttgttgccggtgccgacgttggcatgctgtcgcggtgcgcaacaacagaagtggcaaaaagactctcacattttaaatggatagaggccagcaaaaagccggtgagttatgatgaacaacaaattaagatttaataaaaaaatttcttcattacattaatgatagttataaaatacacaaaattatttttttttataatcttagtaatcatttaaatgatatatcaaatttaatttcaaatcaaattaattgaccctaaattgctttttgatcgttgctgccatctccggctcctgcattggtattggcttggagatggcgctggcgtgccactaccggatcgcggtcagctggcccaagacgcagtttgcactgcccgaggtgatgcttggtctgttgccgtgcgccggcggcactcagcggttgcccaggctgatttcgctgcagaacgccctcgacatgatgctaaccggtgactaatgcataactgaaattaattaaacatttttatttcccttttttctttggtgtcttaattttcaacaatcgtttttttattttaggaaagttcgttaggccttacaaagccaagaagatgggcctggttgaccaacttggggtgggtgacatgtcgttggtcggagcggggaggagctcaattgtcggcggtcggggacgccgatcggggaatgagcgaattttattttaacccanaaaaataaacaaattttttggggggaaatgctcataaantgttcattttttgcactttaatcat

SEQ ID NO: 755 - DNA, 5572 bp, Heterodera glycines
  unsure (1)..(5572): unsure at all n locations
tgagaacaattttgatgaaccaatacaaagatgatgggaaattctgaattattatttttttcttacatgattttctaaaaatgtttaatttgttaacaatgctaaaacaataaataaataaaaaggggaaaaaattgaaagtgacaaattggcttaatgttagttgactccggtcccctcctcttccccctttgtatttttctctggttatctcccttgttacgcactatttcactgcccccaaagtgtataaatagcgcgagttttggcataccacgctcacttttcaaatcattcgaaaaaatttcaacaaaaaatggcgctcaacatgcaggacaaaaagggtctcctccaccaaattcttggcgaagctgacatcacggtgacaaccagcggaatcacgatcagcggtccccgtctctcctccccccgttttattccctttgatgaggccggccgctgccgctcatgtcgtggcaccgaggtggaagtggacgcgatggtcaccaaggagggcatcaccatttggtgtacgcgtatcgaccgggtgcaatttgtcccattcgacatcatctacgacttgcccggtcactgcttcttccgggtgaagaaaaaggcgcgggtgttcaacattccctacggggacctgcctgccatcacattcccaaaccaccaagaacaacagcagcagctgcaacagcagcaacaaaacgatttacgccaaaaagctaacacggcgatggacttggtggagagtggactgctagctgattcgttgcgtgaagaaggcgtgcagaggactgagctgaagcggaaggcaaaagttgcgctcgatctgattgatgccggtttgaccggcgatgcactttatgaggagggacaacgttggaagaaggccaaaactgcactcagcgttctcggaaacatgctgctggccgattcgcttccggaaaagaagactgcggagctcccgcttccgccagccgaaaaaattgaatcactgccacttccaccactcgaaaaaatgaaaacacccccacttccacctgccgacaaaatgccttcgccgctccctccatcaaaagtggaaagtgatgagcaacaattctacgacagcatttctgcggctaccactatgatggacagcgcctcaatgcagcagcaggcgccgctcaaaagaaaacaactgactccaaaaggcaaaagcaacggtatgaagaaggcagctgagccgcagcatcatcacaatgtgggggacatggacaagactcttgacgaattctttgagagcgttagcgcagcgacgaccaatttgtctatataaattgttgtttcatgcaattgtattgaattttaattaatttattaacacgaaatgcttaattctttctccaataaagatatttgctttaaattaccatttggactaattatttccggtccctcctcctccggtaaaacccaattcctattgaaatttgttgccgaatgcgataaactaattacaccaaaacccgtctccaccatttactgttttggtgaaatgaatcccgctgtacccattctccaaaaatcgggggttgatgtttattcgggtgttcctccggaagagctgatcaaacgcatgccaaagccccttttgctgatcctcgacgacttgatgctgtccattgatgagcactatttgtccgacttgttcaccaaaaagtcccaccaccaccaatttgccgtcgtgttcgttacgcagaatttgtttgagcgaaagatcaaagtggcccgcctgtccgcccagtacctggtactgatgcgagcacccaactcgctgttgtccatccgtaacattggcgtacagcttttcccgcgtcagctcgacttctttcttgacgcctatcgcaaagcgaccgctcgcccatacggctatttactaattgacatgcacgcctcatctgaccccgtgcttcgccttcgcacaaatatatttaaggacgagcaagaggaggatcaaggcttagttgtgtttgtaccaaagaatggagcccagtagtcaggatgaacaagctaaaattagtcaactcatccacgagaattccaaatggctttgtgcgctggccagaacgaggtccgcgaaaaagtgttgcaagctgatacggaaagcgaacgctgatcaactgctagcgctggtggaaatttgtttgaacattgtcgcatctcgatttcgcttgaacaaacgtcagaagaacaggctgatgccctacgcagattttgttcgctgcctgagcagagtgagaagtgaacgaggcgcgagacgtatgattgttcagaagggagcaggggttggcggactgttcgctgcactcctaacacccgtgttaattgaagttgccaaatcatttgtgagcaaaaatgtataaataccgtaaaaaattgttgttatttcacacttgttgtttcataaaatggcaaataaatttgtgcttgtaccacaagaaatttaccggggtctcacctctgcgactgacacgggtgacatcaatttggatgctgtacgacacgatttgacgcgtgccagggctgaacgaacaaacccttcagctaaaaatgtcagctacaatcaacagcttaggcgatacttgcaaatgagacgggaggtcacggacaaaccagcacgggttgagctagtcaagggattgagtgttctgatgaggcgaggcggtgctgatgatgaagcagaagttgtagatacaccaccccgccctcctcgtcctcctcctccaccaccgcctcctggtcagcatcctcctcgtcgtccaccaagccctccaggcccaggcccgtccccgccggggagtcctccgccgcgtccacagcgtcctccgagaccacctagagctgctgcgccgccctctcggagagatgggcgtgtggaggaatggcgaaaaaagagaaacgacatacaacaacggcagccggttgtgcgggaccttcttgctgaagcagctgctgctccgctacccgaaagtgacgaagaggatgactacatgttggagagcggattcgctctgccagcaccatcacaatattatggcgatttgcccgttctgcctgacaacgcggacgcaattgaggagatggacactgcacagcacaggattgcaaccagaagaaagttaaagaaagcagatgacgatgatggcgatgacgatttgcatcgcaaaaaataccgggtctattatcctcctcccccttctcgcccacccccgtctcgtccacagccaaaaattgaaacacctcgacctccaccgcgtcctagcctcaagaaagaaccacaaccactgctcgatcctcggccatccacatcacaacaagttgatcgcaaacataaaagggagccaaagttcgatctggatccgcgaccatccacatcacggcaagccgggtacaacccccctgcggaaccaaaacatgagcagaaaccgtcaaaaaagccacctcctcgcgccacaccctatcatattccgaaaagagagccaaaaattgaagaaacactgccgcggcagcaaccttctcctgctgccccacaagtgccgcctgttccgccacctaggagagggaccaaacgtcgacaccccccggaaaatggtgatgagagtggtgagctgcgcatacgtaaacgagtgaggcaagcgcgaagagtacgagtgtattactcaccagagccgggtccatcaacatcagcacaaagcgatgaacaacaacaacaacaacaacaacaacaacaacgtgaactgtttgccattccgtcaaatcagctgaccatggcacagagaattgagctaatatacatcaaatgcaaccgttatgccgatcgtatgggtgtccggggaaacgcaattatcaacactcaaaatgctcaaccattggtgcgaagcaatttgcgaacggccatcaggtatataattgacagaagagcgggtcgacctaccattagaccaccgggagcggaccaattggaggagcggcttaggcaggacccaattttgtattcattgacggctccaccaaagagaccatcgcagagcacaagcagcaggacgtcaataaagaaggaatttcatccgaaaaaatggaaatgatcaacaccactcttgacaagctgtacaacgatccatcctctccggctgcgtttgccggtgttagtgcactgtggaaggaggcgcggaaaaagctaaagaatttacgcaaaaaggatgtacaacactatttggagggacaccgcacgtacaccctgatgcgccccaggcgggtacgatttccgagagcaaaaactgtagctgctggcttcatgaccgacgtccaagtggatttggctgactttcaagcgctttctcgtcacaatcgcggtcaccgatacctgctggttgcggttgatgttctctcaaaacgcctgtttgtcgttccactcaaaaataagaaggccgaggagatgctggatgcattcaaagagcttgtcaagcaaatgccaatggtcccacaccgcattttctccgacaaaggcaccgaattcaaaaacaaattgctgaaggaattctttgaggagcaggagattgagaaacatgagcccgtgcattcgtcagtgaaagcgtcagttgctgagcgggcaatccgaaatgtgaagcagcgactgtacagatactttgccgaaagggagacgctgaattgggttgatgttgtacaacaaatagtggatggaattaacagcactccgtcacgggttcacggaatgcgaccaattgatgtcaattttgaaaatgctcagaaggtgtggaagcgaatttatgaatcaccgcaaaaacgcaagaagccacgtttccgtaaagatgaatttgtgcgcatgagcagagagaagggacagttcgagaaggggtatttgccaaactatggagacgaaatcttggaaattgacgaggtgctgaaggcggtgcgtcccatcagatacaagctccgggatgatcgtggtgaaaaattccggggcaccttctatgaccaggagttggcccgcgtgagaaaagatgccgacaccagttacagaattgaaaaagtgtacagaaagcgaagaaaaccggatggaaccacagagatgctcgtaaagttcattgggtatcccgaacgagaatggattgacgagtctcagattgtataaaagcgtttgaatttttgtgtatttctcatcagttgaataaatccataatgtcaaacagtttctttgtgtttttgcctagcaatgtgacggattatccggacaatcaaccaaacaaattccgggtccggcttccaaagcctttgcatttcaacgggtcttgggtgtgtgggctgcacagcattagctacccatactcgtggtcacaattgngacattggatgagcagtggatagacatccacttcacgnnatattgnnngntcccctgagaangacaacaccgcatcgtacgcgtgccggtcccaggtcttcacagaatcgangtgacagctgagagacttttgacgacacgctgagaaccatgccatgctaa

SEQ ID NO: 756 - DNA, 954 bp, Heterodera glycines
aaaaacgcaagaagccacgtttccgtaaagatgaatttgtacgcatgagcagagagaagggacagttcgagaaggggtatttgccaaactatggagacgaaatcttggaaattgacgaggtgctgaaggcggtgcgccccatcagatacaagctccgggatgatcgtggtgaaaaattccggggcaccttttatgagcaggagttggcccgcgtgagaaaagatgccggcaccagttacagaattgaaaaagtgtacaggaagagaagaaaacaggatggatcaacagagatgctcgtaaagttcattgggtatcccgaacgagaatggattgacgagtctcagattgtataaaagcgtttgaatttttgtgtatttctcatcagttgaataaatccataatgtcaaatagtttctttgtgtttttgcctagcaatgtgacggattatccggacaatcaaccaaacaagttccgggtcaggcttccaaaacctttgcatttcaacgggtcttgggtgtgtgggctgcacagcattagctacccatactcgtggtcaacaattgggacattggatgagcagtggatagacatccacttcacggatattggtgttcctgaagaagacaaacaccgcatcgtacgcgtgccggtaccgagatcgtcacacaatcgggttgaacagctgagagactttgtagcaacaacgctgagaaaccatgccaatgctaaactaaagccgcttcctcgagaggaagaggcggaccgtaataggacaaaaccactatattctccaccgcctgctaaaagaagtataaaagacgtgaatgatttgtctttgtttccttcacccccgagagttaatgagccggaaaagccgcctaagtctcctccagcacatgtaccacctactgaaccggtaactcctcctccggcatcacccccgagagttgatga

SEQ ID NO: 757 - DNA, 3110 bp, Heterodera glycines
  unsure (1)..(3110): unsure at all n locations
actatgggagacgaaatcttggaaattgacgaggtgctgaaggcggtgcgccccatcagatacaagctccgggatgatcgtggtgaaaaattccggggcaccttttatgagcaggagttggcccgcgtgagaaaagatgccggcaccagttacagaattgaaaaagtgtacagaaagcgaagaaaaccggatggaaccacagagatgctcgtaaagttcattgggtatcccgaacgagaatggattgacgagtctcagattgtataaaagcgtttgaatttttgtgtatttctcatcagttgaataaatccataatgtcaaatagtttctttgtgtttttgcctagcaatgtgacggattatccggacaatcagccaaacaaattccgggtccggcttccaaaacctttgcatttcaacgggtcttgggtgtgtgggctgcacagcattagctacccatactcgtggtcaacaattggtacattggatgagcagtggatagacatccacttcacggatattggggttcctgaagaagacaaacaccgcattgtacgcgtgccggtcccaaggtcttcacagaatcgagttgaacagctgagagactttttgacgacaacgctgagaaaccatgccaatgctaaactaaagccgcttcctcgagaggaagaggcggaccgtaacaggacaaaaccactttactctccgccacctgcaaagcgtgcccggagatctctagcgctctcttcgcctcccagacatgaagaagctcctgcacgaccacttgaatcgcctcctttgtatgacgagccaaagctgcaaaaagcacaaaaaacacccgaaaaaccagccaaaacagccccggctacaccaattctgcttgactcgccaccgttgtatgacgagacaaagctgcaaaaaccacaaaaaacacccgaaaaaccagcaaaaactccagctaagccaccgtcgcaagctcctcctataccagcaacccctacagcagctgtttctaaaccgtctcaaccgattgctcctgttgctcctccaacacctactgctaaatcagtagcaacacccactccagctaaaacggtttctcctcctccagctaaaacgccttctcctcctcctccagctaaaatgccttctcctccttctcctcctccagctaaaaccgcttctcctccttctcctcctccggctaaaacggcttctcctcctcctccggctaaaacggcttctcctcctgccactactattaccactactaccaagccaaaaacaccgcctccgctggtcaaacatagtcctcctccaacagctgcaaaacagccttctcccgtaaagactacgcccgcgtctaagctaaagcccgcgaaaacggttccaaaaccaccaccacctcctcctaaacaaaaaacaccaccaaaaccttcaccgatacttgagtcaccgcctcggtatgaagaatcgaacagaacaattgtaaagccaccagtcatacaaccatctccacctcatcttgaagaagcgaacaaaacaattaccaaacaaacgacatttaatactactgcaaaagaagtgatgccgacagagcctgttgcagctgctttaacacaactagcagatttaccagaaaacaccttcagctttcgcatcaatccgctcccagttgtgccccgctcagtatcgattcaataccttgatgatgttgaacgttttaaagtttcattcaatgatcggttgatacgtcatttgtcattctcaccacagttgggctatgtgctcgggtttgaaaaccctcagcacgtgatgtctaatgaagtggcaaaatatccggtggatttgcgaggcggaatctcgagttttgccgtttactcaaaaggactaactgagaatatgattgttggaaattcgctgagttcgctgctccgtgttgtgtcagtcagcggtgcaacacccggtgactacaatgagaaaatttacgattcgcccatttttgcgcgagtgctacccagggagatcaacgaaattgagattgagctgcgcacaatggacaagggtcgcctcgtcccattcgcctacggcacgacgctggtcgtgttattatttaagaaagtgataaatttctgaaaccactcattttttgtattcattcattcattaaacgtaaaaaaaataaaatggttcatattgtgtttgaccctcgcagtgccgggtacgacgagtatgtgcaatacggtagcggaatagaacacgaacatcacttcattgggtccagtccctttcaacgagggtatgggcagcggggagcaggggttggagacgtgtttcgcggtctttggcgcttttttctcccaatcctccgccgcgttggcaccacggtaggatcggaggcattgagcacgggtcaacgagtgttggagcgagtcgggaacgacggaatgccacttaaggaggcactggtaagcgaaggaaagaaaggaattgataccgtactggagaagggaggcctaccaaaacagtttggcagtggtggaagaatgggtataaaaagaagaagaaaacacgcaccaagtcaccatacaataattggccgaacaatcagtaaaccagcgagaaaacgtgttcgatccgacgcatttggactttactaaatggcattccacaaaattgacaatgacagtgtgaactccatcaccaatgccttggactttttccgcatcccgccaaccaacgtcagcgtctcatcctccaaagtgtttgaactgctcccaagtaaccctctgaccgacaccccctatcacttcaagcttcactccagtcaaaattatattgatctctccaaatgctatttactgtctgaatttcgaattcgcaaagaaaatgcaaatggtcaactggttgaccttgcagctgatgaggttgctccgattcaactgattggacacacattcattcgaaacatcaaaatgagcatcaatggccgtgaagtgttcaacgcaaattctctgatggcctacaantcgtatttttcacacgaactctcctattcaacagcggccaaggactcgcatttgaatgctgcaggttactaccgtgacactg

SEQ ID NO: 758 - DNA, 4203 bp, Heterodera glycines
  unsure (1)..(4203): unsure at all n locations
acacctaaagcatgcatctcctcaaaaacctcctatccccttttagctcctcctccacctccagcacaaacgcagccatcttttgtcaagaccacacccgcatctaaaatattgactccgtctcggattgatgagtcgaatagaacaatagtattgccatcagtaaaagaaacaactccaccgcgctttgccaagacagtgatactaccgcaaaagaagtgaagccgaccgaacctgttgcagctgctttaacacaactagcagatttaccagaaaacaacttcagctttcgaatcaatccgctcccagttgtgccccgctcagtatcgattcaataccttgatgatgttgaacgttttaaagtctcattcaatgatcggttgatacgtcatttgtcattctcaccgcagttgggctacgtgctcgggtttgaaaaccctcagcacgtggtgtctaatgaggtagcaaaatatccggtggatttgcggggcggaatctcgagttttgccgtttactcaaaaggactaactgagaatatgattgttggaaattcgctgagttcactgctccgtgttgtgtcagtcagcggtgcaacacccaatgactacaatgagaaaatttacgattcacccatttttgcgcgagtgctgcccagggagatcaacgaaattgagattgagctacgcacaatggacaagggccgcctcgtcccattcgcgtacggcacgacgctggtcgtgttattatttaagaaagtgataaatttctgaaaccactcattttttgtattcattcattcattttaacgtaaataaaatggttcatattgtgtttgaccctcgcagtgccgggtacgacgagtatgtgcaatacggtagcggaatagaacacgaacatcacttcattgggtccagtccctttcaacgagggtatgggcagcggggagcaggggttggagacgtgtttcgcggtctttggcgcttttttctcccaatcctccgccgcgttggcaccacggtaggatcggaggcattgagcacgggtcaacgagtgttggagcgagtcgggaacgacggaatgccacttaaggaggcactggtaagcgaaggaaagaaaggaattgataccgtattggagaagggaggcctaccaaaacagtttggcagtggtggaagaatgggtataaaaagaagaagaaaacacgcaccaagtcaccatacaataattggccgaacaatcagtaaaccagcgagaaaacgtgttcgatccgacgcatttggactttactaaatggcattccacaaaattgacaatgacagtgtgaactccatcaccaatgccttggactttttccgcatcccaccaactaacgtcagtgtctcatcctccaaagtgtttgagctgctcccaagtaaccccctgaccgacaccccctatcacttcaagcttcactccagtcaaaattatattgatctctccaaatgctatttgttatccgagtttcgaattcgtaaggaaaatgcaaatggtcaactggttgaccttgcagctgatgaggttgctccgattcaactgattggacacacattcattcgaaacatcaaaatgagcatcaatggccgtgaagtgttcaacgcaaattctctgatggcctacaaatcgtatttttcacacgaactctcctattcaacagcggccaaggactcgcatttgaatgctgcaggttactatcgtgacactggtggtgtgcttgaggtgggagacggatgcactgcacgacgcaacctgtttgtaggcagcagaacagcacaattcattgccaaaattgacgccgatttgtttaaccagcctctctacttgatcaacttttgtgagctggacattgaaattttgcccaacgacaacgactttgtcctaatcacaccacccggtgttgctgcagccactcgctaccatttcgaagttgtcggtttgaaaatgtatgtgaagaaggtgtccctgatggacggattggcgttggacattgcgcgaaagcttgagttgaagccggcacgatatgcagtgaggaaaacgctgatgaagtcgctgttcatcagtcatgggcgttttgaatttacgtctaatttgttcatggatcaaattccccggcgtatcacaatgggattggtggccaatgctgactatgttggcaccgtttcacgcagccccttcaactttcaaccatttaatgtgcgtgaaatttccataattgccaatgggcgctcctatcctcaagcagcctacgacttggactacccaaacggaaagtatgtgcgccccttcaacgacatgaacgaagcggtgggattcgccaactcatcggaaagcaacgggattactctcgcacaattcggcactacgcattgcatttacatgttcaacttgacgagcagtggagacgaccaagcggcgctttttgatctgataaggaacgggaccacagcagtgagcatcaaatttaatcaggcggtgcccgctggaggaataatgttggtggtgatgggcgagtgcgactcgctggtgatgttggataaaaatcgatcgatcagcactgacatcactatttaaggcacacttattttcattttttccataacgataaacatgtattccaaaaaagttggcgttattttattccttcttcggatttctcttcccgtagtgtcatgccgagaggaaattcctgagtactctgaatatataagaagaaaggcaatgcttacatccacaaccacaacaacgattccatttacaacaagcacatcaacaaccaccacctcatctcccccaaaaagtgacaagttaattgaagagcaagtgtcagctggtctcacaccactcattcaattgtgcaaagatcgaccagaagaggggaatttattccaacaagccgtttgctgggcggtgttcgcattgtatttgatgcttattgtcagcctggttctccatcaactttgctcaattttttggctcaagaatggacagcgtgcaaatcacatcaattttgagcgaaaaccgggggaccgcacaagtctttcggggctgcttcgccagtgaccaattaccgcctccggtcactctacaatatcccgcagcgctaattgtgaaccgggacccacattacaagggagggtctcattggtgtgcaatttatgcgaagggaatggaagaaccagtgatttattatgacagcttagcccaaaaaataccatctgtcattgtgtcatcattcctgaataagtttccgatgggtctaagaaaaaatattcgttcctatcaatcccaattagtgtcaacatgtgccccacactgtattgtttttgtctaccacatgtcacaaggtcattcatttgaaaattttattgagaaattggaaaaatcgacaaattctgatctgtatgtaataataatgatgaataaaatggtcaaataaatgcttacaaaacgctaaagaaaaaatacaaattgtcaggctgactaagctcagggagaattcggacatacccagcgtactttttcaagtgtggattgaacagccaaaaaaattcaaaaccatcacttcggacctccggaaaaatgccatgtgatagcattacactcatcggttgttgcagaatccacggcatgtgttgacggtagaaaattccacagcaaatgggccgcttcatgagccaaggagttggtgagctcattgcaaaatcgagcagaagtccaaacaaattcccaatggcaattgactaaaaattttgtgttgtcattaaaaatttaaagtatttcactcacatttatggcttgggtcatcacgaaataaatctcgaacaaattcgttccaagtcgtccgtagcacaggtagtgcaggagctcatttcggctgaggtcctgcggcagttcttcctgtagaagcagtctccccactttcttcttcttcggtgtccttttctcctcaaacatcacatcgactaaagcaataacacccttctaaaaatatttttggtaataaaatgaaaaataaaaaaggggaaattaccaaatattcaanagcacttttggcgttgactacggaaacactcgaattggtagcaaacagggccaattggagcccgcttcacatttgcaaataggcagaccaaaggcacgaaactgatcaattcgcaatttaattca

SEQ ID NO: 759 - DNA, 1734 bp, Heterodera glycines
  unsure (1)..(1734): unsure at all n locations
gggccaattggggcccggtttcacatttgaaaaaaggcagaccaaaggccgggaaaatgaaacaattcgccaattaaattcagccgggagcgttggacgaagcttggggtttttttccattcaatgggaagagcattgttgaaattggggcgttttctttttccaaaattgaataaagaatgatttcgatttcttgctgggaataattttggtgcgcaagtgggcgtggccaaagtgcactcattgtacacacggtcattttaccgattcattttaaaaattttcacttttcttgcacatgtgctgttttcctctcctcttcctcacttgtcttgtgctttatggggaccatattatttaattgggaattttggggaccgtctaataaaattaatatttttgctgttaaccagggcggtagctataattacaaaaagcaccgtttatcctggcagcaatttgccttttagggcttgaggtcgttcgcgtgacttgactaatttcccgagtcgtttaggtgccctgtcgtcttgtgcttcatgggtggcggtgtgctgctcttcaggccatagttggtttatattttttgactattttccatgcccaaatatttattattcattcaccattttacgtcattttccatgccggcgctcgcatataaataccgagattttactcattcctcctcactccattctcagattaaaaaaatggacaatcatccccgaaaacgatcctctaacttttccattgaccatattctctccgcacctaaaaggccccgacaaggcttcctgatcaatgaactcttgggcgtagtccacttccttggatcttttcaacaaggcgaaggaacatcaaaacaggccaaggactacgttaaaaaattggacaacagcattgaacacgtggccaaattccactacgtaaaagtcaagtcaaagttcaccattacggatttgccaagcacacctgaggcactgttggccggaattttccaacactgcatcgacgaggctattgctgacagccgtgagcgcaacatcgagcctacacacctcggctgtatgatcagcagccctctgttggaaggcggcgacatcccaactccagtgcgacagatgactaacaacactctcgacaccattctcaaccagttcaaaaaagtggcgcagtccaaacaacagaaaaatgtatcgttatggggtgagccgtttaccgtcaccataacgacattgaatcgcaatggactgccacccaaacgtcgtgtcaaagggggagctcgtcgccctgtcaaaacggccgttcaccaccgaattaatgaccaatgcctgattaaaattcgcaataacgacaaccacttctgccttttctatgcgctgcaggcaacaatggtcgacaaaacgtgcaattggcctcgctggaagttttcccgttacttgaacaaccaatacggacagcagggacaacttcatcgtgatgcagttgagctcatgaagcaggtgaaagcaccaatggacttggatggctacgacgcagatactttcgtgcctctcattgttgatcactgggacaatatgcagcaacaacacccgctttgctgtgttcatcttntggatcgnntgggacagtataaaccgatctancagtacattgacaacatttacgacactccgctgctgttgtactttcatgaggaccattttgatggtggcagaagcagggcggtct

SEQ ID NO: 760 - DNA, 5857 bp, Heterodera glycines
aatggtgccaccattgggtgaaattggtccctttgcatcttcgttggcctccgattgcaaaatcagtgaagccttaattcgcaagtcgctgctggtggaggcaaaacggcgcaaattttggaacgcaaaaaccattgaaaaaatggattttcaggcaaatttttagaatggcatttttcccataaaatcgcaaataaccccaaaacgctattcatttttaaaatttattcctctgaaattgacattttgtttactcgattcatgaaaaccctgcaaatgcttttaaaattttccaaaaattgtgaggatggccaaaggaaaaatttttttttgaaaattttagtgccgccaaaaccatcaattttcaaggatacatttaaatttgttttcgtatttgcaggagattgtcccgttcttttgccatcattacgtgttggaaagtttcacggaaacgcggagcgtagcggaggcaattgacgcgtcgtcctcgtcttccgccgccgcgtccataggacgaacgcgcagcgaggaccacgacgacaatgtaaaatggatttttttaatttttgggagaggatacaacatatttttgaattttggcttattaaaattaactctcaccacttttggcatggaatattgaactccttccaaaaacatggcatttttctctaaattcccgttaattttccttcaatttccaaaaaaaaatttttggtttttttccaggcaaccggcagccgaacttttgccagttcgacgtcggcttttgtcaccaatgaccaccaacaacagcagcaaattcatcggcggaccagcggcaccacaacatttgttaagggaactgccttaattagtcgtggtagcattgttggcggattggtggaactgaaaacgtttggcatggcgtcgtcgaacggcgcggagttggggctgaacccgtgggactttgacgtgcagccggacgacgactttgtcagccaagtgagtgatagctcaaaatggaattgattgattgtgcaggcatatttactctgatgaatgtgccaaattttgattccgactcaattttcggcaggcaatcccgagagtgaaatcgggaatgacaaaatttaagcgatttgtctcttattctcctgtgatggtgccgtagtgttattatgccgtcgtaaattttaaaaattgaaaaaaagttttcccaatttttaaattgttttcccatttttgtttttatatatttcctttattttgtacagaccaaaatcttggaaatgccaaattcgcatcggctcggcgcctgtcacagctgtaagggtgaaatgttggtgcactgtttccactgccgtgggtcgggcaacgacaaatgctcatactgccggcaagtgtttttttattatttatattttttgttataattttaaaataacatttttagtggcaccggcatgaaggcgggcgttgctcatccaggtaaaaaactgacgtggacaccacaaaatgggtatttcggcacaaacccttaaatagttatgtctgaatccaaaatccttgaccaaaaaatctctaaatttgtcgtatattccaaaaactcctcaaattaaattttttatcaaaccacaaaaacctatttgtttataggaggcgcactacctttttagaagaaatttctatacaaaatgttttcgaagtgttatatagcgttttttcaaaatttatgatgaaatattattttttttaaacagtgaaattttttcatttttttaactttttcggggaggcggggaataaagagcacacattataaggactcttgatgctatttctttctgttcatcctctgtgtccccaattttcagctgtgtacacccatccgatgattggcggcggcacttttcccggcgcgcccgcttctgttggtggttgtggtgttgctggtactgctccaaaccgtggtgctgctggtttccaccaccaacaccagcttcaccacccgtttgccaacccgtcaatggtccgtccggcactgctcggtgcccagcgggacaaaccgtacgcggccggcacgcccgtccatttcatggcaaaggctgggctaccaccaccggtgcgagtattgtattatacatcttacatgtacacccaaatgtcgccagcagaaaatcgcaggaaaaaacaataataaaaaaattttcaaaaaattcaggaaaagttctaaaaaaattttttaaagctttttgttttttgaaaatctaggtgttactggaaagcaaatttctgaatttccacaagaataaaaaaacataagaattttcttttatcttattgctcgaatgaaaattaatttgtattttactgtattccgacagtatgccaagtgaaaatcatttccgggtgcatttaaaaaaatcaacctgattatatgactccgtgaaagccctggcaggatccgatcctgatccgggcccttccctatacaatcatcataaaaaaataatttctgttttccagggcattggccaacacgacctgtgcattttctgccacggccggggcatccgcgactgccagcactgcaagggccagggcaaaaagcactgtttgacatgcggtggcaatggccaagtgcacgtgtacaccaaactcaaagtggtcttgtgagtcgtttgttcatttttttatttcggtcatttcaaatgtttggcgtaatggtgttgtgtccgtacccaaactctggacttttcccggttacttttcagcaaggcttcttttaagacaatttattaaaatggaaatcaaaagtggaaatgcaaagttaaataaagaatgatcgctttttaatagtaagaaaaacaaagcaaattgttaagtgagttgtatcgctttaggcagggatcctgaggataagagaataagcaaagacttaaataccaatgacaaatgggaggggccaaacagatggaattacacaaaattgtttggaagaatattttccgatggattggacgaaggggtcacttttatgagtgagtgaggaacagaagggccagggaaattacaacataggaaatgccaaaaacggagaaaagagaaacaaataaataaatggcaatgattaagccaaaaatgcagatccaacaaatggttttttcaaattttagttctgtcgagtgcaccgattattacagcgcgtgcggcgtgcctgaagttctcttacgacaggcgaacggcgagctgattttctccgaaacgcggccttatgtaagtgccccccccccctcaaattttatagattttttttccaaattagactaattaaattatccgatcaaggaaaatatttcgaccacttttacggttggagaaagatcactttttgtggagaaaaatagtttttttttttgcattaattcattttttaaatattaaatgtcatttacgctttaaaaattcatttgtcagaggcaaaatacggtgataaataaattaaaatcaaattattgggaatatatttagattaataaaaaatttcaatagaattatggtgaaattcttttaaggtgcagccaattaaacgggacggactcaccgaaatcaacgatgtcagccgacgcttctgtgccgcccacctgaagaagttgttggactcgtgccgtgtgctgaagcaacggcactgtgtggagagcattgaggtggccaaagtgcgctttcgtcttggctcaaaaatgggccatttttttgtgtacggacgccaacggttgtgctacattccggaggggccgacccggtgcagtgtgatgtgaaaagtgtgtgcacgaacgacccaaaaagcggagggaccgtcaaatgacggacagacaaactgacaaaactaccgtagtactattactacggtgtaaaaatactgtattagacaatgccaatgaatgaaccgccggagaaattaggccgccgtatttgctaatgagcgcagttagccacccccgaaaaaatagtgaaattttactttctctgcactttgggaaatttaaaatttaaaaaaatctttaaaattattttttgttttctattaaaatataaatttgatttgaagaatggtaattaaaatttttaattttttaaaggaatttcaaatttcgaaaaaaacacagaacaactatttctcatttccatttgagcaaatacggtattctcagctcgaatgtattcccatcctcaggcctcttccggtgaaaaattcctaaaatttaaatttcgacagtttttcctcttgtccatggtttcttaatcctgatttttggactaaaagccccaaacaatcaatttgaatttatcttttttgtgtttaaatgcaacccaaagaatgatctctcgcgttttgcttactttttgttcaattcatcttttcctagcgtttttctccctcatcaagttcaagcagttcagctttaatatttacatttaaatcccaaattcggttgatttttcgcctcggtttttgttgttattttctagtcatcatttttttttattcttcctcaccttttttcattacaattttttgttcatttaccttatacaaatatatttgtggtgcaaatgctaataaaaatgcaagtattcatttttctcatacatttaaataaatatttttttaatatacatttagttgaattattaaattgccacattttttattaaaataattcaatgttttttaagtgttttagttttttgttttttgctcgtttatgaagttcgtctttctgttgctgttggtcagctgcttcctgctgctgattgtgaacattgcttttggcattgacgaccattcatcatcatcatcgtcgtcagcagccgacggcgttggcacgtgtcccgcgctttcggcattcccattttggctgcgccgccagtgccccccatttgaggatacgcgttgtgccatagcgtttccaagcgatgtgccggcaccgcccgggcaactcagctgcgcgttgggtaattctggcggatggacaactgggccccggaaaactcaaattgtggcagaatgattggaccaccgcccaaattgggttgactcggacaacggagttatgtttcaaaaaacttttccgatgccaagttgctctcccaccgtgattatatggatcggaagaaattttgtagttggaatcggttcaatatgggaataaattgtttgtttttgaatcctgacaaagaggcccctaatattgggaattgcaattttggaggggacaaacaaaactcggcaaaccatctgccggtgtagggaggggtaatttttttttgaatttccaatttaaaaaccgagtctgaatttcgtgtttgaatatgctgctgaaccaacatgttttacagcgagtgcccagcccaacgcgcgccttcgccagctgtccgcccgtgagctgctcgcgttcgcgaagcggcgcgacccgtacgggcgcccggtgtgcatgctgacactgttctacgcgcccgactgtgtgttctcggccaaggtgcgtgaaggtggtggtggtgggcggaacaggttgtgtttccccctctcccctcgaaattttttttgaaatataatggatttgaaaatttccgtgcggggaacgacgaggggctgggaatgaagcgcatccgatggtggggcggattagaggggctatgacggttgtcccccggggagttattatttttgaggcttgttaattccggcgggtgaaatacatagccaaattttttcactttagttgggaccctttcactgtgccccgcccccatttcatcgcgtaaaaaacaaaacttttagatttttttaatttacatttttaaaaaatttttc

SEQ ID NO: 761 - DNA, 3058 bp, Heterodera glycines
ggtggggtgaacggatgaaattcggcatggcaatttcaattttgggacaattgtagtacgccaattagagaccggaattcggagaaaacccgtgcccaaagtcaagggatgtgtcaagccaaggggaaaattactgttcttcgatattcgaatcaaaacccacttttaggggtcgggaaatttttttttggaattttgagtgaaacctgacaaagctgcatttgcggctgcaattcggggcaaaaagcgacggagccgtcccaaaagagatgaagacgaagaagcaccattaccgttacattcatcctccatgatgaatttgaataaaatattcgattatttttgcgggctaaataaaacaatattaaatattcccgaaaaatttgcaaaaattatatgggatccttaaaatttaggcatttttcatgcgcccattttcgaatgaatgggggaaacgaaaaattagtcagtccgtgccataattttgtgccaaaaataaaggaagaaatgaccaagataaaaaaatagaattaaaatggtacaaaacatttcatacatcaattagaatttgataaataaatatatatttatttgtgtgtgtgtttgaacgaaaatataaaagagcagacacatcatacagtaaatcaaatcgaccgattcgtactgtaatttttgtaattgttgtcactctcactatctgctggcgcttacgcataaaaagaaagccatacgaatgggttgtttttttgtcatgggaccgaagaaacaaaaatgcatacagaaaacggaattggattggattgatcagctctgatcaccaaacaatgtgacgatttacaacacaattagcagccaattaattgcttggatatgtttttacgataattaatcactttctctctctctcccccattctttccctccgatcaaattaaataacgcccgcccccggctgttctgttgatccgtgtttcagtgaagtgactgggcggaggcctcgagttccggcaacaaatagggaaatggctgcccagtttgagaaagcgaggcctgaacaatggaagaaaatttgtcaggtataaagtctgtgcgtaaaattgaaagctaaatttcattataatccacgcgacatgccccaccatttccaccctttttcggccaccaaaattaaaatatattttgtcctggacttgtgctatattatttatttttttgctcttcgggccaaaaaatttatctagtgttatttttcaaacttttcagcgccgggtgaaaccccaggaaattggagcagttttgcgggacaaatgtttgcctttggaggcaaatgttcaataaataatggtacaatgggttatatgtaaggcaccgcctgggaaaaactcatggaacttttaatgaaaaagtgagaaaaaaattgtgcaaattttccgccacccacccgtgtctccgtgtcccattggaaatggatgagtgcggacgggaccaattcgtagtccaacagcgtgtgctcctcctcgcgcaactgttgctgctgctgctgattggcaccaagcgcagcggtcagtgtgaaagtgccgtgatggatggccaagtgttgggccacaaactcacgcacattggcaaaccgttcgtgcacattgaaaatgccctgaacaaaagtggggtaataaaaggaacataaaattattaaagcgccgggttttcgctttgaaaaagtcgaatcattatagaatgcaataaaagtctaactcaaacaacaacaaaaaaccattagaattcaaaaatttcgcaccgaaaagcaaatcgcttttttaaaattttgcacgattattcatttactctggccgggtttttacggaaaatcttttataacgatttttcatgaaatttaaaaaatttttttttataaaatactccatagaatttcgaaaaaatcactagaattttttttattgccgcccccaatcagttttctcccggcaaaaactgttcactcgcctgcagcacaaagctgttggggaagcggacccggatgtagcagtacttgaacgggttgccctccgcgtcctttcgcttggtgtccgcctcgcgcatcttccgagtccgcaacgtcattatcttctccaactcttccgacattcgctgttgctcccgtcggatttcttcaacagttcgcttgaaaaagtcgggcggaatttccgggttcggcaactgctgttggttcgactcaattttgaacacctgagacaaatttggttttttgacattgtttgaaatagttgaatgtgagggtaggatgggtataggtataatagtgacaaacaaattatccaataaaatttcataaaaaattctcgttgcgcctttcagcaccgccggaaccaaacttgacaggttttttttttgaaaaattggaccgcaaaaaaggcaaataattttaattactacaggactgacagaatatcaaacacttggtcacacccaccttcgcttcacgaaacactcggatcgcaatcggtttgccgtccaacagtgtcgccaatgcgttgcgcagcgtgtccacaccaccggcggttggctgtgccgacagcaccaggtaacgctccgccgattgttgctgtccatcagccgcgggggcggcacgcatttcctcacgaaaaccaatcgctttcaaaaattcaatggtccctttcactggcagcactttttcctgaaaaatgcaaagaaaaatttttggaaatttattttttctatcccaaattccctcataatcagaaatatgcgggcaacgaaagtgggaaaatgcatgaattcgtaggcctcccgaggtccggtttgtcccagaccgttaaagttccagtgaatggtacaaaaaattcgaaaaattacaagttttttctaatgtgcaccgtacccgttcaggaaaaactccaaaaatcctactatgaccgtcgctataattccaaaaaatattgttggaggaggattcaaatttatttattttctcattcttcggggagggggtgggggggtggtggttttctggtacttaaat

SEQ ID NO: 762 - DNA, 5048 bp, Heterodera glycines
  unsure (1)..(5048): unsure at all n locations
gaagaaagaagaaaaatcaatgatttggcagcagctcttaacattaatcaaaggcttcaccagcctcgatgctggaaaaagtttctttttctcagaaagtctcaggaggcctttactgttacgggtaaagcgccacacggccacaactcaaaataacttcttcaatagaatagtaaaaacctggaatgtccttccagtcgtagcggtgcaaactaataaggcaaaggaattcaggggtttcctaaaagcaacgagttatgagtaggaatattcatgtaccatctagtacattccatatttcatcgcccgcgaatttgaaacacttcaattatctttatttcggtgttcatattgtatcttataatatgatcggaggtggattctaagttatcttttttgccactcgtaggagcgggggatgggggggtggtggttttctggtacttaaattttccaaaaaatgttttttttttggcggattaatacaaaaaataaaatttttagcgccgcttactgcaaacactcggttgctcagtcgaatttggcgatacttctgctcgttcgggtggtcaatgatgttttgcaaatatttgcggatggtttccagcgcggcacttcgctgttcgtcgtcacggcaaaatgtgtgcaacatccaaacggaggcgctcaacggttcgtcagccacgtgctcgaacagtgtgctttcaatggcattgtacatctatgcacgtttattggaaataaccaaaacttggtactccaaaaggaaagagtattcgaaaaaagtgtttttttaatgatttggatggaaataattaaaatggggtccgttttgcccaactcttttgaatccaaccccattgttttcacgaagtgtatgaaaatgcttcatcataacggttttttgcgcggtgtctatcagtgatgccgcgggttgagaaaaatttcgggttcggactactagaaatttttttctataaaaacgttgccaaaatttttatttgaaaagattagaaaatcaggtaagttaaaagaaatagtttggccatgagttttttgaaaatataatacctccgacttgggcagtgccatgtcttcgtcaaaaatttcgcacgtgtaccgcaccgttgacgtaccatcggcctgttgttgctggttccgtcgctgttggtccaccggtcgttgtggcccgacactgccgccgtccccagcaccgctctgttgcggttgtgccaaccgacgctgttcctcttccaactctttcttggcctaaacaaaaaaaaattaggttctctcaaaaattgatgcattttttgcaaattgttcgcaactaattgcatcaagaatttagaaaatttaaatagggtccctacctgcattcggaccattttttgcatcggtgtcagcccagcatttgggtcgttctgttgcttgccatgcattcgcttctccgccgcagccgcaatcaattcagcatcagagcgacgctaatagaaaaaaaaattttttttggctttgccgtaaatgggaattttaatctcggcccatcgccaagagtattatgtcattaattaaaaaccattataatgggcaactctaaaaacaaacttttaatccttggaatcattcggtagtactaagtattctctattaggctgcaaaatttcaaaaaaattttttttgttaactttcgaaaaagtattgccaaaaatatttggaaaacaagagttttttgagttcttttgtcaccttttttgaaacttaatttcaattttacattctgatagagagcacttttggctatcgactgatacgttgaaattaaaattttgcttgttttggagcagttatgaataattttttgccaaattttcatatcggtggtttttaaacaacgccttttattgcggtttttttttaattctgcaccatcgccaaatccccctctccctccaactcgtttcaaaaattcgtcttttgaaaaaaacagttaacccatgtcaacctgctgagcgcctggcgacggtgaccgtgtgctgctcgtggtacgtcccgccgcttgttccgttcgctgttgttgcgctgggccgcccagctggcgaccaccgcccaacttcttgaatttgttgtccaacttcttcttcttgaccaagtctttgagtttttgcattatttatttggcctggaaaaagaaaattgcgcacaatttttgttggaaaaatgttgtaacaaaaagcctaaatcctgtggtaaattgctccagaaatctgccccgttccgaccgagtctctcaaatcaaaggatttttgaaaatcagaaaaacttggagaattggacgtatgtaaaacaaatttccaactttgccgtacaacaaaattgcagaattaacaaataggtatattgtgaacactaaagtgcaacacatcatgaccaaatcatggtaaaatgagcatgaaaaacaatataaaaaatgccattttcattttaaaccaccgaaacacataacatggaaatgggagagtggaggaaggaattttggtgctgaaaaaacaaaaatgtaataggcaattttatgttatataataattcatgtaaaaacatcgttcgcggtcattccgttcattcattgctcctcttcctcctcctcgtccgattcgctgctgctttcgctcagcgaaaagttgcggtcctgcgcagccacctcgtcctcgtcagaccggttgccgttgtcaactgtgggtaaatttgcgtgaaaatttggagaaaaacgaattttttttggatttccaaagcggaaaagttccaccaccccagtggaaaaattttgaatgaaaatttgtaatagattttagagcgaaaacaaatttttttttttttgatttccaaagtccggaaaagactcaagctcggtaaaatgggttttgaccaatagaccaattaaaattcaaagcgtaacaaaaatctttcgagtcggtatctcccatatttcatgtaaactgttgtttgctgttgaactcactgaattccacttcgccctcattttgctcctcgccgacctcgttcagttttgtgctctccggcaactgacccgaattcttcagaatgcgtgcctcgtccggcgtgtattttaaaatcacatccgcctggaaaaattttcagtctaaatcagtaaatttaagaaacgaaggcgttatctacgaaagcctggcgagctgaaaaacacaggggaagttattcacgaaaaatgcgatttttgtgtccatttttagaaaaacttgtaacaccgggacaacaaacaacgattggaatttgccagacttttctttagttgtttcctttacccaaaaaaattttttcggggcaatgaaaaggggcgagtgattcgcaatttcaaaaaatccatgatgcctttttatagcaaatgtaatacaataaaaactatacatcggacgggaccgaccccagccgttttgccgggatttcggtccaggttttttttcagagaaagcaactgaaccttgagtccaggaaaatggaaatcccggtccgggattgccgaccctaccattttctagtcccgctttttttcaagagtccgatttctactgccccacgtgccttgtcatcttggtaccctcgcaagccgatcagaatgatgtcgccggtgttgatccacacttttttgcgcaacttgccccgtatgtggcacaggcgatttttgccgtcaaaacaaaatgctgtcaaccgaccgttgcccaacattttcaccacctgggcatatgctgaaaaaacaattgtttttttcaatttgtgacatttgttcgaatttggaacctcactaaagctaattgtataaaatttttgcaaatcctaaaacataaataactccagcttttttttgaggattgtacaataatttaaagattatggaagcatgggaaatctcgggcctttaatggttaattctgagtaaaacaaaaatggaataaaattgtcttggaaaagttcatgccttggtcgtcgccgtccttttcgacgagttcccgtttcattatatcattttcattcttccctcggcgacgatttttgcctcctttccctttattcttcggcattagtatttagaaaaatcttaaaaatgaaaaagtaatgttaataatgacgaaaatgtccacattacacattcgaaatctgggtttaattaatcgattaaataaattggatcaaaaatcccttttttagagaaaaaatgcatttgaaccctgctgaaaatccaaattggtatctcgaaaaaagatgtttttattttgaaatcatttaaccattctcttgcaaatgtacataagtgagaaaataaaatatttcaaaacgccaaaaaatattttacacataaaataaattttttcgaaatataaacaatgtacagaatgaagaaaaaactctctttttactaaatgcccccggttaaaccggaaaatttctccagctttgtttctaggattatgaagttatgcttaaattacgccaaagtgattccaacccgcaaaactaagactttgacgacaaaaattagattaaaaaaaaatcgacgatccttttcggacactttttgggatatgggccaacagtgccgatagtcaccgtcggtcgggaaaacattgaaaaatgatatgatttttaagatttttatattttggagaaccacaaattatactaatggcccacaaaaatccaaagtgatcattccaataaaaaataacatttttatgagcacgccaataattcaaaatctgattgatcacttctcatcaattcattcacttctgctgatcacttgnggccgggagttgctttgagaagcctaaaaaagaaaagcatanaaacttgaatgtttgaataagcattcgctgacccatctcccaattgcgcattgcaattaacaacatggctaattctgttccattggttataaatacgccagtcaaacgcctcctcnttcccattttgtccatttgctttcatctcgcgcattnggacaacggaccaac

SEQ ID NO: 763 - DNA, 3838 bp, Heterodera glycines
aaaacattgatcagctcaccattacttacattaatttcctccgtaattccacatgacagaaaagatttggcgatcagttccttcgaaagtgaacatacttttggtatggaagagaatccattgaatttataattcatattaaacatccaacagttgaaaaacccctatctatttattgaattttacctgaaaattttcgaaaaatttttggtatggaaatggctggtatggaaacggcggtatggaaatgggtcgatcccttctgcattcgaccgcagaatgctgtttcgaacaccgagtgttttcctcgggtgaggggcttgtttaaactcgaaattttgattcatttttttaaaatgattacctaaatactgttattgtttgaattaaattatgccattttttgcttttgtatagaaaacaatgacagttgaaaaatcggtgtcaaaggctgagagagggcgctgtttttttgacattcacatcgatggtgagccggttggacgcattgtgatggaattgtttgacgagcttgttccccacacaaccgagtttgcatttaatggacatttttgcgtattttatttggcaataggaattttgtgatgctttgtactggccaggctggcattggcaaagtgacgggcaaaccgttgcacttcaaaggctcaatgtttcatcgggtcatcaaaaattttatgatccaggcagcgatttcagcgccgcaaacggcacaggaggttcccattttttcatgttcttgtttttgtcggaaaatgagtaaatggaagtccaaatttgatagttttgaggaaaaaaggggcttgcccacaattgcattggcattcaaaagaagggtcttttcggtgtcgtcaaaatatttaaatacactatagaaagaaggattctatagtcaagtcactcagtaagtgagtggtacaagccaaatacactatagaaacaagagttctatagacattcactcagtaaggcataagccaagtatacgaaaactatagaaagaagagttctgtatccaagtcactcattaagtgagtggtacaagccaaatacactagaaagaaggattctatagacaagtcactcagtacagaagtacaccgcctccgcctcaggatgacgaacctcacgaggaggaagaggcatttgcagagccagcggaagtgctgcctcccgctctgatagaaaatgcaaaattttcagaaatttactcattcttgtttgaaaaattctttcaaatgagtcaaaaaaattacaaatgattttttcatgaaatccgttaaacactcatacctacagtcgtcttaacctactcgtctcttaaaaaactgacccaaatgatttccccagtttgctgcttgaacctgattctcatttcttcaaaatcgaagcaacagcgaaagcggatgaattcgtcaattccaaatctaaaacatattacattatggatgcaattcctcaattctctgaccgaaacctacgtcaattcatcactgtcattttccagcacagcgcatcggaagccagtctccacaaaccaattttgttcatcgtcatcttgtatttcaagcgtcaggttgttcactctagattttttgtttgcagataattgttcactaatttaaaaaacccactggccaatggaagtctgtgaggggccaaaaacaccggaaaaacgcttccgattgttgggatcaagcatttgataataagtgtcaacattggcatggtaaaaattgccccccatgacggctgacgtacatcctgtgagaatgtaaaactcacttcaatcaaatgctgtggatcaaagctctcacccgtatccaataagatagcgttcacttctgttttggagccaagcagacacatgtgtttggcgcccatacaagtcattgtttgcgtagttctgatcaaccatgtctgttgttgaagcacttcttttgagtccaaaaagaagcctgacacgcaacgatcctagccaagggggtgccaatatctaacgacagagactgcgcttcttcaccaattggccactgttggcgatgacaacgtcggccaacgtctagaaaagtgaccattaaatggaaactaatttaaatatatattaaaaaaacaaaccagacaacgagcacacataaagtgcttaaacgagcgttcacagacaaagcccaaagcgccatcttccagctctggcttttccatgcacacggggtatatttcgaatgttgcttcaacagtcgtctaaaaaagcagaattttgtcacatatttcatctgcctaatacaagtgggctatagaaattttatagactaatttaatttaccatgaggcggaggcgacacttccgctggctctgcaaatgcctcctcctcctcgtgaggttcgtcatcctgaggcggaggcggtgtacttctgtactgagtgacttgtctatagaatccttctttctagtgtatttggcttgtaccactcacttaatgagtgacttggatacagaactcttctttctatagttttcgtatacttggcttatgccttactgagtgaatgtctatagaactcttgtttctatagtgtatttggcttgtaccactcacttactgagtgacttgactatagaatccttctttctatagtgtatttaaatattttgacgacaccgaaaagacccttcttttgaatgccaatgcaattgtgggcaagccccttttttcctcaaaactatcaaatttggacttccatttactcattttccgacaaaaacaagaacatgaaaaaatgggaacctcctgtgccgtttgcggcgctgaaatcgctgccttggatcataaaatttttgatgacccgatgaaacattgagcctttgaagtgcaacggtttgcccgtcactttgaagcagcgccgtctctcagcctttgacaccgatttttaaactgtcttttaattaaattaataattttttttaatttttttctatacaaaagcaaaaaatggcatactttaattcaaacaataacagtatttaggtaatcattttaaaaaaatgaatcaaaatttcgagtttaaacgagcccctcacccgaggaaaacactcggtgttcgaaacggcattctgcggtcgaatgcagaagggatcgacccatttccataccgccgtttccataccagccatttccataccaaaaatttttcgaaaattttcaggtaaaattcaataaatagataggggtttttcaactgttggatgtttaatatgaattataaattcaatggattctctcccataccaaaagtatgaatattaaagacagtgaaattaaaaatccaagaaaaaataacattttatgtttcaaatggatgcaacggtttgcccgtcactttgaaaaagggaggggatcgtcgtggaagaagggtcgtaaggaagggggaaaatttaaaattagcacaatttccttagcgaaattaatacaaaattcaaaaaaattttcccggcggcgcctatcggcaccgccggaccgcccgccattccatcccccttcatcaagttttttggaaaaaacgcgcaggaaaaaaattcgtattcggtccacccttcccaatttcttgaaagacaaatccctattggatacccaatctcccaagcctcgaaatcccaaatcatggcaaacttattgtcatctgaatgtgtaattgacgtcccctcccccaaaaaacctgtcttcgttctcctcctccccctcctcttccgtgtcatgggctgacgcactgcgcttcttcaccaattggccgctgttggcgatgacaacgtcggccaacg

SEQ ID NO: 764 - DNA, 4182 bp, Heterodera glycines
  unsure (1)..(4182): unsure at all n locations
gaccatctgcgatgtgtattttttgaaaatctattttttcaaaatacgatcatagttatagtatttatttggtaaaacaattaatttgttaaactgattacaaattatgttttcaattcttcattttatattgtgctttgaccccctccccttttccctaaatttttttatgttttcaaaagtcatttaaacatttttacaaggattttggggtctctgatcacgaatccggcacccgaaaatagcatttctaacattaaaattttaaataaatatattgaccattttttgataactttttgttgagaatatttttttactttggcaaattgaaggttttgttcgcttcagacatgcacctgaagcttcaaaaagcgaattcgcaatgggtttttgggtgcaccttttgtggacaaaaataatttattgggaaaaatgtttaaggtttcaagatgcagcgctaatttttttttgaaaaacagatgtccattgagggggatgacgttcgcgggtgggaaggacagacgatgttctacatggatggccggcacctacacactcccccaattcaaaacaaaattggccacccttttgggcgggagggcggcggagatcatgttcaccgggaccagcgtcgggcatgtgcaggatgaggacgagtggctgcttttggcagatcacgtaaataaaattaaaacacattccaatttgagtccagggtcggaattaggcaaacctatggtcagatgtggaccaggaacctcgagattttacgggtagtgatataaaagttgattagggaccacaattctgcaccgttgctcactactgcattagcatcatgtctattatgaaagaaaatggcatatagttatgagcaatgaaaggcaaataaaattttttttaatttttgggagtttttaaatatttgcgccaaaaagccatttttaacatgcgccaaaaaagcttgcgccaaaatacctgctccaaagtgggcggtccccaataataaatacagggtacacccccaaatcacgacgccgaatctcgccgaaacaaaattaaaaattcttaaagatggccctaataactccgggtccgaggagaacaagggcacagcaccgcgcattgatgcaacaatacatcgacgaagcacacgattatgccaatggcatattgcaacgacaccgcgccaaaatcgaaagggtaaatttaggcgtttaggggcccgaaatgaatatggtataaaaaagatacggattaaaaagtcgtctttttactgtccaatttgaccattactgaaaaaattaaagctatttaaaaaatacgaatcgggtttctatatgaaccgaattattgtaaacactgatgaagttttctttttatggacaggccgccatcgtgatgaggtttcacccccgaaaaaaattgttccgtcgcgagttatcgaggtatagttgaaatgccaattttgttttgttcattttttgtattgtcatgccatccccgtcctggctgggactgacccggttaggtggtcgattggcacatgagttacagcaaagacaaatcgatatttcgggttttcgtaaacgttccgctttgattttctaaaaaaatgagtgtagcgactttttgtgtccacaacaccgaaaaagtccgaattgaggttatgacgaaattttttaaaattttgtagattaatatagaaaccaaaagaactaatcgaatgttaccaaaaatatggttgataatgagaagagttgttagcaacgacgccgagacggtcggcgccgaaattagcgattttcattcttttttgggttcactaaaattctgagtgcatgtttgttattttagtaataaaatgtgattttaagcattctcggtccgccaacagttgtgacacgtgatgggcaccagcagcgtggacgtgtgaatggtaaccacgtgcttggcttttaatactgtacatttttaattttcattggcaagaagagccaataaatccgcaaaattcctgactcgaaaaattacattttgaattgaaccaaaaaagtaggcgtgactacaaaaaatcgaaaattttttcggctcgagaaactgaaactttcgcacagccctatggcttgacaaaacgcacaaaatgctttgccctcaggtgctgtgcgtggttttggtcctgcccgcgtttctgattctgttcgactccgttggccaacacacaccgaaaagcacggcgtggcgctgaagagacttcaaagacacactagcggacgtcacggacaggtggaagatgatgggcttggtgtccagcaggggactttcagatttacaagtgtcaaattgactaacaaataccaattttgtcttatgacaaaagcctcaatatttaagggtctcgggactcaaatgagactgattttgaatgtcaagtcaagttctgaacggtaaaaaattttcctgttttaaactacataaacattccaatttgaatccagggtaggaggcgaatattgcctaattgtaagccaaaaaatgcaaaaggtgattattcaattcattcactcattcattcatggcaatttgctcgaggcgccaattgaaaaattttcacacaaatttacattcattgttgtataaataaagcccaaataatgccgtagggaaggggcggcaatttgatgaaaagtgccaaatttgatgaagcggaagttacccgagagagagaaaaagtttttttgtcaagattcggcatgccatttaaggggggagcacagcctcgtaaaatcgcaaatttttaattcctaggcctcaaattttgaaagtgttggattccgttaaacccattttatatgtaaggctcgagaatcttgagtttttgaattttccgagactctcaaatttaagattttcatctaaccattggtcgagactctcgattaacagtttaatcatcaaataaactaaaatttcgcatttttacgcaaaaaagtattactgtaattctttagttagttctttgtatactgtaatctcgagactcttgaaccacccattttgtgctaaaatttatttggccttttttcagcaaagcaataatatgggcaaactcgcggcagctactgccggcgcaacagcacataatcaccatcaccaccatcaccataaccaccaccaccgtaatcatcattatcacaacaataatcaccattcctcatcgtctgcgcgtaacggtagttcgtccgccgccgcaacaactacggtagcccaccatgtggctactggtgaacaagcaacaggcggaatgccaacattgccattggtggtggcatcattaagcaacggcggcaatgccatggacaatgccactgtgccacgaactccagcaagtggtggcagcacatttgacgagctgttcaaaccttccaccaatggctactgtagcaccaacaacaataacaacaacaccaatagtgttatgaatacggtaggtttggacagggaaagggaaatatttcaattctctcccgggtactgtagttacagtacaagtttgtgtcaacgtttccaaaattccttttgccatattataagtctcttccacagaagggcaaatacatactgtatactgatttgtgatcgcctcctttatccctttaactgatgattgatcatttttccttcatccatttaacatcgtagtttttcttcgtcatactgtatacttttttttgttacagcagcaacagcagctgatggccacccaaatgatggcgcatatgttcgccgctgcgcaacaacagcaacaacagcaacaactgatcagtgctggcggcactgatcagcaggttgccgccgccgctgccgctgcggccgctaccacactgatggccaccgcgcagatggccgcgcatatggccgcggcatccgccgctggcggatttggtgggtgtactattattgcaatgatcggctctgatcagtttcttaatcaatattttggtagtaattaccatggctaagatttgcccaatcaatcatcaattgatctcatatgatcaacatttttcactttatgattgngagtaatattatcactgatatacatatatctgctatttattatcaanntgattnnactnatggattttggatttattgccangntttctggatatg

SEQ ID NO: 765 - DNA, 3736 bp, Heterodera glycines
  unsure (1)..(3736): unsure at all n locations
gggggggggaatgagagcactntcattaattaatggtatcaaaattaaattcgctttttctcgagactctcggcttaattgatacttctacaacgaaattccattcgcatatttcgcgatatgcatattttacgtgcatattttggcattttttttaaatactcaaaaatttgaaaaaatgggaattatgccaaacataatgtccaaaaatctcaattttcttcaaaattaataaagtttacatagctttattttgtattttttcttctaaaaagatgttatgcatttttaatataaaaattcattagcgttttaatcgattttttaattaatttccatcggaaaacaaatttatgtttttataacaaataaaaagtacaaattaatcaattgcatgttgtagacttatgttttccggatgtattttagtttttgttttgttttttgagcagacgacaaaaaataatcgtggcttaaaaattactaaaaaattaataattaaaaaaaatgcccgacaaatcaaatcgaagtgatcactgatcaaaagtcattaaaataaattcaatacttaataaatttcacaaatcgtctaaaaaattctaaattttttagtaaaattttctttgggttgaattttaagttttgtttcacttatgttcaaaaattctcggcatcattaagccctgcttgcgccggaagaatcttggcacattgcgtctcagttttgcttcagtcccgacaaaagtcgctttattcccctctccctcgccccctaattatccatgtctaatgtggccagggttagcaccgaataatggcaaattaaggctttaattaactctattaatgcgcttcccccacggagcagtacaaaacgttgccggacgaatttttagaccataacttctttttttttctcaaccaaattaaaaaacattcatgatattgttctaaagcacttgagaaactacaaacttgcaaaatcaaaaaaagaaaaattcggacaataccaagaatgcttaatttgattgaaaatgaagaaagttatggccctaaaaaaatcttccggcgatgttttgggggttcaccgcttcccccatcagtacgcctgaaatagcaatgcttgatcaactccctgatcactttttttcatgttcagctgattgcttgttcttgtccaactcggcagctttccaccagcagcagcagcagcaacagtcgcccatggatttgatgtccgtgctccaagcattggccaccgcttcgtccgccgccggtgccttttccgcttcgtctcccaccgttgtgtctgcgtttggtggcaccgctgcttcgcaacattttccgtttggcagtgccggcaccgtcaacgccgccatctctggtgcttctccggtaaccgtaggcggcggcacgtcggcggatgcgggcggctttttgatggcagccgcagcaatggccgccgcgggtggtgccaatgcgtgcggtggcggtggagtgccaccgcctacgacgacgtctggcgcggcaacaacgccgcttttgtcccaacttacgctgccgctaacaccgtcggcaatgccatcgacaggcacaggcaataatagtaacggcggcggtagcaacggttgtggcggtgccggtgccaccaacggtagcagcaacgcgccgtcgccttcaccgcagaagcgagcacgcacccggatcgcggatgagcaagtgaaaatccttagacaggtgcggtgttgataggataaggagtgtacggatcagttttcggcgccgaccgtttcggcacggcaccgcccaatttgaaatagttttggccataacttttttttgtagccttacgaaatttttgggtttttcagtcaaacagaaaacccttaagggctctatcgcaagttaccaaatttggagttataataactgatgatggtattaatggtacggtatcttccttcccttacagtactttgacatcaacaactcgcccagcgaggagcaaatcaaggagatggcgcacaaagctcagttgcctgagaaggttatcaaggtaaaatgggttcattgaccccaaatactgatcagtgatcaattaccattattcgaatcaattaaattgccgctaattaattaattattattataagttacaaattccgtaaataattaattacatcactagcacccacacggcgattcaattttgggctccaagtacaattaagttggttttttcgtcttagtggtctgtgagttagtcatcaaaaagggggtctcaggttcaaatcctccttgtgtttgtgtataaatttcaattttttaaagcaaataaataaaatattaataaaaacagaacgccaaaagaacaaatacaaatagtggaaggtagacattatattttacccttgattttattaaatttttttagcttataactttgtcaataatagaccaaataaaaccattttatgctcattttggagggaaaattctgaagaatatttcttaattagtcaaaagtttaaaaaaattgtttattgacaaaaaaatgaaccatgtgttattttatatgttagagacatggaaatagtgcgtcaagatgagagaaaaagaaaaaactttgtccttgaaaaaaattttttcctattgaccaattttcttgaaattttgcataaacacatattttaacccaacctactggatgatgctttgttttttatcaaaatgctttttaactcgagatcggctcttccgtttttacaagggaaaatccccataaaatttttaagttttgcaaagttttggcgttctgattactaaataatatcgtgagacgcattcgcaaaaattagatgttttactgccgataaaataaggaatttttggtcaatccttgattttgcatgtttactgattgaaataaaaagttcaaaaaatgcaatcatatcattacatttatcatatcagctaatacaaattccctttgcctaactatgcctcttcattggacttctgtggacactcgcaacgcacttttgtgcgccgccgttccttccattggcgccttcgtgggctcgacgatggccatcaaagatcaggaattggttcaatttctcaaggtttgctgcatcagaggtgagcaattaattccaaaaagcttttagaatcaaaactttccttctttcgcccgttgttgcaaatacaattatttgctggccaacactgccgtcaccattccgttcggttacgcttcttatttggtctacaaaattggaggaggtttgttaggtcaaaattgctaaggaaattatcaaatcaccctttgagcataacatgcttgtcgttgtgaaacataaattaaattaaaattaagaaaaccgttaggactaccaaataatggctttattgcagttcacacgagacaaaaaaagactagacaataaaataattgacaaatttttataaaaccaattttttgaagttttctagccataacttttttgaggctcaaaaatttttttttaaactgtagattagtgaaggactcttggggctggttatcaattataatgtttggttctggtcggttttatgcatcccatgcatattatgcgtcccatggatggttatcctcagtttcttaggccagaacttttttcttacttggtcaatacctatattcttggtatcaaacgaaagcttaaggtctatataagcttttgttgtttca

SEQ ID NO: 766 - DNA, 1304 bp, Heterodera glycines
aaatggggatgagagggaagaggaagagaatggcagcggaaaaaaggagcgggtgatagtggaagagagggaagagaagaaaagaggagagatgagaaagaaggaggaacaacaacaataatggaagaggatgaacagcagcaggaaaagaacagggaggaagaggaggaaaagagagagagggaagaggaggcggaaaagggaaaggaagaagaagaagcagagaggatgatggacaataaggaagaggaggaggaagagcaggcggaagaggaagagcaaaaactaaaggatgagggaagaatggaagaggaagaggaagaccgacggcatcggcatggggatgaagcattggtggaaaggcacggagataaagcgtcgtcgtcgccgccctcccattccgcggcggcatttgtcgaccccggcactttcttggccagccttggcaacccaacggcacagcaatcggcggcaatgatgcccccgctgttcccgttcttcggcactggcgccgctaacagtgcggcggcaacgccgggtgcaagcggtggtggcatggagtcatttgcctcaatgttctcgggtgagccgggggtaattttgccatcgcatttcggcacttttttcttgacttttttctggcatacttagaaatttattagctggatttttatcactatgattgaaatttccggtttttgttttacattttggcactttaaagcttcatcattgatagaaaaatctattctattttggcatttttatagagggtattttgtatcctgcataattggaattttggcttaattgatcatagttggacttctcctgttgcttttgccattctggatgaattttcttttcacttaaacattggtatctttggcctaatcattggtcggattttgtttttatttttagcatttttccttggcttaatcatagatgggctcttctcttcccatttcggcactttttggtttaattacacctatcaaatgcatttcctgttccagcttttccgttccattcttttggccaattggcgacagccgcttcttcctccacacccacttccaatggcttttcctctccatccgcggcacaacagcagcagcaacaaccatctccgtttctccagccgtcgcccgccggcctcatggcagccgctgctgcggcagcggctggcaccaacaacggcggcacatttggccacctgttttcgggccagaatatgttgctgaacagtttgatgggccaacaatcggctaagcgcggcacagcatcctctaccctccatg

SEQ ID NO: 767 - DNA, 4161 bp, Heterodera glycines
gcattgggactgtacggggcgacggtgctcagcggctattttttggtgcccatgctcaagaagcaggatactaaggcggtaggcaacctacaagttcatcttcccatctccaattccaaccctttaagctgactgccaacgctgttgtccttgccggactttccgtcgccacttctgtggctttctacaacatcgacaagatttccgcttattggacgtgagttatttgggagttgtgtcaattgtatttgccaattcagcatgcccttcactctttgggccattttctgcgctggacttacggtgaaggcttgaaatgtttgaagtcggctgcctttttctggattgtcattttatgttaactcatcttttgttgagttaggaatattttacttccaagtaaattgtctcgacatttgccataacattaattatttggtaggatgagctctttaaatattttttttcaattctcaatttatcgtttattttattgaaacggttttattatgagtaccgcatccgaaagtggaagtgacaaaattgtgttccaaaaggtttgtgctcaatggtcatgggttttctgcaaaagtcgattgctttaagaatgttactgggcgaggtagccaggttttggatgacgccgagtttgttaaaatgtatgatcggtcgacttcgaaaaccttggtacttttccctattaaactgctaattttggtggccctattcagaacacttcctcagccaatgacaacgcacagtcaaaccaacagaaagaacaggttcagaaggttggtagctcatttccttctgtctgactttttttcattaatttatttttaagtggaaagtcggtgatcaatgcatggcactctacgaagtggacggaaagtggtacccggccaaaatcgagcagatttcgcctgtaaaaaacacatgcactgtctcttacattggttacgaccaaaaggccattctgaagttggaggacattttggggtatgttttttttaatatagcgaaatcccttcaaatataatcaaatgttggctgttttttgaactataaagagtttttacttgtttggtcataacttctattttgatccagtagtgccgaatttgccgcaaattcgcactttcaacaccattcggttgatctcaattggtacttcaacacttctcactccctttcattttttgaacaaactccgcccataaagcgtagaagactgtccatcgaacagccaattgtgagtttaaccagcggaaatagttgcaatgaatagtagctgtttcgatggaatttggcggattcttcaaagtgccggacattccgcagcatatcctcgagggcaaaagcgggccaaagtggcgggaaagagagggacgacctggcggtcagaaggaatggcatgagaccactgataggaagcggccaaaaacttccgattattttgcataccttcgcttcctcttccggatggccccgcgccaaccttcgattggacagcataaaataaatgaactgtataaatgttcgacttcggttgcagagcgtttcttttccacttatggtctgttctcgaccaatttgtctcattgtcaggcattgaccaaatttttgcccgagtccaattgttgcattggaaatgagaaaagcggcaccacatcggacaacttaaaaaccccagatttcgttagtgaaaacagcacaactgtccgtttatatttggagggaattcgtgacaagctcagaccaaatatgtcaggaattgtcgttagcaacgtattcaatttttatttaagtgaatccgatgttgaggctgccgatgaccatggcgatgagcgtgaagcggaagggacaagcggaacgactaaggcaaaagacaaattggagaaagcaattttccctttcctcagattgcggacaatgatgtgaaaaaagatgcatttccggtatctttttagtatatatacaaggggtgtctcgggacaaaatttttattaatgaggttttcaaaaaaaattgtttaaatttaaattttaagttttcctcttcccccccccccctcccttacgcctaacgaggtggtgcaggccccttacgataaggggggggggttgtctcgagacagaccttgttctttcacaaattaaagcgagtccgtcctaataaatttagatcccggatttatgtcctccaccaccgccatcgatgtttggaaagatagccgttgcgggcaatgagaaggaggcactgaccaacatgcttatgtcgtggtacatgtccggataccacaccggtctgatttcgccgttcattctatttgatttaaaaagcgttttaggcttctaccagggtgttatgcatgaaaagacgacccgtcagaagccaaaatagataacgttgccatacggcttaaaaatcatctcactggttgctgtccatttttattgtctctcccctccctcagttattgtttaattttcttgttcagacataaattgccggtcaacatttccaaagcaataaacggatagcctttattgaagcgtaacacacatataaaaacgtgaagcatttgaaagaatatgaaggcgttcaactacatagcttaaatgcgatgcttttgttatgggcagaagttttgttaattatggtttttgctgaaaagaattcgaaaaatggactaaataaagcacggaaagcgtcagtttgtgcatcccatggccgagtggttcttttcgcttgtcacagtcccttcaaagggtccactttcaccaccttcggcgcttgtgcatttgctttttcctcttcggcttttttcgctgcagctttctgctgttttaggcgcattgcttctgcgtccctttccatccgtttctcagtggacgtgcccttacacaaagaatgaagtgtatgtaattactaattaggaattgtttttgaaaaatagtcgaaatttaaatttgatcctttggtttttaagttggtaaatcccatcacacctgctcttgctttttttgctgttgctgtttcttcagattgcgctccctggccaagtcgcgttggttaccgcctaaagcgaaggcaaatttatgcgtaatttcgatttaattacgagtcattttatacgaaatgttcttgttgtgaagaaatcaagaaagtgcaacgtgcaagtgcaactgtaattaattggtttaacctaaactattaaattaagtaaacaattgttgcgatgaattaaacaaaatgattttaaaacgaatgagcagaccgacgaatggacaatactgacaactcagtatttcgtttgtgaatgggagaaaatggagctaattgtaagtatgacgaagaaccagttttaataaaggagtcccctcgtcctgtccctctcagcttttatgtgttcccgttcccccccccccccccctccccccacagaatgattattgtgcggcggttgagtgcttaaacatgttggaagaattggggcaaagattattgttggttattctgattcattcacacatttatatttgattatcacatcgactctcaaaaagacatatgccaatgaagagaatgccagagaaaaatgcaatactcattttggcctatggaagttttttccgccttatagattccatccaatttttgtataccggtaaattaaataattttgcacagaattatcggaccgggtcactatagtctggccgttatagtcagggggtcggtgtagtctggcaagctgtttttgcccataactcttacaaatgttttttgtcaattataaaccaggttaaaatatctatgtttagctacaatacaaatggaatatcccaattaggaaaaaagcgaaattttcagtttggcgccgcctttgttcagtcaaatttatattcttcaggcaaagtaaaaccctaatttttcacattaatttaaaaaattttttcaggtaactatttggttctagtcggttttacgcgtcccatgacactttaagcgtcccatgacattttacgcgtcccatcacattttacgcgtcccaacaacactttacgagtcccatcacattttacgcgtcccatcatattttacgcgtcaaaaaatgtttttcgaaccgtcaatcggaaactttatacctttcgaata

SEQ ID NO: 768 - DNA, 1228 bp, Heterodera glycines
atacggcttgtatgcgtctctaattataacattcctcgtatgaacacctgtgaactctgctttgacattctttcgtcaaactttgtcagttgcttttaatattaaaaattagcgaattatcttatccaaatttaccactattaataccgaggcatccaccgtgggtctgttctatacggcttgtatgcgtctctaattataacattcctcgtatgaacacctgtgaactctgctttgacattctttcgtcaaactttgtcagttgcttttaatattaaaaattagcgaattatcttatccaaatttaccactattaataccgaggcatccaccgtgggtctgttctatacggcttgtatgcgtctctaattataacattcctcgtatgaacacctgtgaactctgctttgacattctttcgtcaaactttgtcagttgcttttaatattaaaaattagcgaattatcttatccaaatttaccactattaataccgaggcatccaccgtgggtctgttctatacggcttgtatgcgtctctaattataacattcctcgtatgaacacctgtgaactctgctttgacattctttcgtcaaactttgtcagttgcttttaatattaaaaattagcgaattatcttatccaaatttaccactattaataccgaggcatccaccgtgggttgttctatacggcttgtatgcgtctctaattataacattcctcgtatgaacacctgtgaactctgctttgacattctttcgtcaaactttgtcagttgcttttaatattaaaaattagcgaattatcttatccaaatttaccactattaataccgaggcatccaccgtgggttgttctatacggcttgtatgcgtctctaattataacattcctcgtatgaacacctgtgaactctgctttgacattctttcgtcaaactttgtcagttgcttttaatattaaaaattagcgaattatcttatccaaatttaccactattaataccgaggcatccaccgtgggtctgctgttctatacggcttgtatgcgtctctaattataacattcctcgtatgaacacctgtgacctctgctttgacattctttcgtcaaactttgtcaattgctttaatattaaaaattagcgaattatcttatccaaatttaccactattaatacgaggatccacccgtgggtgtctatacggcttgatgcgtctcta

SEQ ID NO: 769 - DNA, 5668 bp, Heterodera glycines
aagttcttgggcgagaaaatttaaagcgctgcggagatgcaaaaatatttgcggccactttaccgcagtttttatacacgggaactgtcaatcatataaagaagggaacgccgaagcgacttcatttcaattccatttcggttgaggcggggggtcggggccattctttgcctctcggggcgcttgcccacaaatattcaaatttttccatcaatcatctttatctgccaccacggcacggcagcacggcatggcagtgggtggagtcagcagccgcaccatccgcaagtttacttcatttgccactttcgtctgctttcaattttgtcagcagcagaaccatcctcaatttcaattctcattgtttgtcagtttcgaccactttccattgccaacatgtcttttattgcccccggcactttcgcgttcctttcaaaagactatggggaatttccgactgggcattttgacccaaacagagcatacgacccaaattcacttgcagaactttcgtaatggcatttattttgcttccattatctttcattttttctttgtagtcaatggagaaaagagtttctggacggccgatacggatccaaacaaccaacccctccttccaccccgcgtgccccatcgcccagcttcccaatcccggtcatcgttggtaattttgaatttgttttttggattttgcaaatatctatcttgacaggaaatcgtccacaggatgaaaattgtttgggttttccacaaatatcttgtctgattttttccattttagggcggcagatgttcccaaatgacgatggatacgaatcggaagatgatgaaattctcttgccacctccgccgatccccccgcaacttggccaccctccgccaaatgtgccggtaatttcggtctcgcttttcgttgctttttctcaaatttccgagtgcttttttcaggcagttcgagttcagccaatgcatgttgggcagcagcggctgccgctgagagacctgccgcaaattttccaccctccaccaaatgtgccggtaattttgggtctttctttcgattgctttttctcaattcccgagtgcatttttcaggccgttcgtgtccaaccaatgcagcaacccgtaccaatgagagccgtgccacaattcctccaccctccgccaaatgctccggtaatcttgagtctcgttttcggttgttttttcaaaatcccgagtgcattgtttttcaggaaattggtgtgggaccaattcatgatgggcaacaaccactaccactaagagcgttgccacaattcgcccaacctccaccaaatgtgccggtaattttgggtcgtttttttgttgctttttttaattcccgaatgttttttcaggccgttcgtgtccaaccaattcaacaaccgataccattgagagacgtgccgctatttgtcaacccaccaccaaatgtgccggtaattttggctcgcttttgttactttttttcaagatcccgaatgcattttttcaggtaattcgtgtccaaccgatgcctcaaccgttgccgttgagagacatgccgcaaattcaccatccaccgcgaaatgtgacttcaatttggatcaaattgtggttgctttttctcagtctctgggtgtttcttcagggaattcatgttcgacaaattcaacgggaatacgccgtaccgcaatttgcccatccgccgccaaacgtgccgtatcatccaccagaaaacgttccggtaatgttgggtcttgtttctcatatttccggatgcttattcaggtaatccaaccacggcaacgaccgcgcgagctgagagacgtgccactattcgaccacccactgccaaacggacaggtaatttcagaccctgtcttttacctaacaccgaaacatcttttcttaagcaaatgtatgccaaccccccgagagtgctggaagtgatccgacggctgggcgagtggagaggaagaccaagggacccagacgtccgcctcaatgaatgaatggaatttggattttgataaaatttgttgttttaattttttgaattgataagggttaaatcccgttacctaaattgtttgaaaattattaaaattttaagaaattagatgctaaacctaacctttgacaaagattatgaaaaaatgaaaagaaatgacgaaatttttggaatgttccttctttttattatttatggattttttttcatgtgcattattctggtgctagtaagatattgccgaatgaattaattggttttttctcttcattttaaaatatttcacgtccccatgccctgcccacttcccacggaattgatcaaggaaataattgacgctctcccccctccaaaaacacatcggcttttgcgcgtaaattttgttttggcatactttgttaaatgtcggttttattccatgatgagaagattgtttcgcccagagcatatatcaataccaatggcccgaagaactggaatttatttctttttcgatgttcatactccccctatttattttccactctaccaataataacatttaaaataaaattataattttttatttcttatctgattaatttcgatcaatattttttgataattaaacaaattgtatttttccaaaaagaattttctcgcagtagcaactcatcgtcttttttactcccttcataaaatgtctcgcttttgccccctcgcccaaatcaatgaatcgggtcggcttaacacaccaaaggggaaatttagtgagttccaaacctatcaaattaaaaaagaattttgatattcgttttaggtcttttttacgctttggaaattgctcgaagctaccagctcatagggaaaagtataacggaaaacaaattccgttatctgatgaagacggagaagaaacaaagggaaatggccatggaattgatggaaaaggcagggataaacacggatgacaaaacttttggtacccaacaccttgaggctgtacaaaaatactgggacagggaattcccggatatgtttcgcattgtggcttttgaaatggtaaccaaattcgcttgaaaaaatatcccgttacttatttttagaagaccgggcttaggccaattttcaaaggagaaggtgttcgaagaaatgaagtgggtgtgataagagaaggagaccattgggatgggatcaaatcggcttcttggttttttggtgttcgatacttctgtgtcagctgtgaagtgacgtatgatcgacctgaaagacacagaatggagtgtaaggaacgctgcaaaaaatgttgccggatgggatttgggtttccatgtgcaaatgtatgcgaggaaatacactgcggcgaatgcaatctcaagttttacaacccgaaatgttttgaagcgcacaagaaggcggcttgtattgagtacaaaaaatgcgaaaagtgccgagagacacacaatactcggaacaaacacacatgcggggaaaagttttgcaaactgtgcaaagtttgtcacccagggcggcaatgtttcatcaaaaaaatttcaagtgcgaccacagaaagcctacagaattgtggcatacgacctagagacgactgtagatgggggagaacaccggctttaatcttgttagtgcggcacgtacttgtagcatttgtgcgggagaagagcgggaatgtgagatttgcgaaggccccagtaaaatcacatggtcagtagcggacggttttgatccaatgagcgagtttatcgtttggataatgggttttcaacgatttgaaacgattgctttcgcgcattatgctgggaggttcgattcacactttgtcttgtccgagctaacaaagaaggaaattgcgacggagttgatgatggctgatttgaaaatttatcaaataaaggcgggaagagtgtactttcgggatttttggatgcttagtcagaataaattggcggaccttccaaaaaccttggggttaaaaactgcagctaaattgtattttccacacaaatacaataagaatgagaattttgggaagagattacccaacctgccttctttgggagactactgcccggacaatatgaaggaggaagaagccgtaaaattggaagcatggcacaatgagaattttcaaacggaatttgaactaggtagggaaaatagcatttttttctttgaaaataaaatttaaggggaacaactcaagacgtattgcgaaaacgatgttgaaattttgatggaatcaattttgaagtttcggcagttatttttggggataacaggagatttggatgtgatgaaggacagcgtgacaatcgctggtgttgtgatgaagatatttagggcaaaatttttgaaggacaggcatattccgatcatgcctgagggagggtacgagaaagctgagaatcagagcaaaatcgcagtgaaatatttcgaatggctggcccaaaaaaagggagtaaaagtgcggcatgcgtgtaacggaggagaagtggaatttggtgggctgaaggtggactgtgtgattggggcagagaaaaaaataattgagtttcaggtaaaagaaaaaatattttctttttaaaaaatacttaaggggtgtgcatttcacgggtgtccgagatgttttttaccttggactatagcgccaaacggacggacaatggaagagaatcaaagtagaaccgaaattcgtatggaaattttgagggaaaagtgcaaaaatttttcaatcggagaagtttgggtaaataaaacatttagaaatatttattaattgttagttttagaagtgtgatgtcagagaggaattgaagaaaaataaggagatgaaaaagttctttgaaagtgtgccggacaagggaccgatcaatccgagggatgcttatgccggaggaagaacgatgccattttgtttgtacgcaaaggctaccgaagaaattgagatatcaatgttcgacatcattagtttgtacccctttgttaattatggtaaaattctgcttaatttttgttagtttcctttcgcttaagacaccccataccccgttggagtcccgaaaattgtagtgagcaggaattttaatgtgaattggacagcacccgacgacgtaccctatgatggacttttgaaagtaaaagtgatcccaccgaaaaatcttttgtaccccctcctccccgtgcacatcgatgaaatgctcctcttccctaattgttggtcttgtgcgagaagggccaaaaatgaatttgtgatgacaaaagatgtgaaaaaatgtaaccatcgtcccacgcagagagcatttttggggacattcacatcaattgagttgcggaaggctttagagctaggatatagaattgtgggattctatcgagcgtatcattttgaacagtttgacaatcaactgttcaaaggatatgtgcggatgtttttgaagataaaggtggaggcgtcggggtggccggcggaggtgaaaagtgaagaggaaaagagagcattcatcgaaatgtacaaggcgaaatacgatatctgccttgattatgataagattgggttaatcccggaataaaaatgattgcaaaattggggaaaaataaaaaaaatcctctaaaaattggttcaatttaaagggattaaaaagtttggggggaaaa

SEQ ID NO: 770 - DNA, 3898 bp, Heterodera glycines
atatattcgagttaagtctataaaagggaatgttaaagcgttctgaaggtttgaatatttcaaagggattaagatctgttcggccataaattattttatgagccatgaacagatcagacagctttcgcctgctttcaagtgtcggcagttgaaggtattctaatctttgttggtatggaatgggtggaaggctgcatttaaaaagaactcttttggtgaaatatttttgacatttttcaatttttttaatgttttttagaagagatggattccaaacctcaggagcatattccaataacggtctaacataagttttgtacaaaataatccaaatcctagaagattttgatttaataaccccgaaatatagaacgcatacgtaaatatgcattctttattatttgtgtgacatgattggaaaattgcaatttattatcaatatttatgcctaattccctaatggatccccacatttattatatttccctcaatttttttatttcttttggggttttattcccccaatgaaagaacaaaaattttttaattgaaattttgatttccccttaattttgccccctttctggtaaattatgcaagggttaaggaaaattctggaccggaatgggttaaaccaaattaccaattttactccccccccatataaatttttttttcccccccggggggaaaccctggaaaaacctaaaaaaaaacaaaaaaaaaaaggtctgggaaaacccggggggggccaaaccaatttttttgggggggaaaaaacccccccttttaaccaaaaaaccctttttcaaaaaaacccctttacccccaaaaaaaggggcccccccaaatctcttttttttcttttttaaaaaaaaatattgggcgcgggccccgagttttttttaaaaaaaaaaaaaaaaaaaaattttttttttttttttttttttttgccgcccccaccccccccccacaggcttaaataaggggcggggggacatttttaaaaaaaaaaaaaaaaaaaaaaaaatttttttttttttttaaaaaaaaaaaaccaaaaaaaaaaataaaaaaaaaaaaattattttttttttttttttttattaggaaaaaaaaaaaaaaaaacacacaaaccaaaaaaaaaaaacaaaagccgctccgcaaaaaaaacccaaaaaattttttttaaagaatagtcctaatttggaaaaatgtttcgaagaagaggggggagttcccccacaaacgaaaataaaaaatttgggataaaagagcatgtgacaactttctattttaaatgcccagaaaacgaagatcccgaaaaaatgtttaaaaaaatcctgaaaaaattaatgggggatgcaatgagccgagaagctgagccgggctggaaaattgagaaaatttcagtggacctttattgcagtgccctgtcagaccccgtgatcatccctgcccgccccttccaacaatcgaacccagacattgttttcaacgagttcatgcacagacagcaatcatttggggaagtgaatttgttagaccagagaatttcaataattattgccacttattctttccctgttaaataaatttgtttcatttttccctttcattattttttgtttattacaataattatttattcgaccttttttctttattaatttttcagttaaaatgtactcgtttcaaaaatattttgaggaggctctcgaaaaagaagattttttctgccagaaaaacagagcagaagtggaggcattgttaattgaggcttcaaattataaaattataatacacagggactacgaaagccgctattctgattatattgccacctatcgccgcaccccactcttctgtttctgcatgattgagagaaatttaagatttttttacgacacaggaaccgggacgcctataggaagggttacaaccgtgctacatgttaccgttgaggcgagctatacaggagaggggttcatttcgcctatgttttccttttggttttattgggagggcaggagtcaaacaacaaacgaatctttcacgagccgtctttatttgtacactgtttcgatgctaagagcaatgggcaaagcctggggcagagaactacttttgaaccctgttgaagttttaattgatatgttctaccaacgtatagataggttggaacatagaaaaaacaattaaaaaaaatattttagagatttggtcggatcgtggtcattgttctatagactcccaccctcactttttgacacttcacgccgggtggttgcggagaataaactggaagaatttttaaaattaccatcattttttcgcatgcttttttataataaatattaaatgttcatgttgtatttaaagtgaaggttttgacccaaatatttaatcaattttaatttattattttttcgtagaaattcagaaaaaaatgcaaacaattgctgaaattaaaaatttcgagattattgaaggcggaagagtttttattgtgagagcgagaattgagaacgtagtacatgtggagtacagggtttgtattaaaaatgaaaaaaatatatcagtttttaaggcttgcgttttatgccgtaagggggcgtgttcatgtggcgttgagaaggcactgacaccttatttgaaggtgtctgtggcagatgatactgagatattggaaaatgtggcattttttggtgtacgtgggaagaaaaacggaatggtaatgttttaaagaaaaaataccattctaatttaaattcaggaggagttgagaggattgtctggggccgtgtgcaccatgaaaatcggcgcgagggtgaaagaattcggagggaagaaggggatctattactctttgatcgatattgttagcctttaaatctataaatgaacttgttaattttttctaataaaaatgttgggtttaaaattatttttcctctttattatagcgaacgcggcagaaagctgctgctgcatttcaaaggaagaaaaacagcaattaggtagtatccgacgaacaattgaggccgtatttggagatataatcagattaacgaaagaggccaaagatttttctttctcggcacataataccatggttgaagctcaaaaaataaaagacaaaaaccctagtgttcacggggtaaaattttggcatgaaaagcttttaaatggggtaagaaagatccatacgctatttgataaaataaaaaatgaggagaataacattaaaaatataaaaaaaagtatggaaaaatgccttgacagaaaagatgcggaaatgtgccaagaactagcggatgaggcaaaacaatcaatagaattagcaaaaaattatagaaaggaaattgggcaaacttatcggaccgcttactcgcaacccgatttatgcattggagacttggccaataaattaaaagaaacaatgcgagaaaagcaaatacatttggaaaggccaagaccccaaacagaatttagagacgaatttattgcatataaaatataaaagaaaaatttaaaaaatgaaaaataaaaaaatgaattctgaaaaatcagaaaaagctaataccattttggtggaagctgaaaaaaagagacagaaagagcctggagggatgtagctgcgttagcagaagaagttggcgattttgccaaatcttctcgggaaacgcttaatcgtgcaataaaatctagggaaaaagctccgtatgctaatggtgttcgggaattatatcttaaaatgtcagattcaatttgggaaattttcaaaatcatggaccaaatcaatttggagtcaataaaggctgaatctgcgtggcgtgagttcgaaagatgtaaaacaatggaccaggcaacaaagtttgaggaacaatcgcaaaat

SEQ ID NO: 771 - DNA, 4862 bp, Heterodera glycines
aattggataaggaggggagtccgaaactgctcattcattatctagcccattcaagacggcatataagacaatgaatttatttgagttttattttgtttaggccactttccgtgcaataactcgtggcgaacgacgacgccatcactgtcaactttttgatcagagtgaatgtgaagaagagtcatcctttttataaatgtcatttaaaatcacttgtgaaaacgatctttcaaaattaaatcatttttttgtttttgtgatcgtctctatttccagtagaaatcattattttgtttctttccaatgctatttttctcccatatatgttcgttcttgtggaaccgaataaattttgtcgtcaactttcctatttttcaaaaattattaattcgtttttgcgagaccaaatgtgaaatttttttaaatatcggcgtgcaaaacaagaaaaaaacaacaaataacaaaaagtgaggatccaccattaacgcattttgacgtcctccgcccccctttactcctcctccattttttccttcttgaccttctttttggcggctcggtactcggccaccaccaccgcgtggtcacgttcgtacggctcgagtgttacctaaaaaagtggagggggatttccattgccaagatgtgacgatttgcttttttgtgcgtcctaatggttggacaattttacaagaacgcaatccattccaatgcaacatccaatccacctgctcaatgggtttgaactgctcctcgcgcaatttgttcacttcgccggcaaacaccgcctccggctccgccgtgctgtccacacagttcgccttgatggagatgaccacatggccgttgttcttcagaaatttgtgcgcattgtgtgccacaatccgtgcctggtccggctgtgccacgtccgagaaaattgtgtccacaatgccaatctgtgcgcgcagtgattttaggaaaaaaacttgtattcaattttgggaagacgaaattgacacgtaaaccaaaaaagatggttttcaaatttggattaaaattcaatttagaaaactcgcaagagccgaaagtttaagcgaatgaccctatttgtgaggaaattaggtatgatgcaaatagctaattgtaagttgactgaccatcatggagtatttgtgcgggtgccgtgcgtcgtccacaattggcaccacgttgggccgcttcttggccatgccgagcaggtcacgtccactgcgatgtgaaaactcaactgcatagaccatgccttcctaaagaaagaaggtatctatttacaaatccaagacaaaaaaaattatttggcatacgggtccaacgatgtcggacacatgggaaacggaagtgccggaagcggcgccaagataaagcacacgggcacctaaagcatgcaaatattgcgcatgtgaaaataaatttgagtagaaaaatcggtcccgattcaatccgtaccggacggtttttcatgaaccccgtggatttataaatttggcatccttttctagccaacttagaaacataatcacaaacgaaagaattagaatggaagttcgaaactaatgctccaaagcatttacgcagatgaaaagcttttaggcaccaaattccggcaaactcttgattttcgacttttgttggagtcagggtccgagatttgaaaacggccaaactaatgcaaacacgaaatcccaagaatcatgcacccaatgtttttcatcgaaaacaaaagggttatcaaccaattgcgagtgcttgacggaaactgacccgggtaaatgtgcgtgtcctcaatgccggccatgacggcggcggccagtttggagcggaacgggttccacacccggtactcgactggcggtgccgggccggcagccgcggcggtgggtgctgagacaccgttgctgccattcgttgtctcttccgtcttcggcgttattgcagcaatcggcgcattttcggtctgctgggaggagatgcgcttctcgccgtacaccgactcgcccggcaccatgttcagcgtgcacagcgcgtcctccttgcccttgacgatgaaaatgcctgcgggaaattcgacggatgatctgatcaggcgtgaacacaatcaacctctgatccggtgcggctccacaatgaccttgcgtcccccgcgcatgcctccgccggcgccacccccgcggggtgaaccgccgcgtccacgtggcgagccaccgcgtcgcccgcggcgaaccaccgcctccccgaccgccaccaccaccgcgtggactgcctcctcgaccaccaaagccacgcttaagaatttcaaaaaattttttgcttttatccacgcatttatcgcgaaaaaatcaatttgagattttgaggaattttgggtggaattttaaggaaattggtccgtcgttaccaccccagggaatgtgcccagttttgagagcaattcaactcgttcctgatggtttttggatttgtgtaaaccgctccaactatttgcgagtgcatgaagttgaagatgtacggcaaccatttggagtccttcttcaattagtttgtcccaccttaaaccctccgccaccgccgcctccctccccgttgctctgacgaaaaccgccaccaccaccgcccccacggaagcctcgaccaccaccgcctctgcccccacggtcaccaccaccgccacggcctcggaaacctttgcgaaagagaaagaaatgaagcaaatgtatggaatcgaatagccacttgaccaatgcgaattcgtaaccagaactcgaaagataaatcgaaaattttaatttttgactctgggttcgaaccccctagcaaacgtatttaagtccagaaataaactttagaagtgcttgtaaattaaaaaagccctttccgtttgtgggttttaatgttaaaaagctctttttaactttctcttctcacctcctcgtccgccgccaccgcgtggagaaaattcgggtcttcccattctttgattattatttttgaaggatgctgaaaaaatgcttttgcggaaaattatttgataagaaaaaacaaaaagtcataaaaacacaacggtcaaaacgtataaaatcatttgaacaaaacaaagtttggaaattcagtaattcattcaaatgcaaatgtacactgtgaataatagagaaaatggagaggaggaaaagaaatgagaaacgttttaaaagttccgaaaataccgttttttcgtaaatttctaaaaagaaatttccaaccttttttttacgtttaggtaaattaacccatcaagtcctcccgcaagaaaatggaaaaacattgcaaacaaataataaaaataaaatgatcaatcaaaaacaatgaccttcttgctcaccccccccccccccctccgttgttgttcatgttggctttttggtgattgcagcggacgtctccaacctgggggcgggcggtttgaagttggcgccacggaagggctccaatttgcgctcctttttcttcacaaagtcgcgccacgagccgcgccgctcgtcccggctctcctcatagttcttcttgtactcctcctccaacttgcgcttctccgccgcctcctgcaccgactcggccaaccgccgcttctcctcgttggcccgctcctccagcgtccgtcgcttcttctcccggtcggcaaacacctgcaaaatgtggtgtatcccttttcaaataaaaaatgaaatctgattctggcattttgtatatcgcaatttcaaataattgacaaagcaatccgatacgacacccatttcgacaaatttcgaaccccgtgcccgaattcaaacattaagttaaaccttcaattttaaatcttcgatttcttgtttgaattcgggtaccgtggttcgaatttaccgaaatggatgtcatattcgtggtttcgataggatagaaatggtcattttttggcaattttttgctcatcccaaagccttttttgggtcaaacgatatactgggtttttgaacatttcaattgacccacaatatagttaaaaatgagaaaaaacctttgtcacggtgatccaaagtgcacgtgcgtagccctgtggtgtttcttcttcaatggcgtcagcttttccatcctaaaaatgaatacattttaaatggaatttcgatttttgagataaaaatgggaaacctttcgcattttgcgcttcttctcgctgatttgcactgccagccgcgctttggcctcctcgtacatgtctcggcagcgtgacaattcgtccgggtcttcgacggtggcgattgcctatagaacgaaaagaatttcaccgaaacttgtaaaatcatttccgaattttttacttttttgttgaaattatataggggattggagaaaaacaactcctttcatccttaaccaattaaactttgctaacaaataaggcaaaatgcaatgactgaataattgggaaagggaacagagattaagaaaaatgaatacgatttagagtttttggtttgttttatccattaattctccaatcacttataaattagtaataattgaatatcaataattgtcttagaaatgctgataaagtatgaaaggaactttgcccacatacaacttaattggtggtacttggagagtattgggagccaggaaacaacccaatccatctccatgagtcatttttctgattgcgagaaatgtcagatggaaggatttggtgcgtacctttttcagtgcgtcaaatgcgcgttccgccctctcccgacagttcggatttttgtccggatggatcagcagggacaacttcttgtacttcttgcgcgcatcctccacatttgtgtctggctccagctggagcacct

SEQ ID NO: 772 - DNA, 2082 bp, Heterodera glycines
attttcgaattcacctgtggaatcctgggttccgttgaatttctgctcgttgtcattgagtttcgtctcggtcaaagctttcccatcggcgctggtgagcttcaggagattcgtcttgaccaaggattgaacaacagcgcacagctgatcgccgggaaagtcggtgccaagagcgacgtgcagttcgccaagtgtgtacgtgttgcgttcgttgtactgcatgaggacggcaatttgttgcgtgttgcactgcaaaaaaaaacaatttttgaataacttatatgatttttcggtgaattgaatttgattttatcacgaaatccttatttttaatgtcgaaattgcttaccaaaaatgagtatttcgacgggaaagtgttgctcgtcgagaccaattcaccgcggcacatttgcaacgcccaggtcagcttacggccattgaaacggttggtgtagtactgagtgtaggctaaaaagtaatgggttcttccctttgggagttctctccaccacccgccttccccaaacgtacagtcaatgcagtcgaggagaggacgcgggatttcgaatttgaccggctgctgcagtggccacacgttcgacatgacgacaatgacggagaagtcaacgttggatgtcctcggctgctaaaatgggataaaactgcctcaataaaattaaaatttcgttagcgacctgcttgaattgctcggagtggtccctgctcagcgcgacatcagtcagcaatcgctccaacttggaggtgtactcgaacccgcacatgtgcttcagctttgcgatcatgcatcgctcctgctcctcgctggctgacgtgtcgtagacgaggcgcttgcacaaaaacttgtggaaaaacgcttggaacatgtccttgtcgtcgatgtatttgaagacggtcatctgacaatgggatattagtattttaaaaaaaagaaattgatggaacatttcaaactttaaagtccaaacaaacccaccacttgctccaggttctcatccatcttctcgtcctccatgttgcgtgcacttttgcgcaaaagctgatcacagtagaggaccaacagctgcggtgatttggacgcattccgagccatcgccgtaatttcgttgttgttgatgaacttgcggaaggcgcagtccattgcttgcacaaagccatggtcagttttgaaggaatccaccaccaagcgattgtagagttcgtgcctttaaaacggttcattatttcctaaaacccgcataaacttacattttgaggatacagctgatgtattgcttcggatcgttgaacgcctcacgcgcaatttgctgaatggacgccttgccctcccgttcgatgtactcctccaggatctctttgagcttggccaacccgtttggcacacgcgaacaaagtgtgtactgaaaaagaattttatgcaaaaaattgagaaaaagtggtttctgcaagtctcaccatccgtccaagatggtcattctgttggcgagtgagcaatgactgagaaataaatgtacaatcatgtaaaattggcaaaaaaatttcgctacctcaaatttgtcgtggaagagctcgaggtgctgcttgatcaacgccgtgtcacatgcctccatcagcgagtccattgtcgtgttgtccaaataaatttggcaccggtcccgctcttcgccaagcctctcttcaacctagaaagcagagagaaacataatcaaatttggtttcataaatgagacgtcaccgattcacccacctttatcatatagtcatcaaaaacatgacgcacattattgtgtcacactaaaatcacagaacagacactaatgttttagcaaaaacatgacgcacattattgtaatgtcgacattgttcaaattgtccgtctttttgtcctgccgccacaatttggcatcgctccaacacaaaattaatatgtgtatatacatcatcatcatcttctgccttcaatgtcagcttttctttagtccgttcgttcaccaattcaaactgcgcaattgtggtgtaagttttgaattggattatgtaactggcagaagagttggcacggag

SEQ ID NO: 773 - DNA, 2391 bp, Heterodera glycines
tcaaaatgcacaaaacccatccaagggtacctcaagaaagcgctgctcaaagtagttgcggtccacttggtatttgacactcggacgatgcaccaccgaattctgctgctgttgttgggcgaccgcagctgttgctggtcctccgacgtccgccgctgggtcgtgctcgttgatgccaagttcgactggaaacaaggaatgcaaattagcgggtgttcgaacgaaagagtggcggcagaatctggtcgccgaacgaaagacccattccctgactccccagccccgcctcggggtccaaatttgtaagcaaaagcttaactgtatgaggcgaccacgccgctgatcagtcgcgtggtgatgcgttccccgttgcggtccttctccaccagcgccagcgcagcggacgtgatgttgtggtgcagttcgtcaaagatcaccgacttccagatggagacagccaactgaaattcgagaatttaaaaatgaaacccatccccaattcatgtatgaccgtcaaaccactcacattgtacacttccaaaattccgggacgcaccgcctcgtcgatgttccgtctgatccaatgtcggttcaagtaggaaaaaatgccattcaccacagtggaggagaactggaatttggtccactgctcggtgtagtagtccagcagctggtcaccggacagacgctggcattcctgaacaaaaacaaatttgaattcggtatcctgtacaattttatttcccacctccccaatttgtgcaaaacaacaaaacctgaagcaacttccttgtgtactcttcgacgaagtggcgcagtcgagtgtagagctcctcgccgacaaactctgcaccagccgttcccgccgtcgtgcggttgccccgacgcgcccgattgttcgttgtttcgtgcgtgaagtcgttctgctggttggtgcagtaattgaagacgagactaaaaacaaaaaatcctaatgttggcacatggaagaagttaggaatgcttttctcttcgaaaagaatggtcaaccccaaatttttaaaagcggtgaatgctgctgcccaaatttcactacccggtttatggtggttccatgtttcggtatctgcaatcattttttatcgcgaccctcttaagtctttcataacagttaaacctgttaaaactaacgtgtaatactccatatagcgctgcggtgccattctctcctgcgtcttgaagatggactcaaggccgggcaaaagatccttccaaattgtctcgaatctgaccggatgattattcatccttgattggcagctgacaacagtaaattagaagacaaatatatgtgcttaagtatcgctgaaaagcattgaaaagcgttttgttgtcattaatcactataattttatagttgcagttttggaaaacaaaaaattgctaaatttgggttcaagtgcactttaagcgtccaatctactgttagaagtccagtttaggccataactttctcttggtcatacctacattcttggcatcaaaggaaagttgaaagtcctctgaaatttcataaacacaagaacgagtaaatactgacattaagaaaaaaattacaacgagatacgaaagcagccgtttttagaatatatcaaaaataatttgctagacttcaagctcttgcttgataccaagaatgtaggtattgtccgagtaagaaaaaagttatggcaaacgaaactgaagattggacttctaacagtcaattgtgatgcctaaaattcactagagcacgagcaattgaaaaaagggcagtctatgctagcaattagcaatagcatattcctaagtttatgtttttgtgattcaaattaaatacataactaatttaaaatgatgaacaaagtgcatttaggcacatggaaaatttgattattgaagataataaaaaaaaaaacggcacggcatagaaagtgaagttttcaaaaaagtaaataatggcaaaaaatgggatttggtcgcgaatttataaacataattctgcagcggattacctagttctcaaaaaaggacgcaacttcttcttcttctctttgtcattcatttttcctttgtttctctaatggcaattttatgtactatttctttgaaaacattcgtgttaaaaacttttttattttgaagcaaatccaacgtcgaaatcagcaggaacatcaaatcaaaacctttttcataaactgcgccaaatcgaagaataaaaaaaaatgccagaatgccgatttcagattccgacatttttaggcttggaatcccgattgccgaaatttttgaggacgtcagcaaaatccctggatggaataaatgtctctttccattcaattttattagcattaatttaaaagataaaatttt

SEQ ID NO: 774 - DNA, 3404 bp, Heterodera glycines
  unsure (1)..(3404): unsure at all n locations
cggttactgtactctaccgtccagtgagtgtacggtgcncggcgtgccgtcgtcgttactgtgcgcgaccggtggtggcttgggcagcgactcttcccgctccactgtcactaccggcgcgtcgtaggaagcggcagcggcattttcatcctcctcttccgctgcttcggcttcagccggcggtgtctgcttttgatgttgttgctgttgttgtgccgtcgttgaatatgaacaaaacgccaaaaataagaaaagtgccaaaatggtggcggcggcacattttttgtgctccgacatatgaataatatcagctgaacgcaaagcaatcactgatcaaaaaatacacagcaaaagtttttaaaagctgattagtccaattcagcagtgcacattttccgtatcggatcagtgatcacataatatgtcctaaatatgattgaaattttcacatatagagcaacggattttgaactaaatagagaggaaaaaaattcggggaccgcaaacgagaagccggatttgaccgaacgagaatctcgaatttgtagggcgtgaatatttggtttggcaagcggatcgtcgttaaaccctcgtagttctgcttgctgttcaaacatagacgtaacggaattcccagttttgactcccaacgttttcaatagggttcgagccccgcccccgcccccgcccccgggggcgggacaggttttttgggctcacccccgcccccgcccccgtgactctgacccccgcaacccccgcccccgcgaccttcacccccgcgggggcacgggggtgaaaatacacccctaagaatggcatattcgtgcgaaataaggcaaaaaatttagacaattttgaattttttttaactatcgagaaatttttatgaaataaaataaattttacttgttttttattttatttgtggattggtggataaatacagggtttctttatgttcttgtttctaagaaatgttctgatttgggggtaatgccttattttcatttaaaagaagaaaatttctgaaaaatttggctaagttctaacaaaattcatataaattcttaaaattttccccggcggcgcctatcggcaccgccggaactctcccctcgcacattcatcaagtttttttttttgaaaaatgtgccgcaagaaaaaaaatttaaaaaatctgagttccaattttgagtaaatcacgataatttaatatagttaaaaaacgtaaatttatcgaaaaagtcttaatttttttggtgaatatctgttagaaataaatttaaaattcgcccctatcggcacgccccccccaaaaaaaaaattttttcttaaaaaaaattacccaaaaatccctaaattttgggatcgagccatttccctaccgccatttccctactaaggcatttgggccatttccctaccaaagtatgaatattaataaacagtacgattaaaacaagcaagaaaaaatgcatttgagaaatgttcgatcattttgaattatggcgacgaataagagtgatctgaccattttttatgctcgtttttactctctgatttgttgttgttttccgtttaaatataaattttctctctctttctcgatgcatcccttgggtatgtacagggctcccaactctgctgattttcaaagcttttgctcatttctaggggtcaaaactgattatttgatgagatgctgatttgctgctttttgagaaaatttgttgattttttgaaaaaagagctttacgagttggtggccgaacgtttcgtcactgaaataaaataaagaattttaaagggaaaaaatattaaaaattatatacatagatacataatctatttgaaaaacactagtctaatacatatttaactttctgattcgtaggccgattaatttgttttagaaattggttcgatcatgagaataacctttaacctcccccgtgttttggtggttatttgtgggttatttctgacacttggctaatgttgagttctggaagtgtgttaaactgtgataacaagaaattttagggatgacaaaatatatccttgaacctaacccagtgtggtactccttgttttgctacccccccccccccgaaaaattttaaaaattaatatttttgggcttttcaaggtcactgatcatcatcaatatggcgtttgttttgacatctgctgatacctggtcatagactggacaaaatatctgtgattttttaaaatattttggggagggaggcgtagcaaaacaaggaagtacccccagtgttaagcattttgttaagcgaatgtttaaagatttggtcgctggcagcacattgtatccgattactataatgtaacggtcaacgggattatgtgaaaaggccttaagaaagtccatttatctgcaacacaacaatttgtaacaactctttgctggattcaaaaacctgcgggacaagacccattgaaaatttattcaaaaaactaattttcgaacgcccatatcttttttctaactcatccaatcggttagcatttgcttagaaaaagcttcttctcatcaattgctttcgaatgataccaaaattttcaaattgttgccaatttccaaaaactcttacaagagctcattttcgggatggtgtgttatgtatgtgaaatatcacaccacttaacacaaatttaatgctttttggttcaaaaattttattaagtatatggcatagtgtttatttttattttttttatttcagtgacgaaacatcagggagccttacgagttggcatagcacgagttatgtatgattttccattttaatcgtttagatagtttgactttttcataactagggatggtaaaaatatggatataaaatcgcgaaatatggccataaaatatggactaaaaatcgcgaaatatggacataaaatggtaaaaatctcaaaatatggacataaaatggcaaaaatatggacataaatttttctaaattgaggggtaaattttcaaaaaaacccgaccaaaaaaccgaaattttccattttttgcttatctttcacataaattaaccaatttttaagaaaatttaaatttaatcaatttttttgacaaaattttgctaaaaaatgtctttttcggaaaattttccggtctttggggttaaaacggccaatttagctgatgggggccgttctaataggggtttttttgggaaaatgccaaaatatggacataaatcgcaaaatatggaaaatatggatatagaaatccatcttaaaagcttcaaaccaagctaaaaacatgtttttcgtgcgtttcaggcctcccacattccaggaaaaaaatatggatttccatataattaccatccctaatcataacgtttgccaattttcaaaat

SEQ ID NO: 775 - DNA, 2105 bp, Heterodera glycines
ttcagccggcggtgtctgcttttgatgttgttgctgttgttgtgccgtcgttgaatatgaacaaaacgccaaaactaagaaaagtgccaaaatggtggcggcggcacattttttgtgctccgacatatgaataatatcagctgaacgcaaagcaatcactgatcaaaaaatacacagcaaaagtttttaaaagctgattagtccaattcagcagtgcacattttccgtatcggatcagtgatcacataatatgtcctaaatatgattgaaattttcacatatagagcaacggattttgaactaaatagagaggaaaaaaaattcggggaccgcaaacgagaagccggatttgaccgaacgagaatctcgaatttgtagggcgtgaatatttggtttggcaagcggatcgtcgttaaaccctcgtagttctgcttgctgtccaaacatagacgtaacggaattcccagttttgactcccaacgttttcgggattcggaatctcgacttccgatttttctttgagattcaaaggcttctttggtgctggccgggattaaatgctatgctattgtatagaataacgaggtttggaaagaaagtgtcgaccgcttcaaaacaggacagaaaagaggaaaagcagcagcagcaggatgccgattttgaaggtgctttttaacggaaagtgccgcccacagcacaaaaaaaagtgatttccgtctgctgctgcacccaatttgatccacaatttgagcacggatcagtgacagcgaccgacggagcggagaatggaaggaaaagaaaggggaaaataaggcgaaggaacgaacgaacgaatgaataatggttgatgaagttggctgtgctgctgatctgctgctggttgcacttttttgttgtttttgttttgtttgtggcgatgcgatttgtctgtttccgcattttgtttcgcgtcacttcggcggcgcaacccatcgatcggtttttagtcggttgccgcgacgtgctgttgttgctgctgcagatttaggcggtgttgggaaagcgaatgtacggggggggggaataattggtgggaccggcgccgcagggcggggggggggggtggtcggattataagagcacgtatccactctctctccctgattttgccatttttgatgatgatgctcgagagtcgcggcttcgagtcttgttgacagaaaagtcttcgtctcgctcgtatcgagtcttgggtccctaagtctcagtctcgagtttcgagaatttttcagtggtttttcgctgacaacaattcgacgccgcaagaggccgaattgccagagatgtttatttttttaatcatttttggctgtattttttttctcatttagcaagctaatagggctaagactttccaaaacctttcaaatggcactaattttttaaaatatttatacaataaaaatttaatctttcgtatccacaaatatttttcgtacaaaattttatggtgaattaaaaagggataaagggagggatatgatgatggtgatgaagtgagggaatctcttttactgctgcggcactcattcccctcctccaaatcattttcccacttcagcggcaaattcccatcgacgaataaataaagaggagaaaccctcgactttttgttcaatggattggaaaggcgggaagaagaaaaagggagggggaaaaagaatgcttttcaaaatcaacggcagcagcagagagtcagtcagctcaacgttagttttcaaagtcacacttttttggaggagtcttagaaactcgaatatttaactttttatgccgaaatattaaatttataatggcacttagtgaatgtttagattttactagttcaatgcgctttgtaaatgtcaaattttagaaaattttttagaggatgttatggatgagcgtccgccggctgggtgcaccccaaaatttcgccgccgaaatttctccgacgaaattactccgccgaaatttcgccggacggaatttcgccggccgaaatttcgccgggacatattttcgccggcgaaattactccgtaacataatttcgccacaaatttttattaatatatttggaaattt

SEQ ID NO: 776 - DNA, 1630 bp, Heterodera glycines
aaatgccaaaaaaacaaatagtgaatgcctttattcgtgtggaaaatgcgctgctggtgaacacaaattccgacaacaacaatttccacccaataatgatcatcttcagcttcgctttcgcatcgtcggtcctttgtctttcggttgttctcttctccctgcgcttgtcgctgcttatgctttcttggctgccgccatcttctttttgaccgccagcacggaagagcggggcgggcacggacagtagccgctgtccttgccgggctgtcccggtgctccgggctgtccaggctgtccaccgtttccaggctggccgggctgaccaggcgcgccaggtgggccgggcggtccttggcctccgggctgtcctggctgaccttggcctccggggtttccattctggccaggcgctccgggcggtcccttcgggccaggaatagggcgcctgaacgaaattgaatcgggtttaattttacaaccaatggttaaagtgtacttacgagacaactccgttcgctccaggctgtccgggttggccagaggctccggggcgtccgggctgcccaggctgtccttggggtccgggcgcgccaggcgttccaggtcctccaccttgagcgggcgtaccaggctgtccaggggctccttgctgtccgggcggtccctgtcctccggggcggccgggcgggccagcagggcagcgtgggcaggggatgttctggggagggcaaggagcagctgcaatgggaggcatgattattagcaggggggaggtcagccaaaaaatgccaaccgggttggccaggctgtccagcctgtccgggctgtcctgcgcttccaggctgtccgggctgtccaggcggtccagccgggccgggcggaccagggggacagcttggttgttggaggccagcgcactggcagtgtccgggcagttgacgcttggcacggaagatggagttgaaggggttcgcacggggcttcgacggcggcgtcaccaccacttgcacgtccatcaagtcagtccatgccgagtcggtgttgacgcggaaggcctggaaaattggcaaattttggtgcattcattgtttgagtgcggccggctgagtacctcaactccgttgcgcactttgctgttcatttggctcatctccgagtacagagatggcagagtgacaactgtggcgatgatagccaacagcgagcacaccgaggcaatcccgagaacaatgtgagtctcttgcattttgcactaaattatttatgaatttggtgtgtccaaatgtaaataattattttttgaggggcgagggtttatttcactggaactaatgaatttgaaatgcccaaaaataattaatgctggtggtggagttacgagaattactgcccgccttttatatgtgaatattttgccacttttttctctatcaacccattttccttctacccattttgccctcggggcattttcgtatagcctttgcgctgtttgtcccccctgggggtacgtctcattgtcagcccacccccccccctttttgccccttttcccctttcgctgttcttttgcctcttttccttttttatcgccttcgtcagtcatttcaatttccattttttcttgttt

SEQ ID NO: 777 - DNA, 1042 bp, Heterodera glycines
tctcttttccatctctaaatggtcatttttggaatgtttctttaatttcatttctttttgtcataattataatttcgacttgtgtctaaaatataatattttgttgtaaaattttttttattcttaaaaaggcatttgcttcaccactttccaagtaaaaaatatataattgtaaagaataaacttatgggttatttctgagaataataactaaagctggcagattcttaattagcaactaaaactatcacagaaaagtttcttatattttccataacatgacatttttacgggagggaaattattattacttaaatacattaaaatattccccaaattaggaaataataggcaataattttttcaattatttacagtaaaaaaagataaagctaaatttatccagcaactgcagcagcaggttgcaattatcgttttggcataatctcaatttaaatgatgaaattttttctaaaaccttaattatcatccaacaaaaaaattcaattgtgcccttaaaaaaattcattttctcgaaatttacgtgcatagaataaaaatcaatgagaaaaatgatcttttctttcaaatcatctatcactgttcactctttgattcggcacagctttattgtataaaatttgccaagaaaaagcataatgaagccatatttactaaaaattcaaatttatttaattgaaaaaaaacaaaattgtacaaattatcattggcattccgaaaccaaatgcagaacagctgttattgtctaaaaaatcactttttatgaaagacaaaataatattttataccactgtttgtgttttcatcggaataagttttttcaataattgttgccgtctccgtctcatttttggaaaatgatttttccaaaattggcacataatttggtgttggtgttgaagtgaccatttcatgtaaattcattttttttggcacaatcgtagcgatttcagataaattatatgatgctgttagttgttggattgtcgacataaatgacacactcactccatctgctaaa

SEQ ID NO: 778 - DNA, 2872 bp, Heterodera glycines
  unsure (1)..(2872): unsure at all n locations
aaaattatttntattcttaaaaaggcattgctttcancacttcccaagtaaaaaatatatattgtnaaagaatnaacttatgggttatttctgagaataataactaaagctggcagattcttaattagcaactaaaactatcacagaaaagtttcttatattttccataacatgacatttttacgggagggaaattattattacttaaatacattaaaatattccccaaattaggaaataataggcaataattttttcaattatttacagtaaaaaaagataaagctaaatttatccagcaactgcagcagcagcagcaggttgcaattatcgttttggcataatctcaatttaaatgatgaaattttttctaaaaccttaattatcatccaacaaaaaaattcaattgtgcccttaaaaaattcattttctcgaaatttacgtgcatagaataaaaatcaatgagaaaaatgatcttttctttcaaatcatccatcactgttcactctttgattcggcacagctttattgtataaaatttgccaagaaaaagcataatgaagccatatttactaaaaattcaaatttatttaattgaaaaaaaacaaaattgtacaaattatcattggcattccgaaaccaaatgcagaacagctgttattgtctaaaaaatcactttttatgaaagacaaaataatattttataccactgtttgtgttttcatcggaataagttttttcaataattgttgccgtctccgtctcatttttggaaaatgatttttccaaaattggcacataatttggtgttggtgttgaagtgaccatttcatgtaaattcattttttttggcacaatcgtagcgatttcagataaattatatgatgttgttagttgttgggttgtcgacataaatgaaaaatcgtctccatctgctaaaatgtttggtttaaatacttttttattggcagaactcaaaaaattagtcaaaatacatataattataattgattcttgattatacgccctttcaaattcactaataattatgaatcactgagttttgcttcttttcagatttttttttgactaaattaaatgttaaatggactaatgtaatacatttgacaatttacagatttttcgagataaatccgtcaacttttcataaaaacaaccaattaaatactcttggtatcacacgctagcgcatagattgctttttggttagtactttctgaaaactcaatgaaattttctgaaattttatgctaatagagcaagcccagagctatcgtaatatgtagatttttaatttggttgtgtttaaaaaaagtaacgaaaaatgtgtaagtttggcagttttacaaaacgacctagcacccaaaaaatcctttacagagatgggtaatgcgccccgatagcttacaagggatatcccgaacggtgtctgccaaatcagattaaaacaacctttaccgtgtagagcatagtggatttgcgaaatgcggaattaatcccgcaggatcccctccagacaaaagatttttagttcaaatcccgcaactcgatccgcaaattagaaatttccaggctctactaactatattaattaattaaatgtttcacctcctcctgatggcggcattacaacattggttgtattgtacagcgggaaattcttgttgctcatgtcgtccattttgcgtccaattgtacaaaatgaacagctcacagcaaggccatacaaatctttcatctccttctcaacattgtcgctacatgcacctttctccgggcttttggcacacccataatgcgtaagccattcatttccttaaaatatttgataaagtgaattatgacgagctaaaaatgccatccacaaaattgtcgaatcatcctaaaaaaaatttagtctaagggatttgttcctggaatcccggcatttttgcccctaagaccggagagaataatcctaattttatatacatattaactgatacgggttcgaatgtcaaattgtataaatttttcagtatagtataatgatgaacagagttgtaggctctgtatttaatagtaattaagtcacatgttccataccagggatgggctgaggtttcgcttttcgcatttcgcctttcgcattattcgcattttttggcgtttcgcatttcgcttttcgcatttcgctttttggcgcgaaatgcgacttttacacccctaagaattggattaaattcccaaaaaatttttcaaaattttacctataaattggctaattttcagtgaaaaactgtttataaatgatcaaaatttccaatttttccccggcggcgcctatcggcaccgtcgcgcccccaaaactcctattttttcttagaaaatggcccaaaatcgcaaaatttggtaatttgatgaaaaactgttctcagcggcgcgccaaaactcttatttctcattagaaaaatgatacaaaaatcacaaaatttgatgattttttggtgaaaatctgtcaacaaattttaatcaaattttcaaaaattttcccggcggcgcctgccggcgacgcctgccggtgccgcctgccccctccctcttcccaaaaagtttttttggaaaaagcgcgcctcaaaaaagcgttttattgatttttaaagttggaataaaattttaaaaaatgatttttgctttatgattttaactattaaaaagttgtagaaaaaatttcgcttttcgcatttcgcttttcgcattttcgcatattttggcttttcgcatttcgcttttttttcatttcgcatttttcagtttcgcaaatttcgcttgtcgcatttcgctttttatttttcaatttggtccatgcctg

SEQ ID NO: 779 - DNA, 4570 bp, Heterodera glycines
  unsure (1)..(4570): unsure at all n locations
tgttccatacctctgttttcattgtccaagcataatagtacggttccaaaaaagcctttttttctntaagaggattatgatggtttcatacatgacatttcttaattttcgagtcattcttaaaaagtttggtcaagtattttcgtttatgagcccatacatttcttccacctaagatcggggaggaactctaattagataagacttgaagcattaggttgaactttaaatccatatttgtgggatataaataagaacagagttgtgaactcagtatttaagtagtaattaaactccttgacccatatttgggttttaaattgagtcgtgctccagggaaccgtcaaactttaaaattaattaacattcatcattataattacccttttcaattcgtttaattggtcttatttaaccaaagtcatacctcttaaacaatgcgaagcataacaatatttgtatgccgattgccagaaatatgttgactcgcattcttcttcggaaaagttcatcttcaagccaacaccgtttattgtccctaccgtatcccttctgcatttaagctgggctagaaagaaaaattaataatttactttttttattttaaatttaataccatttgaacaaccaagtgcgtttatcataacaataaataagaaaatttgaagtaaattcattgctaaattatttctttaaattaagataaataaaaaaaattaaaaataatgcatttaattatcacaataagatttttattgaataaaattgattttttttaattttaaatcaaatgatgaaattaatgagagtgaaatataattgagaattaccaatacaactaatcaaacaaatttatgaatgtcatttatgctggattttaataaaatatttaaaaggcagaaaatggctgagtaaataaaatgaattcaaaattttcatattataaaaatttaaaataaaagacaaattatcacaaagtttgatgcaattaaagagaaattgaaggcaattggaaaatatgtttgggaaaacagaagcagaattgagacaaaaattggtaaattattaggcgcaaatcgcaaaaaaaaatatacaaatgaaaaaagaaatgaatttaaataaaaataaaatgatgaaaaagagtttttatgaacagaaaaagaaagaattcattgaaagatttgatgaatttaaaagtttatattgccaaggaaaacagaaagaatttgtgaaggtattgggcatttctgagttgacatttagaaaacggaaaaaagaattagcgccaaaatatcacaaaattaagacgattttaatagttattttgtttaattttcattttaaggacggtattccaatgaggacaattgagaaagatgaagcaatatttcaaaattaaagaaaacaatcccaaaactagtgacaaaataattgccaataaattgacaattggcttttcaactttgcaacaatggaaaaaggcttcattttcgaattgaatgatttggtaaaatatgtttacaattgaatttatttctttttatttttcattccgtcacttttattataaataaattcgctgattccaattttcagtgccgttttttttttggttattattctatggtttcacaaatttttagattattttgagtattttaaaattggtttttgaaaaaaataaatgataattgcatttaaaaaatttcacttcacttttttatttttattattataataaatttttatcgaaagaattgatttttatttgaaattaaatgaagaaattaatgataatgtgaggtataattgagaattttcaaacacaactaatcaaacaaatttatgaatgtcatttatgctggattttaatagaagttttggaggaaaatcatttcgggggattccgaatgtcccatggattcctaagaaaaatggtttcctttttacaaaataagcccggtgccgagttatgacgtgccaaattttatagttttttatgtataaaaaaaaatttgcatgtattttatctatttcaaagcttttaaaatgcatttcatatttttaataattttcattgcttttaaaattgaatccggaaaaatccaaccaaattttggcgaaatattcggcaacgcatgggacaataataaaagagaagaaaaagcgatcaaaattgaacaaaatgagcaaaatgataactcagcgacagttgatcaaatgggtgagggaaatggaacgtacccaaatgatcaaaagaaaagtgaaatcattagcaaatttgatgcaattaaacaaaagttaagagaaaaagaaaattttcacgaaaagaacagaaataaaattgagaagaaaattgctagattattaggcgcaaatcgccataaaatatataaatggaaaaaagaattatatttaaataaaaataaaattttttatgagaagaaaaagagagaattcattgaacgatttgatgaatttaaaagtttatatggccaaggaaaacagaaagaatttgtgaaggaattgggcatttcttatgacacatttcgcaaatggaaaaaagaattggtgccaaaatacaataaaagtaagataatttgtttttctttttttagagaaatttgagtgaatttattattctccaccttgcgcagcgggtttcaaaatttaatcgacttttgccgggttcaattttaaaatcaatgaaaattactaaaattaaaataccacaaattcaatttataattattttaaaatattttttgaaatgaaaatgtgttgattaatttttgagtttatttattttatattagctgaaaatgaaatattttgagatggcaggaaaaactgcatatactacaaatttaattgtaaactataaaaagtaatagataaaaaaaccgtaggcctataatgttaaacgacgactattccttaatcatctaaccggcattcaacagcttatctacaaacatatacaatttttttattattttttaataaattttcggctgcataatgacataaagattaatcgattaaaaaatcattaggccatttaagcgtaggcgaaatatgaaatattgccaatgcttacgtgtagttttaatttctatttgtttaaaatgggaattaaattataggaccgatggtgaaatgccccaatagcctcggttttaatagccaaattactccgctctccggataaatgtgtgatgctaacattcttatagacggacgatatgagaaaagttaattaatgatcgcttgtacaatgaaataaaaatttggcggagatttatgttaaaatagaaaatatttttagtattatttaaaaatttttaaattaaaatcattttttagcaccaatgacccagggacggtcccacaatttcggctccggcagtgtgcaaataggcgatgctgggaaaattttcgaaaattttctcattggtttaggattttacgaataattatttttaatgaaaaatttgggagagggaaacttgtaaaggaaagaaaccaatatggaaaatcaaaaaaaaattcacaaattttagcaaagagctaaaagtcatctaaaataaattataattagttggtgaaccttcaaaactcgaataaaattcttaaattattcaatttttctgaagttttagcctaattatccataaatggcataataatgccctttcccacacattttttgattggcgagaatttcgaggcggagaatttctcgggcttttgctactaggctcttagtaggtttttttttgaaatttctcaggtactactttcacggggctcatttatcgaatgtgattctcgataaaaaagcttctttttttgcaaccccatatgaataaaaaaattttagttttaaaaattttcctttttcgaaaacgttataaaatatttaataatcatttaaatgaccaaaattaagttttttggttaagttttacgtgttttgcgccggaaaaatccttaatgcaaaaaccggtaccggtaccaactttttccaccggtaccggtaccggtaaaatccaacgtaaaaatttttggacaaatttttcaatacaaaatttttattcagtttatttatttatttaatttatttattcataaaaaataaaaaagtcatcagaagggcgagaaccacttactctgacgactatcagataaatgtcgtagagtaagtgacaaaatatatggatgatcacaggaattaaaaaaagacaaaatatgtgaaaataaataaattgaggtcaaagtcaaatgaggtcgaaatatcaaatcacttagaaatttgttacattctaactttcccggtcttacatattaccctagtgaacttttaagttttattttaaattgatttaaagaatttgtttttattagttctttatcgagttgattccacaattttgttaccctcccagcaaagggaatgaattttttgccccagtttgtattttgtgttaaatctataaaaggggatgttaaagcgtgctgatggattaaaggtagaaaatagtttcagatctgttcggccataagcaat

SEQ ID NO: 780 - DNA, 3126 bp, Heterodera glycines
ggggatgaaaaaaacttttgatgtattgggggggcacaacttttttgggtaaaaaaaagttgtgccaatggaatgtgttgcggcggtgggagagtgattaattatttgtgtgaagggggggggggggtgctggtgtgttcacggcgctgcagcgaggaacggcggcgcgtggagaaagagaaaagagtgtatgcaaaagtgagagagtgaaacggtgagagagagggagagatagagagagaagaaacaaacattgggtgagagagtagagagacagacagtcagagaaaaattttgtgcacaaagtgaggggttgagaaccaaaacagcatcatcttttgctaatggagaaggggggcgctgaccaatgccattgacatattgattcgatactccaaataaattgggctcattttagcataattataccattaaatttataatggaattgttttatttatttattatttatttattttttgttagatagtacagtattactttcatggcaccacgacgcaaaagaaaggcggctcaattggtcgggcaggacgaagcggtggtgaacggaccgagcgcacaggtgaattgtgttcaccatcaaattttcacatttaaatttcatatgctttttattttcacagttgccaacgaatgacggacaacaattggcgtcagcagcaccagtgacaaacaatggcaccgtccaacaagcggagaacgacggaactgatgcggtggcggcagcagcagcaattgatgacaccggcggacaagtacaatttttgtattttcgttagctaagggcgggcgcttttggtttaaaaattcaccggatggtataattgaggatgtaaggcacacaaatgcacctttttaataaaaaatacattttcctaaagccaagagtaaactgggacgcttcgtggccaaatgtatgagctgatgagtgatgagtgcactggccggccgaattgaaccttttcacaatttaaatttcatcatttaaattttaccatttatttcaccatttattttcatcatttaaaaataaattttttcgtatatttattcaaaatataatatggaaaaaaaaaatttgacaaatatttaatgttccatgtaaaatgtggtgcacactcgacaatagggacatttatcaggactgggtgaaatttttaaatgaagaatcaaacactgacggcatagtccaacgtgcccacaggccccaaagaattgcgccatccctatagtacacaagcacatcccccctatatttgggtacaacaaagtggcggggaactggacaagtgccaatgggtcccccccaacgaaatacggctttcgtttcgctaccagcttgaagtgcggcttccattgggttgcgcgctgccgttgtactgagctgctgttctctggtcagtggcccaaactcgcggctgatgcgaccgtagggttgtcccatgcgcatcctttcacaattccgttccctcagtttttcgcacaccctgcaccgggccgaatggcactcgccgcatccttcaacagaacaatttggttcaaaaatttttttgacaaaactatattacttgctattccaaacagcgatggtgcaattgaagatttgcggcgggacattttatatttttagagggtttgtgtaataagacaatgaatggtccttccactcgctttgtccctatccatgtgcccccccctcccccccccccctcagtgtctgccagattcaaattcggcaagccaattaatcatcaccccagatttcatctgaagcaaacacaaaaaaggaaattgagggactgtctcaaaaaatgtttattgtgcagaattaaatattaattcaaattatggattgcatcatcaaaatccattattgtcttttggtcaaagttcactttttcttcattggcgccaaaaggtcggttgcgcggcagttggcccacacgcattcctcacacatctcaaagccgaaggcaaaacggtccccctccaggcgcttcactttctgctggttgttgtacagacgattccaatcatctcaaaatttatggattcaaattaaaatttgatgaaattgttattaattattaccatggcacaaataggtggtcagcaaaaatttgccttttgccaatttccacaactctcggtcgtccactttgcgtttcttcgttgccaactcatccttcggctcaacatttttggccgtctcttcatgtggcttgggcgactcgggaccaattattttatgttgctcagcaggagcagtagcagtagtaagaggagcaatgcgtcttttcattttgacaaaaattggtaaaatgattctgggtttttggcaggcaaaatgttttggcttttagtgggcgggcatgtctaaaaccgtgactcttttcaaatagtgtaggcgtggccacacttttgcgcaaataaaagtaaaatttttcaacttcatcccactttcattctcctgccatggttcttgtaagcacattttgcgctcagcttctcaactgccctgtcaagtcattgcgcgaccggctcaaccacccagaggatcgggcgcttgtgctgaaacacatcattgggcgcaaagcgcgcacgacctacaacgaccgtaatgggatgaccaaaactttcttcgtcactggaatttcggcacaaggcgccgcatttcttcctgcatatgggcaattgcgcaacccgttcaacatcaatgtggcggcacatttttatgcacggcaccgcataaagcttcacttcccgtatgcaccgtgcataattgaacgcttttcgcggggaggggaggatcggcactacccaatggaacttcttgagctgattgatgacaacatggacatggacatcaacaacaacgagcattggctgggccgtcttttcactgaaattgacgacaaacaatcgtcgtcaaactcatccgacacaacaatgcgcctaatatttgagagagacatggatgaagacagcggacgcaatgaatgctcagtgtgtgtgtctcaccaatgtttgagcatgagtgctcatccacccagtccttcttctgcagataggtgatgagtatgtgctgctcgtccactcgtcgat

SEQ ID NO: 781 - DNA, 6853 bp, Heterodera glycines
  unsure (1)..(6853): unsure at all n locations
ggggggggggttgtttatnnaatagttccaagtatatcggtacgaaggcgtttgaccgatttctgtttagtgtgtttttcttccgacctgctggggtgtttgctggtaggaaatcgtgtggtcccaaccttgattgtagtttatttataccttttttcgctttaccaattgcaccaccttctcttgcatcatttctctttgtgtatcgtttaaagtcgaacccttgacctttttgggcatttatgttgttggctgctttctctagcaaatttttgagccccgtctttccctcactgacaagtgactctttgaggtccctaccctctaatacattggatagaactcgatttccagattcaagtccttggcgcccgatggccgtcccgatttctttcccgattggtattaggtaacgcaatagactcctaaaaacagacccgataccactaccgcgctggtatggaacccctctgaacacattataaccaccgtattggacgactacttctggagaaatttgggttaatgctgaccattcaactttaaaaggatcaaaatcaacgtgcatttttctttcttttttttttgcgttttttaaattgagttttctagttatttatatttgtttaaacacatttttttgcataaatttgttcacaaaaaaatctggtgatatttttgcgcgttttagcagttgcaaaattgcttcaaagtgcatccccatacaccgtccaaatataaagaaaatcacatgctttccgcatgagtgtgagtatggtgcttggagcgaaagttgatgaaactgaatttgagcaaaactctttaaaaatttttggatgaaagggcttagcggtggccaaattcctgtcgaatcgtagtattccacccgattttgctgctcgcaatacacggcaacccaatgtgaacaaggtgaaccgctcggatcaacgttaatcaccattgagtaaggagctggtgtggctgctactgctggaatttgatctgatggaaaacaccctaaaaaggtcgaacgcgtgactgggtttcgagcaagaattttatttatttgaacactgttcatttttaaaagtaggaactttttctaaagtgtaaggttaatgtacatgtaccgtattgaaatggcattaagttaccactggaggttcggatttcgatgaaaatttcacttatttctttgactagtacgcgatggtattggacggagagaaactgctcctctataatttcgtcaggttttccccgaatcgtaacgatacgcaaaactggggcaatcacgtcaccaatcatcattggttcaattagatcaggtgcataaacatgaaaagaagcaactcctccactcatgtctggcataaattttgcaatcgtttctttttcagtgaaatcggttgagttaaaacccaaaatgtaggccaattggtctgaaatttttattttttgcacataacgatcgtccagtttcaacgaaaatctgttcgttgcactgtcaaaatgcagaaaacatgcagagtacgctgattggaaaacttttatccatgctgtcatgcctaattctttggtttgatcgagaatcttcctttcttcgtcattcatcagtgcaatttccgcattcaacttttctgttatcagtccctctaagtgttctaaattacggccacgtagacgcaaaaaatatttatcaagctttttctgatattcctcttcagtgtcatcccaattccgcagggggaccttgcttgttgctgcacgtttttctctctcaagtagaccaccactggttgccccgtaaaggtcaagcaacgtgtcaacccccgctaaaagggcgtttaataattgttcttcgttttcgtcatcatcatcatcatcatcatcattaacatttcttttgtctctttgttgttgttgttgtttattgatgtactcggctctgcccaattgacgtgctgtattggccgcttcagtgaattttttctgtacgccttccactttaactgcgaacggtttgttgccttcttcaagcagtttgtaaagacttttccaaagctcaacggggtttgtcacgttagaggatggaattggtatttgaacattctctccaattttccattcaatttgaacaaattggtcctctgatgtgccgagtgagggccacgaatgggggtatatgatcacgcctaagcccacatcccattccgaattaaattgaagttttcttggtagtcgaactcgaaaagagtttgtgcgatttccttcaacatttgtgttggaaggaacgatcacatagaatgagtttgatgaaggcattctcatttgaaatttaaaaaaaagagcccctttatatatttttccatgtcatcgagcttgcaggaatccagctgttgtgccgttgactgtagcctttccatttcaccaaaacgtattcaacaccttgctttttcctctttcggacgaccttttcaatgtcatatagggtatcatcatcatcatcatcatcatcatttttgcgcactagcacacgacagagatcgttggcatagaaacgacccttaatcagtgaaccatcgtcatcacgtattcggtacgtgacgggaaagcggtcagtgtgcacttcggcaacagtgaacacttcgttggtgaagcgtccggtgtagcccttttggaacacgtgtttgtacttctcaatgcgcacacggtcacccacctggaaacgtggtagtggttgtttccgctttaattccgctgtcccaccaatagcgttctgcttgagttttttcctgagcttttcggcattctcaaaattcacatcaactgggcgcatttttatgcttgagttgtacgagtggtttattccatgcacaatttgctgtatcacatcaacccatttttgggtaccccgttccgtgaaatagcgataaaggcgttctttgatggttcggttggcccgctctgccatccctgcgtgaattcgcggcgaggtgtacataaaaaagtttttcacgttcttatttttgaaatattcctgaacctcttttgccttaaattcgagcccttggtcggtcaacaatgtccatggtatgtatttggagcgtttaaacaagcgttcaaaagcagcaaccatgtcggagctctttttgcttttcaccggctcaacaaagagctgtctgctcagtgtgtcgatgcagacaagaaggtacttgtagccgtgattctctcgcgacaatttgtcaaagacagacaggtctgcttgccattcggtgtgcagtccagaagcgagtgttggtagttgtttgtagcgcctcttcgcttgtctatgaatggtgtatgtgcgttgggtggccaaatagtccactacatcctttctactcatttgattgttcacctttttcgcctcgcgcaaaagcggctcaacgctggtaaagctgaccgatgagttaacatctttgtacagctggtccaacagctgttctttctttcggtctatcaccatagtgtcggtttgaacctgaagacacttttccctcctcccccttcgcacttctttttatgtccttttccatgcctaaagtcagtcaggcctttgccaaattgtagaggctgttccggaaacaaatacttttttagcaacggatcctctcttgccttttcagcaaattccttgtagcccacaggcggccctttgaattcgcttcgtttgtccctgttcaacaaatggctgacaattgcctccacgttgctcgttttaaactcggacccatctgcgcgcaaaacctttccctgatcactgactcccagactgtgccccttttttcgaatgtgtgtgatcagtgcatttttggtcatctggtagttgtgttttggttgaaggcgatcagccgtttctcctcctcctcctcctcctccttttcctgcttccccatctcttgctctgagcactctttttgctgcggcaccacctgttgacgccgtggacgatgatgattgtgcgtcgtcccactgttccccatcatctacatcaccctcttctttttccgtttctccatttccactgctgtttggtgtttctgctgctgctgctgctgcttttctttgttgtttttgggcaggtctgcgatttgataatgcccccgccttttgtgtgtagtggtgtctttgcctcctcaacccaaacgctgatggtacaatgtttttctccaatctttttggcgttgaatgatcgatcgtttgcggcggcggcggcggcggcggcgttgctgcatttttttctctctccttttcgtgctgaagtcgaacattgatcggctgctcctcctgctcgcgcaccagtttgttgagccgtttgaattcctgatggtattgtgcggccttctgctcttcgttcagctccctgctgcgctcaatttgttggatgcgcgagcgcaaaagcccaattggtgtgccgtcggcaccgtctgctgctgctgctgctgctgctgctgcttggggttgaacaaataccgactgaaagacgtcctccgggacgagaaacattcgcattgcgtgacgcattttttttgcgctctcctcaaatatatgagtgttcctgttgtttcgcttttatatatttatttatttatttccccgtcaattagtttttttttggcaaaaatttgtccatcaacactggtaagagaacactggccaacatactggctaccattgggaacccagcaccggtttgttgttgttgttgttgttgttgatgattcagcaatagcaccctgcgagctgttttagcgcaacgcgcgcgtgctaagctcctcaactggtgcttcagttcacccaaccgttgaatttgtcgcttccctaacggaacacgacccttcaacacattaaaacacatttccacaaagcagagcagctgttgatccaaagcgttctcaatcatttggcgctgactgctttttgagcgatatttagagcgaaagtggcgtaagaagtcagcatttttcaacatcagcgggctaacattcatattatgtttaactgtacgtcttcttccttttacatgcttcattttgcaacataaaccaatggggggagcccgccctgctctccatatatattcgtttttaggcgcagcaattccggactctcggggtgcatgtcaatcaataggtagccaaactgcttttcggttgcatctcggtatgcttccgtgaaatagttgtttttcgttggaaatagctgcgaggcgagtgtgcgcacttggagcgcccctgccgggttacgcatcagcaccagatagtgcgagttgttgcgcgcaacccgtagttctttcgcgaacaaatgttgagtgaccaacacaacgctaaccccccaattgtgcgatccccgggtgaacacagtgtcaagaaattgttgccccataccaaccatgagatcatccagcaccatcagcagttttccatcactctcttttgcgcgccggttaacctgctcttcggttgggcttccagcatgtacaacaaccctacagccgccgatgtgtccacttttctgtagctgtattatatttgggttcaactccccataacaatagaaaatctcggagatgggttccgaaactagcgcattcacattcctcagcattcgcagcacccattccgattttccactccccgtgctccccgagattgtcagcgtgaacgggtgtctgaattgcaaatgtttttcatcaaatttttgaaaattgtcagccatttgtttaatttcataaattgtttcaaaatacctacattttctattttatatatacatataataaaaaataagtgtgtgtgtgtttagatcattcttaaattgttcaaacaccaaatggacgcaattcttgcaaccgattggctccacaatgcgttcccagagcgaaagacaacaacaacaacaacaacaacaacaacaatttctagtgtgggagaagaattagacgatgccgtcaaagcagtgagttttacacaaaaataaatttaaaaaaataaaataaaaaaataaatgaataaataaaatcaaggacgagcaaatcagttggcttaaaattatcgaagaggaggaggagcgaggaaatgaattgcaaactggtgaaatggaagtggaacgagcgaaaggtttggttgtttacaagaaaaaaaatgaaaaaaaaatttagagattgagccgccaaagcgacaacacttacagtccaagtgtagctgtaacgaaaagcaaaagagtgtcccgctgattgactttctctgccaacactacaaatgttctgttaaagagcttcacgttctgcttcagacgctgaacaaacgtcgcgaaatttcggaaatgttgcgctctcagcttcagttacgcaccaatcatctgcgtcctgcctggaaaaattttcgcgtccattgcaacgaactgacaattcatcctgctcaaactgcatatgccatgcgcggttatcttggcattacggttttttaatttaaatttatcagctcctcaattgtatagatgatatacattgtttttaggtccgtatttactactatgtgaagcatggcgtaaagctcgtttatcctcagcttccctgtgttcatcaatttggcggtggtgaccattgttctctgtttccgcttgagtgtctgagcgtcataaaagatgcttgattaatacgcatcgggtgttttatatgtgattaagtttgctgtgttattgttgttgttgttgttgttgttgttttttttttaatttctcctagataaaaaatgttaattattcaaaatagtgaccgcggtgtttaaattacagctgttccttcacaaaa

SEQ ID NO: 782 - DNA, 2786 bp, Heterodera glycines
aaaaaccaaaataacgagttcgaacaaaatgtcgaaaagtcgaacattgttcgaactcaacaaaaatgatcaggaagacatttccagacaggggttacaccaaggggggtcaaaatgttgttatttttgcaccaaaacgacgtttagacccacttttagcagttcgaacaaatttcattaaccatttccggtcacagaacatttctaagacctcaaaagagactttaaatgtttgtacagtgactgggagccctgggtaattgaaaataacgagttcgaacaaaaggtcgaaaagtcgaacattgttcgaactcttcaaaaatgatcaggattaggtctaaaatctgaattaaataaaaatgaatataaagtagcgtaataaagtgatttaatacatttaacttaaagtaattttaaaatgcattttttcatttgaaaatattctttttcatattagaaaattaatatataaaaacgaatataattaaggaattaatatttattataaaatgagaaggatgtttgttgctgatgaaaatttaacaaaattgaaaaaatgagaaaaagagaaaaaggcaatgttaaggagcttaaatatccttaatcaacggtaaagggctgcgcatataatcaattaattgaaaaatcgaaacagaggcgtccaccatcactctctcaccgccacacgcccgcctccgcagcgcttgtggtgaagcaaaggggaaaatttttcaccatttagtcaacaattatccagttcctttcaactcaccctgtggccaagtggttaagctcctcgcttccactctcaacggttcgagtccactaccatgtttttgatttttcacgatttttcggaattttcatcataaagtcaacaattatcccatacctttcaactgcccctgtggccaagtggttaagctcctcgcttccactctcaacggttcgagtccactaccatgtttttgatttttcacaatttttcggaaatagtcgcgcagctctcgctcatttaaattattaattaaaatttaaattaattaaattctcgcgcacaagtccatccaataggtttgggttgaagggatcaaagatcatccaataggtatgggggggggggggggtcaatgtactctctctctctctctctcgaggagaccatccaataggtttgggtttgtggaaggggatgtcagagaaaaaaagtagacacactcaaattatcgatcgaaaatcaatcgataatttgattgggaatattatctactcccattttgatgttctttggtcgtcctttggtatggttcaatcttttgtaactcattagctgcagcaaaaggcggaaattcctcaacatttccggccgactttcgcattgtggcaaatcccatcgaaattcaattgaatttggcgtacccaaaaaggccattcccaactctcaacgcattggaattggttgaggcggacggacgggcaatgtaaatttgttcgtcttcaccccggggggaggggggaggcttttccttcttagcccctgactgtttgttgcccattcattcttcccacacatccaaattggtctaaaaatgtaaaaatttcacatttttcattgaattgactctcgagggaacatcttttagtgcgatgatccaattaaatttaaatcattcaatcatttgttgtgcttacaattgtttcctaatgctaaaatgacacctgtcctatccctttattaaaccttttaaggctcattaaccaccacaaatcgtcccttcctcctctcttatgcgtgccatttcccatagtgatgctgcgatgtttgtcagtttgtttttttcgcctttttctcatccgttggatcaccaaatggcattttcccccgtacatcagctgcaacggcacgtccgtcgcattgattcctcacagttcgctgacattgacgccgaactgaagccgcaatggtcgattaatgtcccacggctttgccgaaaaccatgtccatttctcgcctcagggtctggctgctgcttgtcacaatgccaatttcgtgcattattggcaacactttggtggtggcggctgtcctctccaacaaaagtctgcagacaccgaccaattatttgttgctcagtttggcatgtgccgatttgatggttggcactttggtcacccctttccatatttacatgacggtgagcaatttaggcacaaactcatccccccccccccccccctctttgggcttcagataaattcgctgcattggcatttgcccgtttttacttgctacatttactgcgtgttggacgttctcgcctccacgtcctctattgtgcatttgctgctgatcagcatggataggttcggcgattgatcgctctgttcgatttggtcagagtgcacttccccccataactcacagattggtggcggccacaaagccagcggattacaaaacgcacaaacacaggcggaggtatgtcctcccttctcctgctgctaattgatgatcttcgcaccttcgaagagtgtacctggcgatcgccttctgctggctgttcagcttgtgtctgtctcttccgcttgtgtttggcttcaacgcggacactgaacgctatctgttggaggagcaccactgcggcatttacagccccacttacatgttcggctcctccattttcgccttctttttgccccttttgttcatgtctttgatttacgggtgccattattccaactcaataatccttctgatcagctcacttttagttacatttttttca

SEQ ID NO: 783 - DNA, 3526 bp, Heterodera glycines
ccggagggcaatttctcgggtttggggccgatttgggtaacatcgccacctcagcgatggagacagtgatcggcaagtggcggtcgctggtcaagcaaaccaatcgaagattgttttagggatcgatcagaaaaaccgtaatatgatcacatgggagaaaccgctgttgaagaaaatcgaggagacggctgccgaacacgcgagttcgcttaacgaaagcgagcgggagcaagtccgttccaacgcaatttatgggacagggggggggggatccaatcacttcaccgaatcatttgatcaattcgattaccactttctgatcacatatcatttttcattccgttttggttttttcatctgatcatccgataattcttcgcttttttgcttggtcatctcactgcccccgccccatccgttcagcttcaaaacattctccaagtcacgagttcgtccgcagcttctcagacaagcgtttacgaatgcttcgatgacaaattaaagcggcgattgtgtgtttcgaattgggcagaaaaagcatatgtcagcagcgacattctgttagaggagagggaggagatcagtcaggccccgccctcctcggtgattttggacgccgtcacgactttggacccaagtttcggcaaggactcggccataagtggtaaggccggaaaaaagctcccgtaagcctcttagcatttagtgcttttctcataaatgggcatttaattccgcggcattttcctttttaattgactattttgataacgaacagcaaatgttgccaatcaaaagcccaatcagcaacaaaagatgatgggcatgaacatgttggaagtgcccaaaatgaacgcagcggcgagacgaaggcattccgaaaacggacaaagacgggtctcagtgatcagtggcagtgccaatttggtggtggacgcgcgggaaagggagaagcaacaccgacgcttttcactacaaccgcccagggacaacgaaaacgaagagaatttgttgaaagtgccgaacagaattgtaagggaaagggagagaaaaaaatagggagggggtagggagagagagacaaggggagagagacagagagggggaaaagagagaccggggagagagagagagagagaaaggagagatgccacagagggaggaagaaaaagggatagagataatccggcgatttggaatcccttctcttcaaaaatgcagttaaaaatattaagcaaaaaggtattttcaacaattagcttccctcccgccattccttaccaaaagcgatcagattccatttttaattccttcgcggggagcgcaacaaaactttggagtgaattgacaaatgaatattcataaaatcattttaaacaaaacaaaactttaaaataatgaatggattaagcagtgattcctcccttttgtggactttttctttaacaataataaatgatcaaataataatgctttttggcaggggagtaaaaagtccatgcggagactgtccgagctgatctccggctgggaacggccctcgcgctcttcccttggccaactgctcacttttgctcgcagagactccgtttatatagcgcggaaaaagttggcagggctcaaagattgggcattgggtgagttcggtttggtcggaagcgatcgatcggaagggaatttggacagaatttccactgataaaactttgtttcttaagacctgattgccaagctaaagtctaaacaggtaggcaatgagcccaaattctttcgatcgctctccttccctttttagggattggccattcgaagagaggcgagggctaccaaattggtcgctaccgtaatgggtagacactgtgcattttgtcgtgctctaacattccgttaagccgtttttcttatctgctgggccccctatttttcgatgaacttgtacaaaatttacaaattgtacaacgaccaatggtcgcatcagtccgaattcactttccattggctcagtgcgttgggttacctcaattcgtccctcaatttcttcatttattccgcaattaacaaggtgatggatgggtgggtgcctcggcgactctttcggcaatttttcgactttaagaaatttcgtatcactttttggcgattgctcggcctcaggcgaagccaacgcaagaaaaaggcatggcttcttccgccagcacagcacaaaaagaaacgaccaaagaagacggacagagacaaagagcaacaacagaaccaaacggagcagaaccaaaaaatgcagcaaaacaacggaaaaagtggcgaagagagcgacggaaaggaaaacggacgaaagtcagggaatggaaggaagaatgaaacggaggaggagaaggaggggaagggaacggcacagaaagagcagcgaaagtgccatcagaagaagcagacgaagggttcagaggagaaaagggcaaacagcgggggaaggacggacggagagagcgggagggggaggagggcaaagcgcaaaaacaatgccggggccgaagagcgacagcaaaatcggaagaaacgattcgtgtcactaatgtgagtcattagatacttaatgggctaattgtaggaaatggatgcgtattaagtccactgagccgacatttgtccattcggaagccccaaattgtggtcgaagatttggcaaacccaatccaaacttcgatgaccatttccgctggaggggagacaacgtacaggtggtgggcatgggattggcacttaatggccgaatggccaaaatttggaaagcaattccagacgatcgtcggacgattgcatccaacgctcatgctcagaagtgtttggcggtggcattgtctttccgagcggagcccatcacaacagccgcagggggtcggacatgagcaattcgtcggcatcacttcagctgcacgacatccaccaaattgaagcacagagtgccgaagaaatggcccaagcggaggtgaagccggaagtgttcatctgatggacatactcgcggttaattaaatgccaaatattgcttcatattttttttatcatttatgccattgttatgagagagtttgccatttccgtcctttctgatcggtcccttcgcaaatccctcgcaattcttctgcttatctccacggcgatgcttaatttcgctgatcagtcccgcgtttgcctttgtccatcccattatttgtgctcagtttcttcctttcccaacttatttcttacaattagctgctgcaccagtgggggttgtgcttttaattcaccaaaattggcattgtcttactgtatccgttctgagcaccgtacccagccgtatagggccaaccgccgtagtaggacgcagtcgaatagccaccgtagcccgggtacattccaccataccctaggccaccattcctcccataatagccacctaaactccgtgttgttaatttcgtcacaaaaagttagtaccataatatgagggcgaatatccgctaccgtaagaaggactgtcgtacata

SEQ ID NO: 784 - DNA, 1797 bp, Heterodera glycines
  unsure (1)..(1797): unsure at all n locations
gttggaaatgtttattgatttngatcagatgggggggggaacagaagcaggcgatgatgcgtcagtcggtgaacggtgcaattgacccactcactcactcactcaatcatccggatgatgacgagtcgcgaagattatgatgaaggggaggaggaggaggatgagttcctccgtccccaacctcagccaccaccactcaactcactaatcggatgaaatcgaacgaaggcaaacaaaacgaagaaaggaaaaaggaagaaaaaaaacatcggacaaattaatgggaaagtaacggaaaaggcggaaatgaaaatgaattgggatgccaatgccaacaatttgcatgggttgtatataattcttccccatttgctgcttcttttcatatgatgggcttcacacgtttcatgctaacattcgcctaatatttctttttccgagtcgttgaatttataaaattgtcaaaattaaattaattttttctagtaaatgtataaaaaaagataagcataaggatgattgatcattgtcagttcattccgttccttatccggatgaagaaaatgttgaaatggttgaagtcgatgcccacttttgcatcttcgcgtgtgatctcacttccgtttctgcaccttccgcttcttcttcctcctcttaattttcatttttgacaattaaaattgtggctaattaccctgtgccgatttgcgatggaaagggtccctcgccggaatgtttggcacgtccacacttggcagcattgtcacccctcgggccttcgctcccttctaaagcgaactttcagcaattagtcgtaatggaataaatgtgtggaatgagtggcctgagcgaataaatggcgttttgttagctgaacaaattgactatcagaagaagggacccgaatgcgaatttcgctggtggaaagtctctcggggagtcctaaaaagggacgggcgggggaggaaagtgccgatcagtgctgatcagcttcaaaccattggcgagcagctgatcgaccgcaaaagtcagctgggaagggatcattcattcactcttcaaatccccccccccctttcattatcccatcattcacttctcttttcgtctctgtaaatttcactcttccgaaagtgcgctccatttgactgtaactgaagttcatttgcatttggtcacttctgccgttgtcttcttcttctgctgctgctgttgctgtgtccccatgctttttcaaattttacaataattaattaaattaattatttaaatgatggcattttgcttcgatttggagtatttccatgttgtccgtgcccagctgcttgtgccgtgtcatctccacccttttgccgtgtccctccgctgctgcgcttgtccgtccgctcgactgtcccctcgtcatcggtctccacgtttcgtttgtgcggcccgagccgagggcgaatgtttcttctttgaccaattggtcgaaactgtgaaggaagtagcgagacgcttctgtgcccaactctctggccattgagatcactttgcgtgccatcatctgaaggggaggaaaagggcaccgtcgcaaaaagcggacgaatgacctgccaatttttaatggcatgtttgcgttggaatgcgcgtgttttggtggtctgtttgatcaccatcagtccccgactttcccgtccgagtccgcccattcggatggaatattccattaaattggccaccaatttccgcgactccaacgaccgttcgaataccattatcaatttcgcgtacttaaccaatttcaaatggatttaa

SEQ ID NO: 785 - DNA, 9817 bp, Heterodera glycines
ctgagagattaagcacaacaattgagatcgatcatttctcaaatacaattaattattcattttcgtacacttaatcagacgacatttttgttgctttgatccgcttcttcttctccttctttttcttccgctggtggcgacaatggcctaaaattaattaaatattttatttttcgataaaattcaaatgctattgctgctgctcacccaatggatttatcgaaactccacagatcaaatctgacattgttcaaattggcactcggattttcgcggttttcccacttaactggcgccgtcgccgtctccccaattgggcaccgttgcaacagccaattatacacatttaagtcgaattcgtcgatctcctgtttcagtgtcagcttttctttcgtcacttcgttcatcaattcaaatggcgcaattggcattgtttccacacgaaaataaagttgaatttggtaactgacagaagtggtggcacggcgaaatgtctaaacaaaattggtaaaataaaaacaatttgacgaaaattctggcgagacgacctctttgaagttgttgacccattcgaaatttggtggactcacataagcacggaaacgtaattgctttggttgtccattttttgtcggagtgtgaagccatttggtcaacgcttgaccagcatttccatttggcccatcgtcagcaattccatcggggcacagataaccggaatcgattgaaatcaattgatcaagatcagtgagaagtgtcggtgaaatgcgactgcgcaaattgtccaaatcatcgccatcgtgaaagccaaaatgacgaatgcttttcgcaaaaataggccaaatttcgcgggtaaaaacatcccaaatcggttggacatccgtatcaattgaatgcacaaacacttccaatttggtgccacttttgtcaaagaatcgcttcttggagcggaaaaatttgatcacggaatggtcaatgtagctaaagcaagagaacaatgctttagcgtacacaaaagttaagactgactgaatatgaaggttcttaaagcaaattttgttgggcagttgacgatccgacaacggaaaatccacaaaactgccatcgatccgtacagacactttcggttttggtccattatcgtttgcatttggtccttcgtcctttacaattctgattgttctccaaattgtcaattcgctttttccatcaaaatgcgtgtccaccaaaacatcaaaacgataggaaagcaatgccattttgagtccgagttgggcatggtcaaaagatggcagaatgtccatccaaacatccgcacaaatccaactgaaacatgggaaaaattgcatggaaaatgaaaatttaatttttcaaaagaattcattaccgtctgttcatttttgcgatatgtattatgaatgaaaaagtctttttgacctcattatatacccaaatcgccgccagatttttcgttaaaaaaatgcattaaaagcaaaaattctttaacagttaattgtattcaatgtgttatatttcagcaaagttttaaagagcaatcatgtcggtcattggtcccgaattttttttttctgggaattctttaacaagtttctttgggtattttgaggcgctgagcactagagaccggcgcgggacgggatcccgcgcgggatttttcgggatcccagtccgcaatcccacattttttttaaatgcgggattaatcccgcgggatcccgtcccgcaaagaattttgagttccaatcccgcagcgggatccgcaaatttgaaatttccggtctctactgagcactccatttcaacctatttataacaccagcctgaattcgaataaagtcgaaaagaatcaaattgtgttatggaccagtgtttgttattttaatgattcttatgaaataaattaatgcattttttaattttatatcaaaataatgaggtaacctttcaatgaaaaaaatctggcggcgagatagccaaaaaacaaggcgcggcgagttggccgcggcgagttgggcggcggcgagatagcgccgcggcgagttggccacgcggcgagtttctcgcggcgagatggccgcggcgagttggccgcggcgaagtgaccccgacccactagggctgccaaaaatatggatataaaatcgcgaaatatggccataaaatatggaccaaaaatcgcaaaatatggacataaataactttcggcattttttggaaaaacaaataagtggatcagcggaatgaatgatttatttgtgaaaatgtcgtctaattgcgtggaaatgaattaattatttttgagaaatgatcgatctcgccaataggaaacggattttatgccatcattttctctttgaaatgcttttgttgattctttcgttcgaataaaacgtatgtatgtacactaataccttattgaaaaccttcagagtttccgaaatgaaccgtaacagaacggacaaaactaaggactgaagttctgtcttaacaggactcctgctgaccctgccaaacttctgggaaagtactgtacttggtcattggtccgtcacgtttgggccccatgactttttttgactataattttttccttggtcaaccaaatccaagaatcttggtagcattcgaaagcataaagttagaagctttttttttgagctattgcttcgtcgattagacaattccagaaaagaaatatatgaaaaatggaaaaaaaccgaaattttggagttttttttcctaatttttttttcaacaataaaagcgcacaaagtcacacaaccgaggcacactattatttaaggggatcaactggaccaataagctttcggcattttttggaaaaacaaataaaattgacaaatttgaaacgaatggagggagatttactgtatttccaaattctctagataatcattgattattaatagggtttgtaattatatggactaaaaaacgcgaaatatggacattaaatatggactaaaaaagcccgaaatatggactaaaaaggccaaaaatggccaaatatggaccaaaatatggataaaaaatgccaaaatatatgttgtaaacccccaaaaatcccaaaaaaggtgtgcatatttaatatttgcttaaataaacctaaaaagtacaataaacaaccaaaaaatggggtttaaaacttaaaaatgcatattttttattgttgttcgttgtatcaaaaacacctccaagtttgccaaatttcgaaaaaattctcattaaaaaaaaagaaatgttcgcaaaaaaatgacgaaaatatttattgaaaatgccaaaatgacgacgaaaactcaaatttttcgtgttttgtggggtgtaatttttaaaaatttccaaaaagttgatctttagtggtgtatttttcgttttttttatttttcttgtgaaaatttccaaaaaatggccaaaatatggactaaaaacccaaaaatggcgaaatatggatttattcccgaaaacccccaaaatatggatttatatggactaaaaaccttcaccaaatcaaaaaattttaacgcagaaatgctatttttaagcccctttcttcatagcatatgcgcagaaaaaatatgttaatccatataatttacaaccctagttatatgtagggcgaggattcttagtttttaaactattttttctgcggcttagttacgacgagaaatgcacgaaaaacacatttttagctcggaaattctttgttttaacgccactattcatcactaggaatcattattttggagcttcgccactaaaaaaaattattttgaagttggccactaaaatacttttttgccactattttggcgtttcgtcattatttttgccactattttggcattttttgtagctgaaaaggggaattgcttttattatctaataagaatgtttctcaatttgaattacaaaattcgtagtatcttaaatcaaacgtcgccacaaatcaaactgaaatgcatgcgaaaagataaataggcaaatgaaaaatttgtaatttttaaaattcctcgccctctgttcatttttgctgcaactttgccgttttccaattgattgatgtcacaaatgaattaataattgccctgcaaaatccttttctaaacaataatacaaaagtttgatatgtccaactgctttaaatgggaagacagcgaaaattggggtgccaatgccaatttgaaccatatccgatttgatctgtggagtttcagtgaatccattgggtgagcagtaatattatagttaaggtggttccctcctcctctaaaaaattcttaatttcaaaaaagtcgccgggacatttggagactgcggtattaatagagactgggctataattagagcatatacggtacataattggacgcataaaaatgattgagcggataaattgaaaaaaataatatttttttacaaatactccgtctgttttttgccaaaaaatgtgatgaatttatttctgtttcaaaattgtttttgcgttctttttgctctctcatttttcccaactctctctttttaagttacataacaacagagttttgccttgccttttgtgacacaattgaaaaatcgtttttccacgatagcttttttctttggcatccaaatccaacaatcttggtatcattcgaaagctcttaacatgctttattagccttatcaaaaacgaaaagtttttcaagcctggaaaaaattttattaagaaaaaacttcaaaaattttgacttttcgcaattttcatgcataacttttttgataattgtctaatcgcaaagcaatagcttagaaaaagcttctaaattgattagctttcgaacgacaccaacaatgttggatttggtttacaaagaaaaaagttatagccaaaaacatgctggcgccgaaacgggagcgccgaaacgcagtggacccgatggcaaaagaccaacaattggtttttacaatggcacttttttcgagtgagcgcatttgtcactcaaaacaagtttttttcgaatgtgaaaaattttaaaattgtttaatgtattcgcgttttcgtattactgggcatgaaatcatttttcaaatgaacttagacgacaaaacactaactgacaggaaaaacttcatgcgcgacgttacatcagaaattttcagcaaaaatccaaacaaaattggtcttcaatgccattttgaggcaaaagtatgttttatataattggaacgaacgaatcaacaaaagcatttgtgacagggaaaaagcatcaaattgagatctgtcgtttctcatcatttcttaaaagcaattaatctccgttgctttgatccgcttcttcttcttcctcttccgctggtggtgacaatggcctaaaattaattaagtttttttatttttagacaaatcaaaaattgctgtttttgctgctcacccaatggattgactgaaactccacagatcaaatcggatatggttcaaattggcattggcaccccaattaccgtccactatccgtgttttatacaaaaaaggcctcctttctgctcacccaatgtcatcgtaaaggcggaagaagactttgttcaaattggcatccgaattttcgtccttcttctgctgttgtttctgaaccgccgccgtctccccaataattgggcatctctccaacagccaattgaattcaccagtgccattttcatccttcgtcagtgtcagcttctcattggtccgttcgttcaccaattcaaatggttcaattggcgttgtttccacatgaataaaaagttgaatatggtaactgacagagcgaatgacaatacgaattttgtagccgaccgaagcagtggcacggagaaatgtctaaacaaaattagtaaataaaaataataataataaaagaaaatatgacagatcacctctctgaaattgttgatcgatcggatgacacattcggaatttgaaaaaacattgcaacgcaatcgcttcgcttttccatttttgctcggcgtgtgcaaccatttggacaacgcttggccagcagttgcatttggcccatcgtcagaaattccatcggggcacagtccataggaagtgattgaatacaattgatcaagatcagtgagaagtgtcggtgaaatgcggcgacgcaaattgtccaaagcatcggcaccgtgaaaggccaaatgccgaatgtttgtcgcaaaaatgggccaaatttcacggacaaaaacatcccaaatttgatccgtttcgtatgaatacacttccaactccaaattggtgcccattctgtcccaaatttgtttgttgacacggataaatgcaagcacagaatggtcaatgtacctgaaaagggggaaatgatacaataacacaaatgattgcaaattggtcgcttctgtacagaaatttttgaattacataatcataaggtccataaatcggattttgtttggcaacggatggtcctgcatcggaaattccacaaatttgtccttgttgtccttgatttgcataaatagtttcgcttttgctccaattttttcctcgtcctccatgccctttcgaattgtaatgtcattccaaattgtcaattcgccttttccatcaaaatgtttgtccactaaaatgtcgaaacggtcggaaatcagtgccattttgagtccgagttggggacggtcaaaagatggcagaatgtccatccaaacatccgcacaaatccaactgaaaaattggaaacgaaaattttaatttttcaaaaatttccttaccgtcggttcattttggaggctcaattagcacacttttccctttaaaatctgttgttatgtaacttaaaaagagacagttaaaatgagaaagcaaagtacaaatcaatcaatgatgcataaggctgggaatttaaggcactaaaaatcgccaaaaagtcacgaaaaaaagtcctgaaaaattaggtgaattaatttatagaataacactttgatcatatttaaaatatcttaattttaggccattgtcgccaccagcgaaagaaaaagaagaagcgggcaaaagcaacgaaaatgtcgtctaattattagggaatagaattacatggaaatccatatttttttcctggactgtgggaggcctgaaacgcacgaaaaacatgtttttagcttggtttgaagcttctaggaaggatttctatatccatattttccatatttttccatatttcgcgatttatgtccatatttccatatttttccatattttggcattttggtccatattttatgtccatattttggcatttttcaaaaaaacctctattagaacggcccccagcagctaaatttagcttttttgagcccaaacccgaaaaaattttcaaaaaatcattttttcgccaaaatttctcgagaatattgaataaatttaaattttcttaaaattaataaattatgtcaaaaataagcaaaaaagcgaaaatttcgcttttgttgttgattttgcgctaaaaaaattaataaattttagcttttatgttttttttcttttaaaatgattgcacgtaattgccgaaaaaattcgagaccaatttccgaatgttgaccgactaattgcaaaacgaaagccgtctttgtcaaagcgccttaccgagtcaaaaaatttggaaatgtatctcatatgcaatttcaaccaataaatttgaagaaattttgcactcaattttgaaaaatttatgtccatattttgcgatttttggtccatattttatggccatatttcgcgattttagatccatatttttggactccctagtaatttcaattacatatttatttgtttatattaaagcatttttatttattttttcagctacattgaccattccgtcattaaatttctccgtgccaacaagcaaatttgggacagcaaaggcaccaaattggaacttgttgtgtacgtagacgaatttgaaaatgatgaacagccagtttggcattgtttttcctatgaaatttggcccatttttgcgacaaacattcgccatttgagcatttataatgccgatgctttggacaatttgcgtcgtcgtatttcactgacaattctcactgatcttgatcaattggattcaatcaattctggtgatctgttccccgatgcaattgctgacgatgggccgaatgcaaattcttctggccaagcattgcacaaatggttgcacacgccgagaaaagatggacagccaaagcgattgagttcctggagttgctcgtgttttagtctcacaagaataaacacatggttctacaatcataaacaggtcgatgattgatcatggaattttttctttcaatttctttttttactgtgctaaaaatgactaaaccctcaagaaactgcgcggctaagcatttaaaccgctttttgggaaggtttaaaactcgaaaaatggacaaaacaccaaaattaattggaaatcctaaaaaaaaaaaaaataaattttctggcggcaaaaaaacattttattgttttctttcacttgaaataaatttttcaaaaatgctgattttttgtcggccaaatgttgattttgacaattttcagttgggcgtcctgcattttatccttttttttttttgtttgaaaatggtcgtcaatatgttattgttttggtactttttgttaaggcatttctctgtgccaccacttcagtcagttacaaaattcaaatgttaacaacgcaagttgagccatttgaattggtgaatgaatggaccaacgagaagctgacactgatgaagaaaggaccatatcattcgctgttgaagcgatgcccaattattggggagacggcggcggttaaatgggaagacgacgaaaattcggaccatttgaatgcatttttcatccgtcttggtgaaaattgcattgggtgagcagaaaggaggccttacttttgtatagagcacagacaggatttgagacagtattctctgtacagtactttctccaaatcttggcagggccataggagtccctgttaaaacgggtgcccccaaaatcacgccgccgaaatgacgccgctagaaaattaaaaaaatatttttaaatttagaaaaaatttttataagaaaatttcaagaaaaattaaattttttggaaaatttttcgaaaactgtaatttatataaaattttaaaaaaaacactgaaaatttttcaaatttttttttctttaaatttttcttattcgcttcgctctttggtttgtctgtcctattataatggtccatcttgggaaaactctggtcctaaaccagggcttcgatatctgaggatttttcctcattttgtggtcttttagagggtcaaagaggattttttttgaaactgacgatttgcggatttttgtggtattttgagaaatttgaggatttttgtggtcttatgattttttgaaaaattaggtatatttggcaaaatgttcgaattttttcgtcaaatcttatttctttacgaaaaatcttcattttgcaataaattttaattaatttcctttagatgattttacaaaaaaaaataaacaggcattcgatagagggggtcaaaatcattttttttgaaaaaatctgttaacaaatcgcactcaaaatcccaaattttttccggcagcgcctatcggcactgccggaccggactcactccccccgatattcccaaaaagttttttggaaaaaccgcgccacgaataaagcaatttaaaggcaaaaaaattaacagattgtcaatttatttaa

SEQ ID NO: 786 - DNA, 2678 bp, Heterodera glycines
acgcttggccggcagttgcatttggcccatcgtcagaaattccatcggggcacagtccaataacggcacaaacacttccaatttggtgccacttctgtcccaaatttgcttgttggaacggagaaatgcgagcacagaatggtcaatgtagctgataaagtgaaaaaatgaagattggttttctgtatattttttgatttactaaatctgaaggtccttaaaacggattttgttgggcaacggatggtccggcaatggaaatgccacgcatttgtcatcgatcagaacagacagtttcgcttttgggccttcgcccttttcaattctgattgttctccaaattgtgaattcgcttttgccatcgaaatgtttgtccaccaaaacatcgaaacggtcggaaagcaatgccattttgaggccaagttgagcatggtcaaaagatggcagaatgtccatccaaacatccgcacaaatccaactgagattcgtaaaaaaatgtatgggtaaatgaaaattttgtaatttaaaaaaaattccttaccgtcgattcatttttgtggctcaatttgccgtttttccaattgattggtgtgtcaaaaaaggcaaggcaaaactctgttgttatgtaacttaaaaagagagagttgggaaaaatgagagagcaaaaagaacacaaaaacaattttgaaacagacataaattcatcacatttttttacgtgcttattaaaaaaaaattttgaaaaaatttgaccaaaaatgttattcatcattatgtgtcaaaaaaacaaaaaaaaatttttccaaaaaaaagtgaaaaaattttcaaaatagtgctctttgcaagtagcgcccaaattttctaatttagcatttttggttcaaaaacagcataaatgatctcttatgcagtattgatggcttatagtttgtttccgtgtattaaaccgatttttaagaaaaaatctaatttcgaaattttgacttttcgattttttgttcgagttcgggtccggggttggaaattgagaacgattttcttatagaagtttagtcctatattacaatactaatgccatagaaatttattttaaaatatttgtatcactgacgcattttccactgaccgattttccggtcacgaatcaaatgcaatcaatcaataattagtcaatcgtttaatgaacaattaagtagctcgatcacctccttgaaagtgttgatccatgttatttcacaaaaataagcacagcaatacaattcattcgcttttccatttttgctcggcgtgtgcaaccatttggacaacgcttggccggcagttgcttttggcccatcgtcagaaattccatcgggtaaaagaccaccagaattaatgaaattcaattgatcaagatcagtgagaagtgtcggtgaagtgtgacgacgcaaattgtaaaaatgattggcattaggaaagcacaaatggcgaacgtttgtcgcaaaaataggcaaaatttcgcgggtaaaaacatcccaaattggttggacatccgtatcaaatgcatacacattcaaatccaaaatagtgccacttctgtcccaaatttgcttgttggaacgaagaaatgcgagcacagaatggtcaacgtaactgaaaaggggaaaaatgaagattggttttctgtatattttttgatttactaaatctgaaggtccttaaaacggattttgttgggcaacggatggtccggcaatggaaatgccacgcatttgtcatcgatcagaacagacagtttcgcttttgggcctttgtccttgcgaattgcgattcttctccaaattgtcaattcgctttttgcatcgaaatgtttgtccaccaaaacatcgaaacggtcggaaagcaatgccattttgagtccaagttgagcatggtcaaaagatggcagaatgtccatccaaacgtcaccacaaatccaactgaaacataagaaaattgggtaaatgaaaatttgcaattttttaaaagaaattgcttaccgtctgttcattttttctctattatgcatcaaaaatgtcttttcggcctctttatatatctaccaaaataaaagtgagagatttgaaaacggatgaacggatggggggagattaaaatgatttgttggccaaaaataatggccataacgcattaatttatgcgtatataaagagagagtaatggggaagggtgttttgctgattttgttcaatacatacataatttacacggcttccttatttttgtaaatgcatatattttttcctggattctccgtatcctaattcaaaattgattgagctgataccgtccgtatatctctaattatccccccggatgattattgttcaacctccttagataggggaggggggctaattagagataataggtaaagtgaattagagtgaaaaaacaatatttcagtgtgaatgggtaaggccaaggcaaccgatgcagaaattaggtttcctaaatttttttgtatatattttttgaattttggtcaaaattttaacatttttgatcgcaaaacgacggaattgttcaaattttatttattgttaatccaactcaaattcctatttttacaaatttaaaaaaatttagataagtttcaaaaaagttatggccaaaaatgtgtaaaaactggttgtttg

SEQ ID NO: 787 - DNA, 2021 bp, Heterodera glycines
aaacactattttggagctttgccactaaaaaaaattattttgaaagttggccactaaaataatttttcgccactattttggcgtttcgtcattatttttgccactattttggcattttttggaaaatttcccaaaaaatgcaataaaaacgaaaaatacacccctaagaatctacctaaaaattttcaaaaaatacacccctaagaatctacctaaaaattttcaaaaatacacccctaagaattggaaaattttcacaaaaattcttcccccaaattttttttttcttgttcaatatttgctaagaaaatattttgtaactgcaatcagtgaaaaagttgtttgccttattttaaattattttcaaattaaaaaacagctatttaaaaaattacacccctaaatttggaacttgttcgccactattttgccatttttttgtcagtatttagttaattattttgggattttttgccactaaaaatcctcgccctagtcataacactaacaaatttttttcattgagtgtgggacttttcaggccaatatgccgcgataatcaccagaggctgcacaaaatacttttaaaaatataatgaattttaatttgttaaaatatccattaaaatttttatacacaaaaaaataaaatattacaattttttatagtgaaaatgattgtaataaataagattctttcacatttttacatcggctttttcttattcattgggctctctaaaatttttgcattaaaaattcgcaaaaaaaaaaggttttatgtaaattaattttacatcgcttcaaacattttccatttgttgaccagaatggatttgaatgccaatttgaattcgtcaaatttagcgcttatttcttccatttttggcattttgaattttttgttacttttatttttgcctccattctcctcggcattttccaatggattgaatttcaaaaaatcttttctgattgtggcgtcaaattgtgccaacaatgggttcatttgtgcactgtttacgttcgaacttatgccaataagccaaactttgcaaaaattgggccttaaatttattaaataatttaaaaattaataaataaatttaattaataatttattattatccaatttataaaattgtttacttaaatgccaatgccaaaaattcatttgccatttcgcagttgtgctggtaaatgtcggggtacaaatgtgtgccaatgtttggcccattttttgggtccaaatcgtataaaatttgccgacggattcgcccgtcaacgaactgacaaaatttgtcaaaaatttgcgtttgttgctcagccacacaattgatcagcacaaaatatgtatactaaattaattattaaaaatattaattattttttttaattttgaacatttttttatcaagtaattattaaataataaatatttgtgttttcttcgtgccttttctataaacccattattttgttcatgtagcaattttttccattcaaaattatgtgtcatttcaattaaatttgtcattttcaatgctaaaataaattttttttttttttaatttaaaaaattttgtaaaaattttttttgcctttgatcatttcattttgtatcactttggcactgcagtttgtgaccaaacttgccacatttaattcaggaaaaattggcgtatacacaggcatttcctgttcctctggattttgtacaaaaaatgggttgacaatgttggatttgtccaattcactgagttgaactggcataaaatttggtctaaaaatttaaaattgaaaaataaattctcgactccacactcccgaaaatttatggaatttttttggcccattaaatgacaaaaatttatacatttttaccttgtcgaataaaaaaggaagaatttttggattaaaaatggaagtgaagcatttggatagagaagcacaattttgctgaccattattgtcaaaattgcaccgttcaaataaccatatttgttggaataaatataatt

SEQ ID NO: 788 - DNA, 6786 bp, Heterodera glycines
aaaaaaatttgttaggtttatggcttagggcgaggatttttagggggcaaaaaatcccaaaattatttaactaaatcctgacaaaaaaatggcaaaatagtggcgaaccagttccaaattaggggtgtatttttttaaatagctgtttttttaattgaaaattaattaaaataaggcaaacaactttttttcactgattgcagttacaaaatattttcttagcaaatatgaacaaagaaaaaaaaaatttgggggaagaatttttgtgaaaattttccaattcttaggggtgtatttttgaaaatttttaggtagattcttaggggtgtattttttgaaaatttttaggtagattcttaggggtgtatttttcgtttttattgcattttttgggaaattttccaaaaaaatgccaaaatagtggcaaaaataataaacgccaaaatagtggcgaaaaattattttagtggccaactttcaaaataattttttttagtggcaaagctccaaaatagtgtttcctagtgatgaatagtggcgttaaaacgaagaatttccgaactaaaaatgtgtttttcgtgcatttctcgttgaaataaagccgcagaaaaaatagttaaaaaactaaaaatcctcgccctagttatgacgttactcaaaacaacctaccttaataaaaaaaataatcaaaatttgctataactttgcttaaaagcatcaactttttaattcttgaaatatttcgatagcctttaattttctcgttaatctgcaatttttcaaaataatttatttgattttaaaaaattatgaccaattaatgtctagataacctagtttgttgagttaaagtgatgaataattttttttccaaaatttctaatttaatgttttaatgtaatgaatcagcaccattttttctgtattttccagttttttgtttgttttgtttttcaaatttaactgtttaattaataatatcagtaaacattaaaaattattttataaatactagcttaataaaagaaaaatgaaataattatttataaaaaattaatcacaaacaaaacttaaaaaacaccacaaaacaataaacaaaatttttgcgaataattggaaaacttttttcagaatttaaccacataaaaattgaaaatcaagcaacttccatttgttcacgagaatagacttgagttgcaatttaaaattctcaaatttgccaacaatttcaaatgtttctggcattttttcactctgagtttgcttatttccattaatcgagttgaaattcaaaaaatctttgctgattgcggcatcaaattgtgccaacaatgggttcatttgtgcactatttacgttcgaacttatgccaataagccaaactttgcaaaaattgggccttaaatttattaaataatttaaaaattaataaataaatttaattaataatttattattatccaatttataaaattgtttacttaaatgccaatgccaaaaattcatttgccatttcgcagttgtgctggtaaatgtcggggtacaaatgtgtgccaatgtttggcccattttttgggtccaaatcgtataaaatttgccgacggattcgcccgtcaacgaactgacaaaatttgtcaaaaatttgcgtttgttgctcagccacacaattgatcagcacaaaatatgtatactaaattaattcatatatgaattcttttaaataattattttgttaaaaataattttcataattttactttatcaacaaagggcacgcttttgtgtagcaatatgttcaggttaaaatcaggcattttggcttctaattttattgtcgtaatgctaaaaatttataaaaaattcaataaattaaaaaaaattgaaaaaaataaataattaaattcaattttctcatttataccttttatcatttctttttgaattaattttgccccactatgtgttattaatcggccaacattttgttcaggaaatgttggggtatatattggcatttcctgttctgacgaagtgccaagaaaaatttgagatttttcggcattcgaatggctcaatggcgcaagtattaatggcaaattaattgacctaaaaataaattattgcaaattaatttttttggtaagtttttattgggcattaatcaaaatatataacaaccacaatataaattcatatatattttattatgtttattaaggatgtaactttttctaccctttaaaacgaagaaattctcgaaaaattttaaaaaaatgaaaaaatttaaaagggtaatttttttagcaatttttttaccttgtcgaataaaaaaggaagaatttttcgattaaaaatggaaatgaagcatttggatagagaagcacaattttgctgaccattattgtcaaaattgcaccgttcaaataaccatatttgttggaataaatgtaattttctaaattaaattttcatattttttaaatttaaatatatttctaaccttttgcccacaattttatagcgataaacatttgctgaaaatatgtttgttgtttatttcgagaaacggagaatgaattatcaaaaattttcccccaatttccattatttttgtcctcaagcaattcactgacaataaaaaataacgaacgatggcctaaaataataaaaaaaaattaatgaatcccttttaataaactgaaataattaattaattaaatttttcgtcacggccaaaatttgaaaaaattttaaaattagccctaggacccaaattggctgggcccaaccaatcagtgtaatttataaagttttcatcctgccaaaatttgagaaataaattttattttaattagccttgggaccaaaacggcggcgcccaacaagtcatgctttcgcgggacttattaatgctaatgggccgactaattaatgctaataggccccaagttaataaattggttgaaggacacctacttgacaatgcgcgaatcattttttggtgcgtttcatcagtgaatggccataatatttgaataaaattatccaaaatttgatgattaatgactaacggtaattcgctattgtccgaaattgccgcaaaagacaaatcaaaattaatgccattcaagttgaaagtgatcaaaaaaattgtgccattaatgatttttcgcaaatttgtcacttcattgttctggaaaaaagtgattttaatttattcaaaataaataaataatagagcgattaaatttttaaaaaaaaccaaaaggaggagggtggacagatctttttggttgcaaattttttttgtgataatagctgataaaatcttgttcagggagatttgcggaatctctaatcacgaatctgacatctattttgacaaattcctaatcccccgaactcgaaccaaaatcgaaaattaacaaattttgattatggtattttgcaaatttaaattaaaataaatgtaataaattcattaaaaattttacttcaaaaagaagcgaataaagtgacgttttattggctgttgaagagcagacatttttttggcatttagttttctcgttgccaaaaaatgcgttcattcgaattgttttttctggcacaatgcacaaaaggtcaatgcccgagtcaattgaatgggaattaagaaaatatgagccggaaatcaaaagcctggcttttcttttagactacaataaatttataaatataaatataaaattaaatatttatatatttattaaagcaaaataaatatttttttattggataaaaaagtttacttacccaacttttgacaattgtgtaaatgattttgagagaattttttattttaatgttatattccgccatagtctcatgctcaatttccgtcaaataatttttttgctaaaaaattaatgaattttaaataaaaatttctttttaaaattatcccaaaagaatccgaattatttacttcgttaaaatgcaattgttgtgatattttcggaaaagttggatgcaaaaaattgttttgttctgtttcaggtatcgttttattgaaaatttcaatatctaaaaaataggaatttcgaaaaatgtttaaaaattacgaaaaaaattaaaatttttaatcgaaacttgccaagtgcaatttgtgtgtccattttctttggtaatgttgaaaattttaaatagttctttagaaataacttttgacaaaacatttcgcgcaaattgtatccaatttttgtccattcattaccaatttggcatttgtcgttggcaaaaaatgccgacaaaatttttctctcatgaattttcgtcctaattaattggtatgaataatcaaatgcttcttcactgccaaattttacattttccgtaaattgtaaaattttgcacaaaattttgtgcaagttttttcgaaaattatgcagttcctccacatatataggctgaaatttgaacagattattgatggtaaaattaatttcttgttacttttgtacaggcctaaaataaaaatttcgggggggggggggattcgaagacctttttttgatattaaagcaaaaaaattttcacaggaatttcagaaattatcagcgccgggcagaaaaagcaggaattttagccgttttttgctaaaaaatcaccaatttttggcattttgtggtcaatttttcaaaaaataataagttgaaattggggtatggcaaacctattttttcttgaaatttttaaaatttttatttcgggaagggcggctggctatgttctgcttttgtatattttaaaatttactaggtacctgtaatgtaagtgaatttgtccattcaattttgatcaaaatcaacgaatttgactgatcaaaagtgtcaaattttgggaaaatttttctttccattttttgcaattgttcccacatttgaatgcgtttttcaatttcattcacataggcaccgatgtcgagcagtacaatttggtaatcagcccaaggtgaggataaaaattcagcatattttccatataaaaatgagtcatccaaaaatgctaatagaaatgtttataagtggcaaataattgaaatgtttttccaattaaagaattattattattttaaaaaagtaattttttctataaaaaacaattttattattattattatttattttttattataaatttatttcaccttgaaaaaagtgtggtgtcaaattcatttgtatctttgctaaaaaaatttctcatttgaatttgtttaaatttattaatttttaaatttattttaccattttcaaaagtctgtcgtaatttgactgggccaatctcaggaaatttttccacaaatccttcgtaaaaaattggattttcattaaactttgacttaaaaaatgatcgaattccttcagcaccattttcgcgggtgaatgcatttttcagataattactgaaaacattttccgtctcgcacaaactttaaaacaaaaaaagggataattctaaaaaccaaatatttaatttttgtttattttttattttttgtcatatataaaaaataataatttggaaccataagcgcacaaaattttaaagagaattaaagagaaaaggaaaggaaagctaatctcaaaatatggtaaccatttttttggatttcaattttataattttggtaaataatttatttatataccaattttaacaatttagttttgaaaaatgatcaaaggctcattaatcaaatctgctaaaagaagaagcaaaaagttttctttgaaattgatgggtcgtttcgtaaaatccgccagtttagcaatttttcgataaaatatggcataattttgcttaaaagtaacaaattttacacattcttggtatcgctttagtagtaacgatttttctctatttgcccgcaaattttcaaataaaataatcaaattattaaatataaattatggcagaaaataatacttattttcatacaactttttcgaaaatttgactaaattttttgcaattttacaggctaatagagaaaaacctgggctttcagaagatgtcaagaatgtaaaattgattgcttttcagcaaagttatgccatgttttgtcgaaaaaaaaacaaaaatttggccatcccatttaagccattttttcggtggtggccaaatttatttaatttatcacacctaatcattttattcgcataatcttccaccaattgatcgcctgcattgcgcacattgtcatccaccgagtcaacccaaattggatgattttcggacaaatctttaatttgtttatacaaaatgatcagtcgcagccatcgccaccggacgggtgccaatgcttcgtcaaagttggcattttgccaacattcattggcattagtgctgacgatgccacggcgccatgcaaaatgaatgagcgcctttaaatcctcaaattcttctccaccactgttgtcattccatttaataatttgatgggttttggtaaaaatgtcaattattcgtgcggcataaatgcgaatgcttaactatgggacccaaacttaaggagtaccctcatcttcaccgcgtggttttttgtgcatggggtaagaaaaaaacgatacattttgaagctatgcaattttttcaaatttcgctgcaatttcaacaaataaaaaacagctacctgactgaacggccggaccctgattttccaaggttttcaaaaggccaaaaaaccatcatttggctatatttaagctcgaaaaaaacttcggaccgaaaaacaaacacgaaaaa

SEQ ID NO: 789 - DNA, 4149 bp, Heterodera glycines
ttcttccgcgcattgatgccgcttagatgaaagaaaaatggcggcaaaatcaaaattttagccgaatatgtacaattggcaccataaatttaaacgacaaacgtcaaattaggcattttgtctccgaatttggtcattcattacgagagcttccttttttagccaaatgcctaaaattttgcgcacttgatacgcaaagataagcacgaaaaacgcgttttccgcttggtttgggttgtccacgatgacttttaataatgcctatttttgcctatttcagggtttttgtgcctaaggtgcctattttaggatttttgaaaaaatccttaacaaaaatgcaataaaaacgaaaaaaacaccactaagatccgacccgaaaaaaaatttcagaaaatacacacctaagaattgaaaaaatttttttaaaagaatgatcccaaaatttaatattttttctcaataaaaatttttggtttaaaatttttccttattttggaaaaaactttaaactatttaatatttcttttacaattgaaaaatttaagtttttacgtgttttaatacctaaaaagcgttaataaaaaaattttgtttgcctattttagtgcctattcgaggatttttgtgcctatttaatgcctattttgcgattttttaatgcctttttaggtgcctacgcgattttttgtgcctaaaaaggaagccctagtcattacgacaaaaaattctgtcgtttaaatatggcgtttttaaaaaatctaccgtaaatttgtcgtttggtcgtcacttttcttttggatattggatatgagtttttgaaaaaccgggatccgctccagaaaagccgggattttcggaactccgacctagtgcaaacattaatttcgaatataatttgaaactgcttaagactatgaacatgtccgtcgctgctggccatgaattgctgcacgcgctcggctttgatcatgagcaaagccgaagtgatgcccggaattacgtcattttacgggaagatgacggagtaattaacaaatattttcactaatttttcatatactcattataaaagcaatcgaaaattaatccaaacacgcaaaactttgacttcgcttacgatttcgggtcggtgatgcattattatccatctgggggcgaccatgaaaagtaagaaacagttggattttaatgatcaaaaattggatttaaaggggcttatacgatcggatcactttgccacggttttaccaacaaacgattggccaaaccgaacgaatctctttcaaagacgcggccataattaaccgaatttattgcgaaggcaaaaatggtcgaaaatttcaggaaattttcatttgtttagactcatgcaaagaccatgataacaagtgccaaaacgggggctatttgaatccgaatgattgcacaaaatgtcattgtccggacggatacggtggcgaatactgtaaagaactcgaagagagtgagcaattaattgattcaattaagatgggattaaattttataatttcaagatttgaattgcgaggatttgagtggaattccgagagaattggtggccaatcagtcagcagtgttattgaagacgaaggccaaatgtggggggaatttgccgtgccgatgccattggcgaattaaggcaataaataatatttttgaatttttaggttttttaattaatgcaaattttaattgtttttagcctgaagtggggaaaaaggcgcgaattcagttcaaaagtttgagcaatttgtttgaatgcacacacaactgctcatcggcgtatgtcgaggtcaaataccgagccgacaaaagggcccaagaaaaaagacaaataattaattttaattaattattaattagcataatgatggctcattaaggtgccaaactttgttgtgccgcatcactcactgatctgaaagcaaatgaatacaaaaattggattgaggcggaaaagccggacatggacattgtcatttctgcgcacctttcaccaaaatggaccgtaccatccaccgtattcgaactgacgtatgaatcaggcaaggaaaatttttaaattaattttatttgttttttaaatttttttttaaatatttattatttttaattggctttatttaaatgtttttccaaccattacaaaatggaaaattaattgttcaaaaatctgttaaggcaacgccaaacccataaattcgagcaaatgcgtaaataccgataatttgtttgccgagaaaaggaaccccggcaccagcggtttgaagtgttatgacggggtcaaacaccaattttatgactgctcctgtcacggtgataagaaatgcctcgctgaagaaaaatgggcacacgacgcctttctttgtccaataataaaggtaattaattaattatttatttatttattccaaaagacaccgccacacaaacctttcatataatataggcaatttaatttttaggcactaaaaattaccattttttgtatcaaaaaagcggaaataaggataaatctggcaaattataaaaactctatttgattaattaatttgtaaattcaaggtaaatggaattcaaatccaaggaagccgacaacgagtgtttactgacccaaaggattttcgatacgattggactcggattgaggttaattgttatgtgagttgggtcttctaatttcaaaaatttgtttaattgactaattttacagaaggccgaagcaggtaccgtaagcttttggggctacagtaagccggagacaaacgaaatcattcgggtggacgaaatccactgtttgacttataaagctgctggagtgccaaaacggttcaagagtttgcaagtcgaagaacagccaccgatgaaaaaactgagtccaagtccattcttggccaataatgcttcatcacttatccatgtgttcgtgccatttgttggccatccatgagagaggggggagattaatgatcagtaggtgatctgtctgctacagctgatcagcattggccaatttcttatatatttttttactttttaatagagatcggaccggtcggtttttttcgggttttttttcggtttttgatcgaaacaaaccgaccgagaaatttttgagtttttcggtttttcgttttcggtttttttccgaaaccgaccctcttgtccggtctctattttttaagtgtgtcaatgttttatgtaagtccctctcgtatttgtatttttaacgcatcataaccagcatgggctatataatttattggctaaacgtgcaaaaatatctctgccttaaatagacaaaaaaaaaatggacaaattttatttgaaggcatataaacaattaaaaatttaattaatgcctgtggcggtgtctttttgtttatttattcattttatttttttatgacaccaatgtattttatgcatttatactaattatttgttttttttttcttcttaaaaaatggataaataaaaatccgggccaatatcttttgaagacaataaatttaatgaaaaattcatgaacaaaaaataaatttaaaatcaaataaaaaatcaggaatgttattttttgcgcttttcctccaatttttaaacacatcacggcttttaacaccacaatataattattaaaattttttaattttcaaaatattggtaaagcctaactcgttttaatgaatttgtaaacaaaaatcaatacaacaacacaaacatttaaatggctaacaataagttgaacatttggatcacatatgtacctaatcacatcaataatcaatcaatcgattcacttttactgtttctgatcagtgatcaccactcggccctggcaaaccgtcgagaagactgaaaaacaattaaaaaaaattatcatttggatttttgaagtttttcttcacacccatcgtcgactccgtcgtccgcgatgaaaatatcaattgcgttttgtcgagcagtacagagcattgcgtcattcatcgccttttccaatgtttcctcacttccttctgctgcaattggacaacggatgagcttaaaaacatttgctccttcatgaatcggtgccaatgtcaattgatctccagtcaattcgttggtccgtttaaatgacgcaatgga

SEQ ID NO: 790 - DNA, 2899 bp, Heterodera glycines
  unsure (1)..(2899): unsure at all n locations
tgtcaaaaaataggacttacctactcctctcaaaaaattagctgggtcgaaatttttaaatttggcattatgttntaaaaatctctaccttgttttttttatgttcactaagtntaggatgtttgttcttagtattctcaaacacacggttaaaattgagccttactgcccttggtagagattttactgaggcgttggtggagcgtttaaatcgtcaatttgctaattacgtatgtactttgaatttaaatgtatcatgttacagatcaaagagtattcaggttatatcaaatgtcgggctgtgcattactttttacgactaaaaaatacggcgcttcttacatattggtttttgtttcttgctttattaagttaaacaattttattttatagcccggtgacgcatcaacgcatacgcctgtcctattccgttatgttgtttttcaaccaatgataaatgaaattcttgagggcaacatactgcgctcgaaccaggaagggatcacaatcagtatgcagtttttcagcgacataacagttgcgccagacaaattgcctgcagtttctaaattgtatttattttattttaaacattattgtctaatgttctaactttttttttattttagtgatgagtctgttcaagtttggagatgggagtatcaaaatgaaaatggtgatatcacgccattctatatggatccaggaaaacgcgtaaggtttgttattgttttttggtatagcaatgatttgaatttttctatattttcccgcgtgtgctaggcattcattttttcccggcccgtctattagctccgccgggaccctcccccaccccttctcccggtctcaaattttaagaaattatccaatgctttaaaaaaaatcagctgaaaaattagtaaaaactttaaagaatttttttttaagtttttctaggttaaaaaatccatttagatttttttttaatctaaaaattaagttttagttgaaagttcttagaaatttttttttgtacgagttgccattgacccgtattttctgtgctttttcggctagttttgaattatttaatggggtagtaaagactcatttattgacaattcttttacaagctagaaacgagtcaagaatttgttaccgcttttctacatttatacattctcccatgcagttttctcaattaaacattcaggtcaatggacgtcctttggagtttattcagccagaaattctgcgcatcaaacttcaagagccaattctaattgcgatatgccctaccttaaattgacttttcttttgctgtcgcttccgttcggttgcccattaagctttgtcaatcatcgtcttgaccaaccgcagtcagcagtcacttcgggtagtccccctgttgtcccaattgcctcacttctcttgtgccgctttaagctgatcgcacatgtcacttaaatatgttcctttgtcgtgcaacgcagcgttgcatccctcgttcgtgggtgtgcgaccaggagaacgattgttcggatgggcaggacgagaagaactgcggtgcattttatacctaatggtttcgttggacttttctttttatttgtgcagagactcctcaaaaacgatgctctgaaagtgaatacgaatgcaaaaacacacaatcaatgcaacggaatgcaaatgacaactcttggctcaaccacttggcccgcaccggtttcacacacacgtgcatccaaagaaatgggtttgcgacggggaggccgactgtgtggagaaggatgacgagttgaactgcgaaggaagtgagtaactgacgaaaattcgtcgatcacaattcttttttggttattcttttctctgatcggcctttctgcacatgactttttcaaatttgtcaggtttctgtttttgatatttcagagcttaaatgtgacgagaaacactttgagtgcaaaggcttttgacttgcattctgtgacttcgtgcattccaatcgaatgggtatgcgatgggcaggtaattctcgactaatattagaggaatagggtcaattgttctgctttcatttaggctgattgtttggacatgaaggacgaagcaaactgtacagctaaagaaacgaagcctgaatgtgaaaaggactgagtttcggtgaatcactcattaatcaattcttttactccaattgattctcaaggtgcgattctggtcaatgcatttacaaaagttggcgctgtgatggggacagtgactgtatggatggaagtgacgaaaacaactgcaaggtggacacgtgcggttctgttgacaagttcaaggtcatcacgcgaagagtccacctgaaaatgcaaactgacagttttagtgcaaatcatcgactttctgcattcccaacaaatggaaatgcgatggcgaaccggtaatttaatgttggaatttagaaatttgtttatcaaacctaatttcaatttttatgtgttttgatagctaagtaatgcaaaaaattctttgacaggtaaaagtcgaaataaaatcaggcgatcggtgaatgacataaggacaaaaaatgtttttggttttgttaaggacttcctgaccactcggatgaaacggactgcgaaggggttactgctcaacaggaagtgcactgcaaggaacatgtttgtttcaacgtctttgcccttttcccaattcaattgtctttctctgcactttgtccaggagtttgcgtgtgcctctcgttcccaatgcatcagcagtttttggcaatgcgacggcgacgaggactgtttcgatgggagtgcgagcacaactgctgcattcagtgcaaaccgaaagagaaggcgtgcgctgancgaaagagttgcattgacgaggaattgtggtgcgaccgatcggaggactg

SEQ ID NO: 791 - DNA, 1857 bp, Heterodera glycines
  unsure (1)..(1857): unsure at all n locations
catttgaacactttgtcaggtaaaagtctaatttntggaattaatttaatttatcccacaatttcaaatggatttgtaaatcagtcaaacagttcttgttttttttaaattagcatatccatctgaatgactttctgcgaattctttgcaaaattggctctgttctcgtggaaatattgtgcatttaccacgcaattttgaaatttcacatggacgaggacaaattggcactgaaaaatggacaaaaggacgacacggggggaagggaaagcgaaaacagtgacaaacagggggagcaatttgcagaagacaatttcgacacgaatccgttgggtggggctttttatttattttcatttgcactttaaatcattcaaaaatttaaaaagcaaaaagcgaccccctaattaaaatagttcaaatgaaaagaaattaaagtcatttgaaatcaaaatataaaaaatgcccaaatacatctaattttgcaatttcattgttttttagttgagaaaggcgttatgcaaaagtcgctcattgacaatgccttcgatgtgttcgaatgcgcctcccaaaatttgaattgtcttttggccaatgccgagatgagtgccatcaaattcgaccagttcatcaaagttgttgagttggcggaaaggtcccatattttatcatttttattttgaatttgtaaatttactatcaataattattcaattaattcctcctcatttccatttgctcagattccggaccttcggtcgccaatattttggcaatccgtgccaactcatccgacacactttgatggaccaatcgcgcaaatatattgagcgataccatgccgagaaaatggaggaggttaaaatgtttttggagagcgaaacgttcactctttgcccggtgcccgtccaattcacactgtttgaccttccggtgagaaagaattggtcgtttttaagtcaatgattgacacttttgacggggttttccctaggttttcccaatggattgcattttaaaaaatgcttttcaaatttaggaatttttcttcctcaaagagttgcaacagaaacagcaaaatgatgaacaaacggaggaagagactgaacagaactcagtggagacatttgtccacggcaaatccatccgtttttcggtgtttcgacattcttcggaaatggacacggaaatattcccttattcacctgaacaattcgacgaaagtgtgaggagaaaggcacaaaaaatggacatgaaaaacttttttgcgaagagaaagcattaaaaaattattttgaaataaacaaaaaatatggaaaaacaaattcagccccgacgaattggtgacagacgacggatgatctgcaaaaatggcgaagtctctcagtgttcgtcgtccgatgacggcactcgaaattccattgaagacgaatcactggcgccgtcgccgcacaacgcaatgccaaatttatgcaattccgcgctgaatcttttacgtgtgattggcaagtgctttatttgcttagagttggcatacctgtgcaagggggtagtcaaagggggagggtcatgacgtcagacgtaagaaatcggggggggggtaaaaagaagaagaagaggaaggaaaaaagggaaaaggcagcgtcgaaatcaaggaaagtgccgtgaaattttccaattcagctacgtccgacactcttttcttacgttcgacgaattctgctgaagaatattcgtcgaacgtaagaggagaggctgaaaaattcctaaaattttgctttcttttttttaaagatttcattaaaaattcaaatatttttcctaaaaaagttggcttataatagcaaaaaacctaat

SEQ ID NO: 792 - DNA, 2849 bp, Heterodera glycines
tttatactagagctcgattggacctggacccaatcctgtttttttcctggacctggttttttgcccaagtccaacattgaatccaggtccaggcccattttatgccacaaatttgttttttcccccatatgcattttaccccattttcagtcccttgcggcggtgttcgatttgggcgacgcttcgtttggctgtgtggcggccaaaattatactctttcagtcaattctgaagcaaatttcggcgaccgattggacaaccggggaaatccattcgcaacattcgccttatgtggacacaattgtccaagtgaatggagaaaaagaggggggggggggggtgaatattggccaaaagcaaaggaaaaaatggccaaaataacaattatcagccttttccataaggttttactggtgttcctttttaggaatgttcgcaattcaaacaaaagttcgtccgccttttcccctacgttcacatttccgacgaattgtacgccgccatttggtccatgcttttgctgtgcattttccgtattttggtccaggggtacgcggacgcccaatttgtttcagtggcaccattgacaaaaacgtaattttttaggtacgccgacgtaaaaaagtgcagcattgagggaagagcactgcaactgttggatgtcgagcaattatgtggggaattggaggagatcaccggactgaggcaatttcacaatcatccctttattttattgtaaattcccgaaattaggcctcttccccaccgaccgttcgtcgaaaatttcgtcaaagcattttatttgccgtttggagagcttcaaaattggatggtgaatcatacagtgagtggagaaaaaatagggattttaattgggattcttaacaaattcaaggagtacagcctaagccaaacgagcgcaattttaaatgcagcggctggggcggcggcgatcagctcgtcctccgtcgctacgaactccagaaaagcgaccatgtcgcgcatcatggccaatctgttggacgcgggcggaattggggaaggcggcaactctcttttccaatgaataattccaattttttgtttaattttacgttatttccatccgttcatcttttgaatttataattacgcaaaagaacactcacattttgtaattctaacaatcccagttttgtttgtatatattgaatgttgttaattgtgataaaaaaaaaggcttggatttaaatttttcgaaaaattagttattcaaatttttaaatatacatataataaataattataaatagcaaagttttgtgtttaattggtgctgtatgtttccgtcagtaaacgatttcgtcagtgaacgaattcgtcagcaattattttcgtcagtgatgtgtttttttaaccttttatttttatattaatcattgtgtccattttttttgattagcaaacaaattcgtcagcgaacgatttcgtcagtgaattaatgtttttaaaaaaacgctatacttaaaatcaaatttaaaagtgcaggtggtaggcacaagcacgaaggtaatcaagtgggtcacgattttcgatatcctgaaggagtgcattcaaattgttgtcctgcctaacatatttccattttcttgctgcatgcgccccccttattccatcagctggtgcgacttgaaagtccacaattcgctgagaccacatttcgtcttcctcgatcattttgcgcacaaaattgctcaaacgttgatttccttttaaaagagtattctaaattccatgccatccctcgacgctgttgttgctgcgtgaaaacccaagtgccaaacgctcagtcatattccacaattgaatgggaaaaagtgcatctcgctgtgccaagttcattgcttcaattctgtcgcggatccagccgtccgcagccgcgcccatatttccgttgtcttggtcaacaagcggctcttcattctcaatgacatgacgtggtccaatccatgtcatgaggaagtaaagaatcaattctaagcggtaaaaatcaatgaaaaattgggggagggcgatgtttttagaattttgcaaagaacccaaccctgtagctcagcagttggatggagcgtcgacaccaagatgcaaaagtagttataaacaaggtcgacaggtacaaatgccaaagcttgaagtgatcggatgtttcgttgaagctcaacattttggaggtattgagtgtgaagatttggaagtcgttgaattcggcgataaattgcttggccaaaatgaaaaaggcagccactttgggttaagttggcaaaaacaattcgcgtagaattgatggctgctgattcgaagtcactcattagacgttgcggtgcccaattgtttccaacactgtctctgattgcttcaaaaaaacgcacgtatgttgccccttccttattcggcagtaaaccatatacgcatggaactgagcaatggtcgatgatagcgctcattgtgtataactgtgcaaatccacgcgggcatgacttaagcgggccaatttaaaatagtaccaaggattctttgcctaacaattttgggtaaaactttatctgccccccattttgaagaaaaacggatgtcatattcgtgatcagtgaccccaaaatcccccgtatatttacttcgaatgtaccatcaatggcacattcagtgttgtattgtcgaagaatttcgagagcagatgcagaacagaaaacaatcattcaatggccgttaaaaatttcattgcaaatgacgcggtttagaagagcatcaggcagtacgatgttttcaacaggcaaaacatcaaggccaacatctccgacctatattatttt

SEQ ID NO: 793 - DNA, 6886 bp, Heterodera glycines
tccaaccctaaaaacctctaaaccaactttaacacaaaaaaggagttataccccaaaacctgacttagcgcctgcactccatcggcagaattcataaccattagccttctcctgctattttttttaaatcattacttaagcattttcaggttattatcaataaaaaacaatgtataaatacaaaaaaggtcagcaaaaaggcgagagcaagaaagaaacttgacgaaagtttcaaaagggcgctgaggggaaggggaagaaggtcgacccgggcaaggacctgtgttcacgaagcaacacacggctggatattgtggaatacaaaagattgtagcgacaaattcgaaaaggtaagtaatcggaagaaaataaacaaacgaccataaccattgttaacgaaatttttaccccaaaaagtcaggctggaattttactccgacgatgaccctttttttactttaacacattttttggtgcgcttttaaaaaaaaatatgggacgatgcctaggaaaaatagtgaatttggcgcatgtaggcaccgtcgaacccacccccccccgttcattaagtttggaaaatgccgcaaaaattgttagaaaactggtttcttgatcccgattcggagtcaaaaaattcacgtttatagttaattggattcacaaaattcaagtccacaaaaaatgacttcattttattttttgtttccggtttattagatctttgttcggtcgaagccgggtctgtttgacaatggcttttgcgaatacctcacaaccaagtggtacacgaggcccagctcaaggccaaattggtcatgacgcaagaaggacgcgcagcagaagagatttattttgggagttcgattgggcatttttcggactcggaggatgcgctaatattggcagatacgatcagataatcgatttgattggtatattgtaattctttggttaagaaataaactcaaaggttcgtagtcggtcggcctttttgctcacttttgagtcaaatgagaatttaggcgctacttaaaaggagtcttttgaatttatcaaaaattaaaaacaataggggggacccttttggtttgcaacattttttaatatatagtcattaaaatttatttcctggggttcttggggtccctaacctcgaattcgcgatgcgagatccgccgaatttgtgactccgcggcaattttggataatttaaaggggaaattattttctgaagcgagtgttttatatttttgtttatgaaaaagtaaagcccggtaaaaaaaatttccgtgagcggcatcgggagtgcaaaattttccgggacgggcgtccagaacggtaatcctgtaaaatcccgctcccgtaaaaaatcccgttcaccgaaaaaagcgtgagtcgggagcgggaatcccgtaaaatcccgctggagacccgatcccgccgggctctatgaaaaagcaagagatttatggaaagcatagtcaaaaatatttggcacgctccaaaaagaattttgatcgacggacgtggaaacgctcattcaaaactggacaaagagtctttgccagaaattacagagacggttcgaagtggatggcaggccaaatcatgagccaaataagttcatcactgtttcttgtccgaacagctggtggagtttggaagcggcatttagaccagctgaaaacggacgagacgaagcccgatctggagagcaacaccgacgcggactcaacatcgtccattggtgatcagacggaagtcgcaaaggacggaggacagccgaggacgtggacgaagagccgaacgatccgcaaaatgttgcatgatccgccattgagaagatcggtgcgcgaacgaaggccacgacaggtcttcgaccccagcgcgtgatcgctgacttcagcttgtggtgaggagacggaacccgtcagttgggccccggcacgtttgggccccagcggttttttggctataacttttttctttgtcaaccaaatccgacattttggtagcattcgaaagccctaagtgtcttctattagccttcaaaattttgaaaaatttcgttaaggttcagaaaagttattgccaggaaaattcaaaaaaccaaattttccaacctttttggccataaatttgttcaaaattgacaaaagtttttggatttttgcaggctaataaagcatttgaagggctttcgaatgataccaataatctttctcagtgcaaataggtttattatttatttagtaatcagaacgccaaaactttgcaaaacttaaaatttttttgtgattttcccttgtaaaaatagaagagccgatctcgagttaaaaactagacagctaaaaaataaactgtgattcgatagaggggacaaaatatgggcctatacaaaatttcaaaaaaagttacccacaggaaaaaattttttcccatggcaaacatttcaatactttaattcttttttagccaagtgcgcaatttaaggccaaatcaaataaaactaacaatattatctagaaaaaaattatcgatgctgtacgtaactaactcttattgaaaataatttttttttgacacgaaaacttttaataaaaaatatttctgccttctttaaaagacagagttcccaagttttttttttcaaaataagacaaaatggcctaaaaactaagattctgaccccaaaaataagattttttctaaaactaatatttgcgtgaaggaaacgcaataaaaacatgaaaaattgacttaaaacaatattttattagcgtaaaaacaattaaaattgatcatcaaaagtatttttcccatccgcctattttctctgacaatttgtgattggaaatgagcatttggtacatttgtgggcaagaaagatcataattgactttggtttggaccaacgccttgactgtttcgacttgcaaaagatttcgtttatcagtccattgcgatccgcacaaagagaataccctctccacaaatgcattcgagacaggcacggaaagtacgacgctgaccagcttgagcagattaggcaaatctgcttcaaacagcttcttccacttctgttcgggggttaatttttgaaattcatcatttgggaaagaattcaatatttggtttgcttcgctaacatcgtcaaacaaatcatttgttaactcgggcgcaatttgtcgagccagagccaatgcatcgtcgtggggaattttgcggtatgccagcgcaacccattgcaacttttcaggaaatcggtcaatgcgatgccatttgtccaaatacgccagaaccgaagtgtaaaacgactgaaaatttttgaaaatatgcaaccgacaatttttacttgaaattgttcctccaacgcttcgcgtgtgctctcatcgacttttcccattgccaaatctgcaccataaaacctttcactttttcgttgttcaattttccctctaaatttgtccatttccagcaaaagttcgggcaaaatgactttttctttctaaatttataaaattttttcatttaagatttgtaaaacaacctgaaaaaagtcaattgtcttattaaataagccaagaatgtggtgtaaaaaatgaatgatcgcaaacgattgttcagaaaaaacgaaaaaaaagtcataaagaagtgccggacacttttctggttttgaaaagtaggcgattaacacagattccagccgaatcattttgcccaacacattatgcatcgatgtccatcttgttggcccatgacgattcaagcgttcaaactcaacctaaatttatagcttagaatttatcattccttattccgcacctccaattcctcacaaaatccttttagctcctcaattcgtttggttgaatttttaaaatgccctgccattttaaaaatcactgcctcaatgtccattgctcttccttcaattctcaaattgtccgttgcctttttcgccgcattgtgcaaaacatggcacacacaccccacaccaatcaatcgttcattttgttgtcttagacggaaaaataaattgttttctcctgcgcgctcttctccaccgaaattggcttttgtgttgtccgccgaaagtgccgttaaatttgatacattcaaatcgtatttttccattattttgttgatccattggtgcaccttttattgcaattaaaaatgcaaaaaattgatctcacttcaaatgatgtttcgcccggaagtgactccaagtcaatcaaacgggtttcaataccattgtcttttgtaaaaaaccgaacaacaagaggaaaaagtttttgattcccaaagtttgacgcatcgatcgataaagagaatggtttgtcagccagtcgttcaacgatttttttcacggaataaggagccaacacgccttaacaataattgaaaaaagtttttgtatttatgcgataccagttagaatttttgccgtttttgtttgtccgcaacttatttttttcgcaatatttgaatcgggaaaaattgtgcgcaacaagccgtccgaggacaaacaatccaccgagcgaaaagattggcaatgttgtgcagtgtgataagcgatagtgcctattaattataaaattttgatcagaaaaaagcctgttaaccttcggccgccagaactttacggtcttcagttgatggggcggaagtgtttggcataaattcctgcaatggaattgatctgtttgctgcttttgccgctttctgatgttttccagttttttggtgcaacgaaattgcacttttcccgatggacagcagattgatatcatcgttgcagacgacacagagggcaaattcttcgccttttcggcttttctttatgtgccggaattccttttcgtagctctccaaatagatatttttacgttttgggggcatcttgggcattcacactcaagaaaacgaagtaaaatataatttatttgaaaatcgaattaattaaaaatattcgcttcaataaaaaaataagtaaagttattcaattttgtagatttttatttgcaaatccaaaataagaacgaaatatgcacgtcgagtcaaaaataagataaatcttagaaataaggacattttcattttctaagatccggcccctccaaataaggacaaatcttagaaataaggacacttgggaactctgtaatataatcatcactttttccaatcccatgctgattaatcgggcacatttgtaaacccttcccagaataaaaatgactaaattttatggttttagccaatatttaagaattagaagttttggggcatgcggtaccggtaagcgctgtcggaaaaaattttcagaatttttaatgaattttgttaaaaaatagcaaaatttttcagaaatttccctcttttccccttcgccggcgacccctaccttaattttttttaaaaaaaagaaaaaaaacacaagctacaactaacaaaagaagaaaactattcatcaaaaaggactttttttcacggtaggggtcaactccgtctcagcaatgttcaaaaagctataacttttttctttgttggccaaacttcacaatcatggtatcattcgaaagccctagatgtttagaagatatttataagctatttctcagtgattaatcagctctcaaaaaagttgtcagtttaaaaccgcaaaaaaggcagaattttcaaagttttttatttctattttttttatagttcgaaattttctgtaatttttagtaggctaatagagcctgtgaagagctttcgaatgatatcaagattgtttgattcggtcaaaaacttcaagagttatattgactcaaagttggctcagacggagttggccagacggagttggcccgttccgtactaagtaggccaagttttaccaagattttcttggtctcgggtcttgtccttattttttgggggctaccaaagattcaaagtctagatcaatcggaaccaagacgtatccctaacctgaactcaaaagaaaagcgaataatttatatacagaaatgttttttttgaatattatatactgtataatgtttaatattgcgtttttataaaaaaagtggaaacgcactaatgagactaattagcgggactcatttgtccgaaaagcactaaatgagattaattggcgggactcatctgtcccactccgcccttcctactcactttcgacaattttttgcagaagaataagctgttcgtcaacggacacttcaccaaggacctgagcgaggatgagcaggaggaattgaagcagtaccaggagcagctggatcagttcaaggcatgaacaactgggagggagtggaaattttcataagaaaaatactgaaatttccaaaaaaaaattcagtccgaagtcaagacctacttggaggagcgccagaaacagttccgcaaccaggtggcgcgccagggcggcgccgaggccaaggagggcggaactcagctgaagaagccggagccgccaaagaaggtgggcctcgttgcctagcgatggtgttcgagaatgccgagaatctcgacttatgaaaattttactctgttttttggacctgatcccggggcttggccgatttttttgaaattttggtccacattttcagcccagcttctgctcggacaaagccaccacacagtacgtgttcgacggctgcagcgttcaaggcgacaacgtgtacattggggatacttttgtacggaattttcaaaattttttaaaatttttcacccccccccctcataggtgcgcaagctgagcccggacgagcagaaggaattggcccagtttgaccagaaattcaccgcctaccagaaggcagtgacggccggcttccgcaaggtggaaaattgttttggcaaa

SEQ ID NO: 794 - DNA, 4434 bp, Heterodera glycines
  unsure (1)..(4434): unsure at all n locations
caacaaattaaaatgaaaattagttaagaaatttcgtctttctttccccttctaaaggtttaatgaataattgctttttaattttcaaaaaaatttcatttaagtttttcgaaaaatgcatttttagttaaatattatttaaaaaaatttgtattttgtgaaaaaagaattattatttttatttcttcataatttcaataattttctgattaattaatttatgataaatgttttgtcagaatgttttgaaattttgcaggaaattacgtttggcataatgactatatcagcttggaaattttcaaatatttcgatcactagaaaatttcaaaaaatcctcctttgtataattttatttgtaaatgtttcacgtttaggcactgatcgtgaggtgcgcagcagttcgtccggacgcattttccaggtgcgtggaagcggtgccacgtcgctggtgcagtcgcctaccgcgcgggtaggcggtggcgcatgcaccatgctgacgcgccttcaacaacaacagcagcaaatgcgtcgttgcgtcggaggcgcgaccagtgcagcatcacctacgacagttgcaactgctgcagtgcgacaggattccgcggacgaggcaagcatgggcagtgtcagtacggtggcgagtggcggcgcggtggtgggtggtgtcgcaacgcaacacacaccgcaaatgcagcgtcgcgctgcgaccattgcgtcacagcagcaccaggtgggtgttgaaatttaaaaaattaaatttaaatttagagtttcatcaataaattccattaggtatatttggacactaattgatttttttaaatggattaattagttaaaagtgtttcgaagtaatttttttaataatttttagtaaaaaatcaaaatttcgttcatttttaattttttttttatattttaattaatgaaaaattaaaaagtgctgcaacaaaaaagatttcatttaaataaataaatattatttttaaatattttctaaaaatttaaaaaaaaaaatttaactattttttcaattttatttgaaatttaatttttctccttttatttctgcagcagcagcaacgcttcaaaatgcgtaggcccaaatccactggtcaaatcatcatccaacagcagcaacaaatggtggaggcacagaatcatcatcagaggaaaaaaatgtccgaaaatcatcagcaacacgctgttgtgatgcaggtgggaaaattgaattttcaaatatttatttatttttttaatttaaaatttatttttattaaattttttatttccggtttttggatacaaatgattgttccaaaaattcttcttttttttgtcaacaaagagggtaatatttttgattgaaaaattctcgaaaaaattttaaaattaaaaattgatttttcggtcttttttttttgttaattaaatctgttaattttttacttaattaatatttaaattttctttttctttttttgcttttttaaatattgcggttttgtaaaatgaaaaatttttactctgatgaaataaaacggagctcccgcggattttcgggctcgtggattacgaatttgacatacaaatctaccaattttgaattcctttacgaaatttgaatcaaaagtctaaaattccaaatatttatttttgaccatttgttcgaattcgggttcaaattgggatttttcaacacccttattcaattaacgatccctgaaaacccctttttcatgatataatatcactaccagggatggggaattccgaggcaccaaaaattttcggaagtcggaattccgaggcccaaaaatttttcttaagtctgaagcggaattccgaccccaaaaaatcggaacttggaagtcgaaattccgtaccatccctgatctctactatacatatggcaaataattaatttaatcaattaattatctttcaggatcgcggttcggttggcacggcaggcaccggacaatccggcggttccggctcgctatcgttggcaccggtcattgctggcgccggtgccgtacgtggcggcgcacacgcgcagcacaaccaccaatgcaacagcaacaacaataacaataatagcaacagcgtgtccgcgtacaacacggtgaacaccgcgtacgacccgtcgtacaccagcgcaaccgtttactcggactcaatcacgtgcctgcacgcgcctggcgtcctgcagtcgggtggcggcgtcattggggctggcggtggggcgagcagttgcgcggacggcatcacggaccagcggcgcgggtgagtggtgacggatgagtggattaagcaatcaattagattgataggcttaatggctttattggtttaattagatgcttgtgcgtttcttgaaatttgccattccccctcacttccgacatttttttaaaatcaattttataaaaagaattaaccaaaaattttatttttttttgaattttttaaaaaataagtttttttttttaaatttttaaaatcttttcttgaaattcttgttctcgaacaacatttaaacattcttgaaatttctgttaaaattatataaaaactttgaaaaatatagaaattaattaaagaaaagtttttgtttattcaaaaccctacaggcgaatttctttaaattttcaatatgaagtcaatgtttttttttcaaagttatttcattaaaaaaacagatgttaattaaaacaaagaaaaaaaattaaatttagaaaagcacaaaaaatttatcaaagcgaaatgaataaaaagaatcccaaaaaattagggtagagtcaactccgtctggccaactccgtctcagcaatgttcaaaaagctataacttttttctttgttggccaaacttcacaatcatggtatcattcgaaagccctagatgtttagaagatatttataagctatttctcagtgattaatcggctctcaaaaaaacttgtcagtttaaaaccgcaaaaaaggcagaattttcaaagttttttatttctatctttttttatagttcgaaattttctgtaatttttagtaggctaatagagcctgtgaagagctttcgaatgatatcaagattgtttgattcggtcaataacttcaagagttatattgactcaaagttggctcagacggagttggcccgttccgtagagcggccatcggtaattgtaaaaaaaatcggtaccggtaatttttgcagttgataaaccggtactttttggctgggaaaaccgggataaaaccgggacttttccctggtcaaaaccaggatttaggtactcagttgtacgcttttttcaacaccagatgccggtcccgtacaactctaattttgaccaattccaaaatactaaaaacaaattataaattaaatatgggattatagttacttttacatattggtggatcaatcattattttttaataaatttcattaatttggcgctttcattcgacgccattttttcttgaaattccttatttttctgacttaaatgtttttttttctttatttaacttatttgaataaaaaaaaaagattttaaattaaaacataaaaatgaaaaganaatttatatttacaaaaagcataaactttctcaaaaatttatcaaagcaaaaattaaaaaaaaatgaaaatggaaagaaaaaagacagaagcattgtgtgatatataggtgaagaaagaaaaccgaacaaggaaaaaataagaaatttttgacacaaaaagggaaatttggcgctatttaaaaagttagcgatttttaatctaagcctaactcgaacaaaaatcagttaggaagtctgagatggtcaaaatagatgccagattcgtggtcaacgaccctaaaaacctctcggtaactttttaaaaagtgccagaaattttttgagaaaatggcgatgaattgaaagtgccaaatttgtcatcatattcgttgttcaaatggcgtttttcatcttcattgtttgctgcatttttcaatgctttttccaattttgccttttcttttttggcattttcttttattttttggcacaatttttccattttttcttcaaattctatacgtaatttggtaatttccaacggatcattgaaatgttttattttttgttttttcgtttttatcattaatttttctccattttcttcacttttctcctcttttaattcgtaattcaattcctcctcatttactaactccatctcactgatatcatcatcaatcattttcaattcattttccccaattttccaaaaacatttcgaaatgtcattcagaatttggacaatattaatgaaatcgtcatggaagttttcttcattaaaaaatattggcttcaccaccgatggtaattgtttcgccactttcggacttttagctaaacagaattaattaattta

SEQ ID NO: 795 - DNA, 6205 bp, Heterodera glycines
agaccagagaatttcaataattattgccacttattctttccctgttaaataaaatttttttcatttttccctttcattattttttgttcattccattattatttattcgagttttttttctttattaatttttcagttaaaatgtactcgtttcaaaaatattttgaggaggctctcgaaaaagaagattttttctggcagaaaaacagagcagaagtggaggcattgttaattgaggcttcaaattataaaattataatacacagggacaacgaaagccgctattctgattatattgccacctatcgccgcaccccactcttctgtttctgcatgattgagagaaatttaagatttttttacgacacaggaaccgggacgcccataggaagggttacaaccgtgctacatgttaccgttgaggcgagctatacaggagagggattcatttcgcctatgttttccttttggttttattgggagggcaggagtcaaacaacaaacgaatctttcacgagccgtctttatttgtacactgtttcgatgctaagagcaatgggcaaagcctggggcagagaactacttttgaaccctgttgaagttttaattgatatgttctaccaacgaatagataggttggaacatggaaaaaagcaattaaaaaaaatttgtttagagatttggtcggatcatggtcattgttctatagactcccaccctcactttttgacacttcccgccgggtggttgctgagaataaactggaagaatttttaaaattaccatcattttttcgcatgcttttttataataaatattaaatgttcatgttgtttttaaagtgaaggttttgacccaagtatttaatcaattttaatttattatttttggtagaattccagaaaatgcaaacaatcgctgaaattaaaaatttcgagattattgaaggtggaagagtttttgttgtgagagcgagaattgagaatgtgatggaggcggagtacagggtttgtaataaaaatgaaaaaatatatcagtttgtttaggcatgcactttatgccgtaaaggggcttgttcttgcggggctgagaaaaagatgacatcttatttgaaggtgtctgtggcagatgatacagggcttttggaaaatgtgggatttttcggtgtgcgtgggaaacagaatgggacggtaacgcaacgcttttttaaaaatccatatacatttaaatttaggatgaggtcaaaagtttggcgggcgccgtgtgcaccatgaaaattggcgcgagggtgaaagaattcggagggaagaaggggatctattactctttgattgatattgtcagcctttaaatctataaataaacttgttaattttttcaaataaaaatgttttacttaaaattatttctagtttggttattgttggtcggaacggaaagttgttgcctttcaaaagaagaaaaagagcaatttaccaatgcccgaagaactgtagaaggtgtatttagagacataattaggttagataacgaagcaaaagaattttctttttctgcacataataccatggttgaagcccaaaatataaaaaataaaaaccctgataaacctggtgtaaatttttggcatagcaaattattagatggagttttaaaaattcatgccctatttgacaaaataaaaaaagaagaaaaaaatatgaaaaatattaaaaaaggtatggaaaaatgtctagacagaaaagatttaactatgtgtcaagaattagcagaagaggccaaacaatcaatcgaaattgccaaaaattatcggcaagaaattgggcatatttatcggaccgcttattcacagccagatttaggtattggagatttggcaaataaactaaaagaaacaatgcgcgaaaaccaaatacggtttgaaaggcaaagacctcaggaagaatttagggacgaatttattgcatataaaatataaaagaaaaatttaataaatgaaaaataaaaaaatgaattctgaaaaatcagaaaaagctaataccattttggtggaagctgcaaaaaaagagacagagagagcatggagggatgtagcggcgttagcagaagaagttggcgattttgccaagtcttctcgggaaacacttaatcaggcaataaaatctagagaaaaagctccttatgctaacggtgttcgagaattatatcttaaaatgtccgattcaatttgggaaattttcaaaatcgaggaccaaatcaatttggagtctgtaaaggctgaatctgcatggcgcgagttcgagagatgcaaaacttttgaccaggcaacaaaattcgaggaacaagcgcaaaattcgttaatggaagcccggagattacatttcgagtcccgaagggttcagagccaaatgttaaattatgaaaataggctcaaaacaattgtttgggagcacgttggtatataagaacaaaaaaataatgatataccaaaatggaaaattgtgccataattgagtcattatgtcataaggacttaaaatttggctttaaaaaatataaaaccaaattttattttaaaaatcctttcctaattaatgcggaggaaaattttaaaaatatcctcgcatcaataatcgtaaaaatttataaaaatgaacaaggaaaattcaaaagcattctgaagatttcttttggttttgaatcattttattgccctcttagataccctagcgaaaacaccgccgaggctttgttccaacatgtcctattaaaagaagaattatattcgcttttctatcctttggatgatgtcataacactagaagtaactataatcccagatgtcgacaatagaccaagaaattaattttataaaaaacaaaattacgagaaattggaaaatttctggaaaaatacttaaacgatcaattaatctcgaaatttttgcaaatatgctttttaaacgggtgaaaaatttctacataacagcatttagtgcacctggaatggaaaatttatatttttcattcttagaaatgctcgaaaaaattcaaaaactacctaaacttattatgcatgagtatagaaaccaagcattagctatgcaaaaaatagaaattggactcaaagaaataaatatatttaaatgtcaagaagcagagaatttatcggacctttctttttcaaagataaatgaattccgagaacaagtgctaaattatagatttgacacgagaatgttgtataataaaattaagataactgcactaagccatttgtttaaacccgaaaaggaaatatttctctcgccttttagaatttctccagggaaagaacttttttacaacatgttccgtacagaacccaaaaaagaaatttttaattctacattttacaattatatttagcacaacctatcttgcgtaatttgaagatcatttacaaataatcacaccatattcttttttgaaaattttttaatttctctttagaaggaataagtaatttatttaaaaaaattttccttggttatgtgctcccaacagcgataaaaaagaaaaaaacaatcgttccgcctaatgttattccgttgaaaaaatcttacgatttttttatatgccctgaggcattttgcgcaaattaaaaattgaaggacgaaagaatgggctgatgtgaaaaaaataaaaaacatgtttgaggcgcaaaaagaagttgcgttatgggtaatataatgatgaaaaaaaacgttaaaaaagagaatagtgtaaaaaattttcattataaataacggggaataaacataactgactatcacaaaaatggcatctttgagcgtgtcccattgctctgctcacccaaacggttattttttttaatttttataattggtttaataaaataaagatgtttgcacaatgtcatttgaaccaattggccaacttcctgagcttccaactgtgcgatactttgagtgtaaattgataggcaccgggtggttatataatttgtgattaataatttattatttctttagcgcgttcggaattggttttgcctccagaaaatatgccacccacgaatttgtggggtgggcttttgactcaataggctttgactcgatgggcgatgttttaggtagtatatgctttaaaattgtcgttttttaaccaaaattgccgtctttattattaatatcatttaggccttgaagaatttggcggaccttcggtgcttaaatggtggaccatgggggcggatgatgttgtgggcgcagggttttcgggcagttctccatttttcactttgaacggagagatattacgtaatatttcattcttttttaatgattttttttgtttgaaaggaattgatgatgttcgattggacgtcagccattttgcctttccaactgtttcgatgatcggcgcagacacttctgtgttggttaacacgggcccgatttttttatttgatataaaccaaatatttatgccataaaccaaataggcccgtaaccaaaaattttttagaagcctaaaaaatttctgaatttattttggaaaattgtcaattctaggagaaaaaatttgtttaaaaattagttaactgttgaattttttcctattcggagagaggtttgaggagaaatttcctccccttggtaactggcaaaaaccaaatattttattatttgttgttgttgaataaaaatgttgaactaccaatttttaattttaaccaaattacattaaaaaatgatcatactcaacaaaaaaaaacagattttttacacaactttcaaaccattgttctattctaaaattttttgtcataatatttatttaaaaactgattttatcaaacataaatatatagcttacaaatggctaacataatcttgttatataaaaatgctccacaataatgaaatttacttcccaaaattaaaatgattaatcgaataattattattgttattattatcataccattaacagatctcactcatcaaagtttggtttttttttgtgacggttatccctctttttactcggcttcgatctttgtgttttttatttaacaacagttcaatccaaaataaattaggatttaaatacattatcgataaatttttgtaatccgttaacggccttcctcttgattcgatcttccgtattagatacgaacgaaatgtcaagcttcatgatctttgtgtttttgagcccatatttttgacgaactaaagaatttgaaacacagtcattttaatggttttcgtcccgatttgtatctaccttggacatatttcggactggtttcgacaatcttagccaaatgacgcgcaattggtctatttaacatcaagtcgaagatagcttcaactgttaccaattccgtaaactcattagtttgctccaaattttcgcaatcttctgaaatcgtccattcttcatatccgggccaccctagaaaaatacaaatttgctctaataaacctttacacaataaaattattattaattttatgaataaattatttgttgttttttgaataaattcatatacaaaatcttaattatagtattaatattaaatataaaagagacatgatggcgatgggcgcccaaggttcagatatgaacccagggggaacccgatttcaccctgaaactccaagggtcatttcgttgtgacaacgaagcgaccccaggagtctcaggggcgagagtagacagaataaaagatatggtttattataaaattattttcattaaaacgtatataatttattttataattgattaattctcaaaatatatttttaattcataactttgattaataagaaattcaatagataaaaaacatgccatgaaatgaaagaaaatatgcttttctattattttggtgtacataaacggcatgaactttgctgatcaaatagcgaccgtgctcatccggtgcaattctgctgtccggatttccttcatcaatttggactgccaacttaaaaggcggattgataatttttattagagcccggtaaaaaaaatttccgaaggcgggagcaggagttaaaacttttctgggacgggagtcccgattggggatcccataaaaatcctgctgccgttacaatcccgttctccaaaaaaaacgggtgcgggaccggaaatatcgtaaaaatcccgcgggggtcccaatc

SEQ ID NO: 796 - DNA, 3998 bp, Heterodera glycines
atttttaattttaaccaaattacattaaaaaatgatcctattcaacaaaaaaaaacagatttttttacacaactttcaaaccattgttctattctaaaattttttgtcataatatttatttaaaaactgattttatcaaacataaatatatagcttacaaatggctaacataatcttgttatataaaaatgctccacaataatgaaatttacttcccaaaattaaaatgattaatcgaataattattattgttattattatcataccattaacagatctcactcatcaaagtttggtttttttgtgacggttatccctctttttactcggcttcgatctttatgttttttatttaacaacagttcaatccaaaataaattaggatttaaatacattatcgataaatttttgtaatccgttaacggccttcctcttgattcgatcttccgtattagatacgaacgaaatgtcaagctttttgatctttgtgtttttgagcccatgtttttggcgaactaaagaagcaacccaatcattttaatgggtttcattccgatttgtttctaccgtgatcatattttgggcaggcttcgacgattttagctaaatgacgcgcaatcggtctatttagcatcaagtcgaagatagcttcaactgttaccaattccgtaaactcattagtttgctccaaattttcgcaatcttctgaaatcgtccattcttcatatccgggccaccctagaaaaatacaaatttgctctaataaacctttacacaataaaattattattaattttatgaataaattatttgttgttttttgaataaatatacaaaatcttaattatagtattaatattaaatataaaagagacatgatggcgatgggcgcccaaggttcagatatgaacccagggtgaacccgatttcaccctgaaattccaagggtcatttcgttgtgacaacgaagcgaccccaggagtctcaggggcgagagtagacagaataaaagtgatgttttattataaaattattttcattaaaacgtatataatttattttataattgattaattctcaaaatatatttttatttcataactatgattaatcaaaaattcatttcttaaaaaacatgccgtgaaaggacaaaaaataggctcttctattgttttggtgtacataaacggcatgaactttgctgatcaaataccgcccgttttcgtcaggacctattctactgtccggaattccatgttcaatttgcactgcccgcttaaaaggtgcggattaatactttttattagagctcggtaaaaaatttccggaggcgggagcgggagataaaattttctgggacaggagtcccaatcggggatcccaaagaatcccgctgccgttacaatcccattcaccaaaaaaaaacggaggtgggactgggaatcccgtaaaaatcccgcgagggtcccaatcaccgggctctgataattatttattatacagaatttcccgattcaatttttatatttcgcttttctaccggcttcggcttattccgtttgtttgctcgttttcgttgttgttttgccgtgttttttgcccgcttggatgttgttgaagtggtggcgaaagtcgaacttctattctcatcgtcaatgtcggactcggcaccaacaatttccacagttgcaccaatgtcgagaaaggccgagttcacgtcatggcccaactcaatttgctcttccgtctcatcgatttgtaaatttgcagcaattgagtcccagtcattatcctgaacaaatttcaagctaacgactgagaatgaatgtcaatattttttgaaaatttgagtgtaatttgttaaccgattttctccaaaaaaatgctaatttattgttaaacccaatccatattttaagaaaaataaagaatttatggacgagcatgaaatttttggaattaaaaaagcaaattttagccgttctttctaccgtctcttcctacgattcgacaaattttcctcacaaatcgggattgatcgatcataatttgattaatgaaaatctaaaaaaaccaattgaattacctatgagaaattttgtataaaattttgttgaatttcttatttgcgacgctgactttttttcacgggcctgcccacctcccctcttacaaaattcttaaattttttgatactgtttaaaaattggacctaatctccaaaaaccggcagcgccttcggtcatccctataccaaatatatttaaattgacttagttttattaacactttgagatttgacctgttgtgtctacatggatttgttaaaatttgccacattaatatattttttgtcaattaattataatcattcagttttttgattctgaaaccaagaaatattcaccgttccaaaattggaatcgtttggccaaatttgctcatcgatcatgttgaagatgtcgttggctccatcaagacgagcaaaatttttgatggtcatgttggtgataccttggatgttgtcatagtctgcctgaaaaaatttaatgcgtttagttaatcattgctttaattttagaaaataactaatcgtttttaataattgtgaaatataacgaaacctgaaaattgactgaatatggataatttttgaaaaaattacgaaaaatggaaagtgagtcgaaaagaataacaaatattgtcaaaaatagtcatttttgttgaacaaaagaaaaaagtattcctgcccattttttggtaccgtatgaatttcatcgtagttcatgccgggaatgcgttttgcccctccacaacgcgccaatcggcggatgaccggcttggtgatgccttggatgttatgacgccctgtctaaaatatgaataggtaataattatatatgcactatttggaaaaacaacaaaaatttacacatttaaacaattaaaactttatcacaaatgcattagtggccctcgaaacaaaatttaaagttcataaaattttctcttaaattgttttaaatgaacgtggtttggaatagaagccgtaaattaagtacataaagtttttttgcaattattctatttttgctcactttacaaaagcctttcgcgcctccctttccgcgtctctttcctccattaatgcatccaaacatgttgaagacagttgggaattttaaaaagaattttagaaggtattgctaaaaataaaattatataaaacataatcataaaacgtaaaatgtaaacggagaattatctccgcaatttattgaagttgtaaaggaatttgcggatcgatttgtgcgcatttggattggtaggagtacgaccaagggggacaagaagagcgaagcgggcgaacgaagggagatggtgagggagggctgtcaattactgcgcggaatgttttgtgaaattagggggcagcagcaactgacgccgtttgcaactatgtaaagaaaggatgggaaatggaatattgaaaaacagaagaaaggatgtggaagggtggaggggatggggccaaattttggggccggaatttttcagggggtggtgggttttggtaaggcaaggcgggaaagcactaatagggtgtttgactcacttcaaaaaataattccttacacaaaagttttttacaaccacttattgccaatctaatttcttgcagattgaaagccatccattgcctgccggttctcggcacagcaaagcactaatagggtgtttgactcacttcaaaaaataattccttacacaaaagttttttacaaccacttattgccaatcaatttcttgcagatttaaagccatccattgcctgccggttctcggcacagcaaagcactaatagggtgttccactcacttcaaaaaataattccttacccaaaagttttttacaaccacatattgccaatctaatttcttgcagatttaaagccatccattgcctgccggttctcggcacagcaaagcactaatacg

SEQ ID NO: 797 - DNA, 5411 bp, Heterodera glycines
  unsure (1)..(5411): unsure at all n locations
gtgagaaagagagagtgtgtgagagagagagagagaacgagagagggaggggagagagagaaagagagtgtgtgtgtgagaaagagagagtgtgtgagagagagagagagagaacgagagagggaggggagagagagaaagagagagggaggggagagagagaaagagagtagagagagagtgtatgagagagagagagaggagagagagagagaaagagagagggatggagagaattaataaaaaaaagataaattgatacagaaagaaaagaaaaacaaatagatgtgtgttacgaacacagagaaagaaggaactatagaatttaaaggacatgagagagagaggagaggagagaggaaaagagagagagaaaagaggcagaaagagaaaagtttttcaattcttaaggtttattttctgaacaattttcaggtcatttattaggggtgtattttccgattttattgcattttttatggttcttgaaaaaacgtcaaaaaggcagcaaaaaggaaaaatgccaaaaaaggcatttaaggcacgaaaatcccgtaaaaggcaaaaaaaggtataataaaagtcaatgtaggagcctcaaaccaagttgaaaatgcattatttatgcttaatataaagaaaatagtgcgcagaaaaaaaggcatatgcctaaaagtcggtctctactaatgagaaacaaaacaaaataaatagagatgtgtgttacgaatacagagaagaaggaactatagaatagggttgcaaccccgacgtcggggttggaaaattcggggtttggggttgtcagggttggaagcgtcggggttcggggtcggggttgacaaatcgttcggggtcggggtcggggtttttcaatttttgccttatgccatatagtcaaaaaattttatattattttagctttaatttttttattattaataataataattttatgtgctttttatcataaatatttttgtatagaattaattaaaaatgcataaggcattttaaaatggccaattttcagtgaaaatctgtaaaaataatcaaaattttaaatttttcatcctgcgcctgacccccaaataaaaatagtagattttattcaaaaaaaaatgccaaaaaatttctgcttattttttttttgtttttcaaatcatctattttttcgcggcgttctttttctatagacttttttttaggagaaaggggtccggcggttgccgatatgcgccgccggaaaaaatttgaaaatttggatggctttgttaacagattttgttcaaaaagtgataaattttttctattttgagtaaaatttttcaccaaaaaatttatgaatttctgataaatttttagttttttttattggttttttgtcaaaattattttgaaattcataatttttcatgatttagtcaaaaaattaaatttttaatttcaacgaaaggaaaattgggttcaatacgtcaataaattatgccaatgatgaccaatttttatgggtatttttgtttaaaaaccctataaattaaaaaagaagtcaaccaggatccgaactcatgacaaaagtagtgcatgtgctaacgcaattaccactacaccaatattacacatgaatggacaaaagcaaattactttatttaataaaaatttggcaaaatggttaaaaaaaattcaaatttgtataatttttttcttttctctcacgaaaataccattcttaggggtgtatatttaaccccgagccgagtcggggttaagggtcggggttcggggtcgtcggggttggaagcgtcggggttcgggtcggggttaaccccgaaaaatggccaaaattgtcggggttctgggtaggggcggggtcggggttgcaaccctanctatagaatttaaaggacatgagagagagaggagaggagataggaaaagagagagagagaagggtgaaagagagaggaagaaagagcgaattccggctttattgtttttaattaattattaattcaaagaccttatatttatatttgaaatttttggtaagtgtcaaaataatacaaataactaagatttaattgttcagtataataccaattaatcttgtatgctgcctccacatttccaatttccgtttataaacaaaatttattaatttattttttaaaatatacttactgtaatattttttgctttgttagatattattttccttttggtctcagtcgtgattctgctacattgatgtttttaagctatttaaattttaactttcattgaatataatttatctttattagttaaagaatattataagtttatacaaaaattgtttgtttcacatataatataatacatttttatatttattaatttaaattattcgagcttctttaataaaatataccatttttctcttcgggaaaaacaaaacaaaaaattattgcatttattttgacataatttttaatatttagaaatttctctttcattttttatttggatagtccaattaaatttcatttcttttactttttaaaagctttcattttaagattcatttcaattctttgttaaacatgatgttattttcgaaaattcagaatttatttgattattttttacatacaaattacataaatttatttccttattattggatatgtttaacatattattcatctttaaatatatatatatatatatattaattaatttaatcattctatttaattttaactcgtcgtttgcagcataatatggcgtacataatctgagtaggagaaaaatttgtaaaattttaaattttaaatagagatttaatgcacttatacatttgctcttgctctgcttgtaggatagccttttattattgattttgatatatgatttaatttttattaatcatttgatttttttatgattgtttgtgtcaatcaaagaactatttaaagaaattaaaatattgtaattagtttattaatcatttatattttaattatttttcacaataaataaaatttactgacttattttataattttttttattgcaaatataaatatattttttaaactcttgacgaaaaaaatcttttctgccatttttccaccgagagcaattcgttaccatcccattagatatataaattaaattactgatttaatactttattttttattataaatattaatatttttaattcttgtccacattcatgttatttaagtggtgaaatgttttgtggaatttagtaatttagaaaattagatttatgtaattgaagaaatattgtcctaaaatatttaaattacatctatgtttttaaatgtaggatctccgctctttttctcggcaataattttattgcctcgttgaatatatccttttaattaatctttgttaaatattaattatttccatttttttcaaataatagcaaaattttcaattatcttaaacatcgtaattgcttattacataatataattttatatgatttactcactttataacaattaaatttaattattttcattataactgatacttttttaggttcgtctcagcggggaccggtaaattggacaccggaaaattggacaccagaaaattggacaccggaaaattggacaccaagcggaaaaatggacaccgccggaattttggacactaaaggaaaattggacaccggaaaattggacactaagatttcctttttaaaaaaaatcaagaattaggtgaaaataaatttgagtagaataaatgggttaaatgagggatgattgatcaatgtgccacaaaatgcaccaaaaatgggtgacgattgatcaatgggccaaaaaatgaaccaaaaatgggtgacgattgatcaatgggccaaaaaatgaaccaaaaatgggtgacgattgatcaatgggccaaaaaatgaaccaaaaatgggtgacgattgatcaatgggccaaaaaatgaaccaaaaatgggtgacgattgatcaatgggccaaaaaatgaaccaaaaatgggtgacgattgatcaatgtgccaaaaaatgaaccagaaatgagtaataaaacttatttctttatgaatgatatgatgtttttcttctcctgaagttagaaagatatatatatttttactttgctgagacggaattggctcgacgagttcgcccctaccgcgataggcgccgcgttagaaaaaaaagaattttgaatatttttcatttgatttcactaataaatgggcaattttaggtccaagttttgaaatcttaaaggatttgtggcatggcgccgataggtgccgccggggaaaatttttatggatttttaatgaaatggtaagaaaatttgttcaaaattaaaataatttttcctcttttccactttcgctggcgacccactcccaaaaagggtcatcattaacagcgtaaaaatttctcggtttccgagactaaaaacccgagaaatttcccgagtcgggaaccgagaccgagaagcgaaaaacgcgagaaatttcccgagtcgggaaccgagaccgagaagcgaaaaacgcgagaaatttcccgagtcgggaaccgagaccgagaagcgaaaaacccgagaaatttcccgagtcgggaaccgagaccgagaagcgaaaaacgcgagaaatttcccgagtcgggaaccgagaaccgagactctcgcacagcactattatttatgttgctctcatctcatgtattcgaactcttgtcggattccaaaattcgttctctgtgcatttaaatattttttgtaattaatatttatttataaatataaaaataattttaaattaatattcttcatttaaatactattttatatcacaatgtcttactcatttttttactaaaataataataataattaatctcaacagtttaaaataaatctcttattggtctactgggatttacccttggtgtagttggatgtctacgtgatttatttgcattattttgtgagaatttcttatttaaagaatattataaatttattgtttttctatataatactaaacattttcttaaattgtattgtgtatatttttaatttttcttggtgagctgaaaatccaagtgtaattgttttcgttgcagcactacaatttgttttttgttaaaatgttttaatttatattatgtaatttcatattttaaaacaagaattcttttagcgttcttaattttttttttaatttaaaagtttgctttagaagggttttagttttatttaaaaatacatttcaaaaatgaatttattatatatttaataaattcttgtcattttatagtttaacaacttgtgatgtgtttggattgacaaactaatgtttttcatgtatattttctaattaaattatttttttaaanggact

SEQ ID NO: 798 - DNA, 1875 bp, Heterodera glycines
agagtgggtgatgaggataatgatgatgatgatgtatgtttgtggcacgtctcgccgtcctcaaaagtccattcacattcattttggggtgccaattctgcagatggtagccaccaccgccgccggcagtccgaaagggtttcgtcatcatcgcggtatcatcgcggcacagaaagggaatttatttcttcggctgggttggctaatccatggcttaatctcccagccgggccgcttttcggcaccgcaaagagaagcccttgggtcggcaaattgtatagcgaaatgtcgctcgccaaattattgagtggggtatcatcagtgagctgaagcaggagagaattggaacggaaattgggggggggggagcaaaatgagaatatatgtcttaattttgtgcttttaagagggtcaagaaatggtgaagaaagtgaaatgtcttcccaaaagatattttatttatttttatttctgaataattaatattttaatttacattaaaatcgagaaatattttttaaattaaattttattgaacaaatatttactttttgatatgacttcttaatttttaaaacaattatttaatttaatttatttttttgagttgagtaatatttattgttagtcttttgtttttgctgcttccttctcttttaaattttaagaattatataaatataaataaatctctataaagtggttaaattttaaattggtaatttttttttttacttttcaggtttcccgagaatcttatgaccaatgcatgcttcaaggtcagcttaatatttaatttaaaaattttgaaaaataaatccacttttttctatttcctccaaatttatttatccatttcaatcaaattattttcattaattaattagcgtaatgagtataaatttcctaattactatatttccaggcataggcacaaaacagctcggcgtttgctcgtcccctgaacgacaatcgtccattacgctggtgttccgcgatgtgtccccgctgccgtccgcgttcacttttaggccgggccaatcctacttcgttataagtgggataaatttaaaaattgattactgtattccctaaaatacagccccccccctaaattatagccccccccccccctgaaataaaagccctcttctgaggggggggggggcttgaaaaacaaaagcctccctgggctctatttaggaaaaacggtaatttaaattaaaaaattcttaatttttgaaaaataaaatttttctttaaaaacaaaataatatataataattataacattagaaataattatacatattaagttaaaatgattcaacctcaaaatatccagaaaaagctatataattgattttaaaaaattgcaataatttcaaaaaaattttaattttcttcgaatattctcaaataataaaagaggatcaatttgatgactacaaataattaaaaaataataattagatttatttatttttgactcaacatttttgttcagcaacctcaaacggcacattgatgggattgaacaacactgaaggtggactgtgtgccaccagaaatatgcggctcaaatttgacgttttgtccctggccgatgaagcggatgccaacaatggtacggtaccctaaggctatacctatcgccctggaatttaaaaattttcatgaaatttttgaaaatttcagatacaatgcttcaaattccgcagccacatcatgcacatgctcaccatcatcatcaccatcaccaacatcatcaccaacaacgctatcatcataaagcattggtgcacaagcagcaggagacgcacaggtaaagatggggcgggtcatttttttttattagcacaaaccttttttttt

SEQ ID NO: 799 - DNA, 5699 bp, Heterodera glycines
tgtacagatttttcaaatttaattctttccattcctcttattttgacatttttaaatccggttttggcattttgcaactgattattttgaaatcaaatcttcatacaaaatctcgattctgctaacaatttattgcttaaaaatggttaaaaaattgttattatttaatattttttggtgaaatttccgcatattctttttaatttttgtttaaaatttttaaataaatttttaattcattttaaatactcaaaatttttcaaattccaaaattcttcagttccatccaaaatgaaagcagcaattatccgccctttctctatgtgattcacacttcggaaatgtcttcctcaccacatggcgacgaggacgagggcgaagaagcggccgctgcatggggccaagactcatacgaaacgggggacgaaaatgaaatgagtgggaaattttgacaataaattaagcaatttcattgtgctttcattagtaaaaaaagtgttttgtggccattaaaatttcatttaatttatcataggtccaataatagaacccccgtaattctaaaaaataaaaaattttagcgggcgggggtggggttaagaacataaaccgagatgggagcaactcgtccccgaccgcgaaaaagaaaaatctttcaaaaaagaatattattaagataattacaagaaaaaaaaaatttttttttaaacaatttcaagggaatttttcaaaattttatgaagaattactaaatttttccaaaaaaaaaaatcgctgaaaattattaaccttgaattttcttatataaaagaatttgtaaggtttttttaaagtctataaattttcaaattataaaaaattttgtggtggggggggcgtagtacatacacccaaccgaatcagccttttatgtattcctttttctgcttttcgccccaaaaaattttttccgtgactattttcctcacgagtaaacgaagcatggaaaaaaggacaaaggctttatttaaaacttaatttcagtagtttttttcctctttttcagcttattattcatccgcttcatccacttttacattgatcagaaagcattgtggttgttgctgtttttgttgtgttgatcacttgctggaccaacaaaatcatctgctgcagatgatcccaaacacaatcgccggacagaaaaatgccaattaattttcccaatgataattaccaaaattaattaattatacattgatgatgctcagaaaaccggtttttcctttttacacatttttaaatttattcgaaaattttgtttttcctatattttaaatttgtattttttaaattaaattttgtacaatttttttttttgcgtaaattttgtttgaatttttgacgttaagccacattcattttttaaatttcccattttttcattgatcatttttatttgacgggcttcttcggtccaccgctgcctttttgtccaatatttattgccttgatccgcttcttcttctttttcatgaaacagaggaaaagcattcatttccctctccccaatctttccgccgttcatgacggaaatccccccgccccccaattcggcacctacgcacaaaacgtgccaaccgatcggggcccagcagctgttcatggaatttggtggggggaacatttgtgacttgaagcacatcccgaatcattattttgcctcagggcataagccaaaaacagtgccaccgcctaaggaagagctggcaataagcctttaagccggcccacccccggggggaaatgaaatcggcgccaccgtcgcctttctatcatcagcagaaagcacacatacatacaatacatacatttttcattcaccacacatttgttgagtaatcgaatgttttcttctgcggggcccaatcattctcactgctttagaagagagcatcacattgatcagtgctgactgatcagagcggaaatcacagtcagacacaaacatatgagtagggttgtggtgagagagtgtgctgatcggagagagccagggttaggcagcaatgttgaagttagagagcaaaagtcaatgctgatcacccaccgatgggaaatggctgcctttaaatctctgtgtgtgtagaaggggtgaggggagagagcatttttttctttactctctcactctctctcgcttccacctctctctctttctctctctctctgtctcctttctctctcctcgcaacttttttttgtggctctcaagttctcaagctaacactctcacacacctatagctgctttccgccagccgggataaagctgctgctgcccttgcctttgcttgctttgatcagtgagacgagagtgccagggagggggagggggaggatgaagcataagagaacaccgagaggaagtgtgagcaaaagccgagaatagacatgtgtgagtgagtgagtgagtgtatgtactttgtgtgatctctctgcctgcttctgatgctggtgggtggatcagcggatgaaaagccggggctaaagcagaggggacgaggacaacgacctctcaaccgcccgatcacttttcgggatcccctcagggcggagatgtgcttatcctaaacaatcggcttggccgcttgaaattttatgacccaatataccatccatccgccactaattgctgctcttaatgttaggtttatgggcataattaatgcgaaattttaccgtcatggtttcgagcagcaccatcaccccacttttccatgacaagctgacagtttgtttatttcatgtaataagagacatggtactcgagagtctcgagtcgagactaaaaagtgtaaaatgcgaaggtgtgccgaaaaatatttatgcccaatttttctaaattctttataccgagcacctcaataaatttttcaatttgtttttaaattttcaatggcttaagtttatatatttatttatctttcacattttttacacaattttgccacctaatgttttctctagttctctctaaatatcacacaaatgcacttttgcgcactttgatcctaaattcacaagcggcggatcatccgatcctctgctgctgggctagccagtagcagcgcatgcaccacacctgatgaaataatgatcagttttttagttcatcgcccaaagttgtttgtacctcgcgctatatcctctctatatccccctcccgcacaaaatcaccaaaacttggccaaacaatgatatttttgaaatgcacaacggggcgggccgagagtggggaggggggataaagccgccgcgcgagtttggtttggcccccgaggggagggcgaaaagccgcgcaaaattcgtccaacaagaaaacttttctgaaggaatgcttcatcccccaggccgcccatcgcataggacacaaaaatgaaaagccaagccgataagtgctttatggctgcgcaattttttatgtgttggtcaaccaacaaaaccaccgggagcattttttgtgtgtgtaaacaccgcgcgcgcttgatcagtttaacgaaaaaatgcgctgcttaagcattcatttttttggaaaattgttttttcaaaaacaaaaaaaaatatctctacttgttttttaggcatatgacacgaccctctcctccccaaaaaaatagggaaaatatttgcttaaaatttgctttttcgttaagcttgttttgtatttattatctgtgttatagggctattaaaagattaggcctttctttatgttgcccggcttaaaccttcaaagggtagagctcaaaatttttgtagaattcttttttaaaaaaaaccattaatacaacaacaagcttaatgtaccttaaatttgggttcttccccgaccgaattttaattggatgcgagtgttttttaaatgagttgctatgtaattgtaagttttttttattttagaaaaatttctatcattttttttcaactttttatgcaaatttcgtctccctgacgaagttgttgtccccgacttcctccatgatccccgaggagttgttctccccggggatcgggcagcaaccttactgaaaattttcaacctcgggcatcacttactcactcattttgtatatataataattttttcaccttttaaaattttgatcacatctcaacccattaccgttaaatattgatcaccaactgatcagagtttttgtctcccattttctcagggctaaagcgagagacaattaattgattgcttcgtccattgcgagagagagcacttcaagacgagagcgtaacagacgaacaaacaaaaatgccgggcgcgccccgtttcacgcagaagccgtccatacagcagaccgcgcagggcgacctgctgatggagtgcctgctggaagcggacccgccgccggaggtgcgttggcaacacgcgggcaccgccatcaacgcgtcaacgcgtgtccaactgacgctgatcaatgtgtcgggcaacatgtacagggccaaccttgtgatcaaggtgggggtaattagtgttaatgcggcgctaattggcaaagtcatatattttgaattttaaaatcaagagtggacccttgtggtttgcaaaatgtacaatataatttttgtttaatgtgtttgattttgcctatcaaaccatttattttaaaatttatttttaaaaatttatttcaccaatataaagcaaataaaagtgatcagcagaatcgcacatttttaatgacttttttgtaattaattatttttgttttatattttttaataaattttgggacccataataaaattgatctgaacagcaacaaatttttaaatgaacacaaaaaagacaagaaaaagcttatccaaaaatgtcacaattttgaattttatttatttatttttatgcattttttaataataattcatttttgaggtatttatttaggagtttgatcttttatatagtagtttttcaaaaaagtaagtaatcaaagcactacaaaatttaaagagatatatcccataaggataaagctaatatacaaaaggaaaagctacaaaatttgaattcttttttttttattttggaacccatattttttgtttggcatttttagcaaaatttcgacacccccgcattttgttaaattcgacaattatgttttaggagcccagcgcttcggacgggggcgcgtacaaatgcacggcagcaaacaagttcggagaatcaaatgcaaacatcaatttgaactttgccggcggggaggaacaaaagtcgaccagcagtgggtcggcaaaagggccaacatttgttggcaaaccgcgcattttgccacgcgacggtggtgcactgattttgatggagtgcaaagtgaaaagtggcacacggccaaccgtcaagtggagcaaggacggtgagttaattggtcaattaattaaaggattgattaataattaattaattcggtatttatgttgattacggtgggttaattgacaatttaatcgatgaacccttaactaattaattgattggttaacttaattgtgttaattaatttgctctaattctcataggtgctccactaagcatgggcagcctgtaccaagacgtgttcgccgaccttggggacggcacctatttatgccaactggagatcagggtaagtaaggtcatctgctgatgcacaagtttagaaagaa

SEQ ID NO: 800 - DNA, 1969 bp, Heterodera glycines
gaagaagcatcgcgaaggcacgccgggcgagcaacggcgacggcacaagtccaagtcgcgcgagggctcgccacgcaaacacatccggtcgagaacggcaacaccgacccaggagggggcgagtgagggcacgctgaaactgccgggcgaccagggcgagaagagtcgggagccaacacgtaaacaatggcacacttggcatggaagtggcggggccgggattagctttatgagcgagtgagagtgatcagagcatttgtttggcttaaacaatcttttttcggcggtttattccaaaataactttttggcattttgtcaaggtacggaatgacagtatttaaaataatagctataccgtacatattcccatgttttcctttaccgtatatcattccttaaaaggattttaagatagttttttttatcccaactaatatactgtaatcctgtgtgtgatataggacgctattaactgtatatcccctgtatggtgtctcaatatttggtcctgatcctgtaaccattacattttccaactcccgccttagggctgattgcatttaaaaataataataattcgtttaaaattttattaaatttagcaaaaaagagccgccgtgaagctggtgacaaagaaggcttgccgccggcagcgccgaaagagaaaagccgccggagcagaagcaaaagcccagcagttcaagtggcaggacctgaagcacacaagagaccaccggtggtcactgatccgctcaagtctcaggtacagtaaattctgatcactttttgagaacagcttttaaagtgattcaatttgaatggaattgcaaacttaaaatttgatcattgatcaaataatctgtcacctggaatataaattaatttgctttatttgatcactgatcaaaaaaacatataagtccaaaaactgaaggctcacccttgattaaattgaattgatttggcttatatccaacctgtataatgccaatgtgtattgattgacaaatcaaaaaattttgttccggtattttaaacctaaatttcagtttttaaaaagggttttccattaaaattaataaaaaaaagcatctgattcaatgatcagatcagatccaatttcactgatgaatctgatttccctcttttacatttgataaaccctcaagtttctccattttgagggcacctgtcctcctcggcatttttcgggccatcaattttgggggatcctgaagaaaattggatcaaatccctctgctgttcatcctagactttttattgtgaaccccttttcgtgtccattgtttgccaaatttcgagagccttgagggggttcagaaaaaaatggttttggcaatattgcagacagctgttttggcgatgtgtttgttgttgttcttccgggtccatgataaatcaaaacttttttttgagcgtgaaaatattgatggaaacaattaaaattgttgttaattagggaaaaataaaaaactgaattgataaataacaatattttttaaactgacattttcaaataatttttgttaattttatgagaaaattttaaagacatttcaactttattagttttttaaaaaataataataattttactttattttgaattattctatataattaataaagcaaataaattgttaagattgcgcacaccggtgaaggtgtgaaattagagtgcgaattgcaatgtcacacttcaacaaaaatcacctggtcaaagtgagttgtgctttaaagttgggcacggggctaagtcgttccacaaaaaactcagtgatcgataaaattaaataaataaatttaattattcaattcacaaaacacggtgccgtccggttaatactaatgtacggtgggacgcaagtcattttcaattttctcatttttgacatcacttctcgccaattttctccatttgtagtagacatagcctgacgccattg

SEQ ID NO: 801 - DNA, 4446 bp, Heterodera glycines
  unsure (1)..(4446): unsure at all n locations
attaaaatttttattggatttttaaggctgaaaagatggaggtggacacgaatggaactgctgcgcagaagaagcggcgggtgccctcatccaaaaaggaagaggagaaggaagaagaccaactggtgccggagaagcgagtccaaatccatgtgaggcctgagggcaagggatgttgagggattttaaaaattaaaaaaaaaatacacatttttatattattttccaatttcttaattttaagagtccatccccttcggaaagcggtgccacaacgccaacaaaaaagggcggcaaaaaatattccggaagtcgccactcgacccaggaagatgtgggttactgtaattcactaaacaagtttactgtacaattctttaagcattaaaatagtcaaacagcgttttatgattttttaatagtctaattgatttcgaataaattagtcattgattaggggaggagggtaaatttaagaagcagactccataatgatttttctttttgaaaaatttaaaattaaatctttggtcccaaaaaataaacttcatatgattaggtaggtaggtaatttaaaaatagaaaagtttgtcgcggcgcgccaaatttttgcgattcaattagaaacagtcgtcacaacaattagactgaatgattgcgtgccttccttcttttatcacatcaggccagaacagctttgtcccaaaaatatatggtgttcttcttgtgttttatgcttttgtcgacgtgtcgccaaaaatattttgacgcgaacgccaaatcaaaaaaaaaaattttttttttgtcgccgccaaccgctcataatttgcacagcatcaaattacacacacacacacaccgcacatgaagtaaatgggggaattaggaccttagataagcggtctggggttaagcttttttgtggatacaatctgcgcgctgatttcggcggatttgcccctctgatcagacacattaaagcctctctcctctctgatcagcgttcggccgctgaaaaatcgttgttttgggttgggcagaggagagattagttcgacgaaacgcgagaagacgcaacaaattttgtcgaaaagcattgatcgaagcaccaccaccaccacaaattcgagagtggattaagcagcattttttctcgagagtgactctcgacggcaaaataaaaaaaatgtcatggaaaaacgcggacagcagagagtcattttcgtccgcctctgactcaccattgtcccacccgttggacatcattcacgaggaggcagctggcccgtcaagtccgagcagtacaacaggcggcggcgtggaaagtcatgcggaatcgttgtcctcagtttctcccgcattccgaagcccaacaccaagccatgatcatgatgtcattgcacatggaggacatgccaagacaacaatcagcaacaattggacaacactccgaaatcatacaaagaccacaacggcgccaagcagtacaacggcggctacacggaatgggaccaataacaatacgctcgtcaagccagctgcagctgcgccaagcttccggagcgccacccgggccaagcagttgcgtgaagaggcggaagaggaggcacaacggaaccgcgcagttgcgcaacgccggatcagcgcggtgcatgagttcgtgctgaaccggctgccacgccgttcggtggccagcaacgcaattttggacaacatcattgacttccatgctgcgcaaccggcactgccaacggtggaggtggagcgggcaaggagtaccgctgagccggacgtgccatgggcggctaagcgccggaacagctccgtgtttaacgcggtcggtccacacattcgactaaagtgccaaaaactgtcatcaactaatcacggcacgacttcaaccgaatcacacctaacacgcccaggcacttgagaaacttttgccacactaatttattcgaaatcatttcctcgtttttacaactcgagaatcttgggcgataatgtgggaatatttaatattaagttaaacgaatttttaacttgaattaattcgttataaaaaataaaattaatcaaataatttattcattttaattatataatttgtttccctatattaatccgagtataaaaaataattttttaaattaatcaaaaattcttttaacatgtttttaatccgactatattaaaaatgactttcaaaaatttttttaattttgtttgttttttaaaacgccgaacaatgatcttccaaaaattaacatttaatattggattttaatgtttgtatttatattttcaaaatcattttacccgcgctaagccttaacaaacattgtactaagaaagtcttaatttaaatttaaaatatttctaatcataataataactgttttaaaacacacttccccaaatttaatttaaaatatttataaaaaccaaaataactgattttttaaataattttttcacccaatttcagatttcacaagtcagcgacgacattccggccagcggactgaaaattccgccggagcgtcgccgtgaactgctcgcgctctccggcgggggtggcgaatcggaggacgagcgaacgtcgtccatttctgaacaaccaccagcaaaaaaagcgacgacaacaatgaaaaagccatcagtgaccatccaaaaagaggaggaaaagcagccagcacaagccaaatcaaaatcgccatctccgcgaccagcaaagtcaccgtcaccgaatccgaaagaggtgggtactgtacaaatggtaccggtgccgtccgcgtgcatcattaccatattccctccggcgggtcgccgggaagtggtcgaccaattcggcatttgcttctactcttttaaatgcattttcagtgtgtgctaattagccacttaagtattcatgatacggtgtcctgaatttgatgagaccgtaatcatcgaaaattccgtaaatttatgagccgacaattccaacgcctaatttttgcagttttttccgtttattttcattttgaagcttttttgaattaaattgcatatattttggcagttattccgttgcaactaacaaagctaatcaacaaaatgccaagtcaacagccgcggcgcgtaattttgaaaaaaaaacgaatcgcattttttggatggaataaatttattgcgatcagttgccctcacataatttattggcggtgaaattgggtgcttttgtttacttatcccctccggggtgcctttcatttcatatcccccccccccctagggggaatgcctttcctcccgctgcattttgtgctttttctttttcattgagcgaaatcaacgcttcaagacccgactctccccctcacccccgcccattcgtcgatccatttttttcgcactttttgccactccaagcccgatcatttgatgaagccgccactgatcggtggaagcacaacagctccagcagcagcagacggacgacgacccgcggatgaatgaatgaattcgttcagcaaaattcacatcctctcatctccattcatcaactggcattcttccggtccgcatggcccatctgttccggccgacggacgcttttcatcatcactatctcttctgtccctccccccacctccacgtccgccgccgccctccgcggtggcacgacgacgacgtgccttcctttccccatcccccatcatttcatttttgaagcaattcgatatcttagctaggtcactgctggtggcaccaatcagttagttagttagctaggccacaagcaatggcggcaaggcttttaccatggagaggaaaagcattggtgcattaaagcatgagagaagcagagagagaaaagagagatagggagaaagagagagaaagcagagaaacagacggagaaagagaaagagggaagagagagggggagagagagagaaagagagagagagagagtggagagagagagagagaggggagagagagagataagagtgtgctccaataaaatttagggaaacaaagatagagaaagcgagtgataagagtgcaacaacaaaatcagcgaccgctgcttgcaaacacaattgggtcgaatttttgaggtggcatgggcccggtctgagcggggaatcaacggatgagaaatgttccgatcggtgtccgatcccgatcgatctgactgatccaatcgttcccctccccaatctaccatcaacccatcatcatcagcacttgatgatttttgttgtcccaacaaaattttcccgattcaagtgcctttttcaaaaacattcgatggccaccgttcttttccctttagttaatttaatgttctgttctcatcaaataatccttcattcattcattaattcattttggattaatgaaatctttttcggaaaaggtctaatcacttttactaatctcangatacatcca

SEQ ID NO: 802 - DNA, 1429 bp, Heterodera glycines
aattttcccgattcaagtgccttttcaaaaaacattcgatggccacgttcttttccctttagttatttaatgttctgttctcatcaaataatccttcattcattcattaattaattttggattaatgaaatcttttacggaggaaatctaatcacttttactaatctcagatacatccataccaaaaaattgatcttttttgttcgagatcccttattaagggggttgtgacttgaaaaaaccggggattaaaaattttttggaatcagaaacaagaaaattgcaaaaaatcgggaaaactttattctaataatataagtaaggcccattaaaaacaatcaatcaatcaatcttaatcactgatcaatcttttacgaatcagactcaaatcacacctaataatacactggattaaaaaaaatcccgcaaaattatggttcaataaatgtcgggtcagcaccatgttccgcgcacccatttccacgtaaagcagcgagacaacaatggcattgcggtaacgaaaaagaaacaaaaatggcaaaaaaaattttaccaattttaattgaatgccaaaaatgaatgaatgaaagttcggtccttttttttggttagggtagcatcagagaaaggggcaaaaacgagccgagaatggccacttccatcagcaccacatccggcattaacggggacgaaagtgggccttccaagccggccaaaacggcacggtactcaccagttggaagcgtggccaaccgttttgagtcgcgcggtgccaaatcatccgtgctcaccgaaatcaatcaaacctcgttgcgggtgaccagcccacagcgcaaaaacgcttttccactacaagctgctgctgctgctgatcaacaagccgaaacttctccaacaccagaatatgtgcccatggaggaggttgagttgttgatacagtaatttgaatcatgggttttcgcgcgcgcggtaaaatttaaattcgaatgaacggcgcaagaaattttttaaatgctttcctatggcacagcgtttttctttttgccaaatttacgcgcaaaaaaagcattttgataaagcaaaggcatgcacttgttgagtgagcaattttcttgtcgtattattgcgtttgttctttgtccacagtgacactcacttacagtatactgttgtgtctaccgtatgcaattttttgtttgaaaaaataccctcgttgcttgccttaccacctccgtgctcaattttttggtttgattccaggccaacggtcgtaccccaacaatgatccaggttggccgtaaaaagactggccaagcactgatcagcgagccgacggatgagtaccgggaaagctaaaataaaaaaaacgctctcaaaaaagccttacaatcgatcaacaatttggatttgtattgtgaatggaatgtga

SEQ ID NO: 803 - DNA, 1969 bp, Heterodera glycines
  unsure (1)..(1969): unsure at all n locations
tcccctaggccattaattaaaatcagaaaaacggggtttttgagaattaaaaaaatttttttttctcttttactatctatcacacggaagaaaattattcattttccctaaaattattgcaaaattgcccctccctcactttattaccattgagttaagtttgcttgaattaggctcatttaaattagcgaaatttttttgaaattgaaatttccgatcgatcgaaagcttttttcgtgttttatcgtcgtatcgtcttatttgccatttttttcctttttgcctttttttaaatttttgctcttcaaaagcatcccaattttgtaatcttcatcttcttcatcttactcatttcgtccttcttgatgaagaagcacttcttctaattttgtgtttatctgctgcttttccccttgttctccctttgtttgctcaattttaaatgtttccccacttaattaattaatttttatttaattacaaatgtttattttttgttgccaaacttcatcattataatttataataatttttattttacattttattttttggttgaaaccctttaccctattctgttcaaataattcaacatgtgctactaataattcccaataatgatatgatgtcggaacaggtgataagataatgattctggtaaaatcttaattagttaattggacagtaatttttcgactaaatttgccataacttttcttaaaagcattgtgccgggattaaaaaattaaaccataaaataaatttttcgtaaattagggttactcaccgaaccatcgggatagaaatgtggcgggaccaggacaaaatcccccccccccaatcatttgtcgagtttaggttgagaaaattccgggaaactccctcatcgggaattattcgtaaaaataaaaaaattaaaaaaaaattaaaatccatgttcctcatccccatgccaaaaatccatcccacccacccacccacctaaaacccatacaatctcccaaatgcacacacacacacaccacaaccacaaatctcacccaggatggcacacagttgaagcgcaactcaatgcaacgcctgcaaggcgtccaagtgggcaagaagcgggtggagcacgagttcctccaggtgcagctgaagaaaacggccaaaaccaagaaggaggaccaaaaggaggggctggaagcggtagacttgaagcaccgcttgtctgagccgcggcacagtctgtcaccgcgtccggaagaggtgcaggcgctgaagcgcgcctcgttgcggccagagagcgcggaggcgcgcgaggccacccagctggagcagtacaggcgggccagcatgagggtacagtttggctagacgctaccatactcaattatagttcattccattttttctgctttcgcactctctgcacaatatgtaccgtacgtaccatcacaccccctctttaatgggtcgatactgtagaatcacagggaaattcgcaaatattcacaaaaaaattcatttgttatgtcaaaagaaattcttcagccattaaactcgaggaagctttccccgattccgccatttttggcatttcgaatttttaaatattgccaaattaattttgcgagtttttctaagttccttgctgtatgtaagtgtcaaatacaataatacatacaaggtatgtagagaataattaataattacaataaatatgacttttgcacattgaaatatataccctattttacctaatcaaatcatatatttatttttcattttcttcatacttttcatgaagcatttatatcttcttccctcttttttccttgttatttatttttcaaattttcaaaaaaatttcattttctgcacccttttttcttgttttattgtgccttanaattntcgttctatctttatgataattttcttgaaccnagactctttgatatcgcaaaaatatttcagagtctcg

SEQ ID NO: 804 - DNA, 804 bp, Heterodera glycines
gaagaagggcggccgagaagtgccattgacgggccgagtgcggtgccaaacggacgggtgacacaggacaagtaagtggcaatgaaagccaaattttgaaaattttcgcgaatttttttaaataaaatttttaaacacaaatttttcaaaaaaggttgctgtttttggaaaaaaattcttgaaaacacagtcatttatcataaaattttgaaaaaatcactagaaaatttcaatttttttcttgaaaaaattttctaaaattttttgaacaattttagttttaaattcattaaaattttacattttttaataccgtaaccccactcaaatggagtacaagaaaaacttattactgtagcacatttatttctaatcttagaagggacatttacggcactcaattaattaattaattatatagctcatttatttttaaactaacttcaaaacttagcattaaatttaattaattttttaaattaaatttcaaataatatatatttttttaattttcaggtttctctgattatttccaaatgtcgaccacaagacgaggacgagtacacattgatggtgaagaatgcgcatggcaaggacgaagttggcgccaaactgcttgtcacgccagcagctgaagtgaaagaaaaaattgccctaatttaaatttaaataataattttttttttaatttttaattttcagtcaaatttggacttccgggccaagttgaaaaaacgtgacacgagcattagcatttcggaacaagaaaaacagcgtcaacggagtgatgccgagcccaaaagc

SEQ ID NO: 805 - DNA, 4317 bp, Heterodera glycines
  unsure (1)..(4317): unsure at all n locations
aaaattgtttaaaaaatcgaaaaaaattcacccccaagatncggggttctgcaaaagtgcatagtagtagtttggttcaacatgtatttatattattggaatgaacgtagggcgtcttaactcattattttaagactttctatcgaaaaaaaatatagaaaattactcaattaaattatcattgctctgaatagttttttaaatttgtaccaaagttgttagagatttgatgtaaaagttgtgcaagagttgtaaagttgtttaaaaagttgtaaaatttgttcagcttttgatgtcatttttttcggaacacagtagtttggtcagggatgaacttataatgccggaatgcacgtagggcacaataacaacttattttaagtacttctatcacgaaaaatttctgaaaaattcaaaaaaatttttcacccccagaatccggcattatgccaaaagtgcatagtagtactttggtgaaacttaaatttatatgttggaatgcacgtagggcgtgtttacacataattttaagtatttctatcacaaaaaaattgttagaaatacttaacaacccctcagaatccctgcgtatctggtcaattttcagaattactgggatatttgtgccgtttccagaaatattttggtaatctatttgcagaaggataaagttcttctggttttttccccttatatgtatacggaatgtgcaactggagccggttccgtgactttgaaactaacgcctttcccgtaattctaatgcagaaaaacaatgtccgtgagtggcgaaaaaaataattttagtaccaaagttgttagggatttgatgcaaaagttgtgcaggagttgtaaagttgtttaaaagttgtaaaatttgttcagctttaatgtcattttttcggaacacagtagtttggtcagggatgaacttataatgctggaatgcacgtagggcgtaataacaccttattttaagcatttctatcaggaaaaatttctgaaaaattcaaaaagatttttcacccccagaatccggcattatgccaaaagtgcatagtagtactttggtgaaacttaaatttatatgttggaatgcacgtagggcgtgtttacacataattttaagtatttctatcacaaaaaaattgttagaaatacttaacaacctctcagaatccctgcgtaccacccctaatgcttcaggcaaaaattttttcgaaatttttgagttcgactccagagcataactcaatttaaatttgtgctaaaagcatgcttaatagctcattagaaccgccaaaatgtgaaggtgtgccctttctccaagcccaagacgctatctttaacatccatcgcgctagaggccgacgaccgcgacccgttcaaaaaacttccgaaaattttcaaaaattttttgaagaaacttttttttacgtgaaaatttcaaaaaacgctttacaccattcgatccgcaatcgaaaagtgccggaaggatgcgcaaaccgcatcccgctatgagcaaccgctcgcttatttttttagcaaacgtcatttcaggctacatttttctcttatagagggaaccagggccccaaggggccctgtgaaagcgccacgggcgctttcaacaccggggccagccgggaacagttgaagctaagtattttaaaattagccgagtgagtacgtcaagcgtttgaataatagcaaaaaggtggtgtacttaaaactaaaggttaactaagaattacacataaaatttttcagacaaaaatttattaacaataaagcaaaaaaagcaaaaatcagcaaaataaattaaaaaataatcaatcaaaaaaatcatcaaaagaactatcaagatcatttggttcttgatggttcgcacccgctgcgtgtccattatctcgttccacgtccgggtcattggccacgtccggtactcttgggcccacgtccggtattgctgcgtccgggtcattgtccacgtccatcagtccacgattcggtatcctcgactgctgcgtctccaagtccaacagttcgtggtaaaccacgttctcgatgtgcgttccgtacccactttggcagaacggcgcgtacaccctgatgccgtccatctgcgtgaccctggacatggcgacgtacacttggccatgcgaaaagcattgacggccgttgagtacgagcgccatccgctgcagcgtctgtccttgtgcctttaattttttgtgcttatatatttcaatccttaaataatctgtatttcaccttgtttatggtcatagcaaagcaaaggcggacgggaaactgcagacggcggaagcgtagcccacggtggtgtcgtgcgcggccatattcgaattgaatttgtggaatggcgatgatgttctgcgcacccgctcgtggtccggtgagaatccggcagaacaggttgttctccgaagtgcgcatcacttgaagtcgtgttccgttgcacagtccctgggtgacgtccaaattgcggatcagcatcacgggcgtacccacctggattaattggttaaaaatgatcaaaacaaaaaatagttcactttgatggtcaatttgtgcggcggcattccggatggcatttcattgtgcaccgcctccatgttgaagtcggtgcggaaattgtgcatctcttcgttaggctccagaggttcgtcgatggacaggaattcccttccgcacccgctcattctgccaagcgccacctcattgatgtgctgcacgtcgttgttggtcggacagaggatggcattgtgggcaattgcgtccgcgttggccagcgggtcgtcaaacagtgcttctgggaagcagaagtgaatggtgtggtcgaggtcgtccacgagaagttcgggcggaatgcgcagttggttggtgaagccttggctgtccgtacccacgcggtgcattccattgccgatttcttgcagccaatcgcgcaacgattgttctcctggtgcggtccgcatgttgatcgttaggctaataacataaatatgtttgtaaaaacaaagttgacaaattacctgatttttttgaacagacgaaagagcgctcccatcttgatcgacgtacccacttggtcctcacgagttccatgctcgactacgggagtcagttgccgccagtcgccgctcaacaccaccactttgttgccgaacggtgtggcatttgcacaaacgtctcgcaacagccggtcgatgtagtcgagcacggtgttggacaacatactgatctcctaaaattgttattatgaacgaaaagcaaacttatatttttgtttacatcaatgatgatcagttgtgcgtggcgcagttgctccgcttttgccgactcgaagttcagcatcggcggcgtctcctgcgacacgtcgtttggcacgtagaagtgcctgtgtgccgttccaccgcctatcagcaacagagccgcgatgccggtgctggcggcggcaacaactgagttccgctgcagttcttggttgcgtacccactgtgcgttggcgtttccatccaaggagggcttgcctgcgatgcaccacttgatcagcgtgttgtaaaagtacgtcttgcctaaattaactttagcaattaattatgcttttgaaaaataaggaagccgttattaccgcatccgcccgcgccttcgaggaagaagagcttctggtcgcacccgccaagaattgatgttgatatctcatcaaaggcggcccgttgatctgggttgaggcgtccaatctgctcgatggcaacttgctgcggtggtttgcagcgttgccgagcatcctccccatagaagctgtccaagatgttgtcctcctccaggagctgcgcctgatgttgaaagtcgtagcccactggcagtccttgcagcccaacatctcttaaaaataatgattatatggacaatattatgccagctttactcacttggtgttcgtccccatgcagttgaggtaatactcaaggttgagcatcacctcagccgcgcggacttcagctggcttcggcacagctcctgggtggttggcggcaacaggcgggttcatctcgtcgaggaactcgtcgaacagcgcctgagggttggacggatgggcgtgcgcaagcagcatggcagagatagagctgtagccgcttgagggagggcatttctgcacaggcttcttgcatggttcggcggaagagttcgtcgctcacttgaaaacgcgaatggtgacacgtacccacgaatgcggcgaattggatgccatccatggtgcgaacgtcggacaagttcttgtgacgcggacgg

SEQ ID NO: 806 - DNA, 5718 bp, Heterodera glycines
gtcgctcactgaagacccaatgtttggcacgtacccacgaatgtgtcaaattggatgccatcaatggtgcgaaggtcggcaaagctcttgggtcccggacggtggagaagcagtgttctatttgatagctttattaacttttcattttaatttattacctcaaggcaaatagctcatgcttgcgcggtgacacggtgtacacacgcacaaacatttttgccttgtccgggtcttcttccagtggacgcacccgcttcttccatgaccgcgacctgaagtcccacctaaatagcacaaaatatttactaattaaatttataatatttatttcaactcacgagtaacgatatggcactaggtcgtacgtcaggtgcgctgcctcctggtcccttgcgcagagtgcgaagaacgctgtaagccgggtgttctcgcgaaccctccaccgtccttcctcttcatgtccttcttccacaacaatcgtttgtccgagttcgtcgtgcacgctgagtgtgtagatttggtgcgacgtacccacgattttgtacgagttcaggcgcaggtaggcctccatggcggtcatgtatcgcactttgaacgtggcggcaatttcgtcgtagtcgtacacttcgtccgcacccgcagttccatcgtttctgccctgttgcgccggtcttcgtggctgtgcaacgcggacataggccttttcaaaccctgaatgttcttgaattattgaaaaaaatcaaaattaataaaataacaaccttttaacaggtatttgaagatatacttgcaggccttctgtccgaacacgtactccacattgatgtggcatccgtatttgagcagaagaaacggattgtatgggatgacgcggctgtcgtccatcagaatagcgctccggaccccccttttcttcttgtaatgcgtctgaccgtgttctccctgaataattatatattgaatttagtatcaattcaaataattggtacatgctgccgctccggtatcctcccttggtgtgggatgcgctggtagcgcacttcagcccagtctcgttcagggtcagcagcaggatcgtggtggtcgtcgtcatgttggttgtcgtacccaccggctcttccaaagcatgtgtcactctcgtcgggcggtatgcggacgtaattcgtgtagcggacctcttaaaggaattttatatttttaaaatgaacaatatcctttacccgataattcggtccggtcagagtacggcttcggaaaatgtttgcggcatcgcgaaccctccagacatgccgcattgcagtcgtgcaacatcattgttgtcgcgtagtgccagaggcgacgctgttggtgtgcctctggcgattggtccgatgagggcggaagggcagggatgcgcgcgcagacatattcgtccacgtgctgcggagtgtcgatgcggaccccccgttcaagaatcaggagcatgtgtatgtgtggcatgccttaatttatttttcttttcatataatataatttaaattttacctcgcttctggtgttccacactgtaacaccatccggcaactttgcccagcacaccacgctccgtcacgtccttgatgaattcagctgccttgtccatgaagatgcggcatacaatgtcgggccggtgggcatagttttgacgcacccgcaatgcttcgtcgatctcaggccactttggattgccagtgaaggtcacaaacctaaaaaattgatagcatcaattatgaattaaggtaatgcatttatgttaccaagtcggagcccccaggtgtcgaaccatcgtcatcaggtcggcatacttcccttggtagtattgccgtgacccggcaaatgtttgtggcatgaggaagacacggccgagctttgcatttggtccttgctgtcggacccccttctccatggcggtgatgtactcacgggccataagttgacggtagttcttctttgcctggattgacttcagatggtccagttcgttgcgctcaattcggttgagaaccgaaatggtgaagtactcggcgaggcgacgtgcaaaccacagccaatggaagtcgtatttgccggacccccgaagtgccattcgatagcggtagaactgccgttccgaaatgttgcttcggcctccgcgagtctccacttcatggtcgaagaggacgtcctcattttcatctctttctccgcaaattggttgggccgttgacgtacccactgcatttatttcgggttcctcaagctcctcgggaacatcggtgtccaattcgagttcgggctccggcattacgtcaatttcctcctcattcagctgcgtaaccacaatgtcgtcaattgcaatttcatcgcccaattcgtcgtcggaaatttgttcacgttcttgttcctcctggtgcacttcgggtcgggcattctttatcaaaccaatgtattttgagttcatttttattttatacctcgaacccacgtttcttcatgaaccaccgccatccaagcgtgccgcgtggatggatcaaagggaagcagcacgggtcgatttgcggcattccgctcttcagctcgcgcatcttcccggccttgtcggacagccagaatgctgaaaatttgatatttgtgcttttatagtgttttttattaccgctgatttgtggcggaaggccatcctcttgcacccaaatcacagccacttgcttggctgtgggtgcatccgctcgttcaataacggtgacatcagtacgcccgtgaagcggaccgcctttcaagtctcgatccgtcagcagcgcaatctttattatcaaaatttattatcatatatttttttattttttactctgaaatgcgggactacgccagtagctgctcgagcagcatcgatcttcgtacccacagtttggaatgtctggccaaatggattttgccgcatcaacgcctcaagtctctccatgattgtttgtttaataagtggcgcaacagcggtgtccaatgcttcctgacgaacattcaatgcgtcttccggcggcaaggtgtacacttgagcaaatgatgggagacggacccccggtgcaattaaatcgctgaacaggaaggagaactgtcctaaaataattatttttttatagaaatcagattttaattcttaaccattatatttgcacgtgtccaggcgaccccccatctgctcaggtggggccttttcgccatgtgtagatgcgaaggcgaacaggttgttgaacgccattatgttgttcagaaatgcctctcgaaccctctcgtcaacagcatcgaccaagccatgcacgtaggcaggaggtggcagtttgagttcatccaattcggtgatcatttgttcagtgtgtgtggcgccatttccacagcaaggtgtttgccttcgtgcccgcttgatgttgttgaattcgccaaggagcagacgagcaccgcaatgtccacaaaatgcatcaccaaattgaccgcaatcataatagtccacctaaattgttttaattaatgtttaaaaaaagacagtccaactctgtgtgaagacgagcgtgccgcgcatttatattcagtattttgatgacatctttccgtaggacggacccccttatttcttgctgatatttgtttaaatacgggtgctggtttgattccatgctcgtactgcttcaaatatttttgtgaagacaaaaaagacgatgcattctgttggcattgcgcataagaggggcaatcacatgcgtacccacaccgtgtataattagcagctgtaaataaaaatttcaattaggctaacaaatgtcagtaaaaaggcaaacttgttaaattcctccggcgtggtcgttgtgcagctattgggttgggccaatcacgagccatgtaatcacggaccaccttctccattttttcttcaatttgcttggcatgaatctcatttaactgaaaaaggaaataacacaaaaaaaagaatccaaaacctttgtgcgcctagcgcttgtataacgtggagtgttcgcacccgcagcaagaagagtggatgctgacttccgacgccgagtatctgtgattttttgttgaaaaattatggaaaaatgaactcaaaatacctgcaacgctttcaacgtcgcttgtatccgatcggtgctgttcagaacttagggctgcattgtttggcgtacccacgtttccattgtgacgggttcttttacttgcggaacctgttacttgtgtaataaatatagcttgttattagcttaaattaagacctccagcaatagtcaaagcccgtaatccgacagtggtcggagtcgaaacaacgctggtgtccagttgcagtgccgacgtacccacaatagcttgtccatcatttcgttgttgtctgatttgggcacgaattccagtcgacgttgaaggttctacaaatagattttaattctcatatgaaaagcaacaaaaaccctgatctatgccaaaaggttgctgaccacttgtattcggacccccaagagcattggccacgtcaggtgtctgaatggccgctcgccagcgtaaacgatctgcttcttttcttcttcgatcctttgaaggcattaatttaaaataatggcaaaataaatcaataaaatattaaactaaaaaacatatttagttttagataacagtaaaaatataaaataacatttatttaagcactggaactcaaaattaaaagaacacattacttttgttaggacagacggtactaaaaagcgaagcaaaggagtgtgcttttaaactatttttgtgcaaaaggtacgccagtggaagtgtaggcacgcagggacctctttcatgcattatgctgggactggaccgctaagatacatgcacgcagggacttctataggcaatggaagtttacaggcacgcagggacctctaacgaaagagagaattcaaaatgtatccagatggtaaaattgaattgcttggataacatgtacaaaattccatcaatcaaaaataattgaattatttaatcatacataaattgcaagttttatcttgattaaacaaaaattagaatagtttttttaattttgtgccaaagttgttaggaatttgatacaaaagttgtgcaggagttgtaaagttgttcaaaaagttgtaaaatttgttcagcttttgttgtcatttttttcggaacacagtagtttggtcagggatgaatttataatgccggaatgcacgtagggcgtaataacaccttattttaagcatttctatcaggaaaaatttgttaaaaaaattcaaaaaaatttcacccccagaatccggggttctgacaaaagtgcatagtagtagtttggttcaacatgtatttatattattggaatgaacgtagggcgtcttaactcattattttaagactttctatcgaaaaagaatatagaaaattactcaattaaattatcattgctctgaatagttttttaaatttgtaccaaagttgttagagatttgatgcaaaagttgtgcaggagttgtaaagttgtttaaaaagttgtaaaatttgttcagcttttgatgtcattttttcggaacgcagtagtttggtcagggatgaacttataatgccggaacgcacgtagggcgtgataacaccttaatttaagtatttctatcacgaaaaatttctaaaaattcaaaaaaaattttcactcccagaatc

SEQ ID NO: 807 - DNA, 3196 bp, Heterodera glycines
  unsure (1)..(3196): unsure at all n locations
aatttgacatcatacctcagagaggggacttcgccaccattcccagcgacgacaacgacatcgacaaacgaaacaatttgccctcctccctctcccattcaatcatcacactccattttgctgttcatcctcacatttttcatcttcttggtgttcatcgcgcaggtagcccccccccccctcaatcaatttggacttgcccctctttaggctgttcaagttggagcgcttttgcgacgaatggtcaaaaatcgtatcatccaacggaaattgcaaaaacgtcagaagagtgagtgtttttttttttgaaccaaaccaataaaaatttcaaacaattttaaggaatgaaaactcttcgcagtcaagcgggccgccaatcaatgccaatggtggtgaattttggccgggtaaaaactcaaattttttttttcatattttaaattttaaaattatttcagactggggacgggcaaatgtttggacaagtcgggggccgccaatcgtcgatgtcaccacctgttgtgccggtgaatttngggcggcgtgccgccgtaccaggtacaacaaaaacaaataccttcgcttccatcgcttccatttcttacagccattttttttttgaaaagggcctgcaaacgcaacagcgcgaggtgatttacgatgtgccgacggatggtggtggacatgaacacgcggaagatgatgaggacgacgacagtttttgaacgatgagccgatacaacaatgagctttaattcctcataaatttttataaaatttgggaattttcatttcacatttaacaaaatttggctaataaatgtaactcaaaatgattaattggcaatttataggagaccactaaataggagaaatttcaaatgttttgatgtatgggtaatcagatcattaggcgagattaaaaaattttgaattttaaacatgtgatataatctttttgaatgattaatgtgtgatatagtggagtaaatctgtcggtacatcaaatgagcaatttgtttaaaaatgggtcacatccattatcgggaattcgggatgcgttggtgcataataaagctgcctcccatttggagaataataataaagccgttgtgcaaggtcaacagcgcaccatttaaatgcatccctcccgtctcgctctcattatttcttcacatcacttgctcaatattttcacatttatttatccgctttacattttgctatatcccaaatcatatcatttaagcacacaaaatttacttcatatttttttttaaaaaatgtccgacagtccaacgcccgaaaccgaaataagcattgcatgggacatcctcgaaaatgataaagatgtagtaaatttttttctttaatttgaattcaaatcttatttatcatttttgcagtggtacaactggttcactccaacgaccgccaaacaagcgtgcgtcgaggcattggcattcgcgcgagaagggggactaaagcacgagaacattctgaaaataatgaagacgcttgaggagagagaaaagcgtgacaagaaatgaaatgtcgatcgatgaccgatttgttgatagtgatgtggatatatgatcatttttttttgggacatttaaaaaattggtgatgaattttgtcaaataaatggtggtgaatattttgaaagggcagaatttaaaattgatttaaataatagttaaatatggcggtgttctcatgttctacaattttattgattggctctaaacactcagtgaggtggggatgaggcctataaaaataaactgaaattgacttccgctcattttccgttttcattcttgaaattttccgctaaaatggccattaatatttcggacaccaaatcgcttttcaatcaaatcctcgcccagtccgatatcaccataaccacaagcggcataactgtcagtggtccacgcctatcgaccccccgttttttaccgtttgacgattgtggacgctgccgcgtttgcaaagcaaccgaggccgaggtggacacaatggtgaccaaagagggggtcacattgtggtgcactcgtatcaacaaaccccaatttgtgccgttcgatgtcgtctacgacctgccagggcactgctttttccgcgtgaagaacaaagcgagggtgttcaatgtcccctacggagacctgccctccgggacgtgtgccaaaagcaaaccgactgaccaccaacaacaacaacaacaacaacaggacttgaagcgcaaggcaaaggtagcacttgacttggtggaggctggactaatggccgatgctatgcaggacggcgcacggtggaagaaggccaaaaccgctatcaatgtgcttggcaatctcctattggctgaatcgttggacaatacttccgctcctccgctgaaaaatgatgccgtggacatcaaaaaagaagaagaagaagcaaatgtggcggaagaacacaaagaagatgaccaacaaaaagaagacctcggagacattgacaaaactcttgacgacttctttaaaagccttaatgcttcaacctcaaatgtgcctatttaagtgaataatttaacacacatcattttctcaaaaatgttaaacacacaagcattcaccaataaagatatttgttttaaattgccatttggcctaatcatttcggggccttcatcatcgggcaaaactgaatttttactgaaattcattgccgaatcggaccaattaatcacaccaaagcctgtgtccatgctctactgttttggtgaaatgaatgcagcggtgcctgtgcttcaaaaggcgggagtcgatgtgtatgcgggagtgccatctgaagaattaatcaagcgtcttcccaagcccctattgctgatactcgatgatctgatgctgtccgtcgacgagcgatacttgtcagatctgttcaccaaaaaggctcaccatcaccagtttgctgttgtgtttgtcactcaaaatttgtttgagcgcaagatcaaagtggcccgcctgtccgcccagtacctggtactgatgcgggccccaaattcactgctgtccattctttcttgacgcctatcgaaaagcgaccgcccgtccctatggctatttgttgattgatatgcatgcatcgtcggacccatcattgaggctgcgaaccaacatatttaaggatgagcaggaggaagatgaaggga

SEQ ID NO: 808 - DNA, 6189 bp, Heterodera glycines
  unsure (1)..(6189): unsure at all n locations
gacaacgcggacgaaatgaggagatgacaccgcacagcgcaggatgcaaccagaagaaaataaaaaaggatgaagcagaagatgatgatgatgatgatgttttgcatcacaaaaaatacaggatttatcagcgttcacctccacggctcccttccccacctcgagcgaaaccaaaaccaccaccacgccatccgaccacaaagagagagcaacacaagccaaaaaagttggaattaannccaccaaaaatagagccaaaatttgaacccgattcacgaccatcgacatcaaaagtcgcgcctcggtcgaaaaaagagcctgaattcccgcttgaccctcgaccatccacatccaggcaagccggatacattcctcctccggcacccaaaattgtaccaaaacatgagccgacaaagagacccgtgccataccgtatcccgaaaagagaacccaaaattgttgaagaaacgccacagaggcaacagcaaccacttcctgctgctgtcgtcgaagaaatgcctcctgttcctccgcctaggagggggaccaaacgccgccaccccgtaaatggtgagaatgatggtgaggtgcgcataagaaaacgcgtgaggcaagcgaggagggtgcgagtacagtactcacccgagccgggtccatcaacatctgcacaaagtgatgaacaacaacaacatcgagaactgtttaccatcccgtcaaatcagctgaccatgaatcagcgggttgaacgactgtacatcaaatgcaaccgttatgcggatcgtatgggtgtccgtggcaatacaattaacaccgcaaacggcaaaccgttggcgcatagcaatttgcgaatggccatcaggtatataattgacaggagagcgggccgccctaccattaagccacctggagcggccatatttgaagagaggcttaggcaagatccaattttgtattcatggacggctcctccaaagaaaacagcacagagcacaaccaccaggacggcaccgaaaatcaagaaggaatttcgcccgaaaaagtggagttgatcaactccacgcttgacaagctgtacaacgacccatcctccccagcggcgttcgcaggtgttacagcgctgtggaaagaggcgcgaaaaaagttgaaaaatttacggaagagggatgtgcagcattatttggaggggcaccgcacctacactctgatgcgcccccgaagggtgcgctttccaagagccaaaactgttgcggctgggttcatgaccgatgttcaagtggatttggccgattttcaggcgctttcgcgccacaatcggggtcaccgatacctgcttgttgcggttgatgtgctgtccaaacgcctgtttgttgtaccgctgaaaaacaagagagccgaggagatgttggaggcattcagacaactcatcgaccaaatgccaatggtcccacatcgcatcttctccgacaaaggcaccgaattcaagaacagattgttgaaggaattctttgatgagcaggaaattgagaagcatgagccagtgcattcatcagtcaaggcgtcggttgctgagcgggccatccggaatgtgaagcagcgactgtaccggtattttgctgaaaaggagacgttgaattgggtggatgcagtacagaaaattgtggacggaattaacagcgctccaactcgtgttcacgggatgcgccccattgatgttgacttttcaaatgcgcagaaagtgtggaagcgattgtacggacaccctgcccttcaaaagcggacgccacgcttccgtaaagatgaatttgtgcgcatgagcagagagaaagggcaatttgagaagggatatttaccaaattatggagacgaaatcctggagattgatgatgtgttgaaagcggtgcgcccaattcggtacaaactgcgggatgagcacggtgagaaattcaagggcagcttttatgagcaggagctggcgcgcgtaagaaaagatgcaaacacaagctaccgcatcgagaaggtgtacagaaagaggaaaagagcggatggatccacagagatgcttgtcaaatttataggatatcccaatcgggaatggattaatgagtctcagcttgtataaaagcatgtgcatttttcatttttgttgtgataataaacaagcatgtcaaacagtttctttgtgtttttgcccagcaatgtaacggattacccggacaatcagcccaacaaatttcgtgtccgactcccaaagcctttgcattttaacggctcgtgggtgtgtggactgcacagtatcagttacccctattcgtggtccaccatcggtacattggatgagcagtggattgacattcatttcacagaccgaagcactatcgatgaggaccgacagcgggtaatccgagtgccagtgcccaaggcatcggttaacagggttgaccagctcagagactttttggcagtcacattgcggaaccgtagcggagcaaagctgttgccactcccacgtgaggtggaagaggatcgaaatcgtactaaaccccttcactctccgccaccactaaagagaaacaaaagggatgcgtcaccgataccaccaccaccaccagacgagagtgaaaaaatcgaagactctcccccattgtacgatggaaatgatgaggacctgattgaggactctcccccattgtacgatggaaatgatgaaggggttattgaggagtcaccgccccattatgaagaaacaccaaaagaaactgtgaaaacgacgccaaaagtgtcgacaccaccgcctgtctcaagccctgctaaaccaacaactgtaaaaccgtcagctcctcctccatctgtcacaacaccagcgcctcccacaattgcaaagccaccagtaaccacccctcctacaaccacaaaaccaacaacaccgatccctccaccagccgtacaaacaacaacaccggtccctccaccagtcgtacaaccaacaaacatccctaaacctgcaaagccacaagcaaccgtcactgccctgaccgtaaagcccacaacaccggtccctccaccggtcgtacaatcaacaaccacccctcaaccgacaaagacaccagtaaccgtccctcccccggtcacaacaccggtgcctccaccaccaaagacaacaactacgccaacaataagtaaggttccgagcccatctgttacaattccggcaccgccagcgcaactaaagagttcggcactgtctccgaaagcacccatttctactgttaaaccgccacctccagtttcgctttctgctaaatctaaatcgccgccatctcctccggaagaatctccaccacactatgatgaagaaaaagacataaccgtaaagccaacatcgcctgtaaaaccaacaattactgcgcctccagcacagttaaaaagtccggcagcaactcaagtcatcaaacctcctcaacagccaactaaaccgttggctccgcctccaggcgctccacctcgttttccagctgctgcggtgtcaccacccccgccgacgtcagcagctcaaattgacccgtcgcgtttgattcacacactcgatccaccaaaaatttatttcaaaactcctccggccaacgttgaccccctgacatatgtgccacattcggtgtttattttatatgaaaacaacatggaacgattcaaggtggtgttcaatgaggagatcatcagccatttatccttctcacctcagctgggctatgtgcttggctttgaaaacccgcaacatgtggtgtcaaatgaagttgccaaatacgggtatgacttgcgcggcggcatctcaagttttgcagtttactcaaaaggattaactgagaacatgataattggcaattcactgagttccttgctccgagttgtgtccattagcggtgccacccccggcgactacactgagaagatttatgactcgccaatatttgcgagagtgttgccacgggagataaacgagattgagattgagctgcgcacaatggacaagggccgcctcgtgccgttcgcctatgggacaacgatgatcgtattgatatttaagaaagtgataaatttttgatttcatcattcattttgtttttgatttaacatttttataaatggttcatattgtgtttgacccaagcattgccgggtatgatgagtacgtgcagtacggtagtggcttagaaaaggaggaattcgactacttccgcgggtccagcccctttcaacgggggtacggcattcaacgcggggcgggcgttggggatgtgtttcgtggactttggcgctttttcctgcccattcttcgtcgtgttggaactacggtaggctcagaggcactgagcactggccaacgggtgttggaacgagtcgggcacgagggggtgccgctcaaggaggcgctggtcagtgagggaaagcgtggaattgatactgtgctggagaaaggcggcctgcccaaacagtttggaagcggaagaacgggtataaaaagaaagagaacacatgtgcctggtcatcaaaccataattggacgaacagtatcaaagccagcaaggaagcgcattcgctcggacgcatttggactttattaatcaatggcatttcacaaaattgacactgactccgtgaactcaatcaccaatgctttggactttttccgcattcccccgaccaatgtgagcgtctcttcgtccaaagtgtttgagctgctgcctagcaaccctctgaccgacacaccataccacttcaaactgcactcaagccaaaactacattgatctttccaaatgctatttgctcaccgagtttcgaatccataaggaaaatgctaatggacaacttgttaacctaaccattgatgatataaacattgcaccaatccaaatgattggccaaactttcatccgtaacataaaaatgagcatcaatgggcgcgaaatatttaatgccaatgcactgatggcctacaaaacatatttttcacatgagctttcctattcaacaacggcaaaggactcccatctgaatgcatctgggtactaccgagacacgggcgactcactggaaatgggagacggatgcacagcgcgacgtgatttgtttgcgaatagtaatgtagcccaattcattgccaaaattgacaccgacctgttcaatcagccgctgtatctgatcaatttttgtgagctggacattgaaatattgcccaatgacaacgagtttgtgttaatcgcgccgaccggtggtcggtaccgtttcgaggttgtgggactgaaattatatgtgaaaaaggtgtctctgatggacgggttggcattggacattgcacgaaagttagaggtgaagcctgcccgttatgcagtgaggaagacaatgatgaagtctgtgttcatcagtccgggtcggtatgagttcacagccaatctgttcatggaccaaattccccgtcgtgttacaatggggctggtggcgaatactgactatgtcggctcaattaggcgcagcccattcaactttcaaccatttaatgtgcgcgagatttccattgttgccaatggtcgatcttacccacaagcaccctatgacttgtactacccgaacggaaagtatgttcgtccattcaatgatatgaacgaagcggtgggattcgcaaattcatctgagagcaatggcataacttttgcccaatacggcaaaacccattgcatttacgtgttcaatttgaccaacagcggggatgatcaagcggcactgtttgatttgataaagaatgggaccacagcggtgagcattaaatttaaccatccagtgcccgagggaggaataatgttggtggtgatgggcgaatgtgactctcttgtgatgttggacaaaaatcgatcgataagcaccgataccactatttaaacgcgcatcacattgtgccatttcatttgcataaaatgtattcaaaaaaattgggtatcattttgttcttgctccgcgtttctattcctgttgtttcaacattccatgaacaaccgcaaaagccaccgccagagaatacatattctgcttatttaaaaaatttgactttgtctcggcaacaacagcacccagaatattcctacactgaatatctgagaagctttaagggtgtcaaangattactacgacaacaaca

SEQ ID NO: 809 - DNA, 1909 bp, Heterodera glycines
ttcaaggggggtcgggcatttaacgaggggcggggcgtggggatgttgtttcggggacttttggcctttttcccggcccatttttcttcgtgttggaagtacggtaggtcagagggctctgagcgctgtccagcgggtgttggaacgagtcggccacgaggggggtgccgctcaaggaggcgctggtcagtgagggaaagcgtggaattgatactgtgctggagaaaggcgtcctgcccaaacagtttggaagcgggaagaacgggtataaaaagaaagagaacacatgtgcctggtcatcaaaccataattgggcgaacagtatcaaagccagcaaggaagcgcattcgctcggacgcatttggactttattaatcaatggcatttcacaaaattgacactgactccgtgaactcaatcaccaatgctttggactttttccgcattcccccgaccaatgtgagcgtctcttcgtccaaagtgtttgagcttctgcccagcaaccctctgaccgacacaccataccacttcaaactccactcaagccaaaactacattgatctttccaaatgctatttgctcaccgagtttcgaatccataaggaaaatgctaatggacaacttgttaacctaaccattgatgatataaacattgcaccaatccaaatgattggccaaactttcatccgcaacataaaaatgagcatcaatgggcgcgaaatattcaatgccaatgcactgatggcctacaaaacatatttttcacatgagctttcctattcaacaacggcaaaggactcccatctgaatgccgcggggtactaccgagacacgggcgactcactggaaatgggagacggatgcacagcgcgacgtgatttgtttgcgaatagtaatgtagcccaattcattgccaaaattgacaccgacctgttcaatcagccgctgtatctgatcaacttttgtgagctggacattgaaatattacccaacgacaacgaatttgtgttaattgcgccgaccgggggtcggtaccgtttcgaggttgtgggactgaaattatatgtgaaaaaggtgtctctgatggacgggttggcattggacattgcacgaaaattggaggtgaagcctgcccgttatgcagtgaggaagacaatgatgaagtctgtgttcatcagtccgggtcggtatgagttcacagccaatctgttcatggaccaaattccccgtcgtgttacaatggggctggtggcgaatactgactatgtcggctcaattaggcgcagcccattcaactttcaaccatttaatgtgcgcgagatttccattgttgccaatggtcgatcttacccacaagcaccctatgacttggactacccgaacggaaagtatgttcgtccattcaatgatatgaacgaagcggtgggattcgcaaattcatctgagagcaatggcataacttttgcccaatacggtaaaacccattgcatttacgtgttcaatttgaccaacagcggggatgatcaagcggcactgtttgatttgataaagaatgggaccacagcggtgagcatcaaatttaaccatccagtgcccgagggaggaataatgttggtggtgatgggcgaatgtgactctcttgtgatgttggacaaaaaccgatcgataagcaccgatatcactatttaaacgcgcatcacattgtgccatttcatttgcataaaatgtattcaaaaaaaattggtgtcattttattcttgctccgcgtttctattcctgttgtttcaacattccatgaacaaccgcaaaagccaccgccagagaatacctattctgcttatttgaaaaatttgactttgtctcggcaacaacaccagccagaatattcctacactgaatatctgagaag

SEQ ID NO: 810 - DNA, 4496 bp, Heterodera glycines
  unsure (1)..(4496): unsure at all n locations
atgactntggactaccccagcggaaggtatgttcgcccactttatgacatgaacgaagcggtgggattcgcaaactcatcggagagcaacggggtaacttttgcccaatacggataaacccattgcatttacgtgttcaatttggccaacagcggggatgatcaagcggcattgtttgatttgataaagaatgggaccacagcggtgagcatcaaatttaaccatccagtgcccgagggaggaataatgttggtggtgatgggcgaatgtgactctcttgtgatgttggacaaaaatcgatcgataagcaccgataccactatttaaatgcgcatcacattgtgccatttcatttgcataaaatgtattcaaaaaaattgggtatcattttgttcttgctccgcgtttctattcctgttgtttcaacattccatgaacaaccgcaaaagtcaccgccagagaatacatattctgcttatttgaaaaatttgactttgtctcggcaacaacaccacccagaatattcctacactgaatatctgagaagattgtctttgtcaaagattgctacgacaaccacatttaaacccaacataacggccaccccgaaaagcgacaagttaattgatgagcatttctctgctgttcttccaccgcttatccaactgtgtaaggatctaccagcggaaagcaactttgcgcagaaagccatttgcggggcattgttcgccctttatttaatgctcatcctcagtctgattcttcatcaactttgttcaattttttggctaaagaatggacagcctccaaattataaagatattgagcgaaaatcggcagaccgagcgagtgtttcggggctgcttcgccagtgaccaattgccgcctcccttcacactacagtaccccacagcgctcgtcgtcaacagggacgcccaccacaaggagggctctcattggtgcgccatttatgcgaagggaatggatacgccagtgctctactatgacagtcttgctcagccaatcccgcccaccattacgtcatcatttttgtgccaattccccaagggattaacgaagaattcacacccataccagtccccccttgtctccacttgtgccgcccactgcattgtttttatttaccatttgtccctcggagacacatttaatcaatttctcaaccgacttgagtcttgttcaaacccagatttatatgccacggttgtactccataaaattttaaataaataaattaaatggttgaaaaaaagaaaaaataaaagcccgatgattgagcataaacatcaagatagccaatttcatcatcaaaatgcgggttcttcaaaatgtatgcctgatcatcatcattggccgacaaaggctcagttggctcaatcccgcatgctaccatttcgctcggtgttgccttcaaaattgccggaaaattgtcgcggtgcacaagatcgatggatgtgcactttttcattgagaacgggtttgcactttttgtgatgtgcttgagcaccacattgcaaagtgcaccattttccttaacatttttttaccataaattgaaaaacaaaaacagttcaaaaattttacgagcgaattgtgcgagttgaccaaaattcgggagcagaaaatgcgcccagatttgccgaagcaaacatatcgggcgaactcattgaaaaagcccgggtcacacagctcattgttgttgaaactgaaatgcaggtagagctgtccgtctgacatccatccttttgcactgatcatgtcaaagtcgagagcaagccgtttctgagtttacaaattaacaaaatatacaaaattaaattaaattattattacaatttgggtgaagtttgggtgacgcttcgcccgaaatatctcaataatccgattgaccactgcgataccggatggtggacggccttaaattttgcgaaaaatttgaaatttgaatttttttttcccacctggcttgggtgttaccccgccaaataagcacattatgggcagtgagtagataatttcgaagagaagctcggctggtaatcgcttgggcatcatattggtcatgaaatttgaatgaatgaatgaagagtgaattaaaatatttttgtgcccggttctcatgggctcattaattattcaatagttaatattgacttcaaaagacatttgaatttgccgacaatagtgaaggagataacttcaaaggaaatttgaatttgccgacaataaggaaggagagttcgagaaaattaattggtattcggatggggacaccccgcccctaggcttcataaatactcagtccaaatcacatttcattcatatctgctcatgtctttttactcactttaataataataaaatttgtaaaaataattaaattataataaaatttttattttctgctttaaccagagcggttgcccaattattaggctccgtttatcctggcagcatttgtgtgtcttttagggcttgggattgtacgcgtgacctttactaattacccgagccgtttaggtgccctgtcgtcttgtgcttcatgggtggcagtgtgctgctcttcagggcatagttggtttaaaaaatctttaaattattattattattatccattaatttgcattcacaacgacaatttccatgcctcaaaaattcgcggctttctcatcaatgaattgcttggagaggtgcttcaagagggcggcggcggcagttcatcatcatcaaaatctgcaaaggactacgtcaaaaagctggacagcaccattgagcatgtgccccgcttccagtacagcaaagtcaagtcgcgattcagcattgaggatgtgccagcagcaaatcctgaggggctcctggccggcatcttccagtactgccttgacgcagcgatggaggagagtcgtggacgtggaattgaacccacgcatctcggctgcatgatcagcagtccgttgctcaccggcggggacatccccatcccggttcgacaaatcacagacaacaccatcaataccatcctcaaccagttcaccaaagtggcacagagcaagcagcagcaaaacgtcacactgtggggcgagccattcactgtggtggtgaccacagttgaccgttctggactgcccggccgaagggtgctgaagggcggtgctcggcgaagtctagcaccagtgcatcatcgggtgacggaaacttgtttgattaaggtccaacatcacaataaaaaataaatttggtgacaattttgttaagatttgcaaccccgacggacactgcctcttctacgccttgcaggcgacaatggtggccaaaacgtgcggttggccccgttggagattttacgactacttgcacagtcggaggggacagcagggatgccttcggcgggacgctttacaattgatgcaggaaattggtgttcgtctcggtcggaacacttatgatgctgagatttgtgtgccgcgtgtggtcgaccactggaacaacacgcaacagcagcatcgatttgcagtgttcatctttggatcatcgggacaatacaaacccttgtacaaatacatcaacgatcattacgacactcccattgtgctctatttgaacaaccagcattttgatggtgtgcagaaattgcatggcttgtttggacaacactactgcctcgactgcgaaaagccttatgagcgtccgtcaaggcacctcaattcctgcaaggcgcgctgtatgctttgctcacgcgtcggaccagcattcccgtgtgtcccatcgggcggatttttccatcaatgcgcgggctgcaacaaaatgtttcgcaataacgggtgcctccaacaccatttggcatccaacttttgcgcccagtcaaagcagtgcaaggactgcggcgttatatgggacacacgagtacataacagagatgggagaaaagtaaacataaaaataaaataaaattttcatttcttgctggatttagggtcacaaatgccacgagacctattgtcagttgtgcaacacgtttcacaatcccgagcgcggatgcttcattcagcccattgagccaaaggagcacgacccgtaccgcattgtggccttcgacttggaaacaatgcagcatcagccagtggacccccagcagccagagatgagagagcaccagcccaacttcatcgctgcccgagtcgcgtgccctgagtgcattgagagcggaaattggcggagggcaacagcgggctgcagaatctgtggtccgcatcgaactgtcgctttctgccatcggccctttgaggacactcgtgtggacaaacgtgttgtggcggacaacccactgcaggcatttgtggattggctcatcttacaactaccagccaaatacgacacatatgcctactcacactttggcggacggttcgacatggttctggtctttcgcgagctattccggattgggttcaacccnggagatgcttcgacgggta

SEQ ID NO: 811 - DNA, 5590 bp, Heterodera glycines
attgcctttgatgtttgcgtcaaagccggttgcttgtattttttgtgccatgaattcacggatgtacgatttgaagagttgatcatcactgctctcgtactgcaacacccggaacaatttggtgacgtggtacccttcgtcgagtgctgcgttcaactccaatgatgtacatgtcgaaacccatcctctctgctgatcattgtgggtgcagctgtactcgttgtcaacgcctccgtttgggtagtcaacagcacacttgatgcagagagggaaacacagccgatcgcccactttaacaggaagaactggcacatcgcagcgccgcgggggcaccacccacactttgagaagtgacagatcgtacggattgtcggtagcgcaacgccagtccacttgttggttgagaacatggacttttggatggccggttgggtagcgggtctcaaaacttaaatgtcaaattaatgcaaaaatttgcacaaatatggcaacaaacttgacaaaggggtacagtgacgtgaagtcaaagtacgatatcttctcgccctccttcgccttgtggaaaagtttgcgtggccccgttcgcccacccatgaaggacgctcggatctcaagtgggccgtcgtccacatagctgccaaacatttgtcgcatctcagggtctgctgccaacatttggttaatttcacattcccagtacacatccacgcggccaatttgattgcgcagaaagtccagccgcttcgcgtcccggtctcgcacttcgccggctgattttccattgggcaacagcatattgtcttccgggaaacatttgatgcacccatgccacacgcaacctacaaattttatgtcctgtcaaagttttttaagatcaaaaataccattcacttcgatggccctcttctcagcctcaatccatgcgtcaagagagtagttggcaactcgcttttctccaccagctgagtgggccgtctgcaacttgacgccgtgtttttcctcgtaccacttgaagaaacgaagggcaagcaggctctggttttgcgcgttgtcatagcctctttcaggtacgatggccaagtgatcggcagggaggtggttgctgcgaaagtgtttcatgcaggcgcttgcgatagtcatgcactcccgcaaaacgtcaatgccggcgttgctttcttggtcgtctgtctcatttacagcctgcctctttgttatctcaaaaaattcacggcggaaagcgacgagcgctgccgtgaggatgtcgacgtcgtttttacagtagctggccaatgcctcgtcaagcaaaaatggttcgtggcggtgttgttcgtaccattggtcgaattggcgccgcttttcaggcatcattccttgtgccagatagtcgtccggtgtcgggtagatttgtcgtccgtagttgtccggccgattggccatgtgcgggaagaacggtttttcttccacatccaatccataggcaggcaccagctgtccgagcgcacaaggcataaggttgaaggagtcgcggaacacaaccttcgggttctttttcctctgcgcctggacattcatctcgtacattttatttccctaaattaaatgagcgaaatgaaagtatgtttcaaaaaattctcacctgacggatcatctccgggttaaatccccgtcggaagagctcgcggaaggtgatcaccatgtcgaatcgcccaccaaagtgactgtaggcgtatgtgtcgtacttgatcggtagtttgaagaccaaccagtcgacaaatgcctccattggattgtctgtcacaacctttttgtcaacggttgtgccgttgaaaggccgttggcagaacactgcagtgcgataagggccgcaaaccgaacagcctgcagttgcgctccgccacttgttgttgtctatgcaccccgagcacaccactcttgctgcaatgaagttgggctcgtgatttcttcgctctggttgcagtggatcggctggcagatgctgcattgtttccaagtcgaaagctacaatgcgatatggtggctgcattcttggctcgagttgttgtatgaagcaacctctctcggtgctgtggaaattgttgcagagagtgcagaacttttctccgcatacatgcccctcacgcccttttcttttgttgtcattcacattccaaatgacaccgcaatctttacatttctttgatcgattgcagaaattggattttaagtgatgttgatgacaatcgttgttccgaaagactttgttgcatccatcgcattttttgaaaaagccagctggtgatgcagaacatgggaatgcagggcctactcgagagcacatcatgcagtgcgctttgcatgattgatcatgcagcgacggtctcgagtaaggtcgctcacaagcgaggcagtacttttttcccgcgaatagcccgctgatgaactgaacaccgtcaaaatgattgttgctgaagtagagaattaagggcgtgtcatagtcgtcgttgccatatttgtacaacggcttgtagtgtccggatgcaccaaaaatgaacactgcaagccggtgctgctgctgctcgttgttccaatgatcaataatgagtggcacataggtgtctgcatcataggtgtccaagtcgaaaggtgctcggatctgtcgcatcaattgtcgtgtttcctcttgaaattttccgcgttgtccgtaccgaccatggatgtactcataaaatgcagaacgtgacagcccgcgcgttttggacaccattgtcgcttgaagagcataaaataaacaaaagttgtccgagttgtgaatcttaaacttttaaatattgagatgatatatgtgtgggaggggtaccaccttaatcagacacttttcggtgatttggtgacgcactggagccagacgacgtcttgctccccctttcagatgtctttttgttgggagacggcttcggtcaacagttgttatggtaatggtgaatggttccccccacagcgtcacaccattctgctgtttcgactgtgcaactttggtgaacaaattcaggatggcgtcaattgtgttggcagttatttggcgcacgggtacgaacacatcaccgccgtctaacaatgcactgctgatcagacacccaaggtgtgttggttcgctgctcttctcacgactgtcgctctttgcctcatcaatgcagtgtttgaatatggcggaaagaaggccttcgggatcggctggcacatcccggatgacgaagcgcgatttcactttggtgtagtgaaatttggcaatgtgttcgacgttgcaatccaacttttcgacaaattcgctgggtatttttttggacgacgttgtctgtgttgctccttctccctcctgaacggtcagaccaagtagctgattgatgaggaagccttgccgcaattttttgggtggcggtgtggtgagaatatcattaatagtgaatgggaatgggcgttttggacggttttccattttttgttttgatctaatatgaagaaagagagatgaatattgattaagtgataaaaagaagcaaaaaaatgcgaatttatggggcgaaataatgacgatggaaaatcgacaatacggaagggttgaatgtatggtaataagtgagggaggaacgggtgtggatacgataatagttatatgagcaggcgaatttaatcacaccacaaaatgttaatataatttgtcagcatttttataattggtaaggtaagcattttaaaccaatcttggcctgaagagcagcacactgccacccatgaagcacaagacgacagggcacctaaacagctcggaatattagttatgtaaaagcacaagacctcaagttctaaaaggcaattaaatttgctgccaggataaacggtgctttgcgtaattaaaacaaccgccctggttaacagcaaattaaaactttttatttgagcgaaaaatgtgaggagagaaaggaacaaaaaaagaaaaggcgtgccaaaaataataaaatattacaaatgatttgccaaatcggtcgggtgttagaaccagttgaattttccggttattggtaataggccacgcccatttttcgacttgaggtccctgcgtgcttgcacaaccaaaatttgcataatcgaaattccagctgaaattcggattcattttttataattttcattacaaaaaaatctcgaaaaatggagtgtgttgttcatgtcaaaaaacccaaaattacaagaccactcccaactgagctgctttgggagcagatcatgttcatcccactcatgcgcctgttctactcaaatggttgtaatcagtggtaataatcgaatttaaattttatgttgtttagcatccaaatcaacgatcagcgcaattaattggaaatttgaggttttacgaaatggacgaaagaatgcacatacaaaagctgaaaaagcaattgtatttttgtttttagtttttattattattaattctcatttaaaattaagaacgaaattgtgaagaaatttaacatggcaagcagggcgcgaaaaatgcagtttgaggggggcaatttggacttcagttcgcttcgcgaagaaaacggattggcgaaggatgacttccgaaaaggagtcctactgtatttgtgctatgggggaaatgaaacagcaatgttgttgaataacgttgcgatttccgttcccattctgaacgtaatattttattttttatttgcatttaaactttatattttagtgtatttttattcgtccacttttggagcaactatttgagttcatcctggaatcaccaaacccgttcaccatgcaaaaacggatatgcgtgggagggcatcatccgattcatttgcccaagtccctaagtctgccagcacgcgtcatggttagcaaaggaattcagccccaggtgcgctctgatgacaaagaaatttacaactttttcaatgtacacctaaaaagagtggttggacgggtcacgattttttaccatcttcgatttgatgagacattttccgttatgagcagccatttcgtgttggaatcctaatctaatgaaaattcacactttgtattttggtccgataaataattgcaagaatttgtgtcggaaagttcaaaggataattatagtatacgataatcaatcattttaatttaagttgtaaatttttaaaattggcggcaactttaaaggattttttttgcaaaacgaaaaaataatcaatcatttgaataatttttattttaagttgtaaaatatttttaaaaagtcggtatgataaaaagaaatattttttaagcattaaataataatcaatcatcatattgaattaaccttttaatccaaaaattcatttttgttcgctttaaactatgccgcgtttcgacaaaaaagtgccaaattcattgtattcaagagtattgtaatcaatcatcagaatgcgcagaacgggagggcggggcaggcagtggaacggaagaagggaggcgttattttttgctaacatatgtgccaaagatgcctttccgacggaatgccatttattttttgcatttcgttttttttttt

SEQ ID NO: 812 - DNA, 3739 bp, Heterodera glycines
aatgttggaaaaaatgatgctcatgaaggtggagccgatgactactcctccacggctgagctacccggaattcaaggaggagcgaattggcctatcgactttgatgtcgcgttctccctggagcgcatgtgcttggaatgattggagagggacacgaaacaattccaaatgaatacgtaaattccatttttttttggtccgtcatttcagcaataattttcataaaaagcttttgaaaacaatgttttttttaatataattttttgagtttgtgaattatttaagctggttccaatctcccccataaaaaataatgcaaaatttttattataattgcaaaatgagaattaaaaaaaggtggaaatatttccgtcaagacttgacgaaatgaccattcttgcatcttccgaaaatgcaacccccgtaatttcctgggtatgggctttcatttccaaaatttgcttccattcttcgactccataaactttgacactctctcctccgattgccaaatatttgccggactggtcgaacgtgaggcagttaatctttgaagataaaaaataaaaattttgattttaaaagtcattcaccgattttttaacatcgtaaggcgcaaaacaggttacagttttttgattccgcaaatcccaaattttcacttcgccgtccgttgacccggtagccaaataatatccgttttcggaaaaagaaatggcccccaccgcctccttgtgaccctcgaactggaccaagctggtctgctctttgatgttccaaattttgacgatggcattttttcctccagttccaaagatgagtccgtcggggtgaatttgaccacagcaaatgcccagcaaatcatcattagatttgacctgagaaaatttttttaaattcgagtaatgtggttagcaaaggtgaagaacgattgttgactttgaccagtggacgtccagcgtggagatcaataaacgaccagtgtgagtcttctgaggaacagagcacgtaatcgccagtcggatgcagggatacgtctgtgacggcttttccatgaatagcaattgtatgaagtgcattgggttgttcagtgctccagattttgacctgaatgaaacaaaaaaaaattttttttggggggggggggacgtaattgaaaattagcagaaatattttaacaagatgaaccagcctttgaatcaaatgagccagagacaaatgtctctaagttttggtgtaggtggactttagaaattttagacgaatgccccaaaaaagttctccgttgggtatcagcatcaaatctaataaaagcaattgttttgtcgacaccaccgcttaaaatgtaatttttctgaaaataagcgacgaaaattaaaaacacaattatatttgttttaaaaatgcctgaaaatgcacagcagtaactgagccattgtgtaccccttgaaatgttatgccctccgtaaaattttgaatttgttccactgatgccaacccctcggacaccgggcgttgaaggcgtgcagtggagtactcataatgttttagggtaaacaactgcaaattcgtttgatttagtataaattttgtgatttagatttctgctaaataatcatattttataattctttaaaggagatttatacttttgaattttatactaaatattattttaattttaaaattcttttattattttatttaaaacccacaacccattctcacattgaccaactcctcactgatacccggtaatttcttttttcggtgttcacgcagctgggcaactcttcgtgcatactctatcgacatttttttgaacatcgaggtattaacggatgaggaagatgacaatgttgatgctgcttcagtggcagtgttacgcagtgcttgggctttctccctcaaagcccgatacttttttccacctcgttttgtactcttttttggcggcccggttgccttgaaaaaatagtaaaaattcaaaaaaaatttgattacatcctctcccgctattataagagcatcatcaacgtcgtcatcaccaccaccaccaccaccatcaactgcagctgctgcaagtgcacttcctaataaaaacggctcattgagtatttggtcaacggcatccaattcagcgtgggcctcttcattttttgcaatgtaaaatttttccaaggactccgcgtccttaattttgcacaatcgatataatttataaaaattgaaataccaaacaatcttcaccaatccaggaaattcctggaccccatccacagtcaagactctctgagcaactccataagactttataataagcaaagtcatttttacactcattacaatgtacaacagatgggccttaaaattttttttaaatattacgatggatggggggggggggggtaccttgcaaaactttttccaacactccatccccatcggtatataatttttgaaaatcggatgggtgagccttttttgcattaattataatgtcagggagatgctctccccgacatttgccggccttttctttttcttttttaatttcggccataaggcgcatctcacggcacctttcacattttttgcacgccctctttgggtttacaaaacattttggggggagggttttttttggctggggccattgagaatgaatgaatgatggagttggtatctgaataaatttatgtgcttcaaatataaaattttttttcatcccctttcaaaagctccctaactggtttactcataattagtcagcggggtgcaaattaatgcaccaattgcctcaaatcctgtgctagcacagaaccgggttgctagttaaagcaacacaacaacacagctgactaaaacaaataaaacagaagagaaattatgaaaggaggttaaatgccgaaaagcaattacataaatttttcaaatttggggaaaattttcgacagttttttacaccctcactcaaatttttctaacaatcttactcataattagtcagcggggtgcaaattaatgcacctattgcctcgaatcctgtgctggcacaggatcgggttgctagttaaagcaacacggcaacacaaccgactaacaacaaataaaattgaagaaaaaatttgtggagggggtgggggattgtaaaaatttgagagaaaacaaagttacaaagaattgaaaaaaaataaaaattggagaaaaaaaattgtgaggggggaggggattgtagaaatttgagaagaaaaaattattagaattgagaaataaatatataaaatggagtaaaaaattgtggggggggggggggggattgtatagaaaatgtaatatggattgagtgaccattgcagtggtgcgtccatctgtcgttggactggacatctctgacctattaaatacgttgagggcaaaaaaaaagtcaatatgccccgtctctctcagattaattctccctcccttcgccccgcatacatttatcaaagcgaattttttgaatttttgcttgggaaaaatatgaacatagttgtcggggcaaattacaccccccccccctccccacaactccgtacaatgaccaaagttcacctttcttgtcggggttgcccccgacaactcccgaaaaatgcgcgaatttagtgaaccccggcatctcggaaatttttcccacatttgcagagatgtcggggcccggaagttaatcaatcaaaaaattacccgcgattagcacacc

SEQ ID NO: 813 - DNA, 1871 bp, Heterodera glycines
gagtgggtggatttcggggacgaagttagggcatgtataatcaaaaccattttcttcagaccatccgaattttatggatgtccgaccaaaatggccaccgacacggttcggtgggggtcaattacgagagtctttccagcgattccttcccccggttattacaattgcctcggaggcaaattgtggcagataaaaataattgggttggcattttataaaatttgaaaaagtttaaaaatgaaaaaatttagaaaaaggcgtcattcgtttttgagcagacttcgccggcgaatatggacagtgtggggcgattggtgaacaaactacaccactattacagcaatggaaacggacagctgaacgaaccgccgccttttctctcgcttcgattgtccaagtccatgcgtaacggtcccaataaattacataaatatatcaatcaattactcccccccccccccccccgaaaccgcccaatacccttgggatggcggcaccctcaaagggaatcccgccgccggcggcaacattaaagcccaaaaacgccccacaccctggcgtttgtgcgggaaaaccgccccgacacccccgacaaatcagtatggttaactacttttaaccattctaaaatggatgatagatattcaaattcatctttgtttttcaatcttttggattgaatcaaatcaatgaacttttcatcagttacctccgttcaaaagcgtgctgggtgagttgttccattaaactttttgttaacctttctcttctcagtggtaaggcttggggcatcgctgctgttctcttcttcacttgtatctgtatctttctggcgtaaacctttgtttttggcttttcagttggaacatcgcttactttctttctccttttagttggctgccgttctgcctggactcgtgcctcgattcttaccacttttgtaatgcctttttcccctcctccgttctccgttatataatttttcctcttattttaaggcccttcttgcaaacagctcctcgggcgattcactcactgctgataaatccttgaggaacatgtacaaacaaaacaataaacaaatatttccgaaacattgtccaaagagtaattaattaattacgtaatgccattaaatgtgtttgcttcacattcatttcattgttcccttgtttaaataaagctgaatttcttacatgtcacctcatcttgctcttttctttggatgttcgtttttagattcaaatatagggttacgggcggtacggagtcccggacttatgaggaggctaaataatacgtataggtcggaaaataggctacgggcttcaggcccgtatacgggtccagcccatattctatttcgagtagtaacttagtcatggtcaaaaatgttgtcccatccttccttgaaagatatcataggaaataaaattgtaatttttgcattctacaaaaaaagaagcgaactttctgatagcatttttcatgggctttctaacgataccaatcattaggcaatataagattgccagaattcaattcaattttttgtgccacacatcgatttcttcttttgctgtttgattttgctttcaaatacttttttgaatttaaaaggtgtaaaataattattggcattttttcatatttgtttcaaatgattttttgccaaaataaaattgcttttcaattctcatgattttaagaaccgcctttaggcagtgaaaattccaaaatttgttccatgccacagatgtttttaggggttttcagggtcggagaaaccgattctggcatctgttttgacccaattcgaaccccaaacccggattcgaacaaaaaagtcaaaatacagttttcaaaaaaat

SEQ ID NO: 814 - DNA, 3157 bp, Heterodera glycines
atttttatttttgtttttaattagtgctttttaattataccaaaaacataggatttgttcgaacttgaacgaagttttagtattaaaaaaaccaagtgcggtttagtttattaggcttataaaactctgctgattggactcaaaaaagccattaatgcattaaactacatgattttacggacataatccgttcatttgttttccttggctataaattaaaatctttactaactgaaaattctcaaatgctctctacctaacatttcaaaaaaattaaaaaaaaaattttcttgtaaaaaaaggcctcgggtcgccctgctcttccgccagtctgccagcccattttcccgctgctgctgttgctgccacctcaacagtgctgaagagtgatcagatcagtcccatcgcccgcttcgcgttcagtgatctggtgatcactgtgttgcgtttggatttctacaggacaggcgacccggaagcgatgtgcgcgagaggggggggggggtcaattttatgtaaagcaccgctttttgaatgcttggcaaattttggaccggaatgcacattttaagtttactgacagtgcctgaatttcaattagcaccgatttttggatacatgcaaaaatagggccgaaatgccattcttagtccggtatttaacgcgtttttaagttgtgattcggtttcaaaaataaaaaccatacaatttgaatgccaattatttttgaaccgttattacaaaggccaaaagacgatttaaacgtttataatctcactgatttatgagttttcaatattctaaccgtgcattatgagtttttttttaaattaatttccaaaataaaaattatttcttttttagcaaattttgcaaacactcattggacattttgctgaaatggggtgaactgccggcaaaaacccagcaatcgttgcggcatcgaatcgaagtgatgatttgtgccgaacaaataccatttaacaattgttagcccatttttgatcctttaaggagaaccatcctttcaatgaagacatcggcgcattgataactggtccgactttatctgtttaaaggagctctaaaaatgctaaaatcccaccgatttcataaattttccaaatcattttaaatgtacagaaaaatttaagcgaaattctgcggaaattaagttatcaatcacttgctttgggccagcttctttcctgtacatgctgctatctttttcaaatccgagctaaattcgcggatattttgaatttatcggggtccgatatttaattaatatttactcatctgacggcagttcattttgggttcaaattttcctttatctattgccaatgccattataaaaaaaatgccaaaattttctgttgacagccgtcaagttggaccccgaattgtgccagccccaaggactgctccatctgctcggctcgctgctcctctgtgttctcgttgacggcgactacgacgcgcgtttccgggtgctgctacggcacatttccgcactgcttggcatccactgggacttatttgaggaggtgccaaaagagactgatctaaacaaatttacaaatttccgaatttttccaattaatacatatacatagaaatatacaaaattaaattttctcaaaatgctgggcactcatctttctgcaagtttggcactttcttttttcagttcgagtcaacgctttgtgatcggctgatcgacgaatacaatgaaacagtgtgagaaggaatatttttaaaaaattttctatcaattaatctttaagctcacaaaatttcttttttgaatcatttttacagtgattgatttaattttttgcggggttttcgcttttattttattatattttaacaaataattttttcaaatttatttttattttcattactcagtgacaatcaaaaggtgcgcgagagcaaaagccgtctgaagaagcttaaacggtacgcaatgatcggcgcggcttcgggcctcggtggcattttgatcggtgatcagaaaataggaattttccttttttataattatatttttcaattttccaaggtgtcaccggtggtcttgcggcgccagtgattctgacgagcatttcggcgctcactgccaccacaattttgctgccagccgccgcttcggccgctatttttgggtccgcaattttgaattacaattaaaaaattaacttaaatatgttaattgatatttgaaattaatataaaatggaacaacaaaatttttggaattttttaatgttttaaaaaggtcaatttttaggggaggggggtgggagtgtttcttgggtttttttgtcatttaaatgagcttaagtttgcagacaaaacattaggccggtaaaataagggggtgggtgatctgccgttcattttgagttgtttgagcgtactgtattcttttcaactgtacagttctgtgtttggagctgctggcgccggcctcaccggctaccgtatgcagaaacgggtgggcgacattgaggaatttcgcatcgaacggctgacggagcaggacaatcaggtggagttaattatgaaataaataaaatattttaatataaaaaattggaactccaaatgctgaattttaaacctaaatccggcatttaggaacttcactgtgttctctgcgtgtcaggatggattgaggaccgggaggagagcgcttttcggcaccactggcgccacctttggatgagcaaggagcagtacacgctgcgatgggagagcaaagtgagttttatgtgggtgatcagtgatcagcagagattataatggttcgatcaacgctttttaagatagcaaaatgagtgatcatttggtagctaaaatgctgatcagtcattaaataagtgatcaggaaacaatgctggattcggccctcaaaacttcataacagactaaaagaccataaaaaacaactgctgactggcacttaagacgcagttgttctgatcattgtaattatgcactggacaggacaaatgagtaactgattgatcaaggataaaatcgatattcatttttttcattttatctctgatcaaaaattacaatagtataaactaaaagtcatcgccaactttcccaagcagtacttggaggaattgggccgcag

SEQ ID NO: 815 - DNA, 3047 bp, Heterodera glycines
  unsure (1)..(3047): unsure at all n locations
tctcctttgttgtttcctatgccatccaacgttcactgatggaaacaatgttggccagcctcgtgtccgccatcgcatggcctttggtgtgtaaaatntaaaaataaaattttttatttttttgaaaattttcactgccaggtgctgcttggttcctcctgtgtcatagacaacccgtggaatatttgcactcgacgtgctcgtcaggtaattaagtgccattttcgggcatttacggccaacaattgtatggaattttgttgcctaaccgaaaacggacattttgcattctgctccctaattaatacaccatcatcagtggaagaagaatgggtttaggtgaaaatgctgtaaaattatatactgggaattacagcttctagaaatctcattttacgatgcttaaagaaaattaattatcatacctgtgaactgattattagggatgcgatttttaggtacaaaaaatcgcgaaataggcacctaaaaaggcagaaaaaaatcgcaaaataggcattaaataggcacaaaaaagcccgaataggcacaaaataggcaaataaaattttttattaacgctttttaagtaacaaagcacgttaaaactttaaatatttcaattgtaaatgaaattattaaatgttttaaagttttttttcgaatatgaacaaatttttaaaccaaaaaatttttattaagaaaaaaatattaaatttagggataatttttttgaaaaattttacaattcttaggggggtattttctgaaattttttttgggtcatttcttaggggtgtattttttgtttttattgcatttttgttaaggattttttcaaaaaccctaaaataggcactttaggcacaaaaaccccgaaataggcaaagttaggcattataaaagtcatcgtagacaccccaaaccatgcggaaagggcttttttcgtgcttatctgtgcgtattaagtgcgcaaaaattttaggcatttgcctaaaaatcgcatccctactgattattaatttttggaatataaaaatgatttatttgatcacatgttttgttcatcaaaaattgaaaatataatttaatggaaaatttttatgttccgcaaaagccctactttttttgggccgcaaattttatgatataagcatccaatccactcgtttattgaatgcgcttaaacccattgctaatttctttcaggtgggtgaacacctcgccgaagtgttgctgacccggcagcacggtcggcgtccgatcactctgatcggcttttcgcttggcgcccgcgtgctttaccattgtgagtgataaaaaaataaataaagaatgttgtagagaaagggacaaactgatcatttttcagtgtttgtcttgaacctaatccaaacacacacattaaatttaggccttttggagatgagcaaacgcatgcctgaatcattgggtagaaataaatcaaataattttaatgaaatttcgttttgcccagcaggcattgttcaggatgtaattctgttgggtgcacctgtttcagcttcgcctcgtcaatggcgtcaactttgttcagtaaatttattttaattatcccattggattattgattgaaattatatttaattttactcacattaatgttatatttgaaatatctttcgtgcggctttttcgttggatataatttttcacaattttcatgttgtcgccggcagagtgatcaatggttactgtaaaagtgattggctgctgcgcttcctttaccgtaccatgagcgtccaatttatcatcgccggcacgggtccggtggacaatcgaacggagcgcaaaattgtcaacttcaacctgtcgcacattgtgcgtttgtcatttttttgcaaactttttgaaaattatataattttcttatcacatatttcataaaatttctaaaatttcccggcggcgcctatcttcaccgcccgactctattgtatcacattttgattttacccctttttggcgcaaaacgatgcaaattcttgtttttcaccctggcgctgaaaattttgaaaataacatttgagataacattttgttggccgaagagcaaaaaaaaaaagaagcttaaacacgggaaaatgagactcgaagacaattttttcactaataaataaaaacctaagaaaattctatgaaaaaaattgaaaaaatttaatgacgaattctaagaaatttcaaaaaataaaaaaaaaatcgctgaaaattttttttctcatagaattttaaagaaaatttttctaggattttttttcttgaaaatttcgaagtttgaatatttaaaaaaaatttattcccggctgtgttatgaatttggactgaaactaaagcggggtttttttcaaattgaaacattcaagttttttaaaaattaaatttgggacaattctttttatcattttaaatgaatatttctgaaaaggtcaaaggccatttggactacgcgaaaaagatgacgcaagtgctggaggccgtgggcgtccgttgcacgccgctttcgcgcgcgtcgtgcgccaatttgtccgaggacgcaccaatgcacgcagaagcagaggaagcgactgaacggcaaacagtacaggaggaggagaagcagagacgggtcagagaacaatgaaaaatattgccggcggggggggagaggaaggccaattcagtctgtgccaatttgagatgatataactttttttaagttatggaccgaatccaacaatttttgcataatttaaaactcttggcagtttttgttagcctattaataattaaaaagaatgtcaaactgtgaaaaaattgtagataaaaaacggtgctaggtcgttatttaaaaaagcatcattatgattttatgtaaaattatttataacttagcttaaaagcaatcaaatttttattttttcatatcattcggtagccctaagtatgctctacaagtttacaaattttagaaaatttcatcaagtttcaaaaatgttagggccaaaaatgctcgaaaaatactcgaaaaacaa

SEQ ID NO: 816 - DNA, 3568 bp, Heterodera glycines
caaaaggttgtcgggcccttcactgggcactgcctcaaaaacaaaatttatcgatgctaatgcaaacggagatgttcctgcagaaacaaggagcgcgagacgaacaaactctggtgacagcaccgatacatttttgtccgcagtgtccaccaataatggcacaacataagataaattcgtttcggctttttgtgccggtgatcattcaggggcatggtccgggtcaaatttcaaaaagcattgtattgtataaattaatgaatcatttcatcactcattcgatgtgctcattttgtttttttcagttttttttattattcctaaacatatcctaacgatgaaaatcgaaaaaaattttttcttcatttttacttttgttcgaattttgttgtgttttaaagtaggtaatgttaataacccggatttacctatatcagctaaaattccggaataaatttatacccgcaaacaataaaaaagctagaattgctcattgaaaaataaagaaatgcatttaatttttccgtggtaataaaatttttataaaacaactgaattcctcttattttaagtaaggcaatttccattttgatagatttattttgaatttctttttagtttaatttcgatcaaatgatttaaaaaaattttggtttcaaaattttttttttttattaaagcatgaatagacgacaactgaaactcatcttttttcattttcaaattgccatgtgaaaatatcgcccgtcatccgcattttacgttgcttctttcaaattattcccagtcaccatcgccgccgtatgcgcttgccaagttggccaacattagttttgtggccaattcagtctcggaaacaatctgtaccgtcagcggaacgccattcactctttcgaactcggctccaactgtggacatgtcgccagactccgcacgggtgatcaccagtcgaatcagatcacgttcattttggctctgaaaaatgtcacaaattctcgttttaattaaagcaaaaattcattaatcttatgaatgctttgttttcaaatatcaatttccttgattgcggtgctcaaacggtccgcaaaatatcgtgccggattgcgcgcgtgttgtacgatggcatttaatgcttgcaaaacatcaccaccaaattccgcagcaaatttcttaacaatacaagtctttaaaatatgcattttttaatattttcataattatttaatattctttttgtaaaaattaaaaaaaaaataaatttcggcgaagcaaattctatcatttcgcatcaaatcaaaatacctgttcaatggtatcatcataaaaacgatcatagcttctgaatgtctcgttcagttgtttttgactttcaattgtcaattttgtaaaaaatgtttcttcgtcgactccatgtttgtgcactgcaaacaaaatcgttgcgtcctaaataaaacaaaaatggaatttctattatataaaattattaagagtaattgaaaaccccaaaaaggcggaggcggcaaactttggttcgcaaaattttttagatgatgttcagccgtggaaatgaattttgactaggactcagaagcaggtccaagctcggtttttaatgattttcgccataatcactgacctccactaaggtcggagtattaaaaaacaaaataccacctgaaatgctttgtcaatgtttactgtagcagattcatttcggtttgcagcaattaatttggtcagaagcaagttgtaagcaccactcgtgtcaccgtcaatgtgctttttcaactcctcgtggtacagctcgacgtatgcctatggataacaaaaaatgaaatttatagtgactaatttatgacatgtacttaatgtacaaccttgcggatggcacggatctgtgcattgcttcgtgagattaaaatctcagtcaggacttcttcatcagttccgattcccttaaatcaaagaaatgatccgaaaataataataattacccccctaagaattttaaaggattgccaactttatttattttttcttataaaaaatttatgtttaaaaattttccttaatcgaaaaatataaagtatttaataatctttttaatcggtctctaaatagcagaaatcaatttttagtttaaactgccgcacattattcattaaaggtaaattaaatctttttaataaaatttcacaaaaatagttgtttaacttaccatcattgcattataaagacttgctgcgtcgtaaatggcactctcataaagcagcgacaaaatgagctcttttggcccaccatttggcaatttctttcggatgctctcaatgagactctcattgtgatgctgcacttgaccaattaggcgacactgaaattacaaataatattactgagtaataaattattatagaattattaaggatgcaatttttatgttttagtcaatttttttttactgagctctctatgatctgaaatgcttgaaaaacatttttttttttggcggttgttgagctacttttacgattgtattatttttcaagaatacactcctaagaatcgagccgaaaattttaaaaaatatacccctaagaattgaaattttctcaaaaattcaccttcaaaattatttatctatttcttcacaagaattttacgatttttaactgaattatttatctcaatattggtttgatctattataataaaattttgtcatttacagccctaaaaatgaggtttttagtgcttgttttgcatttttagagcctattttgagggttttttagagctctgagctacctattttggcagttttttgagcctaaaaattgcatccctaataatcatattcagatttgaaaataaatattcaaataatttttaaaattgaaaatataacaattttaccgtggaaaaattcaatgaaataagaatgtccaatatttgataagccgtgtagacgttgtcttcactgccctctctttcgagcaatttgaaaattctttctgcatacttttcagcaggattttcagcttgaataaagataaaaaccataaattttattaatataatattatatttttttgtaaattgtcgctggtgcagtttttgctaatttataaaattgtcactttgattggccgagtagccgttgctgctttcatccgctgaaataaagaaaagttaatattttaaaaattcattccttataaaaaataatttatatctaagggagagtaaaaggtatcccaaaaatattctaatataaatttatagaattggtggttaaagaatttctgtttaaacaattgaaaaaaatctttaaaataatcattttgattagaatctgttaaaattatccacagcgttgtttatcgacctttgtagtgatttagctttgtcctgaattccgaccccaaatttgtgaccgtcccgacccaaatcccggtgtttgccaatttagatacctgaaaatttgtttttgcattgaactgctccgcatgccttgtttgcgagattaatgcggtgttcgctcaacaattgagtaacactcatatatcaa

SEQ ID NO: 817 - DNA, 1676 bp, Heterodera glycines
gaaacttcgatgacgagtgcagaaccggagtctccctgaattttacaataggccggaatataatcagaattttcaaattttgtaaaataaaaaattcttgttcttcttttgtcagagaagtgccccaggactgacaattaccgggacttgcttgaacctgaaaacggtctggcgaatcgggacctggattttaacccgtaccggaaccggaaataacgggaattattcaattttaaaaaaatatagttataattatttcgttcaagcaaaaatattaaataaattagattatgaaatgtttcgaatgaaataataagaaaatgaattctaataatctcttttaataattatttttaattaaatttaaataattgtgattctttttgtggaactaccggtaatccgccttgggatcgccctccagcgcacatatggaatttctggtcaaaactgatttttttcagtccctctcggctaaaagtattgctaataattatattaaataataaatttatttttcaattgactcaacctggagcattcttccgtttcttgaattgggacggtgaggagctggagtttgttgggaacagatgcttcattcttttcattcaaaatttgcccccatcctgccatttggccaagacgatgtgacaaatcaagcgttcggcttgaaagacaaattggccttatgtaggcccccaaggacaacgggttgaccagctaaacaagtaaaaataaaaatgaaagtaagactaatttataatgcgctttaacaatttttccacattaaaaagaaacgtatttttaaattatttccttataaattaactgaaaaaatcacattttttgaaattgataatatataattttctattttgaagtttccgtgcctgttttagggttactgcttaactaattcgtgaaattctcagaaaaacctttttatctttgcttaacacatttgctaattaaaataatttcaatgcttttagttccctaagatacagtcatggtcatatgtttagcatcagtgctaataattggctaataaaatcttttaacaaagagcaaatgccaagtatattctaccgatcaatagcatattcaatgggctttcaaatgagaccaaaaggtctactaaatccattaatcaaaactcaattttaaatataggaaatattctgaaaaaattactctatgttatcttttgatgctgaccaaaaaatatattacaccaacttgatcagaccactccttaatagtgatctggacaccccaaaatactgtgcagatcggaaaatttttggaaaaaaattcctaggtgctttggaaaatttttaggtaattttgagtagacccattggaaagagcagaaatctctctacaatattcaaaaaaccgcaagtctctgcgatttacattcgccaacgtgtgtgggcacttcaatttcatgctgatcatttatctgtaaaatgcactatttccttaagaaatacagtactttttgtagacaccgaaattgaagtgcccatcctcagcgggtataagtcgtagaccgaacattcaaaaatcaattcggtagacaattcagtgctctttcttttttgatcagcatcaaaagttagcaagcagtaattttttcagaatatttcctataattaaaattgagtttt

SEQ ID NO: 818 - DNA, 1942 bp, Heterodera glycines
  unsure (1)..(1942): unsure at all n locations
ataattatcagggaacggattttaggttttcacctatttttttgcggatagcatatgctgagataagcgcaaaaaacacattttcttcgatcacttttcaatttagagcgactttttagcaactattttcgcttgtgaaattttaacaacttttttgactgtgaaattaaaaaaaactattttttcaactatttatgcttttcaagaaaaaaaatattatgaaaaatgcaataaaaaaaataaaatgcacctctaagaatcgacgttaatttttttcaaaaaatgcaaccctaggaatcgatttttcaaaaaacaaaaatcctgcccatgatttggcgaatgatcgaaaactttttacacttgaaatcttcaaatgtgtttgatttacaattgtgcaaccaaaaaagataaagatgaggaaattttggaaaattcgcacatttattgacatgtttttccaatttttggcaactttttagcaactatttcggggtttccttcagcaataaaaatactctaattaggggatttgtttttatagaaatcagcttggttagcgtttagccctgattattgtatctcattaaaatttaaattccttttttataccactgagagtggaaattttcatgcatttcctctgcaaaattgcatctcaagagcatgtcggtgtaattcaaaaaggcacagtgagcggcagtgagtagaagagtcgaggaaacaacgaatccagtgcaacggtccacaatgtgttcgttattcgggcattttgtttcgaagaacagcagcgcagtccatggcgaataatgagcgggagaccccgatccgcccatggactaaaaaatcggaggaatgagaggtcgtgccgcgcattcaaaaaatcctaataaaatatcttctgactcactcgggtttcttcaatttcgggcactgggtcatgcattacaccgcacttgcttaagcaattgttaagctgaactgccgaaaacgttgcatggataaaatgagggataactagccaaatcagaataattaaatgcattttctgaaggatgcgttaaattgaatttaattaattatgattttcaaaaatcaaattttgtgcaacttattttctaaaatactaataccggaagcataatgatgtatagaacaaacaatcagtaaaaataaatactaataaggttaatcgaaaacaggatgtgtagtaataatgtaaagaatgatgcgcaaagaatgagagaatatttgaaagctgattctgtgtaattcatggtgaccttcccccagggatattttagcgaattgcgcagatggagcgacttgaattgttgcaaatttcaggcttttgattgcccaattaagcgccgcaattccaaggttgtccaacctattaatgaccttctcattctaattatttcttacgtgaaaaaatgaaaatcattgtttcttttcctttcataatttgctcgctttcaaaaatcattagaaaagacggacaactaaaagaaactttttttcggtagccctaaatgttataatttatctgaatttaaaaaaatgcccaaaaattattaatttaaagaattttttgaaattcgcgtggtaatagagaataattatttgttagggctattgaattacagtaagagacttaagtatatggccaaacagtgtcgttgaatatattattgtgtaaaatcccgaaaataacattagccgaaaaacgttcttcatacaaatttagccttattcttgagctttcaggagaacccaatttcacttccctttcatcgctctacaaatagttcatccactctngaaatgttggctcaaaaatttgtggccaaaaaagtatatggtcaaaaatttataatttttttactcacggctaagctaatggaaaaatctgaaatattcctgntatctaaattttttgctg

SEQ ID NO: 819 - DNA, 5396 bp, Heterodera glycines
cacttttacgaaacgaccatactgcgtacatatttttgattaatgtttagcttttgaatttaaaaatatacttttatgtgcaagaaaatcaagtaaaatggattttttgggttaataatggtatttttcagatcatctatgaatgtttttcaaatcttacgaattttaactatattaattgtcatttttaaaattttaaagtatgcattaaaagaaacgaaaactagaataaaaaaattacttgttctctgataatgaattatagagaccgggctaaaacgggctaaattttgccagtgaaactgcccaaatttgaaacatttaataaattttttggcgaatattttagttcagaattttgaagaaagaacttcgagatttttggaaaattcgtacatttcaactgttaaaaagatcactccacctaaaattttcaaaatttgttcttttatgggaccttaaaacaaaaaagtgccaagtttggtaatttttaacaaaattctgttgaggaatcggttattttcaaaaaaaatttcccggccgcgcctatcggcaccgcctaaccttcctcccatgtccctcaaaaattttggaaagtgcgctgcaaaaaaacttaatggcgccaaaaaatacatttaaaaagcgaattttaaacagacgtcaaaaaagaaagaaatgattcgaacaaaagaatcaacaaaagcatttgtgagaaaatgagagcttatgatcaatttccaattggtctcaaatataattattaattaattcacttcggcgcagtcagacgaagacattttcaaaataattattcattccgctgatcactgggcccgggagtcggcgagaacacttttcgttgctttgacgcgcttcttccgttggagtcggagacaatggccttaattggtgctgagccgtataaaaaacaaaaatggaaattttcaacaaaaaactggccataaaattttgtatacccatgcaaatcacataaatcggtattttctcaggttattaatgcattttacgcgtaaaattctgcgaatattagcctaaaattattcgatgtttcgtcattaaatgaggtttttacattttaaaatacgcatcaaaggaaaacaaaatttaaaataaaaaattattccctattttatttcgtcatttatcgaaaaggacctaaatgatttgttggatattagacctttttatattttaataaaatttataaagcatgtgaccttaatgcatggaaatgatgttcattacatctcaaattcaaaaagctctacaatgaaaaagtgattttctacgggctttccgataaatgccttaatatgaaagagatcaatttttttattcaaattttggtgccctggaaaacaaatttataaaattaaaaaaccaaagatttacaagaatatgcttaaggtgcttttcttaatatgataaagcgcagaagaatgaaaagcagaacatttttagttttttcgcggcatgctttttccaaaaaaactggggaacatggaggtgtcaggtggcgccgaaaggcgccgccgggaaaaaaatgaaaatttctatgaaattttgctaaaagtttttgtctaaaaatgactaagatttggagctaatatttaaaaataataagtttttggagcgggcggtgccgataagcgctgccgaggaaaaatttcagaatttttaacgtgttttgttaaaaaatagccaaatttttagacatttcctcttttctcctttgctagcctcccccctctttatgtctgttaataatactacaaattaccaagaataagtcagatcaaaccgaaatatgggtacatagccttttaattaaaaaaaaattcattttataaaaaataatcttgcaagaaatcgtctcgaaaaataatccaaaagtcaaattactgatcaaaataagcggaaaaatcccaaaaatccgtaatccgccaaaagtcaaataactgaccaaaatagcggaaaaatcccaaaaatccgtaatccgcaatccataactccaaaaagcccgcaatttccgtaacccccaatcagcaattgcgtgcagccatgattgaaagtcaaatttttgtgaaaataaaaggaaccttttacttcttaatgtgaattcaccagtttgaaataaatttttattgacacatgataaaattgtttttacaacctttttttgaaattttattttattgaaattttttgctccgctaatatccattttccattgtccgtaaaccgcggtccgcaaacgacccgtcccgttcacttatttttttccaaaattgttaaaagagataatgggcggcgaaaaatataaatattttgatcgaatagattgtaaaaataactgatttgaagcaatttcgagaaaaattctaattttcggccccaaaatctattttttgagcctgagttctgattttgaaaaaaattttcgatcatatccctgatttaaatatgaatttttaaaatttatttcgtgataatatttgtgaatattttttccggggatgacctttttgttatttgatttaacatttgttccaaaatgtccccaaatatatattatctattagttattattagctaaataaaataaagtcatatttaaacaatttagcacatttagcttcttcctttttttcttatacataattttaaagaaagttaaagcattttaaaatcattttacaaaataaaaatgcaaactttgccagtgctttttaatttcctttttccaacaaaacgtacaattgattttacgatatctctgctgctgacattaattagcatttgcaaatgcattcacaacccattcaaccatcacaacacatcaaatgatccacaccatcattttgtgatgaataaaccaaaatataataaattctcaaataagttttttgaattaatgagctttgccttttagttccattcttctctcttcagccattttggatggaattcgatttaattacctaatttgttttattatttatttttttaattttcatattttgaatattcagcaaaatttaagagaagtttttagtttgattttattcataaaaatggctgcctggatgttgcttggtgccaaggttgttctgtttgtagcggtcgtcgttgttgctgtggttgtcataaattatgcatccgaacagaaggcaaaagtaaaaaataaattattattattttgagaaaaacaaaattgaccaaaataaatagcacattaatgattgatccaaccttaaaacaccgactttatatttcaaaaataattttcgattatttgtgttaatatctgtgtataagctagtcaagttttcgactttaatttaagaaaattaaattggttccgcattcgatgggatattccgttcccatagcaaaaaactgataagcacttatttacattctcgttttccctaggtcacagagattatttttataattttttagagataattaaaaaggaaacacaaataaatatgaatatcatatgcctgtcgtagatcatttttatgacaataaaaaatttaatttcaataacttcagtaatgcaatttttattataagtatgcatttctattattgacacaaataatcgaaagttatttttaaaatttaaagtcagtgtcggattttcctagagcccttttaagacatttgctcgagttcctgaaacggaaattattattttggcaaaatccgttaaaataaatcaagtgcattttcaaggaaacctgtgccaaataatcctcaaaactggcacttattttgacaaaatctactacaattctcttaaatcttttagcataaaaataaaatgttttaaaaatagcaaaagttaaatttaaaaaataagtggcgtgttttttcggaatccaacgcaatttacataccaatgctagcaatctcaaagcttaattccctgtatttttcagtatgaaaagcagtaccagagtgaacaatgggcggaatgggaaagcgaaagtgatggaggaaacaatggaaaggagggaaagaagaagggaatgtttggaaaattcaaggacaatgtgaagggaaagaaggacaaagccaagaagaagatgaaggaaaaagccaaggaaaagaagaagaaactcgagaacagagtcttcgaagaagcagttgtgtacggagtgcgccgcggctttcgtcgtttcatgaaagaatgagagccaaaacttcactataatgcgtagggccgcaaccttgagtgacgaaaaatctcgaaatagccaactaaaatagagacaaaaagtgccaaaatggtgacaaagtagtgaaaaaatccgaaatagtgacgttatagtcacataattttcagccaaaattgagcaaaaattttttattcgctgaatagttgcaaatgaggtacatttcttttctaatcttttattagcaaatattggactttttaaatcaaaattttgtcaagaaaaaaaaatttggtagatgcattttttgagaaaattttccaaacaatttttaggtcgattattagtggttatttttgaatttttttaaagttgattcttataggtgtattttttggtttcattgcatttttgttaaggaattttccaaaaaatgtcgaaaatgacaaaacgccaaaatagtgatttatagtaacgaaaaatgacgttcaaatgaaaaaattttaactcaaaaatgcatttttgagctcctttcttcaaacaattgagcaaaaaaaaaagaagttttttttactaaaagttgcggccctaataatgaggcttatgtttttatgatacatttgatggattttttaaattttgtcagaaataaacctatctaaccctagagattgaattgcattcgataagattcttcttaaaataattttttctgcaaatattgatgctggtggttacagcacaagtgatgttcgagagtcccggcctcgactcgagaaaagtcttgggtttttttggtctcgaacagcactcacagcgggaaagggtcgtttcggcgccagccagagtttttgggggaagaagcatttcattgttggaagtgtggagaaatgtggcgacgatggaggaggagaagaagcgaatatttgggatggagacgaatcggacggcgatggggagaaggggacggaggaagaggaggtggtgaaccactgcagacacagaaacgggaaataaattctaaaaattgacaaatcccaaaagatcgtccctcactcgttcaggacagcttgagaatcacggacggtctaataggtctcccgggtcctttcccgagtctcggaaacttctcatgtattaacataaatatgggtactacctacccccagggaccgtcccagggggggg

SEQ ID NO: 820 - DNA, 7529 bp, Heterodera glycines
attgactacatactacaatttagagtcatggcactgttagttactgttttttcaaaaaatttatgggtttttaaacgcgtcagtgcttctcagatttacatccaaattaaaaattttcttgcaattccattttacaaaaagatccctccctcctctctatttgccgaaaacaaatttcaaaatcattcattcatttatggcacttatggataaattttttggattttttttttgccaaaaatggcgcctgaatatatttggcccctcaatcagcaaaactgttttttaatcatttcatttgccatttttttttaaacagagaactaaaatgtatgccaattttccgatcacttgccgtgccgcttcatcatcatcaccattttcggcacaccgtcgtcgtctgcttctgctgctgattgtgctgctggttgtgctatcagtcgacgtggatgttgcccatgggatgtttaaaggcatcttaaataaagcatcatcatcatcatcaacatccctcatggatgttgcccatgggatgtttaaaggcatcttaaataaagcatcatcatcatcatcaacatccctcatggatgttgcccatgggatgtttaaaggcatcttaaataaagcatcatcatcatcattaacatccctcatggatgttgcccatgggatgtttaaaggcatcttaaataaagcatcatcatcatcatcaacatccctcatggatgttgcccatgggatgtttaaaggcatcttaaataaagcatcatcatcatcatcaacatccctcatggatgttgcccatgggatgtttaaaggcatcttaaataaagcatcatcatcaacatccctcatggatgttgcccatgggatgtttaaaggcatcttaaataaagcatcatcatcatcatcaacatccctcatggatgttgcccatgggatgtttaaaggcatcttaaataaagcatcatcatcatcatcaacatccctcatggatgttgcccatgggatgtttaaaggcatcttaaataaagcatcatcatcatcatcaacatcccgcaacgaaagttgtcctgatcctcctagtgtagaacaattgccccatataacgtccgaagacgaagggtggaaagattgtgtgaagcagtgcgaacgatacaatgacaagctgtttttttgtacagcaacatccctcgattttattataaaaagaaacgggaaacaatgtcggtgcaaagcagggctgcacgcaactggatttgcaattacggaaatccgtaatccgtaattacggcgattttctcagttacggaaatccgtaatccgtaattacgggggtccaaaaaccccgtaatttcccgtaatccgcaatccgtaatccgtaatttttaaaaatcaatttttgtcagaattttagaaaaaaatttttaaatagtgattaataaaaatcaaaaaactgattttcttgatggagtttcttcattttttatttaaattttacaaataatttataattttgtgtctgatcaaatcattctttttgaatttatgggttgatttttgaaaattttttgaaagtctgatcattataatcggatttatgtatatgtatataattatttcaacattttaatagccagaaaaaaattacgggggggggggggggggggaatccgaagaatttttttggtaaaatttatttagtgttatttaaaaaagttcagcgccgaagagcaaaaacaggaattttaaccatttttagccaaaaaagactaatttttgccattttggagtcaacatttaaaaaataaggtaaaatcgagtaaatcgtggtcaggcggtgccgataggtgccgtcgggcaaatttttttttaaattttaatgattttattaagaaaaatcgacaaaaaaaatttaaaagtcccaatttttcctgtaaaatttttaatttttcatttcgggcgggggaaggggggggggggaattcctccccttacctggctaaggttttatgaattttcataaaatgcgtgaaaaataggtgtgacaaaaaagtgatgcctctattttctaggcgaactacccaaataaccttaacaacaacaaataagaaattataaatctattttaattcttaaataaatcgaaatacgggtagccctttaaataaaaaatagaataatttgttttttataaaaataatcttacaagaaatcgtctcgaaaaaataatccaaaagtaaaattacggatcaaattacggaaaaatcccaaaaatccgtaacccgtaatccgtaatccgtaactcccaaaaccccgtaatttccgtaatccgcaatccgtaatccgtaattgcgtgcagccctgctgcaaatgcttgacggaaggcaacggcgacaacgacaaaaagggcgacaacaaagaaaaatgcgattgcaagccatatacatttgatgaatcagctcagccaaagccggatcagcgtgatctgcctcataccagtggacaattgatgactgattgattgattgatctgttgggtgattgaagatttgtagtgtgattacccaaattttcattatccatccaatcatcatcatcatcatcatcattaagcaaaagttatgaacatattagctctgctgctcgcagtatttatttagtctcaggcccatattaccagaaaaaaaagtttcaaagtgggaaaactgaaaaaagatgctttaaaatgttttttccggtgcaaatttccaaaaaagtttgggcgccaacgaaatgtgcgaatttttctacccccccccccctgattatgggcctgataaaatgccatttttatgtattgtttgttgcattgtttttttgttgtttttattgctgcaattcataaaaattggctggtaaattgaaaaactgctgatcattgagggaagaaaaatgaaaaattttgttttttatgttttaagtaaattcaataaaatatattttacttaaaaataaaaataaagaattatttttccaatttactctttttaaaataggtttttgtcaattttattataatcaaaaaatgttttgtttaatattttagtaaaaaaatcaataaaatgtttgatagaaatatatttttgtccgaatccaagtaattttttgaatttttttttaaaccaaaaaaattaaacgaacatttgtggcagatgaaaatgaaaatcaaaaaatgccggaaaaggtgttgggcggcgaacgaagttggcactgttttttgcgctgcatttcatatttattgttgactttttgcaacttataggctgataaattgaaaaactgatcaaagatggaagaaaatgaatattttttaaaaattttactgtattattcccataaattaggcttactaaattctggtccaatttcttcaactaattgacaaattatggtgtttttctgttacttatgcttcacatttaccattacgctttgttgatttaattattcttaaattaattgccgattaatggactaattcattcaataatttttggtccaggcctccatctgcaagtctggccgagtggtctaaggcgctgcgttcaggtcgcagtcctcttcggagggcgcaggttcgaatcctgcggcttgcagttaactttttaacaattttaaattaacaaaaagaattttgctaaaaaaatattaaatatacaaaaataaatgtaaaacataaaatattttgcatttttttaattttcaaatgctttttaaatggtttattttattaaatttagctgcaaaatatagttttacatcggaaggggctctcctggaaaatcaatttaagttttgttaatttttaattatttttttttaaattttttttttgcttcacattcacaggcaaatggccaactaaaaaaactttgcaaattgttgccaaatttgaatatgccaaactgaacatagcccaaataatgccatgcccattgaatttttcctcaaaattgccctgtgggagaaaattggccacaacacctaaaattgcttacaattatttagcagcagtcaaatatcgacatttcttctttttgcgctttttcgaaattttgcttttttgccaaatttctttcatttcaaaaaaggaaaaatttgaaacgcattttcccctaaaaaatattcgtgaatttcccaaaatttcaaaatcgaactagcaattagcactagctactatgacgttagtcagaaaacgaaaaaaaaattttttaatttgtttatcctttgctaacaacaccctattatagtctctgttaacctacaaaatttcaaaaaaaaatttccttaactctcaaaaatattgtggccaaaaaacctttgaaaccccctgggttttttgatcatcttttaggcataacttatttgaaactatacaaaatttgaaattctcaggcaaaaagagaaaatttagggctatcaaaaatctgcaattagttttctatacctccctaaattcgaaattttttttcgaaaaaactccctggttttcctcaccactttattttattaacccaccgtccgtctgtctctatccccattccgataattattaatttttttttctaattttttaattaaaaaggattatccccctgttattgcccaaccgacggagtgccaaccctcaatttgtactttccttgccactttgttaccttatttagtattattattttaatttttgtcaccccctccgccccccccccattttcccattaaaaacgtgggaaaactgacaattagcaaaattgtttcccctggagccaatgcgcgaaaacgacttcaaagcgcctttgccgacattacgcctgaggccttttggccctcacttcaaaatgccattcagtcaagtgccgtccgcctcttgcgcaacgccgctgacttttcacgcctttttgttttctaatccaattagcggcggcatggcgccgtaaaaaggcacaagccctcgcttatacaatgtgacacttttttcggggatgctaaaaagtggcttaattaacggaagaaggaaaatatttttttactagaatttgttcgggagtttgttttttcgggaaattcttcaacatactatatatttgtatttttttcaaacattaatttaaaattgttatttttttagctttttatattgaaatatttttaaattatttaacataattgtttggaaattgattcttttatatattttttaaatataaatttaaaatataattatttttttatttgttatttttaaataaactttatcctaaaaattatatatccttgttcatttcaatgtttaattatttttaaatttaaattattttttaaaccttccctttttaaaagaatgtaaaaatagatttaaataaaaatagacaactttcattataatgaactaattcataatttgcctataatgctacttaatttaaaaaatctcgctcgaaaaatcgcaaaattttatattttattcattttaaattacactaatctccaataaaaattcatttccattttcaaaatggcatttttcctcaagggttgtcactggcattttggcacaacgccccgcggcgcacttcacacaaaacacacatcacatattgccgcaccgtgccatttaagtgtgcctgctgaagtgccgtgccagagcacattgttttcccgcaaaattagggtgccgaagatggtcccctccagcagggctcacaaattttgccctggggcaataggggatcaaattctttgccctggcgttgcgggcggcggactggcggcattcatttcatttcccgcaataatccctgccggggggaaaagggtcaaaatgccaatgccaatgatggctcacaccgaaaatggactcattggcgttgtgtcggtgccgatgccgtccttgtccgtcgttgtcagtttgatggtgtgccctgaggcactttttgtggtgcatttagaagatggaatgaatgactaatgccacccgcccccccccacctctcatccccgcggggggtgccatttgggggctatcatttttgctttgggatagttaaatgagcaaattggttttgacttttttaaagcattttgccaaatttggcatgaaaaaattaatagcatttatcaagcaatttttgaaaatttagtgaaattctatttatggtgctccatatttttttaaattttttaaatctaaacacgtgaagaacaatttttataataaaattaagcaaaattattaacccattttggcacatattctcatttatccacttttttaaaaccttttctcaattttttaagcctaatttgcccttttcaagtcttaaataattagatatttctaataatcaaaatgaatttaaatatgttcaattttttgtgttaatttcggaattttatatttttaagcagaatttatatatttttccgccttttcatggtaaattttaaagaaatgagcatccctaattattggcactattaaaattatatttttcattttttttttttgtaaattttgaattcttatatatttttaattggatttacggtttacctcagttgggccccggcacgtttgggcccagaatgttttagactataaattctttctttgtcaaccaaatccaacaatcttaggtatcattcgagagcccttcacatgccctattagcatgcaaaattccaaaaaatttcgtcaattttgaacaaacttatgaccaaaagtacatcagaaaccagtttttcagtcattttaggccataagtttgttcaaaattgacggagatttacgagattttgcaggcttatagaggacactttgggatatcgaatgatatcaataacattggatttggttgacaaacaaaaaagttacagccaaaaacatggtggggggcccaaacgtgccggggctcaactgagcgagtccggtagatttaatatttttctcccttttcatagaaaaatttaagaaaattcgtatccataattattggcactgttgctcgccgcgcccctccccagaaaatgccgttgctgccggacacttcggcaccgatcattttcctccattttccgtccacactgattttgctgtgctcaacttgtgccgtcaccgggggccacgcgctgctgctcaacggagaatacccgtggacatatgacaacgatttgttcggcggtgagttggccatattttaaaaaatcggcgtcgattgaaattaaattgtgcgacatttggcaaactttgggctacggtaattttgtagcgattgcctttctaattccttaaaaattgcttgtttaacccacaaattgatgtcttataaatgaaatttgtttttgaaaattcgggatttgttcaagaattttcttggtcggaaaaatggatgggtaccagggctggacgcaattgcggattgcggattacggaaattgcggggtttttggacccccgtaatagcggattacggaaattgcggggtttt

SEQ ID NO: 821 - DNA, 3156 bp, Heterodera glycines
  unsure (1)..(3156): unsure at all n locations
aattttaaaaatataatttnaatgtattantcactttatatattaaaaatctatacattctctcacccttcaaatgttnngagcgaaatttcatagtaaaaaatacgagaggaattgttgttcaacaaaatcgaatacattgcgaagatggaacgaaaaacttntaaaataaaactattaattttatattaaataattaaaaaattaccccaagcatttcccgtgcaatggaccgtcaaacttttgccatctttgattttgatatcattttgataagagttttcttcccaacaattttgacggaaattcgaatgcaccttaaaacagatttttttaaaaaatttatatgcttaattgtcagaaatgttatgaatctgttacattttttttaattgtctccagcggagcctatttatatgttaattaactgttcttatacacaccgtttcaattttggcctcccagttctaaaaagatttgcatgtgtggctcagtggtttttgtaagatagtaaagggacaaagggtgttggttcgaatccgttgtgcaacatgaatatttttatttatttttgtgcaaaaaattaaaaaatgaccatttttgggaattatttttggaggtttttaccaaccaaattgtacaatcttgacatcattcgaaagcccttgatggggagaagctttttctaagcaaatgctaagcaattggattgattaggaaaaagatatgagggttcgaaattttgtttctcgaataactttttagttaaccctttttttgcttttaaaaacccttacattttgttcgtaatttttttctctatcgacatgcaaaatttggtgtaaattgtatgagtagaaaaaaagttatatgtggcgaagtaaattcagtttttctctattaacagagataaagaaatagtacgccaaaaagagagatgttttttttctctgcgctctctctttattggttcatgtctcgttttttgaaacggtgtatatatacagtagataaaataacattaggaaaaagaatatgaggcaattaatgctgatcaatcgttaaatgttatcagattgcatcttttcggctcattacaatattttagcgtagttttagaatttttggaaattaccctttaaagttttagtctatttttaattaaagagtcaacaattacataatttattttatgttttcttaaatttcggtgtggtccagtggttaattgtgctgtgaccggtcgtgggttcaactccctccgggtgccatccaatttttttcaatttaaatttgtagtcaactttgttctcccacaatttttcctattttcttttttttgcggagaataaattggaaaatgaaatgtgccatcctattattcccatgggcaacatttttattcttcaaccgcattttttggcatttttttttttggaatgccacacggaacatcacaaaaatattattttggaatcacccaaaatttattaatttaaattttttaatttggcattttattttcagtaggatattttctttaaattttattctataaaatttatacaaactttaaatttttccaaaaatattatcttggtttaattttacaatttttaattctcttaaaaatatttggcattttgttgaaaaattccaaaaataatttttcgcctaattctctcaaaatttggaaattaaattttctaattaactcaattgatgcccctttttagtccattttcttccattttttggtcccatctgtgccggagtatggatggcatcactaaaaatggtggcggcacacattttaagagaaattttcctcagatcgtttacaaaattcaatttttaaaaatcaaaatggcattttaatatggcaacaattatgtaaaaaaatattattatttctttttacgttcatcttttcatttttaaatttaattttatttagttaattttaaaaataatttaaaaaacaaaaaatacattttaattttaatgattttataaataacattttttaaatttaaactttcaaattcattttaagaataaattaattactaaaaattacggcatttaaaaatattgcccttaagatggtcgaattctcctcatcaaattgtaattcaaaattttttttttggaattttggttcatttctgtgccattgtttaccacccgccgccaaaatgtggcacaaatttccgctcatttgcgcaccgcggcagaccgcgtgccgtgccatcgtctacggcacaaattggccattatgcgcctccctcgggcgcctgctcaaaaagtgccatttttcatattttctcccacggcacagccccagcggaaaagaatgggtggtgtgaaaaatgcttaaatgcgctgcttcgttctccacgatggcacacatgctgatgtttcatttctcttccagaggctcctaattaaaaagaaaatccattaaatctcaattttttgtttcatcttcgaggcatgccgagccgagatttttctgtgttatttctaaatttttagcgccgggagaaaaattagaaatttgtagccgttttttgtaagaaaaaaaagactaacttttgccattttggagttaaattctctaaaaaaactggtaaaatggggatccaatggtgcctaaggcaccgccggaaaatttttagagatagcaattttaaaaaaattgctaaaattttcaaaatttattatttttttattctttaattagcactttggttgacttccaaagccttcgctctcaaaaaaaaaatagaaatgttaaaacccaaaaactgtctttcattacttcgagagtcttgataccgtatttgctttatttgtcagcccccaaaaattacagtacccattggcttgaattttgtatgaaaatcggtccaatgtcgtgctgctgttggtggcttgtcacctgcttctgttttattcttctgtccaccactcagtggaccagtttgattggtcaacggataggtcaatggaaattttagaaaattcctaggccttgtacaattattttcaaaaattttaaagacaggcctcgaaaaattgtgatttttttttaaattttagggcccgacttttggggactgatgcacaatcattggcgaatgtgcaagtaag

SEQ ID NO: 822 - DNA, 4769 bp, Heterodera glycines
  unsure (1)..(4769): unsure at all n locations
attgctaaaattttcaaaatttattatttttttattcccttttaagcactnnggnngantncnaaagncggcgggcccccataaaaaanagaaaaggnaaaacccaaaaacggncnnncannacnncgagagncnnganaccgnannngcnnnacccgncagcccccaaaaannacagnacccannggcnngaannnngnangaaaancggnccaacggcgggcngcaggnggaggcaagacaccagcancagaaaaanacaacngaccaccacncagaggaccaganngangggncaacgganaggncaaaggaaannnnagaaaannccaaggccnngnacaannannnncaaaaannnnaaagacaggccncgaaaaanngngannnnnnnnnaaannnnagggcccgactnnnggggacggangcacaancannggcgaacgggcaagnaagctgcgancaggacgngaccngcgctgancaaacattgattaaattttcaaaaaattttcgtgaaaacagaaaaaaatttttgttaggcttggcgcactgcaatcgccgatcaacattgatccggccaaattgatcttcgacccccaacttggcaaacttcggatttcacagtgcgtcgtttgcattgcgattttttggaaattttaatttttttttattctgatggagggttataattttaaaaattttaattttatttttcatttcatttttatataaataattgaaattcttacggacaacaaattggtttctttttgacaaattagagttgcaagaataaatttttgcagcaacaagtggaaaattaaattttcattctccaataaatataattatattgaaaattattttttttacatattttggcagtaatatttaatatatatttttttttaaatatttttaatgtaatttaataaattgaagaaagttttctaaattttacactcaatttaatataagaattgctgtaatgttcatatttttgcattatgactttatttcgcgatttaataaccaaaaaattagatgctattttttgcactttttattttccaatttttaattacgttttgtaatattttccaataaatttgaaattttttaaattttacaaaattcacagtttttttttcttggcagaagccatgttgaagccgaactgtggaacatgggccaatttccactgctgacattggccaccaaaaacgccacgacggcggacaccactggtggtggtggcggtgagaagagggaggagcagaagcagcaacaaccggtgctgaacattgctggcgggccggcacatccgtacacataccaaatgcaacaaattgtgggcattaattaattaattaataatgcgaaaattaccaaattaatcaattttgggcgcgctataactaaacgaaaatattattgaattaagataatgtattgttagtgaaacacttaccaaatgcaaccatattgtaggcattactctcaattaaagaaatcattaatcaattactaattaattttaattaatgagacaattagcaaattaataaaattaagggctcctttcattaaaccaaacattaattaattaacgttagttaatgcaacaattaccaaataatacaagcacaaacccaacaaattgtatcaaatcggattaatttagtaacatttgtgccaattaggtggtccattttggcgatgtgcggcggggcgaacgcggctctgaacacaccatagaccgtgtccgatttccggctgaagtaataccatgtttataaaaaaatttacagaattttttttttcgaaatacggattttcctagccccgaaaaaattgggattctaaatttattaaaatttatgtgttagctgcaaattttggcattcaattccgacctgtatgacaacttcacacaagcacaatcgcagccacggggtctgcttggcatcgccatcatcattgatgtcagttattttttgcatttttttttaatttttaaaaatttttacgaattttaaagcaatttaaaatgataaaaaaaagtttttggctaaacaaattcaaaagttcatgccctaatttgtatcagataagttcattttttattcagattttactggaaaacacttggaaattttcggtcacaatttcgggatttagtcctaaaaatacaaattattattttgaaatttattgcccattaaatcgacccaaaaacgaaattttttccacttattgaaatccgttaggggtagagtttcaaaaacaaattttaccctaagattggagacaggacaaacgcggaattgcacagattgtcccaggcgaccaagcacatcaaacatcgaagtgggaaatctatttgaattttaaaatttcatttttttaaattttaaaattccaaaccttcattttttaatttttagaccaaatggtccgcattaaacgcttccaaccggctgccctggtgccgtccactgaacattatgtgacctatgatgggtcaatgacctatccgggatgtttcgagacggtcacatggtagggaaaattaagtttagaaaaaaaaattctgcggtataattgcgttaattagtgccaattacggaataaggaatgcaatggctaattatgtaattagtcacgagtcatcccaacaccatggcggtcaacagctcaagattaccttaattgatgaatcaaaatgttaattattactcaagttttccattggttaatttatgatccactgagcaatgactaattaataatgtttaattagttgttaattgcttttaattgcattttgccaagtcccctattggcaaattgattttttagtgttccataattaacgctaattaattaccgcttaataatgagttccaagcattaattaattaattaagtctccatttttcctctggccaaaatttatgccccaaatttcaggctagtattcaattcgcccatttacatcagcattgaagacgtatgataatcaccaatatatagtttaaaataaatataaaattttgcaatttttcncgcgctcagttggcncaatggggtgagctggttcagagcgaagtggccgagtccgaggccaaaacggagacgggcgcgcctccgcccgtgccgctcagctccaactatcggccgctgaaggcgtccaacggtcgcgcattgcgcacaaacatcaacacgagactgaaggtgtggcgacgggttggtcggtccgatcgagaatgtgccacaatttgtatcgagactctcgagattcggagcttcaatatttattgctactaattagcccgggttagaattgccgaaacttccggggtgagagcgagtgagtatgagaaacagaatgaaagagagtgaatgagagagaaggaaagaatgagagagacaatgagagacatagaacggacgaatgagagagagaatgaagaggcagagagagagcgagagagagagagcgagggagagtaataaccctctaagtatcccgttcatttgatggcactaattaactaaatcggcagcctttgaaaatgccatcacaaaactgagagttgaaagaagcaatcagtttcttatattgtttaagaatttcgattcttaaacccacttcctcagttttttaatttgtagtaaaatggtcaggttttatttacctaattagtattaatgggccagtcaattttgaaatattcgaactcggtccttttatttgtcttgtcgccatttttttttgatcgtcaacttatcccagagcgtgtccgacggtggccaatgtcccagccgaatgtacgtggacatgggctaccggacgaacccggcacggactgacaccaaagtgccgtcctcgccatattcattatcaagacaagaaaaggcggcagatacgcgaaccaagcgggatcagcagcagcttaagccgaatagagaaaggtgggacatattttatagaattgggaaatatttaatcaaatgccaaaaaactgatcagcgggcgggggagggaatgatcattgctgtcaatcgatatgaggatgatcaactgacttttgatctgatcagcggtgaccacgataatcatttgaccattgttgatcaactggcactatcaaaatagtgaccaagatgttcaattggtaccaagatcggtcaattgaatctccattaacttatcaatctaacacggtcaattggtctgatcatgttttaccaaactgatcagtgggaaggaagtatttgtcattttctgatcataattttgtatttttttaattccaggataaccgaggaggaagtgcggatgttcggcatggatgtgactgatcagatggacagtggtgatccgacggagagtgatcaggaggggaaagccgcggatttattgcccaagactggagttgaaaatcatcctaatttggcggtgaataattgcgccgttccgtcaatggcattcgatgaatgttcacttttgtaattattgtagtttttttttcaaatttttatattgaaataataaattttatttcgcgcccttttctcgaaataaaaaaagctcggattcgtacttgaaatcgactctcatgcgagaaaattcaaaatttctatgttcaagaataactatatatttcgagatttttcttcattanaaatcgcgattctatagataaccgttgcattgataataaagaattgcgaataaaaaaacaaagaaaataaatgtt

SEQ ID NO: 823 - DNA, 8979 bp, Heterodera glycines
  unsure (1)..(8979): unsure at all n locations
tcacatgaactctcctactcaacaacagcaaaggactcgcacttgaatgctgcaggctattaccgggatacgggcgagacactggagacggggccgggctgcattcaacgcagggatttgtttgccgaaagcaaaacagcccaatttattgccaaaattgataccgacctattcaatcagccgctgtacttgattaacttttgtgaattggatgtcgaaattttgccaaatgacaacgattttgtgctaattgcacccgccatcggcggtgttgttcctcgttaccgtttcgaggtgatggggctcaaaatgtatgtgaagaaggtgtcattaatggacggattagcgctggacattgcgcgaaagcttgagataaagcctgcacgttatgcagtaaggaaaactatgatgaaatcgatgttcatcagtcagggtcggttcgagtttaccgccaatctgttcatggaccaaattccccgccgcatcacaatggggcttgtttcaaatgccgactactcgggcacaatcacgcggagcccgttcaatttccaaccttttaatgtgcgggaaattgcgatcatcgccaacggccgttcctacccccaggccccttacgatttggactacccgcatggcaaatatgtgcgcgctttcaacgatataaatgaggcggttgggttcgcaaactcgtcggaaagcaacggaataacctttccccaattcgggaaaacgcattgtatctacgtgttcaacttgacaagcagcggtgacgaccaggccgcgctctttgacctgataaagaacggaacaaccgcggtgagcataaaattcaatcgtgcggtaccggtcgggggactgatgctggtcgtaatgggcgaatgcgactcgctggtaatgctggacaagaaccgatcgataagcaccgataccactatataaaaggcgccgatttagtgtatttctctcacatttgttacattcgctgttcaccagtaataaaaatgtattttaaaagcgctactgctattttattctttttgattgtttttattggtattggaaaatgtgcatcggctaatgcaaacaaaaccaaatcccgaggggcagtaagcaccaccaccaccgccatcaccaccaccacaactgtcaatccgcagaagattggtgtacctcgtttggcatcatctactcgtatggggaaaggcagcgtgactggcaaaccactaaaaattgtcaccgccaacaccaataccaacaggaacataaccaccgccaacaccaataccaacaggaacataaccaccgccaaaaacaacaaaaacagcagcagcaaaatcaccacccctacaacaaaaactgcaaaattggttgtggatgagcagttgccagtcgcaacactcctcccaacattgattcaccaaatgtgcaaggatcgccccggtgaggaaaacttttatcagcaagccgtttgctgggcactttttgcgctctatttaatggtgtttgtcagtctggtacttcatcagctttgttctatctgttggttaaagaagaaaaaggagtatggacagcgcgcagatttcgactattttgaggcaaagtcgggaaaccgcacgagttttccggggctgtttcccaagtgaccagctcccggcgccggacacgctacggtacccagcggcgctagttgtgaacaacgacccacattacaaacaaggatcccattggtgcgcgatttatgccccttcaaagatggaggaagcggtcatttactttgatagtctcacaaaaacaattcctcctattgtaaagacatcatttatggataaatttccaaaaggttttgttacaaataagcacccgtaccagtccccgctgactaccacatgtgcaattcactgtattgtgttcatttatcatatggccttaggtcacccatttgatgcatttctgcgcatattagacgctagtgaaagtcccgacatgtattcattgtgcgttctgaataaaatgattaatccgtatttgtgtgcgcgcgtgccaattttaccaccctttgggaaagggcatagggaatgattgattattttattataccacggcgcacgttgcgcgcgctgttggtgctgcgcatatatacagcgagctcacgcgggaaaggctcacttttttcgcaaaaataaattaaatatattaataaataataatgtcgttggaagaccacaattattgcggcgagttgggcggcaacgaaacgcccacaaagagaagaaggagaaatgacgatgatgatggggagggagaaccgaaatttcaaaaaaactgcattcgcactctgagcgccgacaaacagtacagccaaaagttcaaagtgcagagtgtaaagtcgacttttatcattgaaaatctgcccgccaaccccgagtcaatgctgcgcgcattgttcgctcactgcatgtcaaccgccctggacgagtcacagcagaacgggatcacaccggatcaattgggcgctacaatctcttcagatctgctaaatccgagcatatggattcccatacgccgcatttccgacaacaccgccgactcaatcatgaaccgcttccttgaggtggcacagtcaaaatcacgggagggctctctgtggggctcgccgttcactgtgaccatcacaacgcttgatgttgcgcagctacctcagcggcaacaggtgcgtggcagtgggaaaaggacaacaaattcagtgcaacatatcgtcaaagagagtgcactcctgcgaatcaacaacagtgatgatgcctattgccttttttacgctttggaggcaagcagaaaataccacatcaaagagatgagccgaagaaatttctgttattatattaaccatcagaacgggcgacgactggaagacgtgtttggactgatgagcagcgcaaacattcgcaccgatctgagagaatatgacgcggttgtctatgtgccgattgtcgtggactattggaatcgaaaatacgccacagcaaaccagcgatttaaagtgttcatttttggcgccacaggcacctatcggccaaaatttcaatacgggccggacaattacaacgtcgaaatcccgctctaccatcacaacggccatttcgacggaattcgatgcggggtgggcaaagcggtgtttgggcgtgactactactgcttttcgtgtgagtgcccctacgataatgctaatggtcacacgctacaatgcaaagcaaagtgcataaactgcggtcgcataggagcggggcgacaacaacgacaattattacagagaatgcacagcatgtggcaaggatttcatgagccaagactgtttcagtcatcatttgtcgagcaatgtgtgtcaacagttcaaaaaatgcaaacagtgcggagttgtgtggaatgtcagacaaaaccgacgaaaaggacgcagcggacacgtttgcggtgagaaattctgctacacctgcaaatgttaccataagccggagcggggctgcttcatacagcagttgaaggcgcgccgccccaaaaagtacaggctgatcgcctttgactgcgaaacaacacaaaacacgcgaattgagggcgaccgcagacttcattccgtcaacttcatctcatgctatgtcgtctgcaccaagtgcataaacgaaaatttatggcgaaattctctacaagcgccatgtggcatttgtgggcggctgcgcaccgtcacattctcccaccgcgtctatgaacgcacccaaaccgatgcccaattcatcactccgtgtccaatggcggcctttgctcaatggctgctcagcgaattcgatccgcgctatcccacaatgctcttcgcccatttcggtggtcgctttgacaacattatcgctcgtttcggcagttcttcctcaacgggttttgtccacagatgatccgtcggggtaacaaattatacgaaatgaaaattgcgaggggcgaaaaaaatccggaaatcatcgtaagagacagctggaaccttatgccggtgccgctcggcgctctgcccggagcgtttggactcaatgtgcaggataaggagttcttccctcatttggcgaatgttgaggcgaattatgggcacattctgcagtcgctaccgccaaaagctgactacttatacggtggaatgacgcccgaccgacagcgcagattcgaccagtggtacgcggaacaccgccatcagcagttcgacctatgtgaacagctcgcagcctactgcaccaacgacacgcgcatactaattgaggcgttggtcgcttttcgcacggagttcttgacgatcagtgacccgctggagcggcatggatgcttggatgacgacaacgacgacgaagatgaagaggaggaggtggatgacgacaatgcatttgaagtgatcggcggtggcattgacataacgtgggagccgatgaccatcgccagtgcctcaatgagacactttcgactcaatcacctcaagcgggatcagctcgccattgtgcccgagtgcggctacgacactacaaacacgcaaagccttgtagcgctcaaattcatggactggtacgccaaaaagaacggggtgagcattcagacggcacactcgcccggcggagagaaaaaaattggccagtacactgtggacagatacatcacggcgaccgacaccgtgattgaggtcaacggctgccactggcacgcgcacgaccatccacgtcaccgctttcagccccaaacagtgatggcgaatgggaaaacggcgcagcggatacgggaggacgatgcgcgacggatggccttcatcacatctcaggtacaacaagtgcgcgtattttgggagtgtgaaattaacgcggagaagcgcaacaacgacgaaatgaagcgcgcctttgcgcagtacaaggacagcggcccaattcgtttgaaggactgctaccatggaggacgtgtgggtccacaacgactacactacgaggtgccagaggggtggcggatgaaatattacgacgttcgttcacttacccccacacgaatgccgtgacagcataccccgtgggtcacccaacacgagtgaacatcattggtgaggcagagcaggcggttcactggcgacgcgccgaccaggtgccggtccgaggcattctcaaagtgttcgttgtgccgccccatcacgttgatgtgcctgtactgcccgtgaaatttgatcagcggcttcttttcccgctgtgccgtacgtgcgctctgcaacatccgcatggagcggtcaatgaagactacgagtgcacgcatcgcgaggatgatgagcgggggtgggtgtccactgtgacgtcaatcgagttggaggaggcgcttcgcaacgggtaccggtgtacggcctactatcgctccgtcgagtgggacgatacgcggtggagcgaccgcgtttttcgaggctacgttgcagaattcatggccatgaaaacacatgccagcggcttcccggatgaaattggcacaaccgaggaagatcagcagcaattcatagaggaatgtgaggaaaaattcggaatccgaatcgagcgggaaaatatggtgcacaacaaggccaagcggaccatcgcaaaactgtgcaacaactccctgtgggggcgcttctctttgcgcaatgggttgtccaaaacgattgtgaccgactcgcccgcggaactgcgcgctctgcttgacaacccagcggtggaggtcagctccgttgaccagctcaccgacgaatgcgtactggtcacctatgcggccggaaacgaatgggtggaggaacacgagtgctcaaacattgtgctttctctttggacaacatcggtggcacgcctccacttgttgcggctaatgcagactgttgctcgcgcaccaaactcggtgctcatctacaccgatacggacagtgtgtgtttcgcccatcgtgaggcggacgggtgccctctggagacgggaccccacctaggtgacctttcggatgaatggccggaccacgaactcgtggaatttgtttccggcgggtgcaaacagtacgccctgcggatgcggcaccgccaaagcggggaggagaaaacggtgctcaaagtacggggcataacactgagcgccgatgcctgtcagcttctccactttgacacattcaagaggagtgtcctacgctacgcaatgtgccattcaaatgaggatgatgacgaagaaggagatgacattttttcaattttgattgagtaccccaatttcctgagacccaacattaaggacgggacggttatttctgtcaagttgtcgaagcggtatcgccctattgtaactaagggggttgtggggatgaatgctattgtacatgattttggttttataaaggcgtaatttatactgaattgtactttttaaaaatgcataattaacaaatggaagattacaatttaaaataatgaagcgtgagaagttgcaaattttaggtagaaaaatgcataatttagtaagagaagtagcagttttggaatattaaaaagattcatcatcatctgagttacagagtttatgtttttaggtagaaaaatgcacaattagtcatgtttaactgcttgactgagaatatttttgatttgctctttttcaatccatatgattcctttcacaaaaccacaagacggaggaggtggtgtttccgcaacactgttttgtgtgggcatcgagccaaaccagagaccatggtcgtcataatcagcatcatcggacgaaggtgatggcaaatttcgcagcaatgatgacgaggatgatgatgatgacgatgatgcgccgtcacgcttttgagacagcgaattaacgtacacaggcggaaagcagtcatcgacgacttttaccagttcaagcgggtaatatttgtgcaagggtccgtcatccctttgaccaaaacatttctcgataacgcatggataatgcgggtattttagcataatgcggtgccgcgagtaataatgggccgcaacgcaaacattgtaggggcgcctcaggttaccataagcaagcactgagttggcgccctcttcagtgagtccagcaaagaagagcgtgtgggtgaagccattacggtcgtagtatgtagtgatgagcttacgatgtgcaaattccttcaacaatttttctcgatccgcaacgctacagcaaattcgcgcgcccacttcgtcaggggaacagtccaaaatgcgcgagaatgcgataagcaaatgcattgcgcgcaagtgagattttgtgcacattcaagcgcttttatatgtgcgtaggagcaccgtaactttgtctttcacgtagcgcgcatcactgtaccttttcgctatataaaagcacgcaaatatgacgcaaaacttcattttaatcacaagattttttttgcaaaataaaaatgaatacttttaataatgttcagcaaaacatgccggaagaatctaacaacaacagcacaaactacaacaacaataacatcagcaacatcaactataacaatgagaatgctcaattatggaagcttgtacgtaagaaatatattctgaccttcaatctttgttacggctgttctcaaaaacttttcgagtccactaaaaacaacaacaacatcagcaacaacaacaattatgcttttgaaactgatcagtttggaggcgttaaggtgcaatttcacatgtgtaagggatgtgtttggttgaacatgaagctgagcgatttaaatagtgcacccaaaagtggtaataatcatatgaaaacaactcgcaactttccaaacacaaacaatgcaacttactctactgacaataattttggctccttcttcaataacaccaacccgcagaataatgcaaatgaatggatttgacaaaattttgagcagatcaaaattgtaacaattaaaatatttattaattgtatggaattaattttattaaatattttgtttcattcaaattcttgtgtcataaatatgacaaacctatttgcccaggaaaaatgattgatttcattcaatgatattaaccttttgagtcggcggataagccgcataaccgctattgtacgttttttggatctcctagcgcacccatacgccctaacagatggtcatgctgtcttataaaaaggcaacggaaaatgccggccacctttttcctgtgccccatttttcgtccaaaaatgaactctcagcagcgccaaattgaacgagagcagctccgcgccaggcttaatttgttggtcgacgaggtagatatggtcgtccaaggccttatcaacaactacaggagcgatggactgataaatgaagtgagtttaggaatgcatgcccaaccagggactaggatttcaatgtagggaggcataacgattttctcgtcctctgtttaattttataaaactaaactttgatcaggaagcggccattggacaggcaccagaaactgtggaactacagaacgtgaccattgggtcacaccttcccgcgcaacaaggcgaggaatgggaaattgggccacacatgcccctacaacagcattatgagcatcagccttgggaactggacccaccgatgcccgaacagcatttggaaattgggccacagctcccggatgcgtgggaactggttccctatcagccaccaccacaatgggaccaagttgtgcatgtggaacaacagcagcaacaacaacaacaccaccagcaacaacaacagcatcagcaaggcgcgtgggacgagggatgggaggagcagctttcgccaaatgcaatagcgcagatccaggacgaggcggatgggtgcgccagagattgagtaagaatttgggtcagggntacataaaggaaaattaagtgattgagagattttctcgtgtggngcagcctcagcctacgtggcccgggtaccaaagacgtccgaaaaatttatatgcatta

SEQ ID NO: 824 - DNA, 864 bp, Heterodera glycines
  unsure (1)..(864): unsure at all n locations
ctaataataatgggttcaactttttggcaatttccggaatcatttgcacgaactttgancactgggaataaccaaaacaacgcatacaacaatgctaatgaaagtgggcaaatggtaaataacaatgtcggatggatggattgatcacaaactttaatcaattttgcaaaatagttcatgtatttgaatcatcatttcataataaatttaaatattaatcattataaatttctttaatcccctttggtgtttgaatacacccgtaaatgtgacaagcgcatcgccggttagcggcatgatgcattagtttctcttttgtgccggttcagaaatgccgcacatccctttgttatttgaatttgaccccgttcgcatcggtcaccgaagcgtcggaccttggctacacagatggccacgatcccgcctcatataaaagggcacatgggaaagtcgccctcttttttttcctccattcaccaccaaaaatgaactccgaaagacgtcgcaatgaacgtgagcaattgcgcgcccgtttaagtttgttggtcgatgagattgatacggtcgtccaggggttgatcaccaactaccaggacgacggattgatcaatggggtaagttttcttttcttttttttgctgtctttttgtttttgcttcttttttttgaattttaattctcgattgaacaggcgccggatgatgtacagctaatggacatggaccatggccaaggagtacagcatgagcaacagcagcagccgtgggaactggatccaccaatgcccgagcagcatctggaaattgggccacagcttccggacgcatgggaactggctccctatcagccaccgcaatgggacca

SEQ ID NO: 825 - DNA, 3087 bp, Heterodera glycines
  unsure (1)..(3087): unsure at all n locations
aacagcatccgatgcaggggtgggaaaccccccgcacgcactttgagcggcccgtgccgcagcggacgccaagcccttcgggggatgcgccgggggcactgatcggagaattaaatttttccgatcagtgccttctgtgcatgggcagccatggagtggactgcacagtgacagtccgcggcaacaattgcggctgtgtcacaatttgcgacacatgctgcgataacggctggtggcagcgttatgcggatgcggcgcgcgatcaggccgcgcggcaggtcgaagacagcatcgacccgtggacaggactcgtgcggggggatgaggccagccaaaggctttgggtacacagaacacattttttttttttgataaatttaattcagtttatattttcaggtcgaggggcacgatgcgcgccccaaatgtctgggctgtcagtcgaggcggatcgactacctgatcggggtgacgcggccgcgccgctcgcagcgcacgcgcaaggccacccgctgcgcattttgccactgatggatggtgatcgatttttgtaagatcacacaattgataatatttggtgatttaaaaataaaatttaaaaaacatcttacgggagccaaaagagtagggaaacttttggataaattaggtaagtaagcatatttggattagacttgaaatagaaataaaagcaaagaacatatacacgatactatatttttcattttctcagattgtatagtaaaagtgctttaaagattagttcaatcataattgaaatagttggacttatggtagctaaggagtacctagctttaccctaccgcaccaatcattcattaatgaggcaactgcaagcgcagcgaacggggttagtagggggtccgtgttatttggccacaaagtgatgcgacaaaggccacaaaacaatgcgacggtggaggaaggggatgaatgattggcgaggtggggtaaagctaggtactccttagttaacataagtccagctatttcaattttggttgaactaatctttaaagcacttttactatacaatctgagaaaatgaaaaaataaagtatcatgtatattttttgatttttgaagattattaaaaaataatgtcaaattcatgatcaaacaaaaaaataaaaaataaaaccaaaaaataaattagaaaaacaaaaaacaagggacacagaaactcttgaggttgggatcgggaaaatttttgaaaatttgagtgtaatttgttaacagattttctcaggccttaaatcgcatagatagacactttaaaacctagtccttatgcaatcgctcgcaaattgtaagacccgacgcgcacattccgatttgccccatccctcccctctgtcgctccccttcccccacctcgtcctcatcctgtggctgctgcagcgcctgccctccccgcccgccgccgcctcgtccaccaccgcggccattgccttttccaccaccgcgaccgccgccacgtcctcctccccgcttcgatcctgctccgtttcggccggttgcgcctccgccgccccgtccaacggtgtgtcgctcacatcccgcctgaccattttttcttcctgcgccgcactcgcaaatgacaatagccgtcaaaaggagcaggaacacctataggccataaatgattactatacattaacaaagagaaggaaaatgctaaaaatatcaattgacatttacctcgcccatctccgtgattttgcccagcgtgccgttgatgctgtccacgtcgagtgccattttgcgcaagttttgctgcacagtcgtttccaactccttgaaaaccatagcaaaattgatttttgaacatcaatttttgcctgcttcgagcgttccatggtgcgcaattgacgttccgtctcggacaactcgcaaccggtggcggcaatcagctgctccaactgtttgacctgctccgccttgtcgccgatgctctcccgaattgtttccatttgaatgattttttcgctggcgttcgcccgtctgtctttgaactcggccaactgaaagtgccaaaaagccaatttaatgtcagtcagtaatgccactttgcacctggttgctgagctgtacccggcgctttaatattccgatgtgctccatggacaggtccaatttgtcgcccgcacgttccaatagtgcgttggctttgccgacggtgccctcgtccccggcactgctggccaattccatcatgtccatgtgcagtgtgttcaggtccatcttgaaaagggaaacccgatttagacagggtcagtaaaacaaatccatatttaattttctttatcacaccccctttttgcatattttaatacaaaatgtataaacctgtttgacacaatgcgtttttgccgagtagacaatgaagaggacaaagtgaaaaaacataatcattctaatgctaaataaaaatttaattaattaaatgttaatatttttatatgccgaggaataaacccgtttctgtctttactcaatttaattgatttacaatccctcctctccctatggcacaatccacgtccccagcaagcgtccctccacccaccgagtatcgacgcgaaaattcaaatttgaatttagcgccaaaaggggcgacaaaagtacaggggtcactactgaaaatatttaccaatcaccatcccccccctttttcatcactaatttgtccgtcacatcattcattcgttcatttttatgtctcactcccctccagggagaaaaaattgttccttttggtcttaatctctcacctcaccactcaatcacggcatccacttttactcctcatttttgccgtttgtcacttttttgcccacccccctcccacggtttaattacccaagtttgagcgctccgttaataaactatttttctgtcatttgtgttcatcaatttgggcgggtggtcaaaagggagccgactcccgattcgcaactcaccttcttctccggccccttttgctgngcatttcggagcgattcagcaagtcaaacgggactccaactctccagagtgcccactcgaaccccacctctctccttt

SEQ ID NO: 826 - DNA, 3961 bp, Heterodera glycines
  unsure (1)..(3961): unsure at all n locations
tgatgagaggggcatatttgtaaaacaattaggaatggattttttgaatttttttttagaaattaattttaacggagtatttttcgtttttactgtattttcttttttacaaaatattcttttaaatatttaatgtataaaaatatgaacaggagcggaccgcgtccggtggcggaaggcgacgcgttggcagcacagcggcggatcggtcggcacaggcggcagcagcggcttgcgctgcgggcgaagaggcaacggacgaggtggacaacaacgaggaggagcgacagaacatggcggtggtgacaaaaaggatggcaattttggtaaaaaaaatttcaaaattattgtgtatgcttttcgggatttttgtgcttaatacctaggcgccttttttgtgcctatttcgccattttttgcacctatttttggattttttatttattaatatttttccttgagaaaagcagcacaaaaacaaaaatctttcactttttaattgtttttttcaatttttgggcacccctttttatttctattttttaaaggacctggaaacatccggcacaccggcacggattgtcgaaatcccagaaaatgtgacggtggttgagggcgaattggccatcatcaaatgcgtcgtggagggcaacccggcaccgacaattgtgtggaaaaagggcggccgaaaaatgccattgaccgacgaccgagtgcggtgccaaacggacggtgacacgggacatgtaagtggcaatttttaaatgaaatttttaaacacagaaattaaaaaaaactgctgttttttggaaaaaactttttttgtgaaaaagtcatttatcataaaactgagaaatcactaaaaaaatttttgttttaatttcaataaaattacatttttcataccgtagccctcaaatggaggacaagaaaactttttactgtagttctaatcttggaagggatttttacggcactcaattaattaattaatgtagctcatttatttctaaactaaattcaaaacttagcagcaaatttaattaaaaaaattttatcaaatcctaaaataatgttaaaaatattttatcaaattaaaataatgttaaaaatattttatcaaattaaaataatgttaaaaatattgtcaggtttctctgatcatttccaaatgtcggccacaagatgggggcgagtacacattgatggtgaagaacgcgcatggcaagcacaaagttggcgccaagctgcttgtcacgccagcggccgaagtgaaaaaaaattgccagccaaatttaaataataatatttacaaaaaataaatttacagtcgaatttggacatccgggccaagcagaaaaaacgtggcacgggcattagcaattcggaacaggaaaaacagcgccaacggagtgatgccgagcccaaaagcaaggctgaacgacggtgagccaaaaacagctaccaccaaaaaattttgcaccgaattttggaatggtgccaaaaaatcgatgccaaattctgcacttcgcttattttctttttaatttgactgaaatttcaaaaaaaaaaatttcagtgcctcttctttttttttttgatggtgacacaaatttaaagacatggcaaaagaaattattgaaattcaatttttttgattaaataaaaatcgtgaacggaaaatgggtcagtggaaaatgcgtcagtgaatcagtatttctttaaattgagatacggtagtaatattaccgaaatcacaacttgttttttagggatttgggaaagtttcaattattttgacttttaaaaacttaattgataaaattcagaacaaaattattagacaattttgtccttttgtaataatacaatacttaatgctacagtaactttattttaaaaatactgtattattgacaccttttccactgacgcatttgccaggagccaaaattattattatttttaaaaattaattttcatttaaattatggcacaaaaatttccagcaaacgccaagtgtatgtggtggaggagccccgtgacacatttgttgtgccgttgaactcgcagcatgccaacgaaaaggaaaatgccacttttgaatgcgaagtgaacgacaaggagatcgatgtgaaatggttccatgacggtgccgagatcgggatggacgggcggcactttaaggtgggaaggagggggcaaatctcttgctaatcaaagaatacattcatattttgtgttatgaaagatcaatttcaaaaattgagtaggagtttaaattacctattttgggattcctttaagcccaaaaatccctaagtatggatatttccaaaattcaaaccaaaactagctcaaattcttcaattcaaatgcctatcagaaatttaaaaaatatattagaaaagtcagaaacaaaaccatttttttaacaatatattttttaattttatatttttttacattatctaaaatttgtttttatgccaaatttcattttgtttttctattgtgtattttattgatgcttcttgttttacaggaacgggctggatgccgtcgtcgcctgctgatcatcaatgtactcattgaagaccacggggagtacaaatgcacagccaaagacgacgaaacaatggcccaactcattgtgcaccccaaattcgtcaaaaaagcggagcgctagccggtgaccttctagttcgatgacgatttgtattaaatttttttgtttttcactgttcctgttttatttgtgcccatctcttttttcgactttttcttcgagttcgggtctagggttcggaattcagaatgatgttcttaagaattttacttttatacgacaatacttaatgctatcgaactaatttaaaatatttgtatcacagacgcatttctcgggcacgccgccgagcagtacagcaaagcagacggaatgtcaataattagagcnaaatagaaaaggagtccaataaacaccggccaacacatatacaaaaccgaggccaaccaacaagcgccattgtttgaatttanatattaaagaattaaagtggcaagcgttttttgttaatgttacaaaaaatttgaattttttgaggcaagtagttttttatcatatgatgtactttctatgtttaatcccaggattaaatcatttatttaaataaaagctttctcaaaaaagaaaatttagctgaaatattgcattacaaaattcacaacagataacactgtaagcactgataaaataataacaataaattttcgaactatttttataaatgaaaatattaattacaaccataattttgacattttatttttgcagttttatttggacttcaaagatgttaatcctagctggtcactaattggatgcgcactgatttatggaatcacgccacatttagagtcattttcaattcatctgtcattgttgtaacataagaacaaagtgtgaaattaatttaaataaacatggaattctaaattaaattttagcatttgtaattgaaccctgaattttgaccactttttatacatatttttgacatccctagtcattaattattctcccgatggcttattgatttggcaaaaaaataaaaaataataaaaaaaaatccctttctaaataaaaaataaattaaaaaaaatttaatccttccaaggagaaaaaaaaattatcattcaaaaatgcttgaaaaactctaaactgtaaaatttgaaaaaaaatttaaattttttatatgaaaaaattatgacattttaaatatggacggcaaaatgaccccgtcccttcccatcagcagggctggacgtaactgattttcaattacggaaatccgtaatccgtaattacggcaattttttaagttacggccatccgtaatccgtcattacggaggtcaaaaaaggccgtaatttggcgtaatccgtaatacgtaatccg

SEQ ID NO: 827 - DNA, 5289 bp, Heterodera glycines
taccatgcgcttaccataccatgcgctaccataccataccatgcgctaccataccataccataccatgcgctaccataccataccatgacgctaccatacccccccatttttttgtttcaaaattaaatttatttgtcattttttatccattactctgctcatcgatataaattatgtttttcaggtccagaaatgtctaattttaatcagaatgactttgccattacatcggtgcaccaaatgcgcaaccgacctcggaatacaattggtgaaatagcggaagtgcgctttgctccccttgaagaagtggaacggcccgatcgtgtgctcgagcgtcttgtacagcggctgtttgacagagtgcttgatggacgtccagcaccgatgttaattggtcttcaactgcatccacctacctttgagaatccatttacgattccacttcgtccacccgagcaaaacaatccggctgctatcgctgatctgatccaaagactcaatgatcaatctgctgccggaattgatctgactggcgggacaacagtcacaaaagtgcttgcagtttggccaatgcaatcggaccacagtgaatcagggagagcaggttgaaatttatttttattttcttttcatattttcttttgctgtataggcgcatgcagccttgaggaagagcaccgattggtgaacactgttcgctcgttgatccgcattaagaatccgaatgatcgactctgtttggccagagctgtgttgttaggtcttcacgattggcgttcacggtcaccaggcggaggcggaccaacagcattcaaaagtttcgcaaatcgccagcacacccacgggcctgaggcacgtaacttattgagacgtgccgcaattccccgcaacaaacacatgtacacaattgatgacgtccaaaaagtacaagattggattgatcaacgatacgggccagcagaaattcgaattgcagtttttgagaaggaacgtgagtaccgaattgtgttcaaggcagcatccggcgaggcagccaagttcaacttgtgtcttttgttcgaaaatcaacacttcaactacattggtcgaattgagcaactgtttcgtgtgcaaggatattgtattgattgtgaacgtcgcgtgacacgctggtaccacccgcaggaatgcaaagtcgtctgccgtctgtgtttacgttttggcgcagggtatccatgtaaacaacaacaacaacagcaatcccgagcagatgggtcaactggcaatcgtctttgccgtgattgtcaattcgtttttccaaatgacgactgcttcgcctatcatctgagcaatcaggcacccgcaagcatgtataatcagggaggacgcacttttcgcccaatatgtgaatggagaagagcatgccgacaatgtggagccataacctatgcgaattatccacataaatgtccagcccaaattggccaaacggaatgggtgcgctgtgcacgatgctctggaccccatcaaagtggagacccttgttttattcagcctctcaaagatgaaccaatgaggaggagaaggagaagaagagggcaacaacaacaacaacaaaataataataacgatgacgaagacgatgatgatgataatgatggtaacgaggagggagacgacgatcacggtcatgatgctgataatgaggaagaagaagaagttggaacaaatcggtcggtcagactttgctttttcgacgctgaaacgtcccaagatttaccacttcaactgcgtacaaaggttgtacagaaacatgttccgatgctcattattgccgaaattatctgcgaagcgtgtataaatgaaggaatttcggttcattctggtgttggacaatacgcaaatgggtgtgtgtgtggtcctcctgcgggaccaagggggcgtcgctggtgttctcctccgtttctgaatgcacctggggatgacaatgctctaccagccaatgtccactacaacccacgaagactgtttttccatagttttgacgacgctaccaacaatgacccggtggacgattttatcaactttctcaccggaagtggtccacatggtgtgaaaacaatttgtttatcacacaatggcggaaaatacgacattcatttaatactggaggcacttcaccggcgcaatttgccaccaaagcgtatttgcacaacgggactaaaaattttttcgatgactttgaaagggaaccatcaacgacacgtgatctttaaagactcgctgaactactttttctgtgaattggatgcactgccacgcacatttggattgaacgctgaagttgcaacagcaaaacctttctttccttatctgttcattcggcgtgaaaatttacaccaaagattgcatggtttaccgggcaaagaattttatcagcctgatcacatgaaagcgtcaaagagagattcctttatgagttggtgggaggtcgagaaccgttctgcacgcttccaattgcgtgaacaactcatcctgtactgtatgaatgatgtggcaattctgcgcgaaagtgtgcttcaatttcgccaaatcattgctgaaaatacgagaggactggacccgtttaaaatctcatccacggcagctggtcttgcgttggccaccctccgccgctgctttcttccaatgaacaagcttgttaatgcgccagaaggtggctacctaagggggcggcgagcatctgctgaatcggcacgatacattcgttattatgaaatgacacatccgggagtacatgttcggtctgcccaatggtcaattggtgaggctaacgtcgaagacactggctaccgccttgatggattagtcacacgtgaaccccctcaacgcaaccttgccattgaatacatgggttgcttttatcatggtaaaaaaaaaaggtcgcccttttcaaccgaacaaaaaaaaaatgcttaaaggttgccccacgtgttacgctaacgacagacaacaaaaattggcaggtggaaggacagccgaagacctgtatgaacgaaccaagaggcggctatttgaactgcagaatcagcatggctttgagctggaagttgtctggggatgcgaaatgaagcagcgtctgcgtgctgatccagaatttcgccgggtgtacaatgactcattcgttccaagaccgcttgatccaagagaggatgcactacgaggtggacgcactgaaccgtttatccttcagtacacttgcagtccagacgaagagataattctcattgacattgtaaaaaaagttaggagaaacaaaaaatattttttcattgttaaaggtgagcttatatccatatgtgatgaaggcattctcgtttccggttggtaacccacgcattctcacgcgagagacacttctatgcgcaccgaccaccgcttccctggtgttctgtcgacgcgaacacattcaaagggctgttgtttgttcgtgttctgcccccagatcccgctgtacacccgctaaaagttcctttgcttccctatcgaactaccgacgggcgcctaacttttccgctttgtgcacgctgtgctgacaaccgacaacaacgggcatgcaaacacattgatgcgtcaagggcatgggtttccgcgtaattttgtgaaattaatccatgtcaatttacttttttttgtcccggtgtttagatacacccatgttgaattgaacaaagcactggagcttggctataaagttattgatttatttgaggtaaaaataacgtatcgtttattagactaaactttaaaaaaaaaggtatggcattatgaagaatgggataaccaactgtttcgtgactatatgaacacctttgtgggtcttaaagttcaagcaagcggttggccatccggttgtgataccgatgaacagcgcagagcctatgtagatgaatttaggcgggttgaaggcattcagttggaccacaacaaaatttcaaacaaccctggacttcggatggttgcggtaaaaaaaaaatacagaattacaattttttaaactttaaaaaaaaaaaaaaaacacacacagaaaattcttgcaaactccctctggggaaaacttgcgcaacgagtcggtggaacggaagttcgttatacccgaactccaagggagtatcatgctctggtggagaatggctccgtgtcggggcttaaccctaatttttattcacaattttatcgttttccaaaaaatattaacaaaaatgcaataaaaaccaaaaatacaaccctaagaaatgaaaaacatcggcttttcctacgcctcgttaaaaagtggtcgactggcatggcaaaaaatcttattctatcaataataaaataataatgtgtaaaatatatttatggattttattgcctttaaaatatttcatttaaaacaattaaatttatttattaatataattttctgtactgaaatgaccccatccctctgaagtctctcactgatatttttgtcacttcggctcaccacatgtgcttacaaattagatcggtctgatcggtcactgatcactcccccccccatttcagccttacttctcttttctgtttttgcttgctcatctcctctccatggtcgtccccgctgcaaatcctctcctttacggtaatttcttttctttttttttgccatttttcatccgcattttttagcttggatgaacgcctcttttcgtgatgcctttttgcgcgtattgcccttccgaaaatggcacaaaaatgccatttcaatgaaacgaaaaacgaccgaagggaaagccagagaaagagacaaaggagaaaagagaggcgaggacaaaacgaaaggacagacggagaaaaaacgccgcggggggacggaaaagcggtaaaacgaagaaggaaaagcattgcgcacccattcattggcttttttgttagctcagcaactacccaatcgttccgctttccgctgcacgcgtcgtcgccgcgtccgctgctgaggagacggagcagcggcgaccgaatggtgccgtagaggagaccaaagaatgccgaaacaaagccatggacaccgttttaattaatcagacggtcattacgacgggtaaatatgattagtcacttaatcaccacttgtgtctgtctacattttgtcacatcgtccaaagaatggctgactgatcagtgatcactttgccaaattttcctccgatcggtccctttttccgacgccacttctcttctcaatccgtccatccgttctttctgcccgttttccgcctttgttc

SEQ ID NO: 828 - DNA, 4426 bp, Heterodera glycines
atacattcgttattatgaaatgacacatccgggagtacatgttcggtctgcccaatggtcaattggtgaggctaacgtcgaagacactggctaccgccttgatggattagtcacacgtgaaccccctcaacgcaaccttgccattgaatacatgggttgcttttatcatggtaaaaaaaaaggtcgcccttttcaaccgaacaaaaaaaaatgcttaaaggttgccccacgtgttacgctaacgacagacaacaaaaattggcaggtggaaggacagccgaagacctgtatgaacgaaccaagaggcggctatttgaactgcagaatcagcatggctttgagctggaagttgtctggggatgcgaaatgaagcagcgtctgcgtgctgatccagaatttcgacgggtgtacaatgactcattcgttccaagaccgcttgatccaagagaggatgcactacgaggtggacgcactgaaccgtttatccttcagtacacttgcagtccagacgaagagataattctcattgacattgtaaaaaaaagttaggagaaacaaaaaatattttttcattgttaaaggtgagcttatatccatatgtgatgaaggcattctcgtttccggttggtaacccacgcgttctcacgcgagagacacttctatgcgcaccgacatcaccgcttccctggtgttctgtcgacgcgaacacattcaaagggctgttgtttgttcgtgttctgcccccagatcccgctgtacacccgctaaaagttcctttgcttccctatcgaactaccgacgggcgcctaacttttccgctttgtgcacgctgtgctgacaaccgacaacaacgggcatgcaaacacattgatgcgtcaagggcatgggtttccgcgtaattttgtgaaattaatccatgtcaatttactttttttgtcccggtgtttagatacacccatgttgaattgaacaaagcactggagcttggctataaagttattgatttatttgaggtaaaaataacgtatcgtttattagactaaactttaaaaaaaaaggtatggcattatgaagaatgggataaccaactgtttcgtgactatatgaacacctttgtgggtcttaaagttcaagcaagcggttggccatccggttgtgataccgatgaacagcgcagagcctatgtagatgaatttaggcgggttgaaggcattcagttggaccacaacaaaatttcaaacaaccctggacttcggatggttgcggtaaaaaaaaaatacagaattacaattttttaaactttaaaaaaaaaaaaaaaacacacacagaaaattcttgcaaactccctctggggaaaacttgcgcaacgagtcggtggaacggaagttcgttatacccgaactccagctgagtttcatgcactgctcgagaatcgcaacatcgacattattgactttcatcacgtctctcaccatatggacagagtggtagtgaggaaaaaggctgaatttgcaaaagcaccgtcaaccaactgcttaccaattgcaatttttgtcacttcatatgctcgtctacacctttatgactatatggaacaagtgctgcgtcttggtcataagctcctctattgcggtgagccaaaaaaaaaaatttttttttcacctttattgacctattattcaagataccgattcaatttattacgtgacacgcagcggtagacagcaggtgcctgaaggtgaagcgctgggacagatgaagagggaacattgctcgaggcgaatatacgaatttgtgtccggtggtccaaagaattatggttttcgccattgtgatcgcataaatggagaggatgagcgtgctgaattgaaagtccgaagttttcgtctctcatattctgcgcagcaactgctcaacttcgagtccatgaagcgcattgttttggaacattacaacattgatggacaaatgttaacacatttttctctcacataataatccaagaaaaaatacactaaaattctattccacagatatgatgagctggacatgaaaggtgttcatgttgtcccgggaaacaacgcgtctatgagaatccaatttccacaaattggacgaactccatgtacggatctgtacacctacgacgctcacaagactaccacctcattatgtgaggaggcatcacccacatggaactgagcatacagatacgtgaagacaacggatcagaacagctgaacatcacgacacagtgaatgatttgatacactataagtggtaacttacggatgtcaattggatccataaaaaaaaataatgtacacatataagaaaaaaaaaactgcagcgttgcgtcgaagaaatataattacatatcacacatcgcagcatgagacagatgttcctgctttttggatcctgtaaaaatgattttaccagaatgataggctaaacatgtgaccaaagcgtgatgattgtctacaacaatcttacaacgcatagcgggaaaaattgtgggatcatattggatgttacgaaatctgtgtgggtccagtgttggtataaaattcaacagaggcaaacgatggggtaatgtgaatgaaccaactatgtttgtcacacgtatctcatggagttctaactgagagcccaaagcatgctgcacccttcttctgattttttgcgcctcgcgtaccgctctgtttggacaagggacacccgttaacaccgcacgggctgatcgaaatagaagacacgcaagagtgcgttgttgaggcagacgcagtcgtataatgattgcatggaatcgttggggatcgtactccgagttgaatccgttttgagcaattttcaaaaactctgtgtttgtgaagggcgtccgctgtagttgaaatgtcactgtacaattttgaatagttaacatttttttttaatctgacattaaaaaacgacaatatttgaattaaaaaaacacccgttcatcatgcatcatcatcatcatcactaaatcatggttctttaacaacaataacactaagacactcaagcgggaacagagagctatgatcaccaccaccaaattgaagaacacatggcagttgggggtaagccagctttataccatgctttacatagtagtagacgcgcacctaaagtgtattgtacacatagattggttaaatttaaataaatcaaacacaaaccgtaatgccaagataaccgcgcatagcatatgcagtttgagctggatgaattgtcagttcgttgcaatggacgcgaatgtttttccaggcagggcgcagatgattggtgcgtaaatgaagattggaacgcaacatttccgaaatttctctacgtttgctcagcgtctgcagcagaacgtgaagctcattcattgaacatttgtagtgtttgcagagaaaatcaatcaacggcacactcttctgcttttcattgcaactgcacttggtttgtggttgcgggtgctttggcaactcaatgttgtctaaatttaaaaaactgtttttaatgtctaaaaataactaaataaacctttcacttgttccagttccatttgatcattttgcaattccctcgcccgctcctcctcctcctcgatgattttaagccaactcatttgtccttcctgaaaatttattttttttttttactaatatagttttatttataaacttttttcataaaaaaaaatacctgtgttgctttatcttcttcttcatttcctgttgtcatcttttgttccgggtacgcattgtggagccaatcggtcgcaagaatcgcgtccatttgtttaatagttaagagattattattattattattattattattatttctgtaaagctttattgtgtatatataatattttttaaacatggataatataagataaaccgttttgcaaaaaaaaaaaaaaatggcagacaattttcaaaaatttgatgaaaaacacttacaactcagacacccgtttacgctgacaatctcagggagcacggggagtggaaaatcggaatgggtgttacgaatgctgaggaatgtgaatgcgctagtttcggaacccatctcggagattttctactgttatggggagttgaatccaaatataatacagcttcagaaaagtggacacatcggcggttgtagggttattgtacatgctggaagcccaaccgaagagcaggttaatcggcgcgcaaaagagtgtgatggaaaactgttgatggtgttggatgatctcatggttggattgggccaacaatttcttgacactgtgttctcccggggatcgcacaattggggggtcagcggtgggttggtcactcttcatttgttcgcgaaagaactgcgcattgcgcgcaacaactcccactatttggtgctgatgcttaacccgggaggc

SEQ ID NO: 829 - DNA, 776 bp, Heterodera glycines
aaatggcctaaataggcttaaaatcatctttttacaatttaaaaataaattttgaaacccctttttcacaaaaaatttctataaacaatctaaaaattctgtaaatttaaacaaaagtaacacaaaaaacatgatttttccaaaccactgaaaataaatgttgttcggaagaacaatcttgaaaaggcaagaaatattttgaccaagagaagacggcgcaaaatcacttaaattttccgcaaaaaaatagcctaagctaaacgagaaaaattttaaacttataaatagattatttttcgaactaatttcaaagcgaaacattgttattactagggatgcgatttttagttaaatacctaaaattttaacttcattttcaataaaaaatttaaattttaacattatcggcataaaactcttaatcatatataatatacattagaaaataatcaaaataacagaataaattatgggattataaatataaacttgagcttttgaaaaataaatatttaaaaaactagaaaacgaaatcatagacataaattaacagtaataaatatgggacaaaagaaataaaaataaactaataaaagtttatatatggaatacacatttttcccagattttattgagtaataaagtatgaatattgaaaaaacaacaaatttaaaataatattgtaaaactaaaataaacaaagagaaaaaccattattacacgcataatctaaaggttgcaagtttttttctaataaaaccttaataaacatgggc

SEQ ID NO: 830 - DNA, 8121 bp, Heterodera glycines
  unsure (1)..(8121): unsure at all n locations
aaaattttttattttattctattattaccatgttgaaataaggttggttttattcgagctgcgctagatcattatttaagcttcttttctattgtttgcggacagatatttgcggacaatttcaggaaaaaataaaaaaatttcttgaaaaattaaacaaaaatttttgtaaaaatggattagaagatttggcttcgctattatatcacttcaaatttcagatatacagaaatatattttaattttttgagacatgcttaatcgcgaacaaaatttacttgcaatttcaaaatgtgcagcatataatataagtgctgaacaccagctgtactaaatttcgattcccgtcattttttgggcctcggaattccgatttctttacgaaaatttttgggttatcggaatgttatcctcgctgaaccctagagcaagatttatctagggttcttccccgattctatgggaaagaaaagtaggggagcagatagcaaatcccccgaaaagacttgtcagcatagctggagaaatttaaaaaatgtaggcaaatactcttcgggaagtaaatctttttaaattctaaaaaattaagttaagagacacaccagcatctcattttgacgattgaaattaattattaaaagttaaaaaaagattgaggccttataaataaaaaattatttaatttgttgtgcagtcgtctccattcaatgttttcataaattttttaaagaaatttttttatttttttccgaaattgtccgcaattgtccgttcgcaagtgtccgtccgcaaatgtcccaattagagaattaataatatttgagacattttttccaccaatcaacataatcataagacgatgccgtaaacttcgatttatttttgttagaaataactataatttaatttattaataaactttttttacaataaaaattgattatgttgcttaataacttaacaataaaaaactgcatgaaataattcgagcaataataaataggattcatttaaaagaaagaataacagcaacacctctattaaaattatatttaaaaaataatttttataaaattttatagattttattaacaaattaattgatattatttataggtaaaatatgacaatggttggttatacaacaaaatgccccaactaaacaaaaggatagttaaaatatttcaggattaaatacataaaatgagaatttaaaatattaattcaaaaaagtaaattacattaaaaaatttatgaagaaaatgtttattaaaaaattttaatgcatatgtttagaaaaaattaataaaacattcccaaagttcttattttatgaataaattaatacgccaaaagcataaatcaaagttattattttattaaaaagaattatttaattaaccaaaaatttttctatttataaattttttacgaataaaaaattacacatacaaatatatttcatctaaaggaccttttacttaacactttttgtctccacaaatttcattgatcttagtaatcgaaacagaaattttataaatgtaagaaataatatagaaagacagaatgttatctaaaaatagcaataaataatttttttgaaaaaacatcagctaaagaagatatttcatagggttcgaaataaacgcaaataattataaattttatgaaattataaaaacacgaactaatgaaatctaaaacattcaagcagtcttcaaaaacgtaggaagcagatcaagaactaaataaaaaaattaattagaaaccagattacggtgataccaaaggacaacgatatccatgggtgcacttttcatttggtttccatgaaaaagctataaaataaaattcatgaaaataacaaaaaacagaaattaaaatataataaataataaaagttgcagagaaataaaaataaatttttatttattctaagaataacatcgatctcattggtaattatataaaataaaatattctaaatatttgaaataatgcgaacagataaatttttaatatgcaaatattctcgttgaatccaaaaattaaaataacaaatgaagatgactgtgataccgaaaggaaatatccttgaatgcagtttcatgtggttcccgagaaaaagctataaaatgaacttcatgaaaataaccaaaaaaagagaaattaaaatatattaaataattaaaactctaaaatttgaaataatgcgaacagataaatttttgtatgcaaatatatcgatgaatccataaaattaaaataacaatttaaaaaaatattataagaaaatattactcatattttattttcaaaaaacccatttgtttaaaaataaattaaatattaattattagtttttattcgtcattctaaaaaataatttcattttaagcttttaaaaaagaatgttataaaaaatatttttacccatttaaagataacctaaaatttgcttaaaaaaatacagtctctaatcaaccaagtaccatacctaagacttgtcttcagggcaaagagaaaaaaacataaaaaattaattgctaattattagacaactacaaaaacagaaagaagtgtcaaccaagtcatgaagcttgtattaaactaaattgctttgtattttttgctgatgccattccacattttttttcagatcttgctctgcatatcatgaagcattttgatcaggcattaaatagaaaatgtttgcttttaagtgtttcaaccttatttgaataaaaataaatttaataaaatctcagttaaatttttgcttcattatttactagaaattttagctttgttttattatggagattacctcactaaaatttaaattttactctcaaaactttttctacatgttacgtacataattaaaaacaaaaatttatggagcaattcccacagcatttaattattagtttatttaaatttatttgattaaatatagtaagtaaattagttttatatcaggagtagtataggggcaaaaatctggcccccccctgggctgagagatgcgcattcactataggagagaggagagagttagagaaaaagagtaattgcaaaagcaaagaaaagcaattaaaatgtaaagaaaccccggccactattttaatgcaaaaaccccagcctaatggtattcccgggtacatttcgcaccgatgcgcgcgtcgcttctttttttgcgtgtcccaaaatagtgataataaaaagttaaaattttgattcatctaaattttattattcgtttttggcgcacaaaaggccatgaaagaaatttctttcacaaatcgcatataatttcctgctttcttgagaatctttcgtgaaaaggaatgtatttatttttaaattactttctgacctgaaaaattcgtgtaaaagcgctgcacataattcgccaaaggaaagttgcaatatgcaaacaaaagtaattttaattatattaaataaaaatttttaaatcctcattttgtcagatagactttattcgttggcaaatgataaaaaatttacgtgcaaatgcttcaaattcatgattttaagcacatattattagggctgcgatttttaggcaaatgcctaaaattcctgcgcacataatacgcatagataagcacgaaaaacgcattttccgcttggtttggggtgtctacgatgacttttataatgcctaactttgcctatttcggggtttttgtgcttagtgcctattttgcaagccttaataaaaaaaatgcctaagtggacaatcggacagttaacaatccgacagtaaattacactaaaagataataaaatgccgtcgctgaagggaccgattgtgccgtatcaagaaaaaaggaaaataaacaaataaaaaaagtgcgaatgcagtctaaaattgtttcgttttaaattaacacatattggcattttgaagggaggctgcatctttattgaaataaaagcgctttttcttgccattcctcgcacccgaatgccgtcttgtaaattataggtgaaattttgatcaataaaattccaatgcctactttattactttgctcaaacttggcaattttttgaaatttagcaccggctgattaattaaggtaaaaattcagacattcgaatatgaaatgcgcgtcggtgtatatatgaataatcttttatttaatgacataaaattatctgaaaatagttcaaaatgcaaatttattttaaaacaattaaataaattattgtaagagagtctgcccatcaactaaaataatttagcaaggaaacaccaaaaattttttataatcattacatgttttcattattgtttttttatctagttaaattctatattttcttatttacttaatatattattaattttcgttaatatttatgtttgggtcaaaagttgtaaagaagaattaatatttatttatttattgttgtaaattttaatttttctgaaaagcatttaaaatttattacagttagtaatcaaatgctatcaaacatcttccagcaatcgcttttaacaaggttataatctggtgaatttatttactatatgagtttatttaaaaaatttatttttgagttttatatttttaattttttttggctcaaaaaagaaaagattttcttaattttcttaatactattttgttttataatcatttaaaaaataaaccccctaagaaatgaaaaattttccaaaaattcatctccaaaatgtatttatttattttcttgacaagaatttatgctttaaaaaactattaatctcaatactgtcttggcctaatttttttacttttttgaataattttttgtcatttcacacacctaaaaatgagtttttttagtgcctattttccattttttagtgcctattttgggggtttttttagagcctaaagcctacctattttggcggtttttagtgcctataaatgtgagccctatttataatgaacaaatttttaatttattttatttaatttctttaaaggagaattgcaaatataattgattgaaattttatatttttaattttatatgaatttttattttaaataaaccaacagaaaagttttttattttctcttgctatttaactataatttatataaaatatatttaaataacaatatctacaacaatctatcttttaatataaaatataattcttattaagatttatatattcaaattttgagcagttgcctctgcctcaggtgcgtatagcgtgactattgaatgctatactccatatttttgatcaattctgggatggctaaaattaaaaggatttaaaccttaattctttgtttaaatattaaaaataactttaaaaattatattattattctgctttatcttttttttcctttgttgaaaagcatcacaataaaaacaaatagaatatataaatatattttttttgcagtttttttacacacctagttattctaatagagtattaggttaagtaattaaaatttgttatgattagaatgttatattcaataggtatatagatgctgaataggagcaatgggtattttcttatttatctatgaaaagttactttttttttatctcgtgcagctgtccgtttttgatttatgatactaatgtcacattaaatattttgtgtcataaagtgattcattaaaatcaaatatttatttaatttcttattttaataaaattcatttatttatttcataaaatttatgcttacggtggttatctttataatcatttattccgtcttgcttagtgtttattactttttaaatagtttataaaaatatttttaacagatttgctatttagtataaaagtctttcaatcttgggtgaagtaaccggtttaagattgtcgttatactataccaatttttatgtattttcaattcttatttgaatgttcaatggtgttctgtttttatattttgttaattgattatcatctcatcacttaaaacatattttcatatgtaaaaaaatcttccatttcagcaataagttcattgtaactcgaaatattaaaaaaaaaatttaattatatattaataattgctctttatgtaataatagttaaaacacttttaataattatcaaatttttatatatccaatttcataaacttttgaaaaacaattttttatgcaatgattattttagttttaattcaattttcaatctaatcagtaaaccagttttaaatcgcccgtttatctgaacagcatgtgcttcaacctttaaatttaatttttaattaaatgttaaaaaatctattataacttttaatcatgcacattggttccacttaattcttcgtgccattaatcttaattttaataatttttatttaatttaaaaaatatatttaccaaaatgcgttcgcttcgcgcattctttcattctcgacatggcgaaggtattcgttgttggttttttaaatgaatgatattaaaaattgattatggaaatatttttgacatgctactttatgctttaaggtattactggagatcataaataattataatattttataggacaaaaattaacaaaattattgattgtaataattatacttttatcaaattttatttttttgtttttcaatgactgtgtttaagaattttatttgctaaaaatacttaagcaatcgctgcgtttgcgcacgcatatcgttggaaatatgtattttttatatgtttaaccattttcatacatatgtaataatttctatttacattttggtaaaatttattttttaatcatatctttattttttcagtcaattaattcaaaatattttcgaatcgttttttgatatttatttggttctctttgcataatttttgtaataaaatatagcctcatattaattagggttcttcgatgcaaattaaagatatgttaaattaatttttacaaatttaaaaacaatttagatgaattacgctttccttttgttattttttaaaattatctcggtaggaagaattggtttacctcacttttgtacagttatgcaaattttgaagcttttgaatgaccttattaaaatgttttctctgtatttgagcaattcatacgcacatcattcaattttttctggaattggcctaaatttttgagttgatctcgccccactacttgctccgtcttcgcatgctcccttttgcgaaattttgcttgtaattgttatttcacgtttattattttcggtactgaaatgttcattttcactgggactcagttgccccagtgctcagatggcgccggttcgaatttatacattgttttttagacttagctcatcaagagctttcgaatgataccaaatttgtgtgattttgaccgttttaaatcttaggtgcttcctttcactcaatttttcaagttttaaacgggttcaaaaaccggtttaaacgctttgccgcgcagttttttgatggtttaggcgttttcagcacctaaaaaacctataaaagtgttttatctattaataaaatattaaatgacttgtgaaggtacaaatttacaagatttgttttacttattattaaaactgagtggttgcggggtagtttaatccgatcactttacacatactttagtcctctattctcgttctgggacatttcgcccatttctcagataatagtttcttatattttgttcaaatactttattttacattggtcatacatttaattatttaactatagagtaattgtttctttatttcattattttaagttgtttttttattttcatattttacaagatgatttgttttttctacagtaagtgcttccagtgtcccctgttgattaatcatttcttttatttattttatatattacaaattgtttgttcagaaagttttgatatttttaaaattcaatggttaaatattttagtttgctaccctataatttagatactattttaattcattgggtttttttaaaattatcaattgcaaatataccttcatattattctttagattttccattttattgaaaagataaatttttgttattattataactgaaaatttttttcaanttgtttatttgatttcatttttcc

SEQ ID NO: 831 - DNA, 4100 bp, Heterodera glycines
  unsure (1)..(4100): unsure at all n locations
aaaatttttttcaattgattatttgatttcatttttcntatactttctcattttttgtgcttcacaataatcaatgaaaaatactaatttttatttttagaatttttccttccttatatgataattattatttggaactacaaaatgaaactttcgaacgttttttaattgttcatttctcgtgcttgtcaacgataggtatctgagtagctcatacatttaatcctattttatcattttttttttaaatttattaaataaatagctcattttttacttttatttggttaatattgttccgtaagagttgagaaatgacatgtagttcgtcattacaagttaatttttataaagttatttctgcattcaatttttggctttagtttataaattaaattgcctatggcaagctgtaaaccctttttacatactttactatgtttaaatatttattttaacacttttcatatttgtccatttgtttttataattgtcttcaatttggagaatattcaattaaataaaagtgattttagcttcaagttctgtatgtaaatcatattaatcacaagagttcaattctatttttttctcaatctacaatcttaacaacaactttaaagtaatattattcatttttctttttttcatcttgtttttacagcttaaacaaataatgttttcttatatctatgttaataatacgttttaatgtctatatttattaaaagaaaattgacttaaaaatttttatttatatttcacacgctagatatttctttgtcatttttaatgctgtgtttatagttattagaattatcacgatttaatgtcccgagatcctgtccatgaagtatgtgagctcctcctacattttaaatgtttattcctttcgttcaaaaaggtagtttattttttggttatgttttttatctttaaagaattttttttggcatatataaattcatttttcaaatacaccatgaactatgtcgtcattagtgttatagttaaaatttgtaaataattagacaaatctgcgtttttcaattaatttctttatctataaatatttatttttaaaatttgttattgtatttaaaaatcttgtgtattcaaggttaattcattttcatcatttggttgaatttattattttaatcttggtcaaacgtaagaactctttatcggtcccttcaacttaattgatttatctttagtgaggaacaattagctattttgatttcctttaaatttttatttatgcaaattatattcaataaattaaatttataatttatagattatgcatgataaatttttttttatgatctatctaaaataaaattataattgttttcagagagaaaatatgaaaaatcacaaacttttaaaaaaactgccaaataatgatattaaaaatgaacattgattggttaaaaatatcactttattttgtcatatattttattcaacaagttttactttttttgttctgattcttaatatatataatttgagctttatttttaaaaagaatttttgctatttttgctattttttaatttttgttttgcctttgttagaaatatatggatcatttaacagaatttgatagaaattgattttttatttaaattcatttttatatttccatatgtattaatatattttaattaaatttttattatttgtatattcagttctttttgcttttttttttataaatttttgtttcttttatgtattttgattgccgacgacttaaatttttcataaaattattaaaatgatgatttttattaatgagactaaaatggtaaaaaatagtaatttttggcgtaaaaccgctaaaaattttgtaaaatacacccattaatttgggatctcaaaaaataaaaaataaatccctttaaacaaattcaaatttttctgttttttacttttttccatttttattaatttattccacttcatttatatctaaaatataaatgttttcttttaaagcttatttaacaaacatccaccgcaatgagattctattataaattctgtttattatcatttgttcttttttaaatatttcgagaattcatcactttggttgtaataaattctaacttcatttattttttaataatttccttattagggaaagggttgaataaatttatttataaaatgctcaaaactcgctgtttattaatattgcaattttgatttttcaaaaaattttgtttttgtaaatttttctttattatttaaattgttttcaattataagtgtaataattgaatagtaaaaatagtgcttaatcaaatgaaaatttttaaactaatgtcatatactcaatctttaatattattaaaacaaagattcaaatatggattaggttttttaaatttatttgtctattgtttctattggtcatttttcattttctataaaattgtgctttaaaataattttttcccatttgtttccaatatcatatttttcataagtattcctcatttccattaaactgagctgtaatcgtcgtttaaatttagttaattagttcatttatttatgcatttatttgaatattaaaaagtatatttattttttatctttaaatatttaatgtaataaatgtatttgtttcgtaacaaaaaaaaattactgacataatttctttccattgttgaatttattattttataatcgtgtaaagcaaatgaaaaattaaataatttattttgtcctttgtttttattgagtaataataaaatttaaaaaaaaatacttttaaccacggggttgggctttgcttaattgtacatttcaatgcttaattttatcatgttcatttgggggctaatctatataaattatttttttatttaacaatattatgatataaatattaattattgattgtttacatttcactattgattttaaataatcgtgtttttaacttaatgttatcgtttttattttgtaaaaatcggcgacttaaatacttctcaaggaatatttgttccagaatatttattctaatttgatataataaattagacttgaattgcttcaaagtttttgattttttaagtaaaaatttgacctttaataaacgttaaaatagaatgtaaattatttgaaagttttattttatatttaaaacattacataacttttaaaatttgatgcgtaaaacaatatctcctttttacaaaaattgattttttattaattaatttattaagattatcattttagttctgataatttgaagataccaaattttttcactaattataatataatatttaataaatgttgactgtatttatattgattttcaaaaagcatttgactcagtgccccatgaattacttttatacaaattggaaaaaataggtataaggggcaaacttttgatgtggataaaggactttttgagtaataggacttttcgtgttaaaattggggatgatttatcctccagtaaaaaagttggctctggcgtcccccagggctctgtccttggacctttattatttttgatttatattaacgatcttcctgatgctttgccatcaggagtaagaattaaattatatgctgatgatgttaaattgtatatttgttataaagcaagaaccgaaacagaaattatgcataaagcattgcataatttatcagaatgggcaaataaatggcaaatcagaatctaaattaaaaaaacttttgtacttcatttggggaataaaaaccccaaagaaatatataaaattgatggaaatataataaatgttgtggatacaattagggatttaggcataaatattgataataaattgcaattttccaatcatgtcacacaaataataaagaatgcatatttacgtatgcgttctttatttcgggttattaaatcaaagtcttctaggatttggattattttgtacaaaacttatgttagaccgttattggaatatgctcctgaggtttggaatccatctcttctaaaaaacattaaaaaaattgaaaaaatgtcaaaaatatttcaccaaaagaagtctttttcaatgcagccttccacccattcc

SEQ ID NO: 832 - DNA, 4177 bp, Heterodera glycines
  unsure (1)..(4177): unsure at all n locations
ggcttcttcttctacctgatcgttgctgcggcaatcctcacgcggtggaatggtgcgtttgctcattccaaatcntgttgttccatcaatcattttaacggttttgttttcccttttcagttcgttggcatgtcacttggcggcaaaaagtcatcggatggagcgagcggcggcggggccaagaaggagaagaagcacaaaggatcgaagagctccagcagtgagaagagccaatgatgctgccgcagtacacgaggacggacgaacgatggaatggccgacaacagttcccctcccaaaccgatgctatccccaaaatatatgttgttacccctatcatttgtgttttatcactctgtaagcaaattttgcgctttccataccagcgatcatattgttctaattgtattgatgtgttatatatgtgtacacatgtatttatgtatggtccaatgtaactccgtttcaaaataggcaattaacaaattagttacgaagattggcaaaaaaagacatttcaattttcaaattggttggttgggttggccccgtttttcctccatttccattcgctttctgctgtttattacatgcacacctcatcgattcaaatgctattttctgttgaaaagtcccaaatttgcactgattttcctcgtggttttgagaaagagtacgccattcttggccaaataaagatggtattaattaattctaaaataaaaaatcttccattttcattcattttttgaatgctctcaacgccgattccgaaaaaaaaacttttgacagaaatggacaattgctgaaattggctgccaacttaaccccccattgattaatatgaatattgctttttagttaatttagtcatcaactttatttttaaaaataaacgaaaagtgcgtcgcctgaaagttttatgaattttttcgaatagctgtaacggctaaacaaacataaatttgtttagacaatttaattctgatgaaatattcgtgtttaatgaaattacatatttatccatgcttcaagaaattcaatgcatttagctacttaaattttaaaaatatgcatttaattttgtttccaattacttctttttcctttcatttcacttttatgtgcaacaattaaccttagcagctgacacctgcaattaaattatgtcttaattacccaaattagcaacaaaaaaaacttgccgttgctttgctccttgtagtaagcttggatcagttttcctgaggttgtccagtaggaagaggaaccgacctaaataaaattacaaaaatttggaatgtttccatttcgagaaatgcaattggtcgaatacagtctcggccattggtggccatcatttcctttccgttttttggcttcacatttcatttttcctcacattgctcgccgatgcgctggtggtcaatgccgaacacgactcgcccttgttacagacggaccagttacagtaggagattttgtagccgtccaaaaaggaccaccattcgttcatggagctggtcgcaattgtgccgtcgccggacgattcgcacgcgccgtactcagtcagaaaaatgggcagacctggcaattagtgcaaatattgtttttttaaatattatgaccccaagaaccactttttgtgtaggccgtcttgagttttgccccgaggccagaaactgtgtgagtgccggtgtaaaagtggaaagtgtacctttggggaagtttgtgtcaaacagattagctaaaatgatatcccaaaatatatgacatcatataaattcacattaaatttgagtagccagtaattggatttgcagcggcaacgtccacgtcctttcaaatgttcgttttaacaattaaatttaatggaaattattagggtcgctacttttagtgatttaactaattttttttgctcaattgtttcgaagaaagaagctcaaaaatacatttctgcgttgaaaattttcgattcggatctcactatcgcatattcgtaatcagcgacctcgaaaaccccccataaacatgtttccaagacttttggtcgctaatcacgaatctgacatgtattttgactaatttctaatccctaacccgaactcgaataaaaatcggaattttgaatttttcaaattatgattttttgttcaaattcagattaggaaatcggaattgatcaaaataattgaaggattcgtgatcggggaccccaaaaaccccagaataaatttttatgactatcacaaaaaaaaatttgcaaaacaaaagggtccccccttttgaaaaaattttcaaaaagggccactttcaatatagcgccaaaaaatgtttcttcaaaaagggggggggggggtaccatctatagtattacccatacaagtgtcacaattaccatcaaaactacaatttattgttcacattttacatacaatatgaaacggagttacattggaccatacataaatacatgtgtacacatatataacacatcaatacaattagaacaatatgatcgctggtatggaaagcgcaaaatttgcttacagagtgataaaacacaaatgataggggtaacaacatatattttggggatagcatcggtttgggaggggaactgttgtcggccattccatcgttcgtccgtcctcgtgtactgcggcggcatcattggctcttctcactgctggagctcttcgatcctttgtgcttcttctccttcttggccccgccgccgctcgctccatccgatgactttttgccgccaagtgacatgccaacgaactgaaaagggaaaacaaaaccgttaaaatgattgatggaacaacagatttggaatgagcaaacgcaccattccaccgccgaacagtgccgcagcaacgatcaggtagaagaagaagctcatttggttgattggagaacaagcgcggtcgaagttgacgtgtgtggaagatgtatcggttgaaggtgttgcgcaattatcgtcgttgagattattttattattgggaagtgagcgaaaatgcgaatgcccgttccttttatacaatctcagccacgacaattcttaaacccaacattttgccaaatttcatttgatatataaggggatgcgttttcatccttttcaccttcgctactaccatttgcccatttcgaagtgcacccactgcaacatttttgtgagttttttctcttttttttcgtgtgtttttttgtcttctttttacatcccctccatttgtgttcagaaacggcctcgacaaacaagcaaattcttcaccaacacaccgatgaagagcgtcgtcagcccaactccgttccgccggcccctttcgctccgctgtgtgtgctcagtgctggtgctgctcatctgtgcgttcgatgtgtcactggcagcaaaagacaaggagaagaatggcaaagaagaaccaggaggcccatttaatacgctcagcatcattttgctgattccgctggtcatcttcaccggcgcgttcgtctacctgctgtttatgaagccaaagagcgaaggaaccggcgatgacgacggagaaggcgaaggagacgcggacgtggaaaagggaccaaccgaagagacgaagtaaaacacgggcagagccaaattggcaaaacaactaataatgtttttcccatttcagaacggagcctcgaattgaatctccagcaactcttttgggcgtgacagtgccgttggagcaagacgaagaagagcagaaaaaggacgacgaggggtaagtgcaaaggtggcggatcattttttactcattaaaatttaccatttttagtggcgaccaaaccgcggagaagaaagaagaggacgcggcggcagcggacgaacaaccgaaagaaggcgccgcggaggcagcggaagcggagaaaagtgcgacaaaggaggagacgaccgaggacacggaggagaccacggaaggatcgaccacagagacttccgacagcggctccggctcgggatcgtcttcagcatcgggctctgaggggagttctgggacttcggacgccacttctgaagccacagaggacgcatcatcttcatcggagggttcttaagtgaagcgatgcgaattatgccgtttaatgacaaggaaactcagaagggtatttcccatgcacatgtattgctgtattattgt

SEQ ID NO: 833 - DNA, 4769 bp, Heterodera glycines
gaaatggatatcgaaattcgagatcagcaactccgaaaacctaagaaaaggtgatctatccgactctaaaaattgtaatttttacaaaaatttatgggggacaaaccatataagagccaaattttgcgctcgttatcgcgacagaattgtagttttgatggtaatcgtgacacttgtatggagtaggaggtcgacaaaaccagagtagggtccgaaaattgttttttgttgcaaaacaaaggtggaacccttgacttgcaaagaaaaacaaattttgtttgaggaaaaaaacggctctattgcagttacgcgtccaaacgacttttacccgtccaatcacaaaacggcggcctaggacttgagttataaccagggctcgcagatctgagactcaagggttccaataatttatcatgcgtgccatcaacgcggataaatataattactaatattaaattgaacaaaatattaatgtttcccttcccgtttaggctgtgttctaccaggagttccggatttttgtgcgctaaaatttaagaaatcctatcattagtcacaattcagttctttctaaaaaatcgaaactaagttaatattgatgtaaaatgtttatcagcacatatacacctcacacaaacatacatacggaaatatgaaaatgataatgacaatagattttgaggagcttgtgatatgtagtgggtttacacacaaaatgataaggggaattgtctgatctccagtcgtgttcccagggcgcttctccatccttctgttctgttagtgttcggtgctcatcgtcctcaggccggcgggaagcgggtgatgctgtggctcaggttcggcgcgattgtcagcgttgctcccgtgttgttgcggccagtgtagcgcggcgccgagaaaagggtgatgagccggcggccggcgaaatattccactccgtccatcacgacctggaaaggggaagtgggaatttagtccagaagcaaatgaaaaaaaagaaaaaaactcacttgatgcgcccgaatgatgtagtcgaggcagagcatgtcgcacacccgctccaccacgtcctcgccgaatgcgatgcccgctcctctggtgttcgggatgacgccacgaactccgcgcgcagggtccgcccacaaaagatcgatctccagcgtccgaagcggcgggtcgatttgcggacgattcaggtggctgagctgctccaggctgttgatctggtcggagaggccgccgtgcatacctgaaaaataatgaattagtatgaatggacaacaacaacaaaaaatgtgactcacacaggattttgtcgccgatcaggccgacgtagggcatccaggcgaacgtctgattgaagaggtcgtagaggcggcggggacccggacgctggtagcggcggttgacctcatcgaagaagccataccttaaagggggggggggaatttaagtctgaaacaacacaaaaaaatgcgatccttacactctgttgatgttggcgcactcgtggttcccgcgcagcagcatgaagttcgctgggtatttgacctgcaatggttttggggatttaatttggtctgttaaagattcactaaaccacaccttgtagcagaagagaagaacaattgtttccagtgactgggggcctcggtcgacgtagtcgcccaggaagacgtactgctgctctggagggttgccgtgcgtgtggaagatcctctgcaggtccgtgaattgtccatggatgtcgcccacgacgacgaccggcggctgaatcctgacgagcgtcggctgcattctgaagatgtccgtggccgccttgcagagttgtttgagctcctcgtcggtgatctgtggaaaaaatgaaattttttaattgttgaaatgtcatgtcaaaaaaatcccacctcatccgtgaagcgttggacaggcgactgcctgaccttcctgatgatcgcgtccacgaagctgcttgacaggccatctccttgcacaagtgttgaagtcgttgccgaaggccgagactgctccgccgctgccgccgccgttgcatcgaagcagtactcctctcttgccattgttgcgccgggcacgtcgcttcgtgggattaaagttgcagacgatgagcaatatataataacaataatatgtgggcaatgaattatgtgatggaacactgcaaatgcgctccttttatatacattatttccgttttcactatgggtcaagtccagtgcagtgttagacaaaattatcatttcgccaaatagcgtaactgacgtaattttttgcgcactaatttaaaatttacactggtaaatgccttttttgattttgatcagccataactcgcttcattcctaacaaaaccgaacaattttagtatctaaaagaagttttatgcttgctttttttcttgactcgaaaaaatgcttttagtttttctttctgtttattacgacagtaaatgaattgtgatcatgcagaggctgcagaatactcaataaagcagcaaaaaaggaaggatctattcgcagattaatttacgagagcaaattgaaggttttttaattaaaaagggggcaaccaatggcaaattgtataagagataatcaagtaacacatgatttcacttaatttgttattacttatctatattactttttttgtaatttgcaaaatttttacgattttttatttttttaacgccgggacacaaattccatttccaaaggattacccaaaatgtggcaattcaccaaaataaattcgtcagcaaattattgagtgagtttatacaaccatgcatacatatacatctactaatataatggtacatacaatggaatacaatagtttatgaaatataggtaatctaatttatatttgcaggcttgagtatcgctaatatttgacacattattaaaaatttaatttttggtttggacaaaacgaaattcagaataaatgatacaaaaaataaaacaaatgttatttttgatgcaaaaacaatgtattttgtactccatcactctttttcttttctctgtagcgatttttccagtaggcaaaaattcgtaggcgaaacgtccgattttggcttagtaggcgaaatgtcattgtgccgcgtcggcccgccttacgccgcttcaaatccaacgcaatgaaggacgggtaaatgaagaaaatgccgaacaaattggtggtcaacagaatggcggtctgacaaagaaaagagacataaaaaatgggaaaaaaggaattttgaaaaaaaatctatccattccaaacccaaatataattttcaaaaatattttccgacaaattttatcaattaaatattaaaagaaaagaaatggacggaatacttttttttgttgtaaaaacaaaatttcgttttcagaagctgtataggattatgaagaaaaaattatttgtacggttttagtgggggtccgtgtcaggttttagctttatttttagggcttttgcttgcttaaacaaggaataccaaatgcaggccctaaaacatggttttcagtctcaattacctattaaatgacatttgttggacgcgtaaaatggcacgggacggttgaaatgtcgtggtgattgaacgcctagctagaaacccaaaaaacaacagtatcacataaattttattgtccgaatacattcatacaacatatttatgtacacataatgattggttgttgcattggagcacatacaaatacaatacaatatataggacatacatacatatatcattacaacaattacaatggtttgatcactgatatggacagcgcatatagcttatcacggacaacagatcagagggtgataaagcacctacaaatgatataatttggggggaggggaacagcgtcatattgtggggatcagcagcagttagaaggggagaagcgtttgttgctcgaagtccatcgttcgttcgttcatccacgggggccatcctcgagtcgatcattgttcaccgctggggctcacgctttctgcttcttgtccttcttggagccgccgccgcccgccgatgccctggcccctttggtggtgtaaatcatgccacagtactgaaaaggaaatgggaaacaaattagacacaaaacgaacacgaacggaggcaaaagcgggccaactaaaccattttactagtcatggaacgatgaaatttggggttttcgggtccgaaattggtcaaaatgaaccgtgtatatgttaatggcacttctgaaatgaaaagcctcaaaacaaattttcggattttaaattttggtttcgtctcacaccagcaaaaaacacgctgaaagtaagccaaattcattttccgtgcttttatgagtctcgaattcatcctttttgaaagctcaatcccgagctgattaaaacaacaaattttgaaatggatacaaatttgattgggactcaaaaaatgcagcaacaaaacaaattcccccaccctcaaacccaccgctccaccgccgaacgcaaccgcagccacgaacatgtacaagaggaagcccattgtgttgttggagagcagcagcagcagaagtgatcggattcgacgtgtgcacgggcgatggatgtgctgtgttgaagcgttgcgcaattgtcgtcgttgctgattgtttgttgttgttgttgtcgctgtgaagggaatgagtgaccaaccgacattttcgctccttttatacacattttttcagtcgaagttttgcctttaaaatttttagttcttt

SEQ ID NO: 834 - DNA, 2715 bp, Heterodera glycines
aaaaaaccacaaaaagcctcaaaatttctcaaaaaaccacaaaaagcctcaaaatttctcaaaaaaccacaaaaccttcaaagcctcaaagcctcattttgaaaatttagcctcattgacctatcaaaaaaccacaaaatgaggctaaagcctcagatctgcgagccctggttataactcaagtcctaggccgccgttttgtgattggacgggtaaaagtcgtttggacgcgtaactgcaatagagccgtttttttcctcaaacaaaatttgtttttctttgcaagtcaagggttccacctttgttttgcaacaaaaaacaattttcggaccctactctggttttgtcgacctcctactccatacaagtgtcacaattaccatcaaaactacaattctgtcgcgataacgcatttattgttcacattttacatacaatatgaaacggagttacattggagaccatacataaatacatgtgtacacatatataacacatcaatacaattagaacaatatgatcgctggtatggaaagcgcaaaatttgcttacagagtgataaaacacaaatgataggggggggggggggggtaacaacatatattttggggatatcatcggtttgggagtggaactgttgtcggccattccatcgttcgtccgtcctcgtgtactgcggcggcatcattggctcttctcactgctggagctcttcgatcctttgtgcttcttctccttcttggccccgccgccgctcgctccatccgatgactttttgccgccaagtgacatgccaacgaactgaaaagggaaagcaaaaccgttaaaatgattgatggaacaacagatttggaatgagcaaacgcaccattccaccgccgaacattgccgcagcaacgatcaggtagaagaagaagcccatttggttgattggagaacaagcgcggtcgaagttgacgtgtgtggaagatgtgtgggttgaaggtgttgcgcaattatcgtcgttgagattattttattattgggaagtgagcgaaaatgcgaatgtccgttccttttatacaatctcagccacgacaattcttaaacccaacattttgccaaatttcatttgatatataaggggatgcgttttcatccttttcaccttcgctactaccatttgcccatttcgaagtgcacccgctgcaacatttttgtgagttttttctcttttttttcgtgtgtttttttgtcttctttttacatcccctccatttgtgttcagaaacggcctcgacaaacaagcaaattcttcaccaacacaccgatgaagagcgtcgtcagcccaactccgttccgccggcccctttcgctccgctgtgtgtgctcagtgctggtgctgctcatctgtgcgttcgatgtgtcactggcagcaaaagacaaggagaagaatggcaaagaagaaccaggaggcccatttaatacgctcagcatcattttgctgattccgctggtcatcggcaccggcgcgttcgtctacctgctgtttatgaagccaaagagcgaaggaaccggcgatgacgacggagaaggcgaaggagacgcggacgtggaaaagggaccaaccgaagagacgaagtaaaacacgggcagagccaaattggcaaaacaactaataatgtttttcccatttcagaacggagcctcgaattgaatctccagcaactcttttgggcgtgacagtgccgttggagcaagacgaagaagagcagaaaaaggacgacgaggggtaagtgcaaaggcggcggatcattttttactcattaaaatttaccatttttagtggcgaccaaaccgcggagaagaaagaagaggacgcggcggcagcggacgaacaaccgaaagaaggcgccgcggaggcagcggaagcggagaaaagtgcgacaaagaaggagacgaccgaggacacggaggagaccacggaaacgacggaaggatcgaccacagagacttccgacagcggctccggctcgggatcgtcttcagcatcgggctctggctctgaggggagttctgggacttcggacgccacttctgaagccacagaggacgcatcatcttcatcggagggttcttaagtgaaacgatgcgaattatgccgtttaatgacaaggaaactccaatacgtatttcccatgcacatgtattgctgtattattgtataatcgtatattgtgtgttatatatatatccaatgtgtttttgtctgatcaatgattgatgtatttgttctgttaatagcgtatttatggtacatataaatgatgttgaaatgtcatttcgtttttttagttcattcatcgctctttgatggtttttacttcgatcaattttttaaaatatgtacataaattttctttgcacagtagagttaatttctagtttagcatggaatttaaattcctggacctgggtttttccaggccaaatgtgtaaaaaaattcaggtcgacgctaaaaaaactcggatttcctggacaaaattttggactattatttcaagtgaccgatgttttttctagttttcaaaaaagtcggatagaacaccttttcttaggttttcggagtgctgatcacgaatccgacatccgttttgacccatttcgagtcccgaattcgaattgaatagatttttttgcaaaaaaatgtgaatttgttgtaattaagttttaga

SEQ ID NO: 835 - DNA, 2937 bp, Heterodera glycines
  unsure (1)..(2937): unsure at all n locations
aaacgannggaagagatgggaacgggaacgaatgcgttcagtggagaaggcaaaaaaatttcaaatttataattatacataaataatgatcggagcttttcacattgtgggttcgattttcgggattggggtcgaatttacgagatttatcccacgataatccagcatttcaaagaaattcgggattatcaattgggcgtcccgaataatttcggcacaaaattcggtctcgcactgggtgtaatgcagttcgtacaatgtcatcattctcgggtaaaagcccgaatttggggcaaatatttaaaaaatagaaaataattaaattgtgtgtgtttacttcccatagggggcacagttcaagcggaccaactcaatgccgatgattcggcgccaattgtccgaccatcagcttcacaatgcctcatccatttcagacctttcaaaccctgggattatggtcgtcggtggtccttcccaaacaccggtaattttttcatattttcggcattttttcaaatttaaattttttttaaagttttgtccaactcgtggcacggcaaatggtccttgttatgctccagcagcaactccagcggatgtgatctatgaatatgtggaccagggctccttgtcgttggcttccacgttgaaagccggcgattttttgtaaggaaataaatgtataggcattttatagatgaatcccttggaaatacagtaccctgaaatatgttaattttatggactgaatgaacgcgcaagaataatacagtgccctgatatttgaattttatggacagtatgaatccctgagaaatacagtaccctgatatttaaacttttatgacagtatgagttcctgggataatgcagagtagtagtctatatttggaatttgagctaactcaatgccctgatatttgaaattcaaggacagtatcgactactgggaaaatacagtactccgaatttgaaattttatagacaatatgaatcagtcagtggttaattcgttttgttaattatttaggcgctcaaggagtaaatttaatgtgtacgatccggtgccgccgatgagcaatggacagcagcaacaacgacaacaacaacaacaacaccgtcgggttgaaagcacttcaattggcacacaacaaattgctgacaatgatcatcaacaacaacagagacgggaaatttatggggtaaaatttaacaaatttaaaaatgctaatatttaatttaaaaaacctaattgcccaattaattattgaatttaaatattcatactagcctaattaattataggataatgaatatttgcaaccgaagagtttgacgagcaatgaaagtgatgacaataatttggcaagcagttcaacagttaggcaccaaaaagcattaattgtcccggtggatgtcggaacatttcgaggtggataaatgtcaaaaatttatttgaaaaataatgagtttaggatgaaattttgcagaatagaggaaaaattgggacccaatttaagtaaagcgcgaattttattgaattggtacttagaactgggaatttttgagtaatattattaaattaattgttattctatacttcctttggtgtatgcttttccaaaacctaagaatttaaaaaaaaatacctagaaatcttttcccaagaaattattaatatctaagccaaattttttttaatttcccaaacacaatcccacatttttttcaaaaaattttaaaaatcctgcaactggataacgcaaatttgatttgtcggtctctagttctaaatgggaatatgcctcctaattaagccatttcccgagaatgtcccgttgtgccaacgacaacgaccacatcatcatcattatcatcaccgccatcgatggcatccgcttatgagcacgtaatgccacaaattccgctgaacacttttcccaatcaaacaccacctcaacgacaatgggaggccgaaattttggcggagttgaagcagcgccaacaacaaaaacaacagcaacaacaacggcaaaatgtaaggaataaaaagcaaaaattggcacttttgctaattagtgccctataagaaatttaaaaaaaggaaatgaaattaaaattaaaatttcaaatttttataatatcttccacgaaattccaatttccattcattcacaaccgaacgcacttgttgaatgctggcactgaataaaaatgtttttttttaatggttaattatgtatattcaattaaaatttgggatcagcgagagtagagagagagttcagtcttttgggtccagtaaaattcaaattaaaaaaaaaccctctgatcccgtgcaaatccacccaaaccctttgatcctacccgctccaaaatgcgttgttcacttcgtcagctaccatctgctcaattgcttctgctttatgaaaattgtgacggcgtttcgcatcagtgaatgagcgtctcaattgtggcgtaatgccatgcactgatgggtcgaataattggcgcacttttttggaaaaaaacaaaaaatatttcgggatttgtcttttattttgtaaatcccagattaatgtgtcccttaataggtgtaattagtaaagcctggacgggatcaggatccaccggaattttccctgggtcccgatcccggcttttttgcaaatgggttgtggtagggatctcgacaaaatcgagcttcacatcccggcaaatccaggattttaatcccgataattctatcctggtgcctgatgccaatctcagatcccgactttttcaaaatttcgggctctagtgatttgctctatatctactaacttgaattaatttcaataaaataaaattttcccaattttgttaaaaaatgagattctcaaaataaaacattaccatagaaggcatcaccgattaaattacaaaggcaggtaa

SEQ ID NO: 836 - DNA, 1895 bp, Heterodera glycines
aaaattttaaaatttgtttcaaattttatgaattgagggggaggaaaaaacaacaattaccccagacaaaatgcacaaccaaatcattttcttaaaaagggcttggaaaactggattttttattattgtataataaaaacaacacactttaaaaatgatgtgctctcaacaaataaaaaagtccaaaaaattaaaaaataaataattaaaggataaaaaaaatgcaaagtttttgtgacaatgaatgatccaaaattattaattgaccatcattgttaattggataatgaaaatttcgcacataactttcaggattaaaagtacaagtttttgactgaacggttttccggaattttttaactgtattttataggaaattttttatgatttatggaaaaaaaaatttggatagccgtggattactaaggctttaaggaattaatgaattaattaattttttagctcatcgacaaccattcgagcagctcatcccaacggcggttgtgcccaccaattctcagcgaagtgccatcaccgctcggcaatactgtagcgcaacagtcgctcggcacaactactgtatcgagggattcctaccgtatccaaataaacactttccaatcaatggctgatcggcaacaacaacaaccatatcttatcaacccaattaacaacagatacagcaggtaaatgagcaaaaacattgcagttcgtgaaatttgaatgttagacggagtttggcactcgctccattaatggaggggtactgtaatgaaaaaaaattcataggctcattttatcgattttatttgcatttttctttaaaaaattgtttggtttttctccaacttttataagccttaaaatacatacactaaaggtcaatcgccgatttggtaccactgggcctcaatggcacagctttgcccatccgcgcatttgaaagaggccaagccgactcgcccgagagaaggtcaaatctgggcataattaattttaaaagaagaaattgttataaattttcctaaaaaatattagaaaatttatttgaaaatttttctaacatttttacaaattttatgatgaaaatcactaagatttttttcagaaatctttccaagaaaagattttcgggctcttataataaaaaatgtttttttaagtaccatttctacaacattgtcgacaatgcaaggtgaaaacagtccgccgaccttccttggcggcgcggaagtgccacctccgatgggcacgagtttgctccggcaacggcttggctccgcatcggtggcacttatggggtcataaattttgaagttttttaaaaattttgattttgtaatttttttccagctctgctgattggaggcgaggcactttgcagtcagaagctgagcgatcattaggctcaagccgtgccgcgaccaccttcttgggcagtccaccagaagcagcagcaacagattttggacaaaccgtcaccaagacatttggccaaaatggaggaatggacaatgttggacaaagtgtcgaccagcaatttggacgaagaaagtttttcggacaaaatgacgtgtcaccaggcacagatgtgtgaaagcgaatgaacattttttgttgtggaatttcattttcaatatttttttttctcatttatccgacgacgggttattttcctatgattttcattatttgataatgtaatttaattgtttttttctcattgattaaaaatggattagggttaaattgataggggtggcaaaaatggtactttatttaaaaaaaagttctttaacattaaatattatagtacaaaaaatccaaaatcttaaaattactcagttcatttgtttttgaaacgttcaaaattcctaaataaaaatttttgggaa

SEQ ID NO: 837 - DNA, 2473 bp, Heterodera glycines
  unsure (1)..(2473): unsure at all n locations
aattaacatttaagatatgtacatacatattagtatgtgtttattaactttntggaacaaagacattttgtttaacaaaacgatggatcatttgcataatattcgcactttcgtcccccgggngggccaacccattcattttcaattcgttcattcgtttcacccaaatcccccccccccaaaaaaaattctttataaacacatcttttatctgtttgtttgtatctgttgtttgttgtgtcccaactattagcagagtttaatccaaattctcacatttgccctagtaaattcacactttgtttgtttgttattgaaactttttcattgcgaaaagaatttttaaaaacgatattggaagacccttaaaaaattttgcatagctaattaaaactcaaataaaaattccaaaaataatattattgctgagacacaaagatcggctcagacggagttggccccgcccgcttcatccggcggagttgtgagaaaaacttttttttttaaacgaaaactaatttttttttcgctgcttccaaccccccacaaaaaaaagtatttttaacgaattaatcatcaaagcggttgtggtgtaactctttctgctgttgttgggtcagtcattgttgtgacttgtgacacattccctctggggatattctcagcaaacttttttgttttgttttggcaaaatgttgcctttggcgggaatatattttttttttgtatgcatttcctcctctcttttttctttgaccgctgattgcccttcaaaatggggatgatacttcgtcccaccaccaccacttttgtacgaccacaaaacgccgacaaaaatgtggcacagatgtgcaaaaagtgttgggttggaggaccattggggggggggggagggctaccactaatcggcgacaatcttttccgattttcaccagcagacccaccacaaagtgcgataacggaaaaagtcattcatattcattggttcgccatcatttgctcattttatgatgagatgtctcttttatgatatgacccccatccaaatgcaaattttattgcactaattatatgttaatgccaattttattgccctaataattatatgttaattaactcgttaacttgtctcattcatgttaatgagttaacaacatatgtgtactcattttatttggttttgaccagagtacaaaatatatgcagtttgaatagtctagtattttagcttttgggaattaaaactcgaaatcttgtcgaattatactgtgcgttggaatagggatgaaaatgatatcaatgccatttcaaaaaaaacgggaaaatttggcattgctaggcatgtaaccctaacatttggcaaaggtctgtcatggagactgtaaattcaacaaattggcaaatatatacttggcaccttaaacttagcaaatttttgggtttttatgaaaaaaaattcatttttattccaaacagctgcttgttgaacagcagcagcagcccataaacaccttcattttcccacatttgttctttgaccctctgctgcttctgtgtccccacttttccaccatttttgctcatcataaaaacgccgggggggggggcattggaacgaacacaaaagtcatgtggataaatcatcatcatcaccagcgacagatgcttacctatttgcatttatgagaatggattccaaatttaacatttaaaattggacactgttccgatcagtgatgtaattccgatgccaggaaatttttaaaaattggaattccgaaggcaaatattttttctgaatttggaaatcggaatttaattacatccttggttccgatgacaaaaactccaatagttttcacaacgaaatcttgaaaaattcagcgagcaaaccccgaaatttaatgcaaatttttccttaaaaattttagaaatttccacaaaaatgctattttttctgattgcctcgctattgcctattttttgctccgctgctgctcttccacccaattatttgcctccatccaattcttccgatgccttatgtgtcgtctattttgactaccgtaacccatcaatgcctcggctcaccgtaatgccacaggaaatggcattcaattacacgcagtggaaggagtgcgcgaggaaatgctcagattttacagccgcagggcacgagaaaaggcagtggaatcacacgtgggcactttgttgttttatatcgctaattaattagttaaattgattgccatggagcgagcagcataggccatttatcctatttttaataattaattagagtggtgggacgctgaaaataattgtttttaatacgggttcggaaatggaaagccctttttccagtgcacaaataatttgggggtttcaaggactctttggacaaattcggactgaacataacacaatatttttcccatctaaaggacatccttgtccaacaggacaatccgtg

SEQ ID NO: 838 - DNA, 4183 bp, Heterodera glycines
ggagtgaacataaaaaaatatttttcaaatttaaaggacatccttgtcgaaaaggacaatccagtgaaaatgctctaccataatgccaatttcatactcttgaaaatggaatttaaacccttgccccgcccccacacaatggcatttcattttgatcaggtgccatcctggcaaagaatttgattgcaaaatcactttcaattggggccaactgagcgcggccggtgagtgcccatcactgtacaaccaattggatcaccagcagcaacaggacaaacacaccggtagcagcagcgtcaccaaacatattgagcaggtggactattttcactggatataattgaaatgcctgacaaatcttttggtattgacaatgaatggtaacttactgtaattttgcgagagagtaccgtatcctattaaaaaatctctttaattacccaatatcttgatacgaacaatggttactgtaattttgcggggaatactgtattttctcaaacaatctttaattaccccctacaatggttactactgtaatttgcaagagaaaataccgtatttcatacaacaaattttttgaataaaattttaaaaaaatctataggccaactcggatgtgcatgtcagtgggatgtgtcttctgtttgcggacaatcggacgaccgttggtttcaaagttgtggaaatgaaaccgccggaatggaaactgccacagtttggcacttgtgcccaaaaatgtgtcaaatttgggcccaaccacgactcatggaaaatcacgtgggaaatttaggagctttcaaataaatgggtcaatggcaactcgatacaaaatcaaatcgagaattggaaattcatacaattttttaattaaaaaactaaaataaatttaaaataaattttagaaaaaaatagcaaaataaaatttttgataatttttagattaaattcgtttttaattttttgtacgagatgacaccaaaataattaccctttgcttacaattagttttaactagactaatttgtccataattagtagctctttaaacagttgcaatttgccgtcgggcgatcagtgccaaattcggcgtgacggtcccacttttggcatgcacggcttttgcccggtgatgcgcgcgaatggcacctattattttgcgcagcttttcacggatttgatggctgagaggcgaacctcttccgccgcagcgaacatttcattttccgtttctatggtaaatttttggcgcatttttttcttattggcattatatttttgatcaattacaacgctttttgaacaattttttccagattttctggtccatggccctctttttcggcacaattttgggcggcggacaatggcactttggcatcgtttatccgaccaaatgagaaaaaaagtgttcgcccaaacggcgcgttaataattttctgtctctctctttatatctcagacaattgaaaaaacattttgatgcaactcatattaattatcccattttcacatgtccccctgctgaattttgtacgtctcgtttcacccgcatatttttgagcatttaaaatgtgccattttccgacatattccattcttttttttctctaaattttcgtgccaatttttcatttaattgtatgtatttttcataaatgttgaccagattttatcagaaaatgtcaaaaaattcaaccttcttgctctatctacatattcatacatatgttcttaaatttcaaactcaataatgacgataataataataataataatccaaaaatggattattttctgcaataatatatcaaaaaataataattttttgagacttatagtaaaaaaaatatttttttcaaaagaatttctttaaaaaaaacttcttattcattttattagcttttcaaataaatcgaataaatttatgtacttagaaaactaaaaaatttacagtttctgcagtgttgaacttagtgcacccacataagctggcatctaaaaacccaagtgccaaaatgtgtcgaaatcgtcttacctctcgactcatttgggctttggtctctgcccaatttgcaataaaaatgccatcataaaatttttaatttcacattttgtccataatttgtttgccattccacctccctacccctttccccaatcatttcaaatccctccacaaaatcccatcaaatccctccacaaaatcccattgatacaacaataaccaatcactgcgcaatgaacaatatttttatttttgccgtggattgttcgccgttttttgggcgctcccaaaaaattctgtcgcttgcccatttcccgttgtcagaagagataattgcccaattctcgaccaattcggggaacaatttaatctctcaacaataataatagatccataaatttcaaaatttttgttcaaaaatgggatagaataataaaaaaaaattcttatttatttggttttggattctcaaaatttcattttattaatttggcgattccccaaattttcattgtcactttcatttttgattcccattcccgtccattagctcaatcatttgttgtttttttgggtgctccacgaccttcggggagagaaaagtcgagaatcggggaggaaattcccagaaaaatatgccggggatggctggagaattcgtcgggtagcagcagcaactcctttgttttcggggaagaaattttaataaaagtcgcaaaaaagtcttagaaaattacagccttagtttttttaattaaaatatttcaccaaagaattcaattatcttaaaattaaatcaaatgtctaaaattgcatttttgctcttcatacttttggcagtcaatgaatgtacgtcggcccaacaagttcatcccgaaccaccaaaaagtatggccatgacatggtttttaatgaatgacttttttgggaggctgcgaatggatgaaatctgtgaaaatttttttgattacgatatacagtaatctcgcagcctaattaccctaatttaccaagacccgtcttcccaaccgcttctgccacatgggcgatcccgtcgtgatgaaccagagttgacaactccaacaacaacaacacccgggaaatcgtcgacggaggatgaggaaaaggacgacaaaaacaggtcagcatggggcctggatttgggtgtgcccaaatatttgtcatgaaattcgggtttcggtctctaggtaagtaaaccaagacccttcttggagaagttcttgccgagattgagaaagattctaaaaaagtcacgggatcggttgtcttagcccggtctctcgtttcttaggtcgtggacaatttcgtctcaaggctaggcccaaaatttcctggacaaaagggcaaccatccaatttccgagaaatttacattggtcgacaaaaatggtggtcagcatgtgtccgaattcagtaccaacctcgatagctcagtggtagagctgcccacagattggatggggtgaacgtgtgggttcgactcccacccgatgcctaatattttgcccatttcttttttaattcgaaaatgaaatttttttttgagcagtagcgagctgaaccgcgataaacgtgaagaagatgatgacacaccgatgcatgacggagaggaattggacgaggagggcgacaaatcggacgttggcttggagacgacggccaaaaacgacactgaaacgaccggggaaccatcaacggacggagagggggtaagaaaatgggaaaattttgaattttttggcaattagccaaccacggaacaggctgaggagcaacaacaacaacaacaacaagagacagtgcaggaaaatcttgaaattgctcgaaaaaaacgtgacgaaaaccaaacgggtgagatttaattgattgagcaattaggaaaggaattttcgaaaaattcacagaaaacatggacggaggcgaacaagctgagcaaacacatgtcgaggaattatgtatgatttaacaaaataagacacatgattgtaacataaataaaaaatttcttggattaatagtttaattgatttttaagaaattctatccctggtggcgtgcccttccctcccctagtgctgctcgagacccgaaaatttgccaatccttgaaaccgagactaaaaatccgagactcaaaaccaagccccaaaaaaccc

SEQ ID NO: 839 - DNA, 824 bp, Heterodera glycines
tcctggtattgtccctgggacagcaaatccctcaagtccagcctcatccctaaactatgggcctgaaaatttaaactttgattttccattgattttaaatttagcaggcaatcaaacggcggaagacgggctccgtagccggaacagacgtgccagtgccacgaacaacaaggcaaaaatggcagtgaaaagcaccaaaacggcggctgccggagcgcaacgtggaccgcgcggcttagagacggggccattggaatgaattttggcattcaaaaatgggaattttttttcgtccctaatttaaaaaaaccctaaaatttagggccacaattaacaaaaaattgtcagaattaacgtgatgttggtgtttgttacacatgcatacacatattaaatatatttttttaataaattagaaaaggtacaattttttcaatttaatgaaaattattaaaatttagaaatatttttattttaaaaagtcttgctttaatcagtctcaggatgtaaatttatctgttagcttaacagtcacatttcagggattggtttctggggcctttcagaattacgaacgacaaatcgaccgacaaatttgtcgtttgtctcccaatttgtcgttattacgacaaaaaaatatatcgtttgtcgtccaaatatatcgttttgccatttgtcgtccaatcagaattaccaaattttgcagagtaatttgtcgtttgttctcaattttgatggaagcaaataataaatatgtttgtcaaaacttttgggcaaattttgggggaactaagaaaactgtgcggccaacaaagagtgatcaa

SEQ ID NO: 840 - DNA, 5571 bp, Heterodera glycines
caatcagacaaaataaaataacaaaagaattttgctatcccccccccggtatgcaaagacaaacatattattaaacgacgcccctcttattgtggtgaaaaatgtaaatgtccagagggattcaaattatgtagctttgcatcttacaataaaatcaaaaatgaatccgttgaaaaaattaattaccaaaacattatttcgttcttcaaaccaaatatctgcgcactaaataaaactgaaaactgcccaatcatgaaaagaaaattatttaattcaattgttcttcatgacaattcaattcacatagtgaaaacattaaatttacttttttcccaaattgactcaataaacaattttcgttgttttggggagggcaatctgacgattggtactccaatttactgtcgagaacatgactgttttaaaaataattcattcaaacaaataaatggaacgaaattttgcttttacgatccatacgaaaaaatttaccttgttaaatctgatgaagaattaattcaaatcaaagcatggggaactattgaaaaaatattttacttgccaaataatttaaatcaaccattcattgaaaatagacggaataaaagagaagaaaactcttcaatcactgaagaatcaaccattgagtgtttaaaaggaggcattattattaaagcaataaatgatatacaagaattacaaatttccattgaaaactatacaattataaaaaagaaccctcaaaaagaggaaataatttatttacccccaaaacttacatcctttgaatataaacctgtcattaaatttataagtaacccagataaatcaaatgagaaacaaatcacatgtcaatcatctcccgtatgtgaattaattaactgtcgattttgtatggaatatcttaaaaacccacaatgtgtagaccagattcactgggcattaatgcttgtaattataatgataattttatatgttatttcattaagcctccaaattattcgaatactcacacgttttatccattggattttacaatttatttttaattgttttaaaagaaaacccaaagtaaatcgaattagaatttcaagaccaaagttaaaaagaccattgatttatttaatcacttccagtttaattttattcaaaatgatttttgcttgtgatgaagtgacaaatttagtcgctggaacaaatgactgtgctgtaacccaagaaggaaaaattgaatgttcttatgaccaaacaacccaactctctattacacctgaacacttaacctgcttaaaactcgacaatacaaaaactaacaccactatggaaacactacaaattacaatagaaactttaacaataatttgcaccgaaaaatctgattattttacgagaggttgcgaattatcttcgacatcacaaaaaagatgctcaggcgctgggaaatgtaccggccaaacttgtcaatcagtaaaaatttcagaccggaatcccgaagtgaatgatcacgctaataatcaaccaggttattcatactgtgtaccatcgtgcggaggatggcattgtcaatgtttcctcgcaactgatggatgtctattttacagaacttatgccgaatcagttggtgacgaaattttcgaagttgttaactgtccatcttggaccattcaggcgacaattaaattgtctatcaatccagaattaacctattctgttgacttgaaacccggaattttaacacacattggtgacgagtctaatagttctatatctatcacactgacttcgacttcaattccaccgacgccgttatttggttcgacatttattatagttcgcgaagaattaaaagcagcaatagttgcgaacggaaatttactcaaaaatatattacggtgtaaaaacaaagaagaagcgcaaagttttagttgcacttttccaccagaagcatgtcaatgccacggaggtgattccgttgtacattgtgaatgtgaaaaaagtccacttaccgaaatatttgctaggcaagagaaccttttacccattaaaacacagggaagttacgtatacttcgattcccaaattaaagctaaaatacagcaaacaacttctcttcaaatgcaagtcacacttaaaggacataaggttaaagctatttatgataaaatatttgtaatattgttaccatatcattggaaggatgttattcctgtactagtggtgctaattggactctatcatgcaaaaacatgtccccatgggtaaaactggaaatatttttgaaagctaatctggaatacatacacccaacaaaaaacaaaaatcattacccctaaacaatactaatgaaaaccccccaattggaaatttccttttgaccaaataactgaattattaaattttattttttcccttattaaagccaattttttcaaaaatttattattatcatattccaacccattaaggattttccaaaatccccggcccaccacccaattcaaaaaaaaaattttggtcgctgccctccctttcgcccggggggggggccccgacaccccccaaaattctaaaaaaaaaaacccccaaaaaaaaaaaaaaagaaaaaaaaaaaaaaaaaaaaaaaaaaaaaaaaaaaagggggggaaaaaaaaaaaaaaaaaaaaaaaaaaaaaaaaaaaaaatatttttttttttttttctttttttttttttttttttttttttttttttcccccccggccccccccccccggcaaaaaaaaaaaaaactcttttctcccctggcgttgagggagccccccgcctttttttttttataaaaaccaaagttttttccctacctttccctttttccaaatttggggggggggccccaaaccccaaaggaacccaaaacaaaaaaaaaagcaaaaaagaattacgttttatgcgtcatcgtttgtcaccattcaccgcgcccaatgcaaaaaactaattcctaagtccaatagattgactttttaacaaatatatgatggaatggaaagttgatgagttcaacgtcctgagttcttttaccgaaacataaaaaaatgcaaaaatttaatttgtttagcgatcgaatttattaaaatgccaaaattaaaaaaaaatcaccaaattttcctgctggtgtaaattttctctaagaaaaaaaaaattttcgtgaccgtaaaaatgagtcagtcggaaaatgtgcccccagtgaatcagttaatttattgatgataacgacatacggtatagcatgctttaaaaattttaaaggtgaaatgactgtgggaacaaatttacaaaaatctaattaaaaatatattttttttatttattaaaatttttaaacgttttaaaaggtgagctttttatacggtttgacctttttcactacaatacttttaacgcatacagattaaatttaaaaaatttttactgtcgattttccgggagaataaattttttggcccattatttatttgttcaatgaatgaatgaattgctttctctgtgttttattcctctgctcttttcttctttaagagcttttcttctgtgaagaggtcccctttcatttggccagtattaaatttggccacaattttctgccaaagtgaaatgttttccaatggaattttaatgttttcaattttggcggcttataaatttggagatggtaagctcttttaatagaataattattaagatttctcataaatagggctgaaaattaattgttgtattcaattttcattttaattcattttccgttggggaataatttttgaaaatttaaaatgcgattttagaacttcattattcctttctattgccttttggattaaaaataataatttcaaaaagccaaaataggggggaaaccaccaaacttgggacgcttctattttagggctgaaattccaacaaattctgataaagataatatttaaaataaaattattttttttaaaaaaaaaagcgctctgtctgatgtgcaaagcatgtgagggtgaaatgtgcaactcctaccagatgagtgtcagctgtgaatttcccgttcgtcaatgcatgcgtttgtccgacccatacagtggcagaggtccaatttttcggtggaccccaaaaattcgacggacaattttttggatcatcataactttgttttctgtgttgatcaaattgggggatctgtgacgacgccctcaaaaaatcagaaaccggcattctgacgactaaaaaattttggcaatcggaattccggtggactcaaaaaatttcggaaatcgtaagtccgagcccaaaaattataggaaatcggcattccgacacatcagtgttactatgaatgtttatacctttttatggttctcaaaagaaaaaaaagttatgatccaaaaactcgcttccggcgattttttgtcctctgttccgaaatagaagcttgctccatatgaaaaagcgcatttgtttaagtgtacaagatgggctgtgtgtatccgtatgatgagatgtgccaacaacagcgaatgaatgaacaaatgcggtgggttgattatatcgtcagcaaaacaaagaaaatattcaaatttgattggaattctggggttctaattaaggagatccatgtaatttttaaaaaacaaacccaggatcaggatccctaacaactcgatttaaatcctgaaatcctaccagcgttttgtttcgaattaatataaatagttaagctgttatacatgtgactacgataattgcaatgccatctccaacccatacggtccaggcaattctccatattccaacggaggctacgacccttacaataatgctcaacgatacggtccaaacggacggtacggctattattggaacggcgcaatgaaacaacgacaacaacaaaccgcaaatttattaatggcactaaccgtaacactaatgacacaaattgttctaagcattttttgatttgataattcaattttaaactaagcaattgaatactttgtggaaaaagttgcaaatcaaattaccaaagttccaccgccaataaacacaaaactgtgttttcaaaacatttgtgtatttagaaaacatgagaaacacaaaatgtgtttccaaaacatgagaaaaacatttgtgtatttagacatgagaaacataaaatgggttttcaaacatgagaaaaacatttttttattttgaaaacatgataaaaacaaaatgtgttttcaaaacattgagaaaaacatttgtgtatttagaaacatgagaaacacaaaatatgtttccaaaatatgagaaaaacatttgtgtatttagaaaacatgggaaacacaaaatatgtttccaaaatatgagaaaaacatttgtgtatttaaacatgagaaaaataaaatgggttttcaaaacattgagaaaacatttgtgtatttagaaaacatgagaaacacaaaatatgtttccaaaatatgagaaaaacatttgtgtatttagaaaacatgggaaacacaaaatatttaaaagatatgagaaaaacatttgtgtattaaacatgagaaa

SEQ ID NO: 841 - DNA, 1232 bp, Heterodera glycines
cccagggccttcccctcccctttccctggctctgtcccccttctcctccctttccgtcccctcttcttcttttgctccggctgatgtttatggccgatgaccaaagctctcgccatcctttcccgtctcctttcttcctcttcctcttcttcccctcatcatcgatggaagagaagggccatcctcccacctttgaaaccccccgggaccaccaaattggagctgatttactggggaacaaaggaaaggaaggagaaaagtgaagaaaaaaagaaaagaaacgatggaaagacaaagcggatggaaaagaaaggcaaagaagaaaaagaaggaataagtcattagtgggcttaacaaagtgatcatttgttgataagagaaaagtaatgccatcccaaaaaactcttccggcaaaacagaacaattaacggaaggaaatgggtgccttggaacaattcattaattattctttatttgaccgacaaagggaatgagaagcaagggataagaggagaatgaggagggagatattgtaatgatgacggatggaaaggaaggatgggagggaggggggggacatcatgcaagcacgacaggaaggaagacaaaggaagaattggaaatgagaaacgaacggatggggaagaatggaaacggaaggaaagatggtgaaaaagagaaaaggaagagaaaaaggaagagagaggaaaaagaggagcaagaggaagagaaactgggaagaacaatgaaaaaggaagaattaagagaaaggaataaggagggaaggtctgatgcctttgatcaatttttggggaaacattcttcctgatgatgcccctcttcattcattgagaaaaggttttttgaattggctaagatttcagattagccaaataaatagggctaatccctccctccccctatccctgtccacactctcccccgggtgaatggggaaagggtctctgccagaaggggttgcgaaattggcaaaagatttgtatggagtaagaattggaaaagagggaggaggatgtgccatttggcgggctgtgccgtgcttttcgtgcgactcgaactttttctaagagaattgcctgccctggcaccgaatgccatttaaatgctgctaaatgttctcatccctttcaatttcttttgaagcgaaaagcgaagaatgagtgaatgggcgactgttcttctctttcgagaacaccttttcttcttcttct

SEQ ID NO: 842 - DNA, 1210 bp, Heterodera glycines
atttacttaaatgctttgtcacattcggcacatttgatcttatgtgcctgctgaagttggtgggtttgatgctgagtttggtgatgttgttgaatgatcaagtcggcacaattttcagtcattgaaagagaaacggacaatcgaaaagaaaagagagaaagaggggaaagaagcaattgtcatgcaattaacagggaataatacgcaattaattagttgccgaatagtctaattaagaaaaaatttaaaattttttaaaaggaatttacgattaatgagtaatccaagaataaacattgtgtgggatagaacacaaacactgattaatggtcgagaggagggggggggggggaattgactcggtcattcccgaggggtgcctggctggggctgagatgggggcgggggactgattcagtcatcgcccgaggggtgtttccttggctgtggattatttgagcgaccgattgcataagagattttcctgccgacttcgtccgattatggccaaccagcagatgccatccctcccattccctctcttttccctgggaatcggatttccaagacaatggccccattctttgtgaaggacgaatctcctccaatttcctttggcaaattgggttaatttctgtccatttttgaagtgctcaatccaaaaagtgtgtcttttgttccgaatgaatctctctgatcaatcggtcccttttccattggcttttccttccccaaaatgttttccgttgcatttgtccttattttaacatatttagcaagaaactcccaaattctcttcgctcacctcattcatttctcattcgccgtgactatcaattaatcattcgtgtgccattcgactgtcctccgcggagggtaaattaagaaatgccaatggaagggagacgccccctcccctccctccctcttctattgccaccactattctctcctctccctatctcatccctctctatctcccctccatttctcccccttcccttgcccccctacccttctcgtcaacgttgctttccaattctcattaaatgtgtgccccgtcctccgttggtgccgccaaccttaggcgtatcctccccaagtgcggtgtccagcagcggactctttcatggccagcagtgtttaccaatgcctgtgctgaacatgggcacaacagtatgttgcttacaaatgaccccatttctctgtc

SEQ ID NO: 843 - DNA, 1217 bp, Heterodera glycines
tcccccccccccccccccccgcccccaccgtcgtccttttccttttctctcgcgccattctctcattgttttgccattggaaagtgcgcggagaaacgaagaaaagtgaaatagggaggaagattagaaacataggaagaagcaagaaacattccgagaaaagggagggaataaaattttattttgggggggggggggagttaaaatttgaggtgttttgagattgtgagggacgagcaaaatgttgggactcctttcattgctcattcactggaaaggtcgatgcccttgggacagcttcgcattcgcagtccgtccgagtcaccgcccctttcccctattttcccctccctctttctttcccccccccccttttgcctcttcacctcaccagcagcagaagtaagcgaaggaaaccaataaatcgcggtgtccccttcttcccaccccttcccaatttttctttctttgtttgtgaaaagcggccgactgctggtgggacagccgagaacgaaatggggggggggggaataaaaggacaggagagagagagagggggggggggagacacagccaatgggcacaggtggaactcatcaagcagagaagggcgaagcgaatgggatgaaagaatgaccgagcaagaaatagccatttttctgagaattaattcacaatttccgcaactcttgcggcaatggaaaaaattttgaagaggctctgcggaacggattaacatcggggttacgagatagaaaattgtcctaaaaagagatagccatttttctgagaattaattcacaatttccgcagctcttagggtaatggaaaaaattttgaagaggctctgcggaacggattagcatcggggttacgagatagaaaattgtcctaaaaagagatagccatttttctgagaattaattcacaatttccgcagctcttgcggtaatggaaaaattttgaagagtctctgtggaacggattagcatcggggttacgagatagaaaattgtcctaaaaagagatagccatttttctgagaattaattcacaatttccgcagctcttgcggtaatggaaaaaattttgaagaggctctgcggaacggattagcatcggggttacgagatagaaaattgtcctaaaaagagatagccatttttctgagaattaattcacaatttccgcaactcttgcggtaatggaaaaaattt

SEQ ID NO: 844 - DNA, 2050 bp, Heterodera glycines
gtgttctccgtttcccactgaactgccccgactttgctctgcttcatctccgatgatgaatctcgtcccccttccatcccgttttgctcccctttgccccttctcccgtctcaccttcgaatcggagtgcataaaaaggatgattggagggaaagtggggagaggggagagaatgaatggggcagatgaaaataaggaggggcaaaggagggaaagggggatgtcagcatgctgctgactgatcccatccactcattcatccttcagtcaagaatatgccctcaggcgatgaaaggtgatgaaacgaaacgggggaagccctcggcgatgaatggtgcgctggtggaggagaaaccttccgccccttccctccgcccccgccccttcccccactttccctttttgtctttattccaatattcatcccagcaggtccactcgactctttcagctgacacattcaaattttccgaaggcgaccaaattcttttgcatctgttaggggaaatcagcacgaagaatgaatggcgagggagggaggcaaatggggaagagagagggcggagagaaaaaggggaagagagagagagggggaagagatagagggggaagagcaaagatggaaaagagagagggaagagaaaggggaagagaaaggggaagaccggtcgaagggtgccgggaaggcgagatgagatggacagcatcgttcattgtcagctcatcacaagaatgcgaggggggggggaagttatttgcaagtttgggttgagacttgcaaatgggatcagcagatcactgaaaatatgaactattaatatgatcagcacagaatgggagaatgaatggtaaagcgaacatcagcggagggattgacagaaagaggaaaagggaagacaaaaaagagggggaaaagcaaagggaaaagcagggggatgcattgcatggacaatgaatggactcacagatagaaggataagcacatttcaacgagattgaaatgaattggagagggcaattcggtcggcagttttgtggggcgggacaggaaacaccgcgaagatagcacgaaatggaaggaaggaaagacacgcccatttgggggaagaaaagggcaatcaaagcagcagaaaagggcataaagtaagaaaagtgggagggataagcgaacaaaggacagaaaggagcaacactaatgggagaagcggacggaggacaaaaaggccaatcctttggttggacttgctgatttacaggtcccctcttctcgaaggagggcggcactaatccgttcattttgccgcgtccgtccatctcttcgtctccttttgatccatccatcatttacccgccaaaacggattaacggcgagtgccaatgcaaatgtcctcgtccttcgtccatttgtgccgtcgtcttggtcttgactctccaattgttttcccgtcgtcggctcggctcgcgcaaaggatgccatcccgcgggggtatggatggatcatccttattgccctgtgccctctcgacatttgtccctctcgcacaatgaatgcaaatttgtggaatatgcaaataccccgccttctccatcaatgccatgattcgttgtgctgttcattttccccaattgactttctccgttttgcctttggcaatgaatgccgtcttttacattttcagcgattgaacggcggaatttgcttatctgtccaccgcaatctcttctgccctcggcgcccgccatttaacgaggttaacctttgaacagatgtttagaggaaaagtggtcgaagtgatcacaaaaagggcgacaaaaaatgcgagtggcgggggggggggggtaattaaacggccaaatggccgagagttggtcactctgtcgagaatgttggctgtccttgccgtgctggtggtcatgcttgttttgtgtgcttgctcttccgaactcatcaatcggtgaagtgagtggacgggtggacgaaaagaggggccaccctcccccccctcccattcattcatttgtccccacaaccccaacggtggcacatttg

SEQ ID NO: 845 - DNA, 2450 bp, Heterodera glycines
cacaatttccgcaactcttgcggtaatggaaaaaattttgaagaggctctgcggaacggattagcatcggggttacgagatagaaaattgtcctaaaaagagatagccatttttctgagaattaattcacaatttccgcaactcttgcggtaatggaaaaaattttgaagaggctctgcggaacggattagcatcggggttacgagatagaaaattgtcctaaaaagagatagccatttttctgagaattaattcacaatttccgcaactcttgcggtaatggaaaaaattttgaagaggctctgcggaacggattagcatcggggttacgagatagaaaattgtcctaaaaagagatagccatttttctgagaattaattcacaatttccgcagctcttagggtaatggaaaaaattttgaagaggctctgcggaacggattagcatcggggttacgagatagaaaattgtcctaaaaagagatagccatttttctgtgaattagttcgcagtttgatcacattgcatggatgggacaccggggtaggggggggggctgacctctgctgctaccgagtctaattgactgccgtcatccgttgggtgacctttggcgacatttggtgggtggccttgggcaaaaggtactgtaattttgctgaaattaatttagcaatttatccttttcaaatttctttattttgacatttaattgtcaaaagatttgacgacagatgttggaaagttgaaatacttaagagtgttaggctaaactgaaggaaaaagaagtcgttggaagttggcattcatttgtcggcacttttgaagggaatcccaaagagaagaggcggagggataattgccaaagtcgtaaagttgtcgcgcgtccatatgggaggaaaggcacggagaaggacgcgtttcggtacttttgtaaaagaaagccattcgagcggagattggcgcatttgttgcacaataatcggagaatgtgcacccgaattcagcaaaagcaaacaaaatacagaagaagaagaggaaaaaacggacacaaaagggaggagagaaaagagaaagggcaaaaaagcgttaaaaaataaattaaatgccatttttaaaatcgaactttgagcgaattgtcctaattttgatcaaaatataattttagccaaaaagtgcaaacatttttataaatgatggggtttaacgatgaaactcaccggagaatttgaatgaaaagatggacaacagaagggtaaaaaagaaaagaaagtgagtcaatcctccggggcattcattcgccaaaggtgggcttagccccaatccctccaattattcacttcccccacccccaaaagccccgcaaaaagcaattcaaacggtcgtcgcaatttctcccacccttttttttacctattttgaaattgaacatgaaaaaagtgcaacacatacttgacaacactcaagcaaaaatgaaggcaaaaagttcggcggaagggaccgaaagccgtgccattgcctttgctgggcgtacgaaaagcaataaaaattaaattaaattttgatcggatccaatgttcatgtgatccgatctttccaagtgccgtctgttctcttaaatagtgccgtcctttccctctctcccaatttatatttatttttttgcctttctccgctgtttgtgccgttttcaccgtccgctcattttcacggctgattgtgctgagaagagagtttgccttactcaccaaccgacgaagaagcaaatgcggtgacattcccgggggaatgacaaaggacggacggaggggcggaaacggtcgtaccatcccttccatcccttctccccgtgccccaatccctaccaaatcagaccaaaagtggggagttaatttgtggccattgtcatgtccctaagggacctcaattttggccatattctttggcatgaaatgggaggaattgaagtgggtttagtgatgagtcaaatgcaaattgcgaatttgaggcggacgaaggaattggaaggatgaggaggaggaaaaagaggatgaggaagaaagcccaacacgaattattatgaaagacgtgattttggagggggggggggggaaagagttggcacaaattatggacaaaatgatgaggcacagaaagtgggatacgaattatcacccatctcttcacttgccaaaaggcacccgagaggccattcccttctctcatcaaaggagccgtcgtaatggcctaacaaataaggggggggggataaatgacggacggaagagaagagaaacgccaagaaaaaagcaacataaaacacggtaaatgaaagaaatgtgggaaacaataaattccagttccttcccctccattcttttcttccttttcctcttccaatttcttttccttcctcttccttttttctcttcctttttccttaatatct

SEQ ID NO: 846 - DNA, 1337 bp, Heterodera glycines
cccccccccccatagatccaatttcggttgcgcaattcaatccctttgagcaaatgaattattttattggcactcttcccaattgtcggcttggccatttggccacacatccaattaaatgtgttcgcccgaaagacaaacgaagcaatattctcccaaatataccgcccctttattttcgagagggaacggagcgatgacccaatggaagaagcggcaatttagaagaataaagggggggagagaggaggaatcgtggcggaaaaggatgaggaagaggggggaggggggggggaagggttccttcccgcattcatcggacggaaatcggcgccacaaaagggcatttattcactcattcattcgttggcattggcccaaaaaaagcaaaaaaaaaaggaaaatcggacaaaatgaaacaaaaaattgagagaaatttaaccaaaaaagggaaaacaattgtcaagatttgttcttcaaaaactgaagcatcagcgaatccatctcccacaagtcgaagaattgaattatgtggtgactttccacaaaaatattcgccgtttccttaaaatccaacaattgacaaatgccattctcttccaccaaaatcaatcgcttacaaaaattggcgacaaaagcaatagcaaattgccaaatcgctcggcgtgcccaagtccatttttgaaggtttccgatttagtttcataatatttatgaagagattggcacaaggaagacagttcggaactgatcagagcacggccggcggaggaaacatcgggcaaagctgacaaaaagggaggagggggacagaatgccaaaacaatcccggattaattggataattggcacgtaattagagaaaagcgcactcatttggaaagacacaaatgccttcagcgcaacaaattcatcaaagtccaaacgcatcagaagcattggcgaaacgatgttacacatgagggggacgagcagcggccagtaaatgctgaccaaatgggaatggaatttgacttttttgaatggctggagaagcaaatttgtgatcggatggcattttgggaaggatggaatggcactttgtaatcggatgacattttgggatagaatggcataatgccaggtcgcctctctccacctcattttggtgtcccgcgatatctccggctcgtcctcccatccctcgtcccttttcgtggacacataacccccattgggcaacacgaatttgtccaagtcgcccatttgagtggtcaaaaagcacgggtccaaaatggtgtggtaaggacgcatttgcggagaagagtgatctataattagaaaaacaaatgcaaatt

SEQ ID NO: 847 - DNA, 3312 bp, Heterodera glycines
  unsure (1)..(3312): unsure at all n locations
tccttagctgagagagagacaatgagagagggcagagaatgggagacgaagtaaagcaacggaagagcaaaaagaatgaacctttgtccttttcttctttttctgtcactccctcgccccattccttttcccattcgccaaaaaatcagaccaccgaagaaacagacaaaacaatcgagtgctttaacttttattacattatgaaaattaattgattttttagcaattaaaatccaatttaaaattaattgtgaatttggtgccaaattaaaaagtgaaaatggatgataagagtaaggcattatgtaaaagcaattttgggacgagttcagtgccggcagacaccgcattaattcatttgtctgctctgctgatgatgatccatccgccgtctgtcctcctcaatttgctccgccgaattgcggccgatgttcctccccctcgtcgtcctcctcctccaaatagtcctcgtctccctccgtcatgtcatcccccgtcgtcgtcatcgtcgtcttcagcagtgctcccacttgcgggtcgcctgtcacatcgaccggtctctgtcctcttctgttcctcacgtgcgcatttgcccccgcctcgaccagcaaatgaacacagtccaaccgaccctttgcactggccgcgtggagaggcgaatcgcccaatttattctgattaaagtacagagaatgtgagagaaaagggggcaagggaaggaatgacttgggccaaaagtgtgacattcggcacggacagcaaatgcttcagaatgggcgtgtgcccggcatacgccgcccagtgcaacgcggtggagccggacctgtccaacccattgacggacatctgacaattggggaaaatgactacggaggggggggggggtgaaatgccacgcgtggactgtggtgccacccgtcatgcaacacaaggaaaagcgcactttgttgtccaaacactccctcaaaaagctcaaatctccggccctcgccgcctcgtgtaatggaaattcgatgagttccatgtgttgttcaactgacaaatgtttttgccgattcgtcccactttctcgggtgccatgacaattcgaacaaaggcaactcaaatatgggcttagtctcaagcttcttgggcctacgataggatcaggctttatttcgtaaatttattattgtacgaattgccattgactcatttctcgtgattttcaccgaattgctttggcagaattccttcggtgtgccccgtggaacttttcgcttcgcaacttttcgtcccctccggcgcttccttcacatagacaatgtcctccccgtacaattttaactcaccagcctaaataaagccaaacaattccattccgaacatcgcaacaaatttattgccttcgtcggcacgaattgcttaagcgagcggaacatccgaatacgccccggtttggccatcggcgggggcggcggcccatccatcggcgtaagaaaggcccaaaacgaagcgaaagttttggagaaataaatcaaaatatgccaagggttgtatcagcgaacggaagaagacattaacaaacagagaggaattatttgttggaattttattgtttaatttaaaatggtgaaaaaaggcaaaaacaatgagtgaaaggacagagaacaattgggaaggatcacaaaaatgcgttaagccaatcaaaagtgacaaatggcatgccaaaatacaaatgcacaaaaacatggaatgcaattaagggaaagaaggaccctcgccctttgtcgtccgcttcatttccctcccttttcgtcctcattttctgtccaccactcgcaattcgctcactttcctcaaatccctttcaatcgccgttctgtcacccgaattaatattgtcactgttttgaggcaacattgtcccggcattttctgacaacttttttcgcgttaaaattggagtaaatgcgaattgaagaggcggcaaacggtcgtcgaaggacaaaagttggtttagcgaattggcggaggaggacaaatcgagaagagaagcctaaatgggggaggaattggagaaattgtcaatttgcggataaattgtgcctgaatttcctccaattggctggaaaaagtgccgacccttctcaattcgttgttcagtgcgtccaatctttttgtggccgtcgaagtctttttgaacagcgacgaaattaattggtcaatctgacaaaagtaataaaaggcaattaattgtacagaataacgacccataaaagaaaacaagggggggggggattatttgtcataatcatgagacttatgatggaagtcagaacggggagatgtaaacttttgtatattaaattgatgtttaaagaaattagtacattcattacaccagaaaatggatatttcgggaaaacaggatttcttgacttgtcatttccacatcatcccccccccccgctgacttcgacaattcgggcgaacattcggccctgctcagtcgccaccgtttgagcacagcttttaaaatgttgctgaaggcgatgcataaaactaagaatgcttttgctgtcgattttctgctgcacttcggggatgtctctgtgaccgggcaaaactccgcggagtaaaggcaaaaaacgaggaatttcctaaaaaggcgttaaagataaccacacgacggaaaatccgtgcctttatcctccgaaggtccacgtctttgccagggacagcggacgacgaacagctggccccctcgatgaccacgacaatgctgcccatcaccgcactttttgccgaatttcctagacatcatttattattagcgaaaaaataaaaaaatatataaatactttgcaaaaatgcaaataaatatgagaaaaacattttaaatttaatacctaattaacatacgtttcttagcgagaaaagaaaatgaggcgggaattccagtggaagtgctcggagatgtttgaccgccatcgtcgtcccccttttctttgtttgtgccgttgccaccaaagcgaccgccgctgtgttcgttgcccattttccgttgctggtgggtcaacaaaaaataaatatcacgaaacatttttcgagcttaagcttaagaattctaatatattaaattccttggcattatgtctgtcgccaaaacaaaaacaaaaaactaattagttgnngcttnagcttgnagcttnngnttgnnnctgttgccntngnnngnnccctnnttttgctatcagatgnttttccttggccncgtttncctcgnnttgtttgttattggataaaatttaaaattaaggcacttaaatat

SEQ ID NO: 848 - DNA, 2288 bp, Heterodera glycines
ttttccgttggttggggggtcaacaaaaaattaaatttcccgaaacatttttcgagcttaacctaagaatttttaatttataaatttcttgggcattatgtctgtcggcaaaacaaaaacaaaaaactaaataggtgaagcttaagcttgaagcttaagattgaaactgttgccatagaaagaaccctaattttgcaatctgctgattttccatggccacattatcctcgaattgtttgtttttatctaaaatttaaaattaaggcacttaaatatgtcagaggcaagcagcagcaacgccccccataatgccaatgccaacaacagcagcaatgccaccaacggcggaagcagagatcggatgaaccaatcgcaaatttggaagtgcttcgagaaaatgcccgactatgaggcggcaaagtgtcgcttgtgcacttcgatgctttcctttaaaagggcgtcgacgaaaggactttgggaccatttgaagtgcaaacaccggtcggaatacgacatgctgaagcaaaactttgaattgctcactccgtcgaattcggacgcatttaaagcgccaaaaataaaggttaattcgattgttggccattttagcatgaagtgattttctataaattacagaaaagaaaaatggagccgaaaagcgatgtctgtgcggacagcgacaattcgttggtctcgggaatgggcacgcctcagacggaagtgatccgagtgggcggactcgcgaacgaaggccgaacggaggcgcaactgaacggcgccggagggggcggcggcgcaggttcgaacagagaggagagagtccgttttgttggccaccctagccatggccacaagcatttacaaagggttgaaaatgcacaaaatcattcaagcttagcctccatgtctgtaatccccgatggggtgtgatattctgctgaataattgccatttccaaaatgtttgtccgaattcgtcctcccattttcagatcgattggccgccggttccctggacgcccaaccgtcgccggtcgtaatggtcaaccatattctcgtctggagttccatctgcagtcagtcgccccctcagaagaccttcatcatgtgcaatttcctcgactctgatcaccaccacttcggcctcaaacccggcacttccgcttcgctcacttttgtgctccaaaaactgtccgcgaagaccgagccgtccggctgtatttccaccccttactccgttaacgttgtgctggacgaactgtccgcgttgggctaccgagcgattggaatggtcaacaaaagggcggacgaagtgctgtggacacttgcaaaatgagcggagggggggggggcaacaaaagtcatttcgagagagatttgcaacaactctaaataattatattatcaatcgcttgtcgggggaccggcttaattttgcaaattaataaaaaggttataaacttttacttttttgcctctgacgcgcccatttgctcttgtgtaaaaatgtttatttgaaataggtacatatattgtacatattctctgaattgcccagcagttccaatcattttatcgcttttatcaaaaaatcgctttctcgaatcccaattaaattaattaattaataattgtcctccaataaattattattttttgaatgtgtgcgtgaaaaaacaattagttaaaattgaactgataaatacaggcaaaaagccgtctcttccgttattcttcgtcccctttgaccgggggacatgaacagaatgggtttcggtcgccaaatgagtcgtcgattcggccgacagttggccaaacttttcgtgacgtgtggcaccatggttttggccatcccgcctgctcacgcgaataggggcggtcccaaacggaggcggccaacacggacagagtgtgcggcgcattctttgggattggcatcgattcactttgttttgagggcactccgccgacagtgccgcgagtgatcgccgcttactttgaacagatcgatgtgcaattcgcccctggcaatgtcctcaatttcctctcttatggctatcagtgcttcacagtatctgtccatctccgctttgtcttcactttctgtcggttcgagcatcagacaatcgtgcaacggcctaaagcatcaatcaaaggcaaagacaccgatcggttgcctaatgaggcccttgtcacactaatggcattaaaattacaaaatgcttctcaccagtgcattgttggcgagtgaaagctgaaattggatttgatttttaccgtttccttttt

SEQ ID NO: 849 - DNA, 1907 bp, Heterodera glycines
ttcagtttcattgtcccgaaccgagcggaatttgtggcaaaatggggagggattggccaaatgttcgtttctgccatttgacaaaccatcgaatggaccaaagacaagtctttgttctcgagtcgcttcatgtacctattggacaattgaatagaaacagcgatcgccttggctgacctgatcagttgcgtttcgctgtggtgactgttaaagacggaatgagtcagaaagggcgaacgacgcgcgtgggacgaattgccaatcagaggagaggcaatttcgttgagggagtggtcaatctcatcctgaggtttgaaaaagcaatattaacacattcccaaaaaatcgaagacattccatctttttttttttgctcctttgccttggtgacgtgaatgtcaaacaaatagagcaagtcgcgcaggtcgtccactaaaagggcaaaacattggccatgccatgccaaagtgatcggcggaatcgctctgtttctctgctgattttcactcacccaaagtcgtctcatcgatcgaaatgccgacgaatccgtcctcaaaatagcgcaccttaattcaaaatcagtttaaatcagaggagcatgagtggatcacattgatctgttgctcctcacaacgcttacgaaagtcgtccatttcctttggctttgctttgattgtgtcgaaaaattctttgtgctcaacttcgattccattcgcttttaattctgaaaccattggaaatgtaattttcttttcaaaatgattgctcactttgtgccaaataagcggccgatttatggacgatttttgcgatttggacgagccgacggggaccgtggtaaacggcgtacctaaaacatcagaaaatggcgaagtgatcagaaaatggtgaaaggcaaaacaacggcacatggcagcgatgtttgccggaagcacttgcgcagtgcaaatgttagaagtcgcccggtcgcgccgaatgtgctgttcccgcgtctgaaggctcacccggtaagcgggctttccctgctgatcccttgaaaggatttacttggaaaatgaacgaacagcggacgatcagtgcaattcacttttgccctaattgcctgccaatcctcactaatgataatgaatgaattaattgcctaaatgcgaatgaactgttgcaccattttcatcaaatcacctcgacactccgacaattcgtcccggcatttgccgtgccaatgccaaatccttgacgcaaataaaccccgcgtggggtccgccgtagcccaacggaagtccgaagcgctgagaagtgccgacggcaatgtcggcgccgaggtcacccggcgaccggataagcgtaagggacaaaagatcacagacgagaatgacgagaatctgaaaaataggaaaaatagagtgaaaaaaatcagagaaaaaagggaaacagagacaaaagataataaagaactgagagacaaaagaccagagaaagagaggaaagtgagagaataagctttgtgacattgtgccgatgggctgcgcgaatcagtcgctccaaatggtcgtacagtttcccctccgtgtttgggtactgtatgattattgcggcggcctcggcagacaaatcgccaactgccaaagttgacacattgtcaattggtcttaattctgctccgattggttcacaacgagtactcatcacggcaagattttgagggtggagcagcggatcgaagagaatggctttttaagtgcgggggaaggggtaattagtggaaattaattgactaattagcttatgctatttgcaaattgaattaagaagtgtattatttttatgccttttagcaaatttatctattataatatgaattgctctgtcttcaagcattacttttccttttggtcgcccggatggcc

SEQ ID NO: 850 - DNA, 2311 bp, Heterodera glycines
cttcatgatgggccccagcgcccttggccattgacttcacgatgggcccagcgcccttggcctttgacttcatgatgggccccagcgcccttggcctttgacttcatgatgggccccagcgcccttggcctttgacttcatgatgggccccagcgcccttggcttttgacttcatgatgggccccagcgcccttggcctttgacttcatgatgggccccagcgcccttggccattgacttcatgatgggccccagcgcccttggcctttgacttcatgatgggccccagcgcccttggcctttgacttcatgatgggccccagcgcccttggcctttgacttcatgatgggccccagcgcccttggcctttgacttcatgatgggccccagcgcccttggccattgacttcatgatgggccccagcgcccttggcctttgacttcatgatgggccccagcgcccttggcctttgacttcatgatgggccccagcgcccttggcctttgacttcatgatgggccccagcgcccttggcctttgacttcatgatgggccccagcgcccttggcctttgacttcatgatgggccccagcgcccttggccattgacttcacgatgggcccagcgcccatggccattgacttcatgatgggccccagcgcccttggcctttgacttcatgatgggccccagcgcccttggccattgacttcacgatgggacccagcgcccttggcctttgacaattcgcctcctcaatttgcgcttcttcgagtgtgagataggctcactgcctaagggctcggcacactgccgcccttctgagtgcgagataggctcgctgccttggcgcatgatcatccatttctgaggggcgcgtaaaacgaggcgtgaaggcgaggcgcggaaggcgaggcgcctcgggtcacaaaagacccaaggggccgtatggcgcgcaatggaatgcaccctgggttacagacaacccagggggccaacgcgcgaaatggaaagcgccccgggttacaaaaaacccgggggggggcactacggcgcaaaaatacaaaacaaaatacaatgcgcaaatgcaaggcgccacgggttacgaaaaacccgtggggcctacttactccccccttcccttgctaacagaccccactagtccctgcccaggtcgccacatgaagcggatcgcttcgggacgctttgcgtccattggttcgggggtgggtgaaagcggagggagagggagaggggctgcccagactacccaagaaacccccaaaatggacgggtttttagtctttatttgtcgcaagccatcgaaatgtacaatttgtgttgcttatataggatcagaaaatgggcgggtacaataaaaatgatggggtgatcatttgggttgattggtcgttcttcttcttcgtcgtcgttgatcgctcgatcggctttttctgcccttaggcaccattcacatgcgcggcgggggctggtccgctttttcacttcttctttcttcccattcacatgcaaaagcccctcttgcggtcccccttttttctcattcttcgcccaatttcccgttctcctgttttttcctccttctccccccgcatttctttccattcgacaactgtccgatcatcggacagtcgcggctaaattcgagccgcgacaagggagtgggaaacatgatttcaaaattttcaattttttctagtctaatctactcaaaccggttcagaattcaataaaaataacattcacggtgcgaaaaatggggtttgaaaagtttattggggaaaaaaagactttacaaaataatacccctgggagaagggagtgggaaacatgatttcaaaattttcaattttttctagtctaatctactcaaaccggctcagaattcaataaaaataacattcacggtgcgaaaaatggggtttgaaaagtttattggggaaaaaaagactttacaaaataatacccctgcgagaagggagtgggaaacatgatttcaaaattttcaattttttctagtctaatctactcaaaacggttcagaattcaataaaattaacattcacggtgggaaaaatggggtttgacaaagttattggggaaaaaagactttacaaaaaaaacccctgggaaaagggaggggaaaaaagaattcaaaattttcaattttttctagcttaatcaaccaaaaccggttcaaaattcaataaaaaaaacttcccggggcaaaaatggggttgaaaaatttattggggaaaaaaaaatttaaaaaaaaaaacccctggga

SEQ ID NO: 851 - DNA, 3006 bp, Heterodera glycines
  unsure (1)..(3006): unsure at all n locations
cagactcagtttgcgcctgcaattgatttgcgttcctcaatttcgcctcaatttgcgcgctgtctttttgttcctgctcagacagtttgctcttccctttcgcctcggtttgagcttcctcaatttgcgcttcctctgacaatnttccattccgcctcggtctgcgcttcctcaatttgcgcttcctctgacaattttccattccgcctcggtctgcgcttcctcaatttgcgcttcctctgacaattttccattccgcctcggtctgcgcttcctcaatttgcgcttcctctgacaatttccgcttcccttccgcctcattcgcacttcctcaatttgcgcttctccaatttgcgcttctcaatttgcgctgcttcaatttgtgcatctccaattgcgcttcaacaatttgcgctgctccaatgcgcttctccaatgcgctttctccaatttgcgcttcaacatgcgctgctccaatgcgcttcaacaatttgcgcagattaggctcactgccctctttgtgagctcggcacaatgccgccaatgagtgcgagataggctcgctgcctaagcgcatgaccattctttcctgaggggctgtggtgcggaaggcgaggcgccacgggccaaaaagagacccgaggggccgtatggcgcggaatggagcggaatggaggcgccccgggttacaaaaaacccgggaggccaaacggtgcggaatgcaaggcgcggaaaggcgaggcgctacgggtcacaaaagacccgaggggccctatggcgcggaatgcaggcgccttgggttacaaaaaacccaaggggccagaaacgcggaacgcaaaatggaatagcgctaatgccagacgccacaggttacgaaaaacctgtggggccggcatgctccccctacccctgctcacaaaccccaaaaccccaccaaaatccctgccagggtcgccacatgaagcggatcgcttcgggacgctttgcgtccattggttcgggggtgggtgaaagcggagggagagggagaggggctgcccagactacccaagaaacccccaaaatggacgggtttttagtctttatttgtcgcaagccatcgaaatgtacaatttgtgttgcttatataggatcagaaaatgggcgggtacaataaaaatgatggggtgatcatttgggttgattggtcgttcttcttcttcgtcgtcgttgatcgctcgatcggctttttctgcccttaggcaccattcacatgcgcggcgggggctggtccgctttttcacttcttctttcttcccattcacatgcaaaagcccctcttgcggtcccccttttttctcattcttcgcccaatttcccgttctcctgttttttcctccttctccccccgcatttctttccattcgacaactgtccgatcatcggacagtcgcggctaaattcgagccgcgacattcccacgcttgaccaacgtgtgcgatgaggtcctttttcacttcattgtgtctttttctggctcttctgctttgctggtgggcacttccgcccttggcctttgacttcatgatgggccccagcgcacttggcctttgacttcatgatgggccccagcgcccttggcctttgacttcatgatgggccccagcgcccttggcctttgacttcatgatgggccccagcgcccttggacattgacttcacgatgggccccagcgcccatggccattgacttcatgatgggccccagcgcccttggccattgacttcacgatgggcccagcgcccatggccattgacttcatgatgggccccagcgcccttggcctttgacttcatgatgggccccagcgcccttggccattgacttcatgatgggccccagcgcccttggccattgacttcatgatgggccccagcgcccttggccattgacttcacgatgggcccagcgcccatggccattgacttcatgatgggccccagcgcccttggcctttgacttcacgatgggcccagcgcccatggccattgacttcatgatgggccccagcgtccttggcctttgacttcatgatgggccccagcgcccttggcctttgacttcatgatgggccccagcgcccttggccattgacttcacgatgggccccagcgcccatggcctttgacttcacaatgggccccagcgcccttggccattgacttcacgatgggcccagcgcccatggccattgacttcacaatgggccccagcgcccttggcctttgacttcatgaagggccccagcgcacttggcctttgacttcatgatgggccctagcgcccttggccattgacttcacgatgggctccagcgcccttggcctttgactttatgatgggccccagcgcccatggcctttgacttcacaatgggccccagcgcccttggcctttgacttccagatggcctcagccaggcttgtagtgtagaacacaaagttttcacccggtgggactcgaacccacgacctcctcaaagcatgaagtgctctgtccaactgagctacgggcgccacttagtggttctccagtattgcgcctgtggtcgtctcagtttgcgccatcgttctgtttgcgcttgtgttcaatctcagtctgcgccctcgctcagactcagtttgcgcctgcaattgatttgcgttactcaatttcgcctcaatttgcgcgctgtctttttgttcctgctcagacagtttgctcttccctttcgcctcggtttgagcttcctcaatttgcgcttcctctgacaattttccattccgcctcggtctgcgcttcctcaatttgcgcttcttcaatttgtgcatctccaattgcgcttcaacaatttgcgctgctccaatgcgcttttccaatgcgctttctccaattttgcgcagattaggctcactgccctctttgtgagctcggcacaatgccgccaatgagtgcgagataggctcgctgcctaagcgcatgaccat

SEQ ID NO: 852 - DNA, 3204 bp, Heterodera glycines
  unsure (1)..(3204): unsure at all n locations
atagaatatactatttagtaagaaattaagaaaaataatgattaaatgaaggaattactcaaaaatgtgtaaaaattacacatggggtgtgtgtgtgtgcatgtgtatatgtgtaagtgtgcgtgtgtgtgtgtgtgtatgtgtatgtatgcatgtgcgtgtgtatgcgtgtctatgcgtgttcgtatgtgtgtgtattgtatgttttttcgagggtgaagttgacattaattaggagtgacaggcggtgtcggtcacgggccacttactactattgacttagccatctggccttttcttcagtgagaagaaggcaggggtatttgatggaatttaatgaggaagttagaacattttaagtggaagggaaaagaaacaagcaattagttggaagacttagattaactttgtttaacagtaattaacaagcaattaataatttgaattgcggaaataatttacatttctttgattgagatggttttagaaactgttttatgacaggctgaggttttttaaaaattaagtaattaattatgacaaattaccaataatggtgagtagcggtgtagtgggctaattgtctcattgaccaactgtcatttttaattatcttccttgaaacggtctggtgtaagtttaactaactatcagttcctaacatccaattattaaatttgggaaatttatgaattaattattttttattgggatgattttacataggaagtttatcgtttgggtgagactcttcaaacttatgtgattaattatgacaaattaccaagaatggtttctagtatatgcttgtgaataatgagtcctcgacaaccataaggtctaattagtgtcagtttgtaacgacatgatatatgattcacaactaatcactatctatataccattgtttttagatgagaaggtgtagtaattgatgaatttaatgatgaagcattgaacatattatgagtgggaagtatgaaaaaatcaaagaattttaattattagtgacagttgttaaatcaatttttgggtaatttaattaagaaccaattaatcaactaatcactatctatatgccattgtttttagatgagaaggtgtagtaattgatgaatttaatgatgaagcattgaacatattataagtgggaagtatgaaaaaatcaaagaattttaattattagttacagttgttaaatcaatttttgggtaatttaattaagaaccaattaatcattaaaatgcgggaaaattattaacaaagttttgatcgagatgttttacatatgtgttttggtatggtcgaatcccatgctaaaatactccaattgctaatagggtatgacatctgcattaattataattataaccaattattctttaatttttacaaactgaatatttctggggaaagaagggttatgatggaacttaaattatatgccacatttttgttgtaattcaatgaagcagaaagcttgaagctgagacaaaggaaatgatgaacactaaatgagtatgataattgttgacagattaacttagttatggtattgatggttaggaaatatggcaattaattctaaaatatctgaaaaagaatgcaactttttgggtagcgataaaccttttttaagtaagtaactaattattacagccgcaaggattttagaaatgtataaaaacaaggaaaataataaaagatgaattttcggtagccaatactcggctctccggtagtcagtacctaattaagctcggccctccggtcaccaatacctcacaaggctcggatttccggtagccaatacctaattaaacttggcccgccagtaaccaatacctcgtaaggttcggcactccggtagccaatacctaattaagcttggcccgccagtaaccaatacctcacaaggctcggctctccggtagccaataactgagtttgcgatggtaaggagcaataatgaccgaatatgtgttggagaggaagggcagagttgaggaaaccaaataagtgaaggagagggggtgaggtcactgcgtcatcttatcctgtaaatcgattcctctaaaaggaacaaatggaaagaggctaacgccaactgttttcttaacaaaatcctatatttagatattttggtttcgggtttattttaattattttccttttctccgtaatacactttctctactcttctatatctgtttactttcactgttattccttattaatttcagacctacatattgtctaaataatcgtttccattagctatttttcaatatcttttcttccaacactatgttttattctcgaaccgttatcttccaagtgttcgtattcttgttctttatcaaactattctcttccctatacattacctaatgtttgccttactaactcatattaaattctcactatttaatattgactctcttcaaccacatttctgagttctctatctctatctcttacacccattattaattgtccttgattctatggtgcagtacaatatcctcatatgatttcttcatttattcctattacaagacctgcttcacgcatacatttagcccttatctaccctttctcgtcacatacagtcagttagctgtttgtcaaacctactttctattctcggttcaatcttagattcaaaattgtctatttctcttgtttcctttgaatattacttattcaatggaattgtaaatgttccttattataattagaattattttacgttgaattaggcaaggagcattgtttgtgtttatgattaaaattaacaagttttatataagttaataaatattatgcagaactttcaaacacactttatcctcaccctcgaaaaaacatacaatacacacacatacgcacacgcatagacacgtacacacgcgcacatgcatacatacgcatacacacgcacatgcatacatacgcatacacacacaccccatgtgtgtaatttttacacatttttgagtaattcctttcatttatcattatntttcttaatttttgttanattgtatcttctattccttaataattacaaattgtgttacaaaaccctgactatttttctcngtaaatacctttttaatttatacctttttatattagtaatgacacattttttccattttatttctgaataaacattcaaatgaaaaatacaagtgtaaa

SEQ ID NO: 853 - DNA, 1842 bp, Heterodera glycines
atgcaactcttttgatagatttgaagacatatcagaattcttagagttccctttgaaaaaagtgaaaaaacacacccagggaacggcttcacccttcggtccccaatctaaacactcacgcaccaggctgtgcattacaataatgaacagctcgtccaccttcatctcagatggatggcctggagtgttggagaggatcaaccaggggtcattccgtcccacatgagtgatataaacagagagaaagaaaagaagggaaccataagaaaactaatatttagaaaatttaattgagaatgcatacttatcatttgcgataaccaaattcgaggacttggaatgaatcattaataataccttttgtgaagacaggttgataatgcttagttagagattgagtgtacactttgccttggattagattagggcgaataaaatggggatatgttacaataatggggtccgcggggtcatcggaaccataacgcataatttgatctttcacactgtcataatggatcgtttgcacagtttgttcatccagtgttatccctcttattttcaagtcgtactcaatttccccattgtccttacgttccaacttcagcccgtagtttttgcagccagcgctgatgaactccaaaatgtcgtggtccggcttttcgtcagtcagctcaccgagatgtccttttcctgtcgggagtgggtcgttgtcctcagggtgaacgtagatgatgctgtccgtgtcaaagtagagaatttcacatccgggagtgtcggccactttttttaacacttcgtaaaggtatagacgcgccattgatgttgtgtagagtgagatgacgacattggagtatttgttttcgtcgacaaactcctctttcggcttgtaggtgagcatgaatacgtcgttgtcctcatccatcagctcaatgtccataatatcaattttcttgtcgtcggtgtattggcggagaacacaagggtcattgttgattaccgccttcgaaagtagattcctcatggagaagcggccccaaagtgagttgaggcagagcttggcgatgtaccgcttccccggttcagctttcatcttctccttctccagatgaattccaaatttcatccagcactcctcaatgtattcactcttctcctcttcgctctcacaccatgacgggaagccggttgcgtggatcttcagggccatcatttcactcacgtaagacttgaagacattgttactccattggtcgtattggaggacgtggaagactttgcggactgtgtagccggcctccaatgctgcgtttaactcaagatgggtgcaagtggacacgaaggcccggtcgttagggttaaagtggggacaggaatagtcgttgtctttgaggccattgggatattttgctgtgatgtatttggcgcacttctcacagagagggaagaggaggcgttgatcaaattttatgggcataacagtgacgttaatgttgttgtttggaggtagaagtagcactttgagcagacctttgtaggggttgtcggatggagagcgccagttgaccgtctgctcatttggtgggatactgatgattttagggtggccgaggggatagtcggtcgtaaagttggtaaacgggtagaggctggtgaagtccttgtagctgattttttgtcccggcttagctgtgtggagtagcttcattggtcctgtccgtcctccgtgaaacgcgtctctgatttttattggcgaatggtccttccagttgtcaaaaaactccctcattgctgtgtcctttttcagcttctcatttatttcgtgttcccaaataacctcca

SEQ ID NO: 854 - DNA, 3565 bp, Heterodera glycines
cttctcttccctttccctaatctcccgcagcgtctttccgttcggcatcctcgtttcgtcgtccaagtcatcaaaacactcctcacaaccgtgccacagacaaccatttacctcaataattttatccctcttcccattagtcacttttatataaccatccacttgatacacctgaccctcccgtttaaagacatattcaccatagcgggagtatgctgtttgaatgttgacgttgttaatatgtgagtaccaatcgagatatttgatggccagtgcactttgattctgttgtggtgtatagcctttctccgggacgatggcgagcgagttgggcttcaaatgattgagtgcaaagttcttgacgcaggcgctggcgatggtcatggcttgccaaagaatgtcgattcccccgtgttttccgttccgttgtgtcagttgtttgaattcccggcgtaattcgacgagggcgtgggtgagtatttgtacgtcattacaacaatattcaggaagtttttccttaaggttaaaaggttggttgtaattattattgtaccatttgtcaaatttctgcaggttcgccttcttcttttggttagggcaatagtcttcacgtggaggaaggtgctggaggaccttatcgtagtttgatgatttgttgaacatatggggaaagtgctgtttatcttttatatgaagcccaaagatttgatgaggccagatagtttgatgggcattaggttgtaattgtcgtgaaaaatggtgagtgggccgtgctcgttttccctgattttcagctcgtagaggcgatttccttgtttgatgatgtccgggttgtgaattccttgcgctaaaacctccttgatgatcatcgtcatgtcgtagcggcccccaaagtgtgcaaaggcgactgttggaaactttttgttgtggtcaaaaaggagccattcaacgaattcgcgtagcggttgttgagtgatgattttttggtcgactgttgtctccgtgtagtcaaagggtgaaaaggtgattgagcggtgagggccgcaaatttggcacttttttccctgaagtgatttgttccagtagccgttgataatgcagtcggtacagatgatggtagccgctgcaaagttaacttcatgctcgaaccggttctccaccttcttgtcctgtgtcgcctcaaagtcgtatgcgatgatactgtatgacttaattcgttgttgctttaggggctggatgaaacatttcgtacaggggttcatcccgtcgtcgtcgtcttcttttatatgaaattgcttgcaaagtttacaaaactgttccccacatttatgcccaacactcccatgaacctttatgttataaattaccccacaatcttcacagcgttgaaatttggtacacaaatccttgtggaggtgtcgcccatagcagttattgttgtagaaggtgttgttacagtgctcacagtttttgacgtatccttgctggggatcgcagggatagtcaacgcccacctcacggcacctgtgacagagtgaagagcattttgaagagtgttcaaatttgtggctgtaggcagattcacaggagatgcaatagtaacgtttgttgaaaaattttgaaagagttttgatgccgtcaaagtggttgttgttgtggtagagaagaatggggaattggtaatcggtgatatcggatttggtgattgggcgcatctggtaatcattaaaaataaatattttgtactcaccgggatacttgacgttccacaacccttgcacttgatgtatataaacttccgcgtcgtactctgtctctgttgtagggatccccgcatcgcggagcagttgctgcgccttttgtcgtaaaaccgtggtttggttgttgttaatccatcgccatcgcttttctgttataattccgcgtttgtacagtgaatagtagcgcatcagttccagcgcgtaaaaaagacagtagttgtcgttgttgttgactttgaaaatgtgcgattgtgaggagacaggcggtcgcccttttccctttgttgtccgttgtcgcggtagtccattggtgtttaggacagtgacggtaattataaagggagcaccatataagttgacgtgtttcgatttgctctgctccactttacaaaactggttgaaaacggcgtccacgacatttgcggtaattggtgtaattggtaggatgatgtcaccctggtctaaaagttccgatgaaattataacccccaccttatttgcagcgccaagtgtgttttgtccatctaaaattgcttcctcaatcgaatggtgcacacatgaacggagctcagcagcggggtcagcacatttgtcaatttcctcaatgacgaacttggattttgagcgcaccagttgatattttttactttttgaagtgaggttatcaattttacgaatgcatttatttggttgggattttttggggaaggaggaggaagaattttgagagagggaaaaacgtttcattttatttgaataataatatatgaatgaaaaatttatgatttataggtgatataagataatatgaaagaatattttgaattagaaaaatgtaaattttatagttgtaatagaaaattattgaaaatattttttttttataagttgaatattggatgaaagggtaatttagttgcaaatttgttagtttaaatattttttgacggagcgcgcaagcaatgaatgtgggtagaattttcgcgaatgaatgggagaagttgacttttgctggtaatagccggctatttatactagttaaagtgggcggggctaaaactaaaatggtcatttggcaggttgccaaagagacatatttaacccttcgctttcgcgacagatggtgcgaacgaaatggtcatttggggagagatgtcataagggacggcctctacccctccattaggatggagtattggtgacagtaaagggacatttaaatgaccacctgcgggcgcatagatgacacgtgcgagcgctcaaatggccctgcgtgctctcaaatgacccggcgtcgcttccctcccgaagctgacgcccacccctccccttttaaacatcagcgaagccctataaaaacattccaataggcatccgccaaaactaaaccaatttctcaaattcaaaaataacgaaaaattaaagttttggcgccaaattcaaaattttgaccccggattgactagtcaaggactgaaacggtaggactcaataggtagcgccctctcagctttttttttatttgactattataatttgtgtttattattattattattatttttataatttatcaatttctaaaatttttttcatttatttttaaatttttatctattattttaaatttatttattaatttttaactattattattttaacaatttaattttaattaaatttaattttttaatttatttattattattattatttatatttttatgtggtattagagagagcaagagaaaagagagagagagtgagagagaatgagagagaaagaaaaaagagagagagtgaga

SEQ ID NO: 855 - DNA, 1942 bp, Heterodera glycines
ggccagaatttaagatgaatgcttttatcatttaaattttttttaaaagaaataataattgtgattcatttaggggtatataaaattaaaaaatattaaaacatttacggatggttaattgtcaataatgtcaatccatgaaaattgatattaaaaaaaaattatatcgtttaaaacgccaaaaaaacaaaaattatttaatttatcaattttgacaacattagcactgttaatcattttttctttcaggtgtacagtatctttataaaagataccagagattatacgtttatttggttcagataacaaaaaaatagtacaaaaaaaagaaaaagaaccacttatcttaaaactatctagtagttcagataagaaaaaagcagggaaaataactatttttattagttttttttatcatttcttataatcggattttgcttcactatttgtttctgctttatgcgaaccagccaagtcaccattggtgctcgactgaccagcaatgtttgttttactgcagttataacggtgcattaccggttcgtacctaaaagtaaaattaaatatgttaaaaattatttacttaaaataacaatttctatttttcctaccaatttgaatggtgtaaatccagtgtagtcctgatttgcagggctacagtcctaccttttttaatactcgatgaaattttttgaaattttaaccataaataaagaattcttaatactatcgaataataatttcattttgacttaattgcacaattaaattaaattttctttttagaattaaagtgctttattaaaatttttaaaaattctaattagatgactctagttatatttaaattcatcccataaatttggacataaatatgtaacattgaaagaactgaatttgtggaaaaataatcaataattatttaaatgaataaagtatttaaatatttttaatttgcaaaaaatgtccaacgtgatactctcatgctaaaataacttttatcaatgttatgttttagatattataatgcaaaaaaaatatatatataaagtaataagcacttcattgccattaaaaattagccggtgttttcaagaaaaaaatagacagtagctttaatatcacatgaaataaattttcaactcaaacaataatgaaattggccaaacaaattcaaaaaatcgatcatagaatatataaatatttgcttacaaacgcataatatcaaacatgatatataaaaaatatagatgatatgatcaaagaatatttacgaaaagactatataattttttatatttttaattcaaaatttaattataattaaaatagcccagagtaatataaataatttatgagtttttatggaaagatggtcttaatgatatttttttaaaactgatgttataataataataataataatcttatttagttaagttgttgtttataattaattcttaaataaaatccttttaaaaagaatcaactttataattctgttgtaaatctttcgtacaaaaatgaatatacttaataatgtaaagcgcaattaatcatatccgtttaatctctttcccaagcacatatctccgctctattccattttcattttccgttccataagtccaactatttaatcgggagcattctctcgataaagagtcagttgagtgtgcagttaatcggcgagcgagagcaaagcgcagcggaattattattttatgtgattggccaatatttatcttatattttactccttctcgcccatccccgctcgcgtattcgatctagtgggcacccatgggattaccaatttggggaagccatttatccagggccggattttggcttattcctttttcccccaaatacaatcctcgttttcactcgtctccttcctcatattctgggctggacatcagcaccttcactataatta

SEQ ID NO: 856 - DNA, 2626 bp, Heterodera glycines
  unsure (1)..(2626): unsure at all n locations
cccacaaaagccacaaacagtgccattatggtaaagagtcttcttgggcattccttcaccccacgggactttgtccaatttcttggcccttcgtcaactctgttcgatttgccccaatcagacaacgcaacggaatttgtttgacgcatggcagtcggtcagttcaaaatgaaaaacaaccaaaaggttttcttcccgtttgacttcgttttctcttgtccagttgatgtgcagcgcccttttgtccctgctgaaaaccgccgaaggtcggctgaatatttacaatgtttttcattgaattttcttaatacaaagtgtccctatttcactaattaatcatttctaatgtcattcattttctatagttttcctctcccccccccccctctaaatatttaatttatctctcctctcattgttatttttgccacattttctcagagtgccgtccttccgactccgaagtgtcctccgtttcattgctttccgccgtcgttttgctgctttccgcactttccgcgcatccctccacttcgttcgattcgctccctccatcgcccgtttcctcgtcgtcatcctcggcgtgtcctccgacccgtctgtgcattggccgtgaacttttccaacaattctgtgccgttctccgccaatctttgcaccattcatcgtgccaatccgtccaactgaaggctcttcaagcagttcgcctcctcttcgaatgctcgtcgttgtccgcactttttgtgcgcgagttgggcaacgattgttttgccaacattcgtccatttgtggacgaagcgtcggaacgcagtgagcaaaataaacggcgtcggaaaatgccatcggtggaagacgtgccattgattcgcgaaacgtgtcttgccattgaagccattctgagctgtgctcgtgatgagcggggttattgacctgaccacatccatctaacaaattataaaatgttcattattgattcagaaagggtctttgtcagtctcatcgttcgctctttggtccaatttttatgtgccgacgacgacgaactcttccaacaaaagggccccttgagggaacttcacgaattcgcatttggccgactcaatgcgattttcgcgcaacacccagaggtgattttggcaacgttatgtttgccttccacttaataattttgttcgttttcagactttcaaggcattgcttcaggcggcgccggacattcggcagaaaattgaaacggccacaataaaacagcaacaacaaaaggggcgcactcagcagaagagagtgagcagaagcggcgaagggggagcagcacaacagcaacagccgaccatcaaattgtccaccgatttcagcgcttttgccgcctcgggcggcggaagcggcaaattgcccgagggttgaaaagcatggaatgtttgtattacggtgcatttacagggattcaattattttgttttaatttgacggaatttcataacacttttccaacatttactgattgtctccttgtggtgcgtgaaatctcttcgttcctaatgttttctaatttttatttttatttgtacaaatgaatatatatatatatataaatatatgaataaaataagcaatataatttctaaatcgttgggcctttcacttttatcgtggaaaaccctgtgttgcaatacaaatcacaattatggaacatttactgtaaaatgttgagatttgcgaatgaattgttccgctttctgtgccaaatgattcacttttccgcttcagttgttggcaatctgtgctgactatgtttgacgtacacctccaatttgctgccctcaaactcccacacaatctgcgctttgttttggacattaaatcattttttaaattattttaaaattaaattggtttggattattaataaactgaaattggcaccaaaaaatagaaaatgctgttgattccgatcagaaaatattctgccaatgaaaatgttgcgtaagctttgcaaaagggaggggaaagaacggttaaagcaaagcgttgagggagggaaagaaaggcaccgaaagtgctgcagcggagaagaaaagtggtgtaactaatggcagtggacacggaaatgggatagccgagcagaaagagggcgcatttgatgcggaacacgcggcaatgctcaaaggggggggggggaggaattggcaaattttgaaaatgccaaaaatgaggaaaagtttggcacaacggacggaatggcaaagagtttatgctaattgccatttattgtcttaattaccatcggattgagcttgttgatgcccgaatggtagtggagcatgttgttgaacagcatgttgaagttgaacggaaagaaaagggaattttaagagaaaggaaaaaatattttggaataattagttaaatataatttaattatttataaattaacataaaaattaaaaaacttactgggatcagccataaagcgaagcaaatggcgtgcacttcttaaaatgggaagaattacttaattatcttatttattttttgattttttaattaatttatatttaaattattttattaattgaataatttaaatgtaaaaaatttaaaactctttnaaaataaatccacaaca

SEQ ID NO: 857 - DNA, 1884 bp, Heterodera glycines
cgattaattcaaaaagagaactgtattagctgatcaatcagtctgatcagatggaccaatctgatcgaataaatgattgatctgatcactgggtgtaaagaacagttgttctgatcatatggaccacacaatctctgatcaatgcgcaatcaataaaaaaataataataaaagcaattagcgtacaattgaatagaagaatctgggcggaatgtgtactgtgagcacctttggcagggaaagggactgatcagttggtttcaagggaagaaacccccggcattccttcccccctccccccccccacgggtggaaccgaccattagccaaatgtatttttgcggcttccaaacgccaatgctaaaggggaaaagggaagagaaaagggactgatcagtgatcaaagcaatgataagggaaggacaaatgaacaaacaaacagtagaaggacgattagacactcacctgtaactgaccggggggaacatactcttcagaccctaaaaaagggggggggggataagtgatcggacagaagagacgacaaagtggacggattgactaccattagaaaaacaataatcgaatggatcgactgttttgtcgcctttttatggcttgatcccctgctggtcccttccctcccccactctatcgcctgttgctttttgcctccctttttggagcttttcctaccggacaaaatgaagatggaattgtgaagttcgtcactctgtcgaattgaaacgcgaaagtgtaagcgaggcaaaaatagcacccaacggctgaacaaggaacaaaagtgaagaatgatcaccaaaaatcgttggattgacagcaaatgtttaccgggcaaaatggcggccattagtcccaatgtccgcacttttaatttggcgtccggcttttctgtcggtcgccacagtgtctcttccgtctcggcaatgcttttgctgctggtcgccggagtgtggcacactttctgcggtcgcttttcggcaccctccgcgtccggcggatggcacgaggcggaggaagggcaggcggaggaggcggaggagcagcagctggtggacgagtcggacagataaaaggccatgtccgccgtattgtccgccccattcggactttgcgtcgtcctttcgtctccttttgccgttgtcgtccttttgcctccgtttttcgctgccttcactttgttgtcatcgtcgtcgtcggcggaagtgagtaaactgttggacggagagcggccatgcagagggactcctccgccttctgttggtgtccctcgcctttggtggccgaccaaaatccctgccgatcccgacgaacacggcccagcgcagtgagacacagccccaatttgaacactgatctcgatctcttctgtcatctcatccggcgatgtgaacgttgagattggagaatgaatgactttttgtatttttgaattttaaggctcaacaaattgcattgattgcgttcaaatttcgaaatttaatttgaatgaaaagcgtaaacgatcgcttttttagttccttcggttgtggctttgttaagccgttgtgggaaagtttgacgccaaatgcgcgaagggaatgtacgcgatgcccaaaagcaactgaacagcgcgaatggaagtcactcagtcaatcggtccctccccatcccttccccccccattcgcccctctgcttttccctctcccacctttccttccccgcttctccagcataagcggcttttcgttgcgcaaatggacgaggagcaaatcgcccatggcgaaatccgataatttgggaatgaacggagcagccactgaaactgcccgggggaggggaggcgtaaggcgcgaccacaaagtcgaaacggggcgaatccgtcg

SEQ ID NO: 858 - DNA, 1936 bp, Heterodera glycines
  unsure (1)..(1936): unsure at all n locations
atgtccagttttttttgttacggcgtaattgcgatnttcnccctaaaatcggctccttgtgtttcaggtgactcgggcgtcggaaagacatcgctgatgaaccaatatgtgaacaaacggttcagcaatcagtacaaagccacggttagtgcctttttcctgtttttgtccatttttcatttgtttcccttcagattggtgctgattttcttacaaaagacgtgatgatcgatgaccgacttgtcaccatgcaggtcaaaaattggattgtaactttttgttccgtgtgttttccccgaattgctggtcacgaatttgacacccattcgactgattccgaatcgctaacccaaattttaacaaaaattttgcattccaaaagggcccctcatattgtttttaaaattggtgacttaaaccgaatgcgtaccgtctttactttgctctttattcgtacaaatgccattttcgatttgtttgtacggcacttttccacagatttgggacactgccggccaagagcgtttccaatcgctcggcgtcgccttttaccgtggtgctgactgttgtgtgctggtgcggacggccaaacattgggccacccaattgaaccgttgccccccccccttttaaggtttacgatgtcactcacgcgccgtccttcaaatcgttggagagttggcgcgacgaattccttgtgcaggcgaggtgacccattggaattggcactttcaattagcagacaaatgccgagcaccgaaagcattttaaaaaagtgtctaaaaagcagtccaaatacgaattttaagtcctcgtgatcccgaacactttccgttcgttttgctcggcaacaaaattgacaatgacgcggcgcgtgcagtgaatgcaaagagagcgcagagttggtgccagtccaagaatgggatgccgtactttgaggtgaattccacgcaaaacatttaaaaattgctacacaaactcaaatcccgttccgattagttgaatttaaactttttttggcattttctccatttttcaggtctctgcccgggacggagtgaacgtcgaagagggtaaaccatccctttcgcttttccattctctcccatccaacttttgcagctttccaagcgattgcccgtgctgcgcttgcacgcgactcgcaggaaacgcacgacttcccgggtcggtttgcgggataaaattgggggaaaatgttgccaatcatttttttttggatgaaaaaggcactcgtaataaaatcttagaaataaatacgctatccaaataagttgcttttcattttcatctggactaaccatccaaattctcggcttacaaatgttttatcaatcaaattttgccagttttataaacataaaaatttcttcagaatttccggaccaaattcgacttgatcagagccgcaacggcagacagcagaattcctcctgttgctgaccgtccgggggcatttcgcgatgagtgaaatggaagaaatggtcgatcactctgtcgatcaaatgatttgtaatttccaaaagaaagaattcggatttcaaattcacatcttctaacacagacaagctcattccctcactttgactacccttttaaccaattcaaacagaaacgatgtttagcacttttattataaggccatttgccccccccccccccctcctgcgttgattcatcgccttcgccaattaaaaatgcaaaattttattgaatttcattattttactatatttgtgtgtgtctgtctgctgatttgacctcgccacttttgcatgaacggtctttgtattattagaaatgaattctgataaattttgatgattttccaacattctatcacttttattctgtgaggggaaaagtgcttttaattgnnggtcaattagtaaatttgttccccataggctgtttgatc

SEQ ID NO: 859 - DNA, 5622 bp, Heterodera glycines
tgggggtcaattagtaaatttgttccccataggctgtttgatcatattggggaatgtctttctccgttaccccgggcaacggctaaaattcgctccccccggcgcattgttttttctcttttacgcgcctttcatttccgtcgatcagcgaatggacgaggcaaaagccatcggttggcgtctcttcgatcgcttccgtccgcccgatcagcttaaccctttgctctttcgtctgtttgtgcgcggtcaattcgcacaatgcaaacaaaaaattcaggtgcaaaaattgggagagaggagaaattggaaaaatattaatttgaaaatgccgttatatgcaatttttcggaatgaatggtgccgaatcgaggcgccattcgcttccgaaaatttccgagaccaaaaagaaacacgagactgctcgagtcgagcgctactctcgagcatcattactaattggggccgttcgttccgaaaaacacgaaagctttcttctgatccgatccctttatacccacccaagaaactgctcggtgagtccccggagattctctgtgaatttgcgcttgtccttcgcggccaaatcgcgcgagaagagggcgaacttcgcgaatcggtcgcttggcattttaattttcaattccattgactcctccctttccccctccccttaaggtcggttggttttcgcgtgccctccgtcacaacccaaacagtgccaagtccgtccgtcggcccttttatctttcatttgccattcgaatttttcaattttcccggcagaattctactcgaactcggaaaaagccactaccttttggcggaacatagaaaagcgattgaactgttcacaaagtcattggaacaaaatgaaaagagaaatggcaacgcaaattgggtgagcaaagaaagaaattcgaatttcgggggaaaaaagcggcgagaatctcgacaaaacgacagttgcagctaaatcacagtcttatcagcagtccttggtaaactgataagtctgttagtctgttgtacccagtgatttgattcgcccgtccaatacaatccgatcattttgaattgagatattcctattaaaatctgatccatttaaatccatttacgttttgcgtgttgataattgataagacttccatgatatttacctgatcaaaatttgaataacaatgctcaatttttagaaattatactattggcaatcgctcgccgtttaccacgtttttcagccgccggaatgtgccaaaaaagtgccctttttcggtcattgatcagttttccattttgatttttaggcacaaatggccttgctttcctctcctcaaatcaattccagcgccgatatggtcattttttacccaatttaaattggagtgactcaaattgacttttgcctctccccattaagctgatgtttttggcgcgtttactcgacgagcaaaacgaaatcggcgccgccgtcgaggcgtacaaacggagcattgaaatggaaccagaaaatgtggacataatccacaatttgggaatgctttacctaaaggtgggtgggcgatttgaacagaaaagtgccaaaaatggaaatgccattgccgctgaaaaggccgaagaccaaccgaacgcatttacaacttttggcaaggcgcttagctacgacccgaattttgttccttcggtgctggccattgcttccataatgcaaacgaacggcgattgggacgtggcactcacaaaatacaagtgagagagagagagagggcggagagagactatgtgggagagagagagaacagagggaaagagaccatggaggaggaggggtacggtaaatggaagaatgatagaaagagagagagagagagagagactatgggagggggggggggaagcgaattttcgttcgatcgaaaatgccgacacattccgatgattccgatcactgataataacagttggaaatttctcttgctgcctttagggcggccacttctgagtttgaccattcgtgtgccctttggaataacattggcatgtgtttcttcggcaagggcaaattgttggctgctttggtcggtcattcattcgttcactttctttttttccccttccaatttcacattcgctttttaaggtgtgtctgaacaaggctaattatctttgcccgttggattggaaggcattctctcctaattacccctaattacgtaattattgtgactgatctctcccccttgggcaggttctgctcaatctttcccttgtctactgcactctccaccaattcgcctccgcctatcactttgtctccgccgcatttgcgatcactcctcagaatccgttggtcctctgcacgatggccggtgattacgagttgaagatcagtgaaatggatcattttcccatcgattgcctttgaatttcgattccgtttgggtgcccgagggcatgggaaagtctgatcagttttaggcatttaacttttgcccaatcgaagttggcaaaatttactcaaagagagaggggacggagatcaaagaaagggcccccagagataacaaattaattaattaattggggttaattgtttacaaattgttttcagtgattctcaccggcctggccgactttcggaatgccaaatcggcctacaaacgcgcccttaagttgggcccctccctttgggccgtccgtttcaatttggccattttcgagtcgcgtcgggcgaattatgccgaagcgactcgccgtttgacggaattggagtcggacggatcattggcgatgggctcgacgcatggcacggcataccccgaggtgtgccattcattggggtgccaaagggaagctaacgctttccaggaactgcttcaactcgtcgtacgcattcgaaagcattttgaaaagttggaaaagcaaaaggaaaagaaagagggaggagaaaatcagcgaaatgaatgaacatcatttttctcaccccaaaaaagataaacagatttttcttcaatttgtttaaatatacacgaaaacgaactgagtcatcagtagggcggggaattatatggatataaaatcgcaaaatatggccataaaatatggaccaaaaatcgcgaaatatagacataaaatggcaaaaatatggacataaatttttcaaattgagggtataatttccctaaatttctttaaaatttggcgaaaaaatgattttttggaaaattttccggtttttgggctcaaaaaggccaatttagctgctggaggccgttctaatagaggttttttggaaaaatgccaaaatatggacataaaatatggataatgccataatatggacaaatatggacataaatcgcgaaatatggaaaaaatggatatggaactccatcctaggagcttcaaaccaagctaaaaacatggatttccatataattccccgccctagtcatcagtgtttcaataaaaattatttaagccgtttttagctaaaaagcaaaatttgaattttcactttttgttcaaattctggtccgaaattgatcgaaatggacgccggattcgtaatcagcaacttcggaaacttgtttttatgttaaattacacaaattgtacgtttcgtaaaccgccaagtgggcattttaaatattttgtttaggttaagttctttctctgtcagtcttattttttccttcctaagcagaaattaacagtccgatcaaatacccttttaatttacattttggtgaagaaatgaaatattacaaaagaataaaattcctaatatgctaataataatggatcggtatggaatacaaattattagtacaaatatataggcatttccatgaactgaggaataatcaagcggtgttaagggttgtcagttaaataatcctaaagcaaaacaatcccatcaaagtgccccattttcggcgtcccaatccgcccattcgtcgccttttgaattgttctttttccgtttctttttgagcagcgtcgccagaaaagtgtccggaggactgaattcgttcgcctcgtttttcacttggacaattttcgtgcaattctctccgtcaaccgctaaaaataatggaaaagagaaaatgagtaaattcatggatttattagagggttaaaatttatcgaaccgatcccttcttgtaattctttttatttagaaccaatgttcgaaatttctcgagttcactataagtgcaaaatttagttttaaccgaaagtcgattaggtaaatatctccggattaacaaatcattttcaaattatgtttactctcaatgtgaaagataaaaatgttcgaatacttttcgaattcaatcgcagaaattgggccaccgcgtgcaaatgaaagcgtttcacgcgcgaaatgatttcctccgcgaaaacatcggccggcgattcgccaaagaattctctcaaagcgaattccattctgtagaggcaatcctaaaaaattaactattaaatccaaaaatccaaagaagaaacataacaaattggacgttccgtcgtttgagcaaacagtcgcggaattttttgtcgagtcgctgaaaacaatcggacgacgatttgccaccacccgacgaaggctgaccatctaaggaagaaaagaccaaaaagggaaatgacgtggcaataatcagaaaaaaaaataagtggatggcccatcaaaaaattcatttgtttattaataatttgcctttttatatgtttagtccccattttttttggttggttcattgatttttccatgtatataaacaatttcattaagtttttttttaagaaatgcatttttcgtagaaagtcactcacttttattgtgcggctgactctccgactttttgatgtccgtatttttgaccgattgttgcgaatgctgcgccttcgaagcgtcgcgtgccatgagaatttcgtattcgaattgcaaaagcatctttttctgtcctgattcgtctttctccaggaagtcattccaaacctaaataaaaagtgcaagactcactcaaatgggacaaatgcaatagtaagccaaaaaccttcatttttgcctcatctcgcaaaaggcgtgagaacgcagaaatcgtctcggggattaaatcggaaccatcaaagcaaatgtcctgagtgtcggcaaaactcgtcaaaagcctagctaaaagcaaagatacaaatgaaaagaacaaaagacaaactaactgttttccacacgacgccacttctgcgcccccatgtttcgcttcaacggaaatccgtccacaatttcaatcggccgatagcttttcgtctttttgcgtcggtggcctccgatgggttggctttgaatttggaccgacacttcgttttcctcttcggcattgtcgctgtcggattggtcggaatcgaagagatagcggaaaagaatgggaaattacggaattaaagggatgaaaataactactttgcataatcatcggcaaatccattttcattctcagcacattcttcaattcgaattggaattctattgatcgaacggttgcgcaaaatacccatggtggaatgatttaagccaatgcaaaaaataggaactcaaacttttgatctgatttttattgt

SEQ ID NO: 860 - DNA, 3974 bp, Heterodera glycines
  unsure (1)..(3974): unsure at all n locations
aattaaaaaattttaaattattttcaaaagggactcaagcttattccttcacaattaattttttaacacatttattgtcttttcgattaaaaaatacataatttgtaatattattaaatatattatttttatttatttatataatgaatagtctataaaatattaatttatttatttatgttaattgttggctatttttgcacatatttcttcaagatgtgccgcggaagtcaaagcggcggtcgtcgtacacgacgctcattatcatcatcattagcagcagaatatgcaccagccattgaatttgacgacgaattagttgggcctgaactgttcagcagaatggccagagaagcggcgccaattaacggtaattaaaattccaaaaaatattttttattttttatttttacagagttcaatgaaacgacggcaattccactcaaaggcattagtgttgtgggcggtgacatcaatggtgaacacgacaaaaatttattcgggggtacggtattatatattttatacagtcaaaaattttttcaattatggtaattagtagagtgcagcgggaccgggacctgaacacggacaactgagtaccaaggtcccggttttgaccgggaccgggaaattcccggcttttttcccggttttcccagccaaaaagtcccgggttttcaacccaaaaagtcccggtcccggtcttgccaaatttcccggtcccgctgcactctacaaaaaaggcatttaccagtgtaattttgaaagagcgcgcaaaaaattacgccatttacgctatttggcgttatgaataataagagaaagcaattaagaaaatacataatgtggaaaaaaattatctgtccttattttcgggtgttcacaactggaaaagtattcaatattttaactattttttataatagagcatggaagactcccagcagaatattactgaacagtctgtatcggctcccaccactgatcgcgacgaatatgaagatctttgcaaattggtcaacccaatctcaaaagataagagggttgaacaggaaggagccaaaaaaggaagtgatgaggaggacattggagacgaaggagccgaaaaaggaagtgatgaggaggacgttggagacgaaggagccgaaaaaggaagtgatgaggcggacgttggagacgaaggagccgaaaaagaagatgatgatggagttgaaaaagagggaggaggcgatgaggagggtgttcaaggggaaggagtcgaaaaagatggagatgaagttgaaaaagaaggagacgatgaggaaggtgttcatggggaaggagtcgaaaaagatggagatgaagttgaaaaagaaggagacgatgaggaaggtgttcatggggaaggagtcgaagaggagggcgttgaaggggtaatttagtatttttacgatgtttctaaaaaaacaaagttaagacttcaaagcaaggagaggtatctcagcttatgcaggacatttttggtgacaatgaaatgagcgaggacgaagaggttggaatgtttaatttcgttagctcatatcaatttgcactaggacaaagacaaaaaggctgaatttgaggacgaggatgagcccaaactgatcagagttgaaccggctgaggaggatgtggagcagtaagcggaatgaaagtggaaggaattcaggaattgtttaatggtcctccttttagggatagcctcggacgcacatgggactttgacgtgatgttggccaagaagaagcaggaaagacgccgtcgtcgcagaaaggacggctccattgacctaatggcggacgctgacgaccaaatcagagaattggtggaggcgatgaatgaggcagcaaatgtgagcaaaaagtgacaagactctttttattgcagcgtataatcatcagcacattctataaaagaccgacgttgggcccccccccccttccacaagcctttttgtaatggtaggggttttccatttaactagataatccagggttttggtatggctgttactaaaatataccgaatgccaaacgcataatcttcgtcaaaaatttaggaagaccgaatgtcgaacatggataggagaccggcagttaagaagcgaaagatgttgcaagttgtgaagaacactttgttgaagactgacttattcgaagcgatgcttgacaacggtgcaaaacatggcattaactgcttattctaagcaaaaacctgaatttagggatgattagcgccctctccgaatggcttgccccactgcccgacaagtcattacctgccttggagatcaggcgagtttaccgcctttacaaaatatttctcattgtcagtttttccttttattcagatgcacgcttttgaaaattcttgaaaattggcccaatttggagcaggtaatgccaaactgtccctttaatttcttgctggatctgacaagctttttttgcaattcataaactttccaattcgaatgaccatactccgtttcgatttgcgatatttataaaattttattagaatgggattgaaaaaccaataaattattgtcaaaacttgtaattcaaaacggcgtgttttggtccttacttttcctcatttgttcgtccctttaagagcattctgaaacagtccgggcttggccgtgccgtgatgtatttgttcaaacaccccaaagaaacaaaggagaacaaacttatcgccgcaaaattaatccgcgaatggtcgcgacccatttttcaggtgatttggagggcgaagagatgaaaattctatttttattcaaattttccatcccagttggacagcgacttccgttcattgagcaaagaggagagagtgcagcgcgactactcccaaatgccactggccaaaaagcgccgactttcgtcagtttcttttttgggaattttttagctaaatgctaaatcaaactgttccgtcctcccattcacttttatctcagcatggacaacgacgagggaatttttgcagctgcacaaaagcaacaaaaacagcaaagggaggagacgaaacaaccaggcgaagtgggctttatgccacgtgcgcgagtgccgagaccgtccacctgcgactacgttatccgtccgaagcccgaaattgagggacagttcagaggagaaacgaagaacaagcaggtcagcagcaaaatgaggagagaatgacttcccattaaagtaatgaaaattaaatgtattcagaaatctcgcttctccaaaatgcagagggaaatgcgcagtcagaagaccacaaagcgcgcagttggcgtgtcaattaacaaagatgcattttaagttaaacacatgaaaatgatttggggttcatttggatgctattcaaatttcgctttatcatcattagagatggtaatttcatatattttttttgctgaattctatgagctccagaaagcaagaaaaacatttttgccggtgaacagaaattgggtttacataacatgctccggcatttttgtacatattttaagtataatttcgcaattttatataaaattgtcatccctaatcattcgtttcattaattttctcccaccaatttatgttattttattgaattttgatgggtttttagtagtatataaaccattttgttaaaaactttattaaattttgttgtttttattttgcgttacaataaaaccaaaaaatgtaaatgcatttttattgggcggacaatttttaacttgcttcacgttttttgttttgaaatgtctccagcagctgattaaactgcgcgatgtgagcgaagtttgggccgtttgtcgttcgttggtcgcacttttcttccattntgtttcgatttcgcttctctttttgtccgtntttacggncgttgngggaggacagcgaaaggtgaaagttacgcgcaacgaaatggtggaaacgaccgnaatatatactcatttgtcagtc

SEQ ID NO: 861 - DNA, 4301 bp, Heterodera glycines
ctttcccccccccccccccctcacccattcctttcccagatttatgcccttctgcggaggatgggccgcccctttcgtaaataaatgggaaaagggcggcggaggagtcgtcgccctcgtccccactgagaaagtgacatattttccgaatgttttgctttggagtgcatttttcactttctttggcataaaaatgccggaccaaagtgtcgttcccccgtcgtttcacccaaaaaggacaaatcaaattataattttacaaattattaacaacaaattcgatgcattcttcaccctaaaaactttaaggaattgaaaaatggtgccgaaacaccggaaccgtggcgacattgaacttacggaggcggaggacgacggcacaacaaatgccaccgttgtgctgaccaatggttgtgttgcgacggcggaggaacagcgagcggaaatgtggtcagatggcagcagcagtgactttggcgtctaccaatgcctgctgtttctgttcacccaactcggctatttggcggtggccccgtcaatgctttccaccactttcttcgagccatcctcggtcattttttatgatggcatttaatcttggcccgatccttcggttgtccattttccgatcaatccccatttttttgtcataattttgccagtatttttcaggctttttgcgacactttccgcctcagttctccgaatggttcttcttctgtcttcactttgtcttcttcccctccgtcggttgagtttcattctctgctgatggagtggggcgagcattgtcacttttccgttcgtactgtttggatgtccagtgccgtgatggtcggcgcggtcgttggcgctttcgtcgccggttttgtggccgattgtttcggcagaaagccggtggttgtcggtaagcagtgggcacaattaaatggaatttctttggaaatgcttttcatctcccaaatacccaccatttctaccgcatttctctcatcccctcccgaaggttccatggctctgatcagtgtggccaactctctgatcgccctcttcggcgcctcctcccctcctttggcactttcgctgtttgctttgctcggcttggcctgcggtgcttacatggtcaccaacatggtgttgctcatcgaaatcctccgccattcctccacccgtcttttggccgtctctctcaacggttggcccctcggaatggtcggcacggcactgctcgcgttcgccgtgcgccattggcgcttttaccatttggcggtttctgtcgcgtcgctttttctcttcattataattgtaactttttttcagcgtttgttttgtcccgttgtatcaaatgcaaattttccagcattatttggccttcgaaagtatcccttggctcattcagtcgggaaaccatcggagagcgcattcggtccaacagaaccttttcaaggtgatttaattttgaaagggaattcctgagtttacatgactttttaaacattttttgaatgtcaatggatcaaaaattggcaggtgaattcctttttggccacaaaggacggcaaaaagacggcgatggcaccgtttggagtgaatggcgtcgctgcgccgatgacgcgaagttcttcccccctcaacaactgttcgttgaacgaaaacactgacgacgcactgttggaggaggtgggcgggggcagggaagaaggcacggcacagaaattggctaattgtgagcattggagggagagtttttgacacttcgccacagagagccctcctccagggatggtaccaggatttcggcttacaatagatgggaaacggctttcaaaaacttctactttgaaaattttctgggaagtggtggggaattgatcgtctccaatcttatataattttgctaaaattcctcattttcccgactctttcctcccctcccccgccctttttaagcctttacctttcccttaaagtccgaggagggcactcaaccagcagcgcatcgtcaacgtcagcgcatttacacctatttggacctcttccgtcaccgttcggtgtgcgtccgaatgctcactttgctcttctgtttcggctcctccgctgtcatttcgttcggcctttacttcaccgccgaagtgctgcccggctcgcgctacctgaacatcgccatgatgggccttggcaaattggtgctcggctttttgccctttcttttgtccaatcgcatcggacgtcggcccattctgctcgtctctgttggtgagtgttttgctgttaattaggaaaatgtcattgccaaatgcttttcctttccaatgcccccatcccctgtccaggtttggcgtgctggactctgatcattgtttggctcttcttcaatctgtccaaacattggctcaccgccgccctcagccttttcatcaccgcggcaatcgacccgaattggaagatcatacacctgttgtccatggagctgtttcccacccccgtctgcaacatgtcctggtcggtcggcactttgtttggcatttgcggtggtgccaagattctctccccgcttaagtgccctttgcaatgtgattgcttgcctcggcagtttgtccgtccccttggtgcaattcctccgttccctcaacggcgtcttccccttttggctgtttggcatttttctgaccatccaatggcttatttccttctttttccttcctgaaaagactacgacattggtcgacaaaggtgagtgggatggatggtagacagttccccttttcagtaagataaggagtttccatgatttggcattgggtttaccaatcgaaacgaattttttgtcaacggcctattttggcttggaatttttacttcgtgtactccccatcctaacactccgtaccaccaccattctccggctatgaaacgataaaacgcaatgcttcccacttgctaaattgaaagtaatttcaggggaaggcagtcaaccagcactaaaggcaatcatattggacccggacagtgggaacgacagtccggacccggtgcgggtgcatccgtcgttggtgcgcgttctcaaaaagcaccaggcggagggcatcaaatttctctacaattgcacaattgagtctctgtcgcgattgaacgagccgggcggaggaggtaagtagataaaaattaattgtcgtattgttcaaatgccagccaattgttttagcaattcttggccattgcatggggctgggcaaaacgctgcaaatcattgcttttttacatactattttgtctcacacacgcatctccgaaaatattcacaaagtgttggtttttgcgccgaaaaacgtccttttgaattggatcaatgaatttgacaagtggctttttgacaatgatcctgagttggacggtgtcttgacggtgggttttgtctaatttgaattgcctattcattttttattattttagtattccgaaattgactctctaactgacaactccgacagattgttggccatcaaacgatgggccaaatcaaaaaagccttcagtgttggtcatcggctacgatatgtttcgtcgactcaccggatcagatgaggacagaaatgtcccaaaacgcgggggaaaagtgcgatcgcaaaagccgaagaacaaatcgaaaactgagaaggagctggacaggctgaagccacagtttcgcgctttgttattcgagggtaattcagtttattttttgctttttgatgtactgcaattttagccccccatatgatcatttgtgacgaaggacacaaattgaagaactacgaatcggcaatttcaaagacaataaatcggatcgttgcccggcgtcgcgtttgtcttaccggcactccgctgcaaaacaatttgagcgagtactattggtaaaaattatccattattttttatgatatattcttggaatttatgttttttagcatggttaatttcgtcaagccgaatttgctcggcaacatcaaagagttcaaaaatcgtttcgagcacatcatcaacagggggaggacggctgacgcgagcagggaggacgttgtgtttatgaagcggcgttgccatgtgctccatgatcgtcttcgtggcattttggaccggagagattacactgtgctcaaggagtcgttgccaccgaagcaggaatatgtgttgatgatccgactcacccaggcgagttttcccgcatcccttcactgtcaagcaatgaatttgtttcatttagtctcaaattgagctttaccgacatttttttggggtttgctgaacgcaacaacacactga

SEQ ID NO: 862 - DNA, 1754 bp, Heterodera glycines
  unsure (1)..(1754): unsure at all n locations
catggacggtaaaaaacgaaaaaaatgnccaaaaaataaattggcgtaaaacaaacgccannacacacgcaaaaaaaaaagtatatgcacttacactggtaaatgccttttttgtattttttattttgatcagccataacacgcttcattcncaacaaaaatgaacaaatttggtatctaaaaaaagattttgaaaaggagaatctttttctaagtgaatgctaagcaatttgacatctcagaaaaaagttgtgcgagtttcaaattttcattatagtagcgcggccgtgcgcggtggacgtgctggcgttgggactgggcaatttgggagggcagatggggaacattgggaaggaactcataaactcccgaaggaagggccccatgggatgatcaagcccagggatcccatcccgcctttgatggacacactgggataagtggctttattccggagagactgaagatacttcgcttgaaatggcgaacattaaatacacgtgaaaaatgaaatgtgatcgatcaattatcgtcgggaaaggggcgacaataagcaaaagggaaattaaatgcgaaatgaaataaatgtgagaatgtgaaattcatagggcttcggccggcaaacaagaaaacccggatctaccttacacctccaaccttaccaaagaccgtccctggtctcttaccaagattttcgcttcaaaatttgcctaagcaaagaaaattatttcaaaaataattttgctaattttcatgccctttttccaattttaaatcaaaattttatgcttcgtgtcactcactcccaaccgtacattggatcgtccctgatccagttcaagactcaggcatcactggcaaagtgcccagccatcaacctttgtctgcgagaactgatcaggacttttttcatttttactgccgaagcacatgaaaaaacaattcccaaattttgcctatgaagcatgaaattttgacatttttaattacctatgtaaattagcgaaattattttaatttaaaacctagacccccaaatcaaaacacactcattttccttgccaaagcccccttttccactatctcttattcctctcaatcaactccggtcatctcgccgtctttcttggcatgacatgccacgtgtcccgttcgtccacaattgtagcactttgtagcgcttcctcctcgtccgccgcgtgtgaatgtcgtccccgtgaattgtctccagcttgtgcttcgccaattttcatcgcgtcgtggtgccggtccaatgtcctccgtcgccagtcgcttgccttccaatggtcggccggcagtcctgaaaatgggaagaggggtgttaggcctgttttctgtaatagaaccactcgagtcccaccaattccgttcattcgctcagtgtcgccagcaatctgaaatggaatagggagattagggttaaaaaaacaacacaattacctcaacctttaaatgaaccctcaaaattttaaaagaatttattttactgatgatttcctaagaaaaattcctattacctttcatttcgcgtacttcaagtgctaagtcttcaatcatctctctcaattgttgtgtttcactagcacaatcatttttggcatgattctcagctgaatgttcccaattttgtctattttctgaattagagggaccaggaaaatctcgaggacaataccaacattcattttgaatgtgccctggtcgattgcaaaattcgcagaagagccgagtct

SEQ ID NO: 863 - DNA, 2762 bp, Heterodera glycines
caaatccatatttattttggtgtttgatcattgaaaagccaaatgtctgcacaattttaaaattaaaacttttggtgtttgatcattgaaaaaattgagccaatttagaatacctatttaaaatttaaatatgatcattgatcattgaaatagctcttctaagaaatggcgaacgaattttataatgatgtttatacatcatttatcacgaagtaatttggtctatctgtggcctaatggttagtgtgtttggttctttctgagagggggggcaaaaagttcgatcccgacaccatgtgattggattttgaaatgaattatttaatcagaaataaaatgctcagcacgaatacatatcagtggcataatggttagtgtgttgggcttttttcggcacaacctgggttcggttccgcgcggagttagcagattaaatttaaggacaaatggtcgaaaagggacaaaaggtcaacctgggataaatgatccaaaacggacaaaaggtcgacaatgggacaataggtcaaccatggggacaaatggtcgtttgagtgccagaaaggccgtttcagtgccaggactctggtactgaaacgtgtcagaaaatctgggactgaaatgtccggtactgaaccgtacagggaatcgtggtcttacactacttagatgtaaaaatattttttattatttatgttttatttttccccattttattttttagtgttttttatttttccccttttttattttgggttttatcataggatttcgcgttgtcgcgacagggctcaaccgcagatagtaatgcgatttggctgaaaacccacatgtcaaatgatgtagaaaaaagagagccattttctgagaatacctaggcgtcacttggcgtcgtttcaaaaccaaattagtaaattaattggtccattcaacaaaactagcatttataactgggaaatttcatgtgattttctgtaatttgcgtcgtatcaccaattggttggcaatcaaattgtctttgagccgatacatggccattccaatcaacgggtacgtatttgtaatggtttgggatgtaaaagaggggagcggtgatttctcattccccaaatggttcgtactgggaccggccgagattccctattattgtattttataccttaggatatctctgggcccgggaatgtgctaatggtttcttatttcctttatttccctggtaagcgatcgtacacaaaggcagcgacacactgcgcttggtgcgtagcatggcgactgtgacattttggtatccataaatgttgctgcccgaggcttaaatttggctgacggcttcaagttgattgtggttaattttgaggttttcttttccattttaaagacaattcattgtcatctttcgccacagttgccccgacatgtcgaggattacgtacatcgaattggccgttcgggacgggcgggaaacattgggagggcattgtcattcgtcgacttgggctcatggcggaagttcaattccgtaacaaactcgtcgaagtggtgactggacaatcggacagtggacaatccgacagtgaggacaatcggacagaagtggacaatcggacagtggacatcggacagtcaaaaataaaatagataagaaaataccggtcgccgcaatggaccgattgtgccatatcaagaaaaaacaaaataggcaaataaattacctatcaagaaaaacaactttactcaattccaaaacggcacagcattatcgatgcgtaaacttagattttagttatttaattctagagaccggacaagagggtcggtcgaacggtttcggttaaaaaccgaaaaaaaccgaagaaaaattgtcgatatatcgtttcggtttcggttttttttgaatttttatattttttccaaaaaaacaataaaacatttttattaatagaaaaagcgaaagatcacctctgaactaaattgtaaagctattgaagctctatcgaatggtgtactaaaggtttggaaaatgatagaaaaggcagccaaaaaacatgtgtttgctccttgattctaaaaaaaccacaaagattagttttagcgatttggtgcctttttggcgtttttttccgaaaaattccattaaaaattcaatgaaattgggaaaataaacccctaaaaaatgctctaaaaaaattcagagaatatacctttatgaattgaacgccaaaattctttttttttcttgataaaaaattttaggtttaaaaatttccttattgaaaaacattataaaattaaattatcaataaatcagcaaaatttagtttttgattagtttttacgtgttttgctccctaaaaatcattaataaaaaaatttaaatgccttttttcatgcctttttcgggatttttgtgccttttttcagtgctattttgcgctttttggtgccttaattgcgagctcaagccataactttagggccggcggtgctgataagagccgccgggaaatttttttgtaattttaatgctatttgttagcaaattttgtctaaaaataccaaaatttgagattttgggctaattttttaagaaaagatagctttttggggggtcggcggtgccgataggcgccgccggaggaaaattttaagaatttttaatgaattttgttaaaaaaatggccaactgatttgtcaacaaagtcggtcgattgttttgttttttaattatttcggtcgaacggtttcggtaaaaaaccgaaaaa

SEQ ID NO: 864 - DNA, 5121 bp, Heterodera glycines
agctttgcatgtattttggaaagaggggtgatcagatctgttcgggcaaatacccaacggaggaagaccagcgaaaagccctggagaagtgggctgggtcatgtagttgaaaaaaaaaagcaatagctttgcgtccacttttcccaattcaaatgtcaaaacggtgattgtcaacagttctctgcgatctgtctttataaaacaaaacaaaacacaaataaatttataccaaacaaaaataaaatagcgacgacaaaacaaaataaaataatccagcacaatttctccccaaaattaataatcatcaaacaacaaccaaaaacatcacaaaatatattgagtctcttaaaaatatacgaaacgccacagaaattaataatttaaaattgaaatgaagtcaattagcacatcaccgcccactagaaaagacggtcccctcggcttacaataacaaataaaataaacaagaacaattcggctaccgatcggtggggttcaaggttgtgctgcttaatgacgacgacggctgatcatctcgtttccgcctcttcttcctcctcattcgcgtggtctttgtccatcgccgcttcttcgccgtcctcctcgcgctcgccctcctccccttcttcgtctttgtcacagaccaacacttggtcgctcagattcagactgtctctcagtttttctatgtcctctttcgtcgggatcggtgcatcgataaaaagttgtgggtaacaatcgcgaatggaatctttgatttcttgtgcaaaacgaaggcgattgtccatcggagcctcgtgtgaattgtgaaagtccttcaaatgacgaacaatcgtctcacgcgaaaagtgacccaagttgcattgttggcacttgaacaggtcgcacccctccaagtgagagtaagcgtgatcagacagacgattgatgacgagtttgccacatttctcacaagaaatggcttcgttgctgcgcttcttgaaatactgagcaccgccaagtcgcatgctgacctcgcgcagtttgatcatcacatcccgcgccttacgcgaggcttcctacccctcgatccgaagaaacgacggcccccgcttcgtcgtttcctcaccggctctttgggcgtccagtcgcgaccaacattttcagacttcaacgagactctcagattcatgatatgctgttgagaacggcggcgaacaatttgctgtgacagtttggactcgttgtttccgtgctggtaattgtcgtcgtcctcggcacggcccgccgaggaattttcagtcgaacatcgcgcaaaacgttctaagcgattgcgtcggcgtatttccttttcgaataaacgctccacgccaaagcacgccttggacatttgcttgagctcgtcctcgaagttgtacagcaaatcttcacacgatgcttcgtcgccgtgctctcgaatgccatgcgcaacgaccgattgaggacggtcatgcttgaagttgcagtgtttgcagccgtaacggacgatgttgaggtcggtgttcagatgccaaaggatgtggaagcctttgatgcgattaaggatgaatttgttgcacagacgacattccaaatcctccactcggcggttggcggagtcgtaaattggtagaccggaagagcgggagatgacgttgttgttgatgttggcggatagaagattgcagccaaaatattcaggcctccgccgctttctcactcccaaattgccctccatttcgcgcatttgctgctcataaatctgttgcgctttcactgcagttggtccgggagtgtttcctttggtgcccagcaattgcattgacatttcttggaccatgttgtacaattccatgcttctgtcttccatcatttcggcgtcaacttttccgtgcgctttcgactgatggttttccatctgatccttccgatagtgttgcactttgcatcccgcatgtttgcaacggaaacgataagtattcatgtctttgccaaggtggtagaacatgtgcatctgacgagcgccggcagtgatcggtttgtcgcattcggcgcacaaccctaacacgcattttttggaggtcattggtccgggtctgttgtgcacaatgcgtccaaagcaatcgtcagcattggcaatttgcttcacctcttcaactgcagcaatttcttcgttttgtttcaaaattactgctttgtgtgaaaaatttgtgattgcattaatcacttttccctttctgcctttatctacagaagactcaaccctaattctgtcattctcttcttttggagtgatcaaaacatttttgtcgtcaaaatccggcgaaattgaaagttcaacaaattttgttgaatatggttcaaccaaagtactgtaaatcacacgcacagaatcagacttgttgtccacacactcaaattccactaattcaccgttgggagcatcaaaaattttgaacccaaggagcccaagtgcatttgttccaaacaaaattggatgtccaacaggcgcatccgtaatgtggaacataatttcaactgcttcacaacctcttctcacaactggcaacaaaataattccataacactcgacacgctttccattaatgtcaacgacattccgggttttcggccaaattttgagatttgtgccttccaatttctgactttccaaaatatttttaagaaactccgccttaataagtgaaacttgtgcaccgccatccatcatcgaaatagcgggctgatcaaaaattgtaacattcgttgtcattattttgccgattaggcacagttcctttttgccagcagcttcaaaattgtcttcgtgctcctcccaaaaacttttgaaaaattcctccatctcgggttcattgttcagaacacctgtgcatttgaccgcgtcctccttgtctttcacttcttttctttcaataagaaaattttgtttcaaaaaatttcttgattgaaaatgttgaggacggtgctgattagcattttgttcgggtttgctcataaaattcgtatttgggttactcggaattggggtacagtttgcaccggtcgttgggatatgttcgaagtttcgcatttggccattttgttcggcttgacgcctgaagcaatttctggcaacatggcccaattttccacaattgtagcattttgggcggttgtcgttcgtttgctgtgtttgcgaattgttgaaaaatcctcccgttgaattcgcttcattttgcctccctctttgtatagcattttgcgatgccatccgacgggttgccctttgagtcgcttctgctctcgccgccatcccgacaaaatgatcaaatgtcattccaggtgtccttcccatttccaaactgagtgccaattccgaattgtcgaatgttcgtatcaaatgcttgatagcataatcgtcgaccaggtgatcagtcaaacctgggtatgcgcgtcgtactagggtgatgacacgttcagccaaactgtccaaatcctcgtcgttttttcgccgaataccggtcattatctgatcaaaagcactccattcacgggcatccgtttcttccaactgccaaaacatttctctttttatggactcatatcggtacggttcggtggaacacgcagacttaaaagctctctcagcccgaccaaagagttttgattctaatgaggtaatgcgttttgcattggaccattcagcggtattagcgtcaaaacgcttgaaaaattccttaattttttcggcgccttcatttccctttaacgaaggtatttgactcataatcagagcatatgacttgatccatcccgggaccacggatttcattttcagtttgacgaatttcagcacccgcattttgagtaccaaaattgtttggacggtttgtaatcggagggttttgctgctgggcaacaggttgaagaacttctctctgctgatttgcttgtacaattggctgctgttggctaggtacacccattgcataatttgcatgctgcaaaactggtggcggaaattgctgattaaaaatcggcggttgttggaggtttgggtttacatagccaaaattttgctgtggagggtagccaaaagcagttggataaggaccgtaaagaaattgtcccggataaccccagataaatccaggaaatccttgttgaaaaactggttgggctggcatgggttgggatggctgttgtggttgcgtttgttgaattgggtgcggatgaatttgctgaggatgcgactggagaccggtgggtgcggtaactctttggttctgcatagctacaccattattcaacatgttttgaaaatttgcttgtaaattttgattgtgcggtctgcattctacggtgtgctctacgcgcaactcttcaaacatattttcgtatggggttgaagtcctaggtctaacattttgcggcgcgggatgtaaaatgcgatggccatcattcgaattttcgtttctaatttgccattgttgtccgttatttctcccaacgttttgcaatcgaattcgcaaacctccatcagcatgctgttgctcgaaatttcctccgcctcgtcccgcttcatttcgaactgcttgttggccattctgttcatccggtgccgcgacgttcaaaagcgcattgcgaatttcgttggatcccatgctttcttctgactctaaaagttcaccatcaacccggttatttaacgaaacatttcgattttgtgtgttagcggtgttattcggcctgcttaaattccctacaactccgttttgctgttgctgtaatgccgccgcatctcgagctcgttgtctggtgaatggtggagagcggttaatcatctttttaaaacaacacgagttttattggagaatcttgaagagcacaacacgagtgctttattggagaatcttgaagagcacaacacgagtgctttattggagaatcttgaagagcacaacacgagtgctttataattcggttggatgcatgaagagtccaacacgaggacagaaaaatgataatgtcgatatatgataatgtcgataaaatccaagatccaacacgaggattatcgcaacttatatggccgacgtaaaagttttccgtttagtcgtcact

SEQ ID NO: 865 - DNA, 1294 bp, Heterodera glycines
ccaacgttttgcaaatcgaattcgcaaacctccatcagcatgctgtgctcgaaaatttcctccgcctcgtcccgcttcatttcgaactgcttgttggccattctgttcatccggtgccgcgacgtccaaaagcgcattgcgaatttcgtgggatcccatgcttcttctgactctaaaagttcaccatcaacccgtttattaacgaatcatttcgattttgtgtgttagcggtgttattcgccctgcttaaattccctacacctccgttttgctgttgctgtaatgccgccgcatctcgagctcgttgtctggtgaatggtggagagcggttaatcatctttacaacacgagttttattggagaatcttgaagagcacaacacgagtgctttattggagaatcttgaagagcacaacacgagtgctttattggagaatcttgaagagcacaacacgagtgctttattggagaatcttgaagagcacaacacgagtgctttattggagaatcttgaagagcacaacacgagtgctttataattcggtgggatgcatgaagattccaacacgaggacagaaaaatgataatgtcgatatatgataatgtcgataaaatccaaaatccaacacgaggattatcgcaacttatatggccgacgtaaaagttttccgtttagtcgtcactaagcaagccaaccttttgttgcaggagcgccaagttgaaaaaaaaaattgttttgcgtccacttttcccaattcaaatgtcaaaacggtgattgtcaacagttctctgcgatctgtctttacaaaacaaaacaaaacacaaataaatttataccaaacaaaataaaatagcgacgacaaacaaaataaaataatccagcacaatttctctccaaaattaaatcataaaacaacaaccaaaaacatcacaaaatatattgagtctcttaaaaatatacgaaacgccacagaaattaataatttaaaattgaaatgaagtcaattagcacatttgtgcttattttgaggggtcggatcttagaaagtaaaaatgtgcttatttctaagatttgtgcttatttcagcgttacgtgattattttgtgcttatttttggatttgaaaataaaaaatgaaaaatttgaatgactattttgatttttcatttttttctgaagcgaatatttgaattaatttgattttaaaaaaaattacattttatttcattttttgagtgaaattcacaaaatgccaccaaaacgtaaacatgtttaaaattcgatttcgagtaat

SEQ ID NO: 866 - DNA, 4068 bp, Heterodera glycines
aatttcaagccatttttgactttcctgatcaccatgaaggagtgatctgatcaagttggtgtaaaagcctttttagatcagtatcaaaagataagctagcatgaattatttcaggtttttaaatgaactctaaggtggtttttcaagtttgagtcaagacttttttccgaccttttttgagcaaggtctgattaggagacttattcacgagaatgataaagcggaatgaaatgattttgtggtatatgaaaggcccatatatcggggtaaataaatatacataaacaaaaaataatcagctaaatttccagtcgaaatttaaaattctacaaattttatcattttgagtcaagacttttttccgccactgtatgaaaactaaacctaggtaactcggaaacaaaaacaaaagcgtacgagacacaaaagccaaactttttggtcatgtttcttgagcagcatgaaacttaaaagcatatttaaaataattttaggcttacaattagcaacgacataaaattaaaatttcatcatttggatatacaaaaaaaatcataatttttgaatttactttcgaaatctaacagcatcattagtagaaaggctttttttattacggaaaaatgttgatgcttttgttggcatatggactaatttgtaagtccaaagtcaaggttgccatccgtcctttattctaaggacgtcctttgttttcttcggctttcaattctgaatttttcgatggacaatgctggcttaaaactttggtatttaacttgccgaccaaagatgactgatggaatatgtcacattaatttgtaagcatggaaatgagacaaatcattggaattggaagtgcatgttaagagctgctgatgaagtttgggttcttctgttttttgacaacactgtggcaaagaaactcggccggcgctgacggctagggggtctgtgcgcgggagtttctctcccgtccctcgggcccaattcactcaaattgccgaatttgctgctgccgtcgggtccttgcccaagggagtgaactggggagggggtggggaggacaaacaagatggggtttgcggttgttgctgtaacggcaccaccgactttttgaagagctgtcggcgctcccggttgaggttcgggagaagagttggacttccggccgcgaactgcgtcaaccgccaggaactggctcccgtcccttttttgctgctgctctgcgggggattgtcccccgcttcgattctcggggctttggctcccctttggtcacttcgtttccgagcgaatttttccccccttttctgccctctgaccctttcaacacttttccgacaaaatgtttattggtgatgatgatgataaaatggtcaaaaattggtggatgattatatgcgagatgttgatggttatatggtgaaaattggaggaagggaagggcgataaggattattgagggggtcaaaaattgggaatgattcagcaaaaagaaaaagatggtgaggagtgaaacgagtgaagagccagaggtgaatgtgtgaagtgaaaatggaaaggaatggaatggccccaaatagacgataaacaatacttaagtaccaaaaacaatttccccctgggggggcaaagattaagatgcgaaaaagcgacgccaatgggtacaaaatcggcggggaaaaaggggccaaaacaaagggaaaatgagatgacagcaaaaatggcccaatggaaatggcgatcggagaaagtgtgaacaaaggaatcaaaatcggaggcagatgtgaatgggcaaatattggaaagaaaaggcaaatggtgaagttgaagaaaacattatgtaaatgagcaaaagtgaaaggaaatgaaaagtttaaataaagagataaataaagaggggtgaaaatgtcgacaaataaaaaagggatcgttccctcctcgcgcactctcgtcggcaacaaaattgccgacattcccgccgggcggcgccggtggctccggcactgcctcctcctcgtgaattcgctgttttcggttcagaaagtcggaaaaaatgcccaaggctccgccggccaagaagagcaccccgatgagggtgggaggcttctcccacccgaagttcagtctcatgtcgcctttgtgcgttgacgggagggtgatctcgacccgtccgtcgtcggcctctgcggtgctgatcattgccaacagcagaattagagtcattaggcgtttgtagagctgaaaatgtgggctaaatttgacgaacagaaacagggccacaagtccgattgtggctgctcccacggccataagcagccatggccccctcgttagcaaatgtaagagggggaaaggatcaatctgccaatccgggaggctgaatccaggcccgggctcgagtcgtcctcctctcgattcccgctgattaaatgccgaatctgtatgccagttctgggagatagaacagcgacgttccccactatttacgttcggatatgtgtgtctgtgccccgccggggcacttcacttttgcactcggcgaacacctcggcccggtcgaacggaattgcctcggtcgtcgtagattcgtttccgccgcagtgaaaggcaaaaagcgtgccgtccgcgcatttgatcttggccaaggcggtgccgtagtcggttcggcatgttgcgttgaaagttgcgcccgaaacgcatcgatagcatccgctgagtttgggtgaagtcacccaacacttggtgttgctgtactcgctgatcaattcgaggccgttgagctggacatgcacctgcacaggtgagtactgaaattcgcctcggacgttcgggccgttgttatggagatgcaaacgggcgacgtcgagcgggagtcgttgctctgggttgttcatgactcggcccacgtccaagtcgcggcaatgacaatggatggtgccgttgtcgtgatccggcgcacatttttggcatgcgccgatcgaaagctggcacttatcgaagcttcgtgccatctcttcatccaagcaatgcaaatccgaggggagtgatttccccattgccacagcgcgtccgtccgtaatgaaatgtgccgaaagtgccggcattggcgggagggaggtggggacgaccgcgatggtcatatttccccactgctcggagactcccgggtgtagagtcagccgatgtgtgtcgacttggccactgtttgtttccagctcaacccatgcgctgatctgcatgtcccattcgaggcaagtgaactcctcgaacaccgtcgtcgttgtcggtaccgccgcccacctgtaaaagaggcaagaggcggttgggagtccgcaggcgttctgccagaagctggtgctgcgcatgcagaacgaatgtcccgggcggttgttcagttcggccaattcgggaatggccgtctcacttcggattgagttgcacatgttgccgcggcatgaccccgccgatgggcatcgctttaccgccgtcgtcgagatagagtatgatcggagccagctttccgtctttggcacgcagaccatggtgagggaggccagtctgagcctcactgccccgagcagttcgtcctgttgagtccgtatgacgaatgagtttgtctggtccgccggcagaagcgtcagcaccgtcgctgctgtccctgcacatttgagtccagccgccgtcctcgaacagtcctccgatcggaccatgacggacaaaggtttgttggccgttgccgggccgatgatgagcagcaatgggatgagggctgccactgcctttgcgggaaaggcttttcgagtcccgtcgggattttgccacgctctggccatcgcccgagcccgtcttcccaattgcagttgctgctgcagctcacgtatttccgttcgtgcctttctcgctcctttcctcactttccgttcgatttgctccgtggtcggtttccgaaaatcgcgtccggttgcccaattgatcagcccgatggggtaacgaactccccatgccacggcttttgagagcagcttggctcctgacaaaaaccgcccaaaaatgagcagaagcagc

SEQ ID NO: 867 - DNA, 4043 bp, Heterodera glycines
ttggccaaaaaatcgcaaatttgaatcattttccatgtgcgaatgcaaattcaaattattgtaaagtggtgcaatcatttcgccacccatttcgttaaaatgtcaggagttcgatgatttttcccttgctttttctatgatatgttttcagtaattttattatgtgaaaaaaaatgtggtgaccgggaggaaaggaaaggtatgtccgaaatgaaagtgccaatccgaccttaatcaaatcgatggtgggcgaaggcgaacgacgagaaatggacagccgaggcgggtcctcaaatgggtcttccaacacaattgtgtgggcaatgctgaaacgcaaaaaaaaattggttgcaattttagcaatttctaaatttaatttaaaatttgattccggtacataaattgtaattcaaataattgaacttttaaattttgaaaaaggttaaagaaaggtattaaccgaatgtcccggtagggtcggttgtttcggtccactaattcctcgttcagtttggtcactgtgtccatgccttcgcccacttggccaaaaatgcaatgtttgccgtccaaataatccaattcgtcgcccaaagtgacgaaaaactgcgagccgaccatcccatcgccgttgttcaccatcgacacaatgccgcgctgactgtgccgcaatttgggcacattttccatttcaatgaaccgtgcttgctccccaaaaagagtgctgaaagagaaagtactataatatagaaattgtttaagggagaaaccgacccataaattgattcgccacctcttcccgagttcgttgggtccccagtttgggcgatgtaatttggctaaaaaatgaaatacagtaaaattaacgactaggaaaaaaacaattgaatcgcattttgtatgtattaaaattacacaaatcgccgtagaatttttataaatatgttgcgggttatcagaacagttgaattttgctggaaaaacattgacataaagcctagctccttgaaaatttcaaggttttttaatttttaggttataaaaaatcgtaaaatttgaacaaaaaagcaataaaattgaaattttctcggggacaacgaaaaggaaaaatgcctaaaaccaacatagtaaaaacttaagtttgaccacatataaatccgtgccctgataataagcaaagccaacctcgatggtgaagaattggcagagattgtaatatttggttttgcaaagtttcaggaaattcttgcacgcatttggccgttcgtcgacaaaaaggtcgatgaccaagtcaccaagggttgtttcgatgagcacggccatgggaagctttaatttataatttaaacaactgtaaacagtaaatgtaaatggttatcgaaaatccgaaaagcaataaaattggcgtgggtttttcaaactaaacaaaaataaaattgaaaaaacgcaataaaatattttggcattatgttttggcgttttctttgaacccactttaaaaatttccttttttccttcagcagctgctgatggttgtgagtttgtgaattttgattgcgatcgcgaaaaaatcagtttcttaaaatgaagtgaaatgatgaatgaactaatgtaaattagaggtttattccatttattagaaattgaatttttagttgaaatgtttaaatacaaattccatatggtaatacatgaattgccttatgttggcttttgaataggcttattgttcatctttactctttaggactgtttgcacaaatttggttaattttttttcgatgggaaataaaggaaaaaagaatcgccggatgtggtcagggattaagccgtgagttgggcaatttcttatattttctttgtctgtatctctctgtactttgcaggggtgacgaacatttcacgccaattccggccaacatcggactcagtgaggaccagcgcaaatgggaggacctttcattttggcagagggcagaaaattcggaatatttccaaagggagggaaaggagcgttggctgcgcgcctgccttctgctcaactcgcaggaagacttcagaatcgcgtacaaaagtaattttttgctgtgtttttattacaatgttccgagtccgaaataattttttttcgtaatttacgaatttaaaattttagttttttcatcatttctttggtactgaagtatctattttcacttgaacagttttcccgtcgctcaatttgcttcatttcgatttaccccaatcatttttagatttaaccaagaactttcgaatgataacaaatttgacagggttcggcattttcctccgtaaaagtcaggagtgcccacagggacgacttcagaatcgcgtacaaaagcgaattttactacattttcgatgcggggttccgggtccgaaatgatttagttttttttcgtaacttacgaattaaaaaaattcatttaattttccacttcagtcggtccgccggacctttacacggacgaagcgctgggaaatttggacacgcgccagcgaagggcgacgctcgattcactgaaaaaaatgcaccccgggattcagtttccggagccgttgcaaaacttctcgcccgagccgttggacctgatgtacgggttggtgatgctaaaggacctgagcttggagcagttgctgttgtacgtgcagccaggatcctatttctacccggattcaccgaccgacgaaagttcgttttgacaaaaaaaaggaggtgggaggcagatgcccaaaatgggttcaaacttaagtttttcaatccctgatagcctaaaaagcattatataagttatagaaaggagagcagcttatttcctccacctcccgagaaataataaaaaaatttactaacttagaaatttttcataaaaaaatttttatggtgaattacaaagatttatgaaaaagtagagccaaaggagaggcagtttttcggacttacaaataatagacgcggggtttaattggcattgaaaatgaaaatttgaataaatggcctaaaaatctatgccttttcgtgataaagtctcggattataagcatgccctttttcagtaaatgagatggtccagcagtccaagtgggaggagaaggaaggacggcgctacaattggactgattccaattccatgccattcgccgattgggaagtcggggcgaaagtgcccaaaacgacaaagacgccgcctccggcacaaccgccgccgctgccaatttttgccgagtcacagaaagacaaattgtaagcagtcaaagtcacactactgcaaatttatgcaactttccattcaaaaacatttagtgtgaaaaaacaagtggaaaaggaaaagccgacggtcgaaaatgaccgaaaaacgacggtgccggagggggcgccggaccttccgtccggtttcggtggcattttgcgtcagaaagcagcggtgaagcccaagaagaacgtacgctggtcgacgctgatgatgatgagtgacggcaacaaagtgcagctggtggccagcggcttccaaatggttgacaatgaaagtgttcggatggcgatggacgctccattggacgacgacggatgggaggacctttgaaagtggcgaaacaatggagaaatcgatagggagtgccaatgcgacaattgtgccggagtttcaacattttttgtccgttttatttctcattatggtttttcaattaaaaatggaaatttcgccccgttttaatgatttttcattgttataaattgtgtacttaattctaagatttgtactggttttgccataaaattataggattaattaaaaaacttaccccccccccgcgaaattaaaaaaatttataaattaattaaaattttctaggcgccacctgatgccatcgccggttcctcattttaccatttctaaattcgaccccaaatacaaaatggcattcaattataaaaattggtaaatacccaactcgtactattttagagtatctttttttctatgttcagtgatcgacttagcgctgtctcccttttttccgtt

SEQ ID NO: 868 - DNA, 3296 bp, Heterodera glycines
ttgttgtgtacggacattccgtttaattaccggacatcttttggtttcatgtttacttagccaaccagttcctttatgtttctttcttttcatgtaaaggtacatatttcgctctttaggcattggaggcgtcctttttgagttagtgggcgaaatgacctgtaggagaaaaagtaatattttaaattgtaaaaatccgattttgtgttgattggcgaaatgtcattaattaaaaatcaaaaaaataattttatcgatgctctggtttgaaaaaacaacaactttgttattttgaaatcagtcacaatgggattatcggtattgataagtcaattctcccgatttccaaatttaatatatttatcagcacaaataaacagaattttttgcgaaaaaaaataaattggccaaagcccaataagaatgaagccttttcccgttgttagtgcattttccattttcacaacactcaaatttattgcgtttttctctctgtgccctctcaatgtctctcactctttcgctgcctgttccaacaccaatgatcgacttaaaagcaaaagtccgcccactttccctgtcccgaccgcacgttcgcgacccaattcatccatcaacagcagcagacggtcggacggattgtcacccaaacgatgatgactcatccatcctctgccttccccgtcctctctattttccattgtctctcccaatttgtttgacccttttcctccgctatttcgccgatgaaggctttctctcttcttcctctcttacatggcacagtctttctgtgctggggagagaccccaactccgacgactacagtcacaccacacaacagccgacccatcgtcgtcgtcacacccattcagccaacaatgatggggggggggggcaagggaacgacgatggcgagagagttggcaattggtggagagtcgcatcgatccattcgtctttcccttttcgcttctcaaccacacccatccaaaacgtccgaccatcccccgctcacacagcaccaccacccattcacattcattcttcatttagtcctcctcctcctctcttcctcttcgcccaacaacaaccagtcctgttggatggatggaggagggacagcgacggacggagcagcgatctccgccaacgctaaaacaggctaatgggggggggagtgagcgaggggcgccgctgctaggcccaccactttgtgcgatgatgaaatagacatcacatccccgcgggggaagcgtcatcacaaattttgggtccaaccaccacagcagagcatttctgcccactgcctgttacgaaagtggcagtcctctgctccgtctgccttttcccccgaacaaacacctcccaggctgctcctcacagacacaattcatccccttcccaattccacaaagaagggatggtaaatgggggacgcggtttcccatggcgattcatccaaaatcaaattcaccccccccccgtccgccgctcgcgtcccttccgttctttaccctcctccccccgtcattatattcctgaagaacgaagactgacgactatggaaaagggtgcaaagtggggggaaacggggaaaaacaacaaccgatgaattcttgcaaatccaatcgatcctctgagaatgcattcaatatgtatgtgaaatatgcgacgggtgtaactgaaaaggaaaaggggaggggcaaaaatgaactgaccgatgacgccaaattgacgtcatcccattaattttgcaaaggaaaaggacatgacatgtaaagcagaaagggaaatgttgcgtttccattcatttgcaaaatgcgcgtaaaaggaaaattggattagaaaaagctaaatttgaaattggaaaaaaggaagtgtggaaagcaagtgatgcggaacacccatccattgagaggaattagttccaaccaaagcaattaggaaatccataaaggaaagggtcgaaattaaattgaactattttaaataaaattggcgttttgtaatttaaattaaatttcggaataaaaaattgttaaagttaggtgtggtggtgccaaataagtttgttacagtatgtctttttatttggtcactttgcgagtgctgagatgggtgcagtcgaagaaaaggaacccataaattatattaatttcggcgccttacacttacaaaacaacgaaatttattgttgtcgctttcatttattctatctttgcatttcttgtcgcgctttttaacctctttttgtgatgccatttacattggatcacttaattgaattcattttcctccctttttatagcacttaattaattatgccttgccaattgcctaatgaaattgcgacggtcactgacgacgtgttttcgtatatgtgcaatttggcaatggaaaagtgttcgaaaaaggccgataaaaagaaggcctcgtgtggtggggcagcaatgcggaagaggtgagaggcaaaaggggacgggggaaggcaaatcgggtgactaagcaatgtaattccatcatttggctctaaatttactatttttgaattccagtcaattcaattgcttgtactaatttcgtatttaatttgctctctttttttagacttttgatcaaaaacttcgtggcacaaatgctcgcgcaggatcgccactcgcgagagctgtcttcaccaacttctgactgttcctcccacttgaatcaggtgagctaatgagtgtaattagtcaaaaaaggcggtcagcccatttattatttcacgtaaatgattttttgtgttataaataagcgacagcaacaaattaaatttttagaccttcgacgagtcgttcgactttccgtcgtgtcaaagcggtgcgaatgcagtggaccaatttggagacgacatggaaatggacgccatcggagaggaagttagtgaacgattcttgtaaaaatatagcaaatacaacttttggtgtttcataaaaaaccggcagaaatctgccaaaaattttcacttcaccgccccgccccccccccccccaataaagtttcacaaagtaggcgcaaattcttaacaaattttcactcgaagcaattttggtcgccactgtcagaccctcccccaaattgatgtcccgacgaaaaaaatgtttaaaaattcacagctattttttctaggcttaaaaaatgcgctgatcacgaatctgaactcagattttgaaaatcattaattaaatttcaaaaaatcgtaaaatgttgaaaacttgacttatctatagattcaatagatcgttcgaaagctcttt

SEQ ID NO: 869 - DNA, 1551 bp, Heterodera glycines
tgccaaaaatcttattgggatcgagagtccgagttacttttttgaaaacaatcaaactttctctgaacttgtttcttttactttaatcatttccgatttacaggttccatccaatgcgacaaacgatgcctttctgtgcctagaccagccgtcgtcattgttgaccgacttggacgacgtttcgtgcgaccctcagcagcagtgccattcatcgcgcaatcggaagcggccctggtcgttggtgttctccgccgatgccaccgccactgctgactctatgccgatgccgtcgctgtgttcgatgggtgtcgtcgtcgaccagtacaaccaccaccacctgagcaacaccaacaacagtgttgtcgacatgttcacggctgcaacttctgctcagcaccaccacttcatcaactccaccgcaaacaacatcaacaacaacggcgttctccactcgtcggctcctccgctgttgtcgccgctgtgctgcggcatgctgcagatgagtccgttcgggtcggccactgctgctggcgaggccatgctgttcaatggtgctggtggcggtgccggtggtgttggcacgggcggacgtgtggagcagccgatgctcaagcgggtcaagctttaagtgacacgggggcgagttgcgcttcgcacaattttgccgttttggtgaccaattgacgcgtgtggactcctcttgggaagacagatcctcatcaacaaaacctgctctttatcacagacctctcctctcctccttctcttcacactcaaatatattctgctgcccaccccatatattttcttttctttcattcattgttatttaatggtggcgattttttatgttattatgtgtatgtgttgcgtttgcttggactttggaaagcagcgctcttaaaacgttcctttatcattaagcatttaatattgcaagttgtttgatttcaaaataaaaggatatgcattattattatgttcgtttgagttgacagccaatgagtctaacaaaaaaccataaaaattaggtgatttttactgaaaattgccaaatccccagggaccaattaatatctgcgaattaggtacatgaatttttccactttttttctggcatttaaatatgttcgacagaaattcacacggatactcactcccccactctttccctccgccttttctgtgatgcattaggacgaaatggcgggtggggagagaccgttcattaagcaaataaaaagcatcggagagaactgctgggaacatttgaattaagtgcgcgaaatcgctcggcataatcccccccccccctaatgagtgcgttttattcgccacttttggaagaagtttttgtcgccagccactcactttctcaacaacaattggattcgttgattaattagtcacccccgatgtttcatccatcgttccgttcgttcgttgtccttccgttgcgttgttttccctttttgtcggcaatgtgccataattggcatgccatgacttttcagccatttgtttgcgtttgtacaattgacacgccacgag

SEQ ID NO: 870 - DNA, 1291 bp, Heterodera glycines
cctttttgccattgtttttgttcatttttaattcattcctttctttacttacacccgccgatgatttctccgggcgcagctgctgccggcacatggcgacgcgcatcgcttctgtgggtaaacacggcacgaaaatggggaggagggaaacgatcgacaaaaattgtgaaaaataattggaaaccgaacataatttacatttcttatttggacacatccatcgagttagagagagagagagagaaagtgctgcttaatcgaacataaagctttaatggattattactgtttctcttaattggcatgcttgaatgggccaaaaaagaggtggagagaaggagagaaaggcactttaataagtaagttgtcgtttaagaaggtggtcatcccccaccacccatttgacgtcgtctttcgttttcaataattttttctttttaagcggataaattttcgagagtgaaatttaaaaacggcgctttataagacatggaaattgatggaggaatgagtgagggtgggagggagaacgcttgaaaatgatatagagggaaatttaatcaaaatttggtgtgcctttccgctttcatctctccgtcgtccgtcgcccccccccccctcgaaatgcacccaaaatttcatcactttttttttgcgaacccaacattcattcatttctccattatgtaatttcgaagccgttttaaaaatttagtccgtgaaaagccatcccttctcccaatccaattctcgaggcttaaaaccctctttcattcagtgagtgagttgagtgtcttgaaaagtgagaacggaaatatctgtggcgaaaagattagtagctgtaaatgacatcaaaaatgttttattagtatttttgctttgattgcccctgggggcatttttgccgaccgatgggacggacccctcccgtgtccccttaagtctcccccctcctcactccccgctcattcggtggtgcatttgatggcgtttgaaaggacaaagagtttcggtggcactttcagcgccgctgtcactggcacagagccgctgacccgtacggcggccgctgcaacagcgggcgccaccaccgacatgttcttccacgcgacgctggcgcgcactttcatttccgcgctgcgcgttcgcggtagcaaaaattgattttaaaaacaacggaaaatgcgtcatcatgccctttccaggcgacgacgatgtggtggaccgtctcaactactactacacgccgatcatgttggccatcgcgtgccttgtcgtgtccgccaagcag

SEQ ID NO: 871 - DNA, 3135 bp, Heterodera glycines
  unsure (1)..(3135): unsure at all n locations
tcggcacacggtctctctctctttctctacccgctccctttccccgcccccttttgtacattttgctcttcaggtgttcgctttcttttggctttggtactgtctgcttttatgtgccacaacgtatgttttttatggggaatgaacgcggcttcttttccaaataaaaaggagaagtattccaaaacttttcttctcactccgtaaattgtgggggatataaaaagttggaaaaagctaattaatgacagggatggtccccggaattcggtgaggagggattaattaccgctagtgatgctcgaggtttcggtctcgagcatcactaattaccccctccccctccatctgctgaactcacagcaacacttggtaattaagctgttccgccctgttttggctcagcaacattctgttgcacatcgcccgggtggactacgtgctgaagtttatgcaaattgctgaacacagtgaacaacagcgaagcagcggcagaacgccaaaactatcgcaacaaaagtgggcgatggtggaggagggcgaaatgccacaattcaccaaaagaccatttcgggtgccgagtgcgcattcggtggacaaatttgtggacgaattcctcaaatcggacggggtaaaactattggaattgagcagagaatgccatttaaataacatggaaggagtgcatttttccaaaaattccaaaaatatatgaaaatttttcatactttgtcatggatcgtaattgtatgatacggtggtattacagtaggattgtccagttttttctacaatttttgctcaacacccttacaaattcagctgttcattctccgattggtggccacaaatgcgggcgaattggtcgtcgttgacattgtcaagtgcctttggaggttcgaaattcggagaatttgggtcaaattattattagcgatcggaatttgtgcccagccggcgccggatttattatttatgtttatgatttgccaaaaccggacggtttcggctacaaatacccggtggtgcctgatatcgcatttctgttcctttttaaaaatggcattcattgaaattcgcgcttttcagagagttttcttcccgtcagtttcatattcgtccgttggtctatgaaaacgaactgagcgaagaacggaggcgcgaggatgaagacagtcaccacagccttctgctgaatgtgtacagcagcagagggaacggaccgacccatcaacagcagcagaggaagcaaagccaacaacttcggttggtggtccaaaatatttggaaaacgaaattcgaacttttgtcagatattccactaatggcaacagcctcggccttccactcccgacaatgtctcggccgccttctgtggtcgcattggacgattctgtcggcacaccgtcgcccgtctgatgaggaggagaaagaagcaaatggccgaagacattctcaacgaatggatgcgatgccatcagattaagaacaacattattattttaatgcgaccttttcacattttgtacataaatgtaattaaatacaatgtcagtcaaattgttaaagataataatttcaatttgaatataaagtgattggttgtctttagggtttccattttaagcaaaattatagtccgatgaggaacagggaatcacacagttcatgggcaaatgaaagtaaagcttttaactagagtagagcggggacaaatgagtacctaggtcccggtattgcccaaaattcccggttcgctctactctacttttaactgagaatttatccaaaaaaagaaaattctaaaatttatttttgcagtgcgccttttcaaaaaaacattggaaaattttctctcacaaccctgtgtttgtcccactgactaagcttttcactgatttaatgacctttatccaaaaaatgtgcaaatggtttctttaacaatagtcaacaaaaaacatttaacgtcagagtctttcaaatcattgactgaagagtttcaatcttagccctaagaacgtcactctcagccctaaggcttacattctcatcacgaaggccggcattctcagcccgaacggcgacgttttgatcacgaaggcttatcttctcatcacgaaggccggcattctccgccaaaagactgacattctccgcccgcagactgacattctccgcccgcagactgacatgctccgccaaaagactgacattctcatcacgaagaccgacattcagcgcccgaaggccggcattctcaccccgaacggcgacgttttggttctgactgtcggtcctatcaatcgccaactgattaaaggtagcaaaggtttcatagagtgcgaacagaacttaatgaagattcaaattattagtataattaatagacagtgtttacgactaacactgcgaagtcttgttaatttgggtggcatttgcgttttctagcaggttgagaattcttccaaactgaatctcgaaatgtcctgcatttggagcttgactgtcttcgtggtgaggaaatccatagttgtatgccacctcaaaaaatgaagcgatcactaaagggaatttagtcggtaagcgttaatttaagatagacaaatgaacttacaattgcgcaattgtccgaggtggactggaagcatgtgtgccgccaaatttcccaaaagttccttcgccttggccaagtcgacccgtgctttctaaaagaaaataatttcgtctttaatattaataatctatttttccacccatttttgttttcgaatccaaattcgttgcctttccaatacaaaatagtcaaagtcaaaggaaacccgagttttcgcccaacagatgtcaaaacgaagtgaattgaccacttcagacaaattttctgggggcagggcaattccttttttcataatttggattctgaagcataaaatagtaattgtacaaatatttaaccaaatggatgatggcatttgttgggcagtgaccagtggatgacccgcgagttacgtacaataatcgtcaactaacaattgattgcttgcctctgancgggggaggacccaccagaagtgtgcgaggtacgcactcctcgcctccacccgcccctgntaacttttatctcctcattaaatttgt

SEQ ID NO: 872 - DNA, 1538 bp, Heterodera glycines
  unsure (1)..(1538): unsure at all n locations
ttcattaaaattgttagcgtaaaaaaggtcaagttcatattcagagcacatgtcgttgtctctcagctcattactttgatatagacagcgtccgccattttaattgtgtgaaatttgtttggcagcgattgttgaactctgaagaaaaggcaaatcagtttcagtgtttaaattgttgtcattcagaagcgtagccaagcagcggagggatacgaaacatttttaccccccccccccccacccctcactccagggaggggatacgcgtggtataagccctttccccaggaaggaaaatccgccgtacggtcatcgcacatacattaatttcatagtaaccaaaaaagacaaaccaaaaaaaagattccgaacgtgtcgtcaaagtcgtccaatgcgcacaaacgtaaaaactttttgaaaacaataaacgctaaaatctgtacgtgaacgatcaaatctaaaattacaaagaaatgagagatgccaggaattaaaactagtagaattaagtcagagaaaaaaaattcgattagccaccctttaaacttctgtagactttaaacattcaattgataccaagaaggtagaactatatgaaaaattcttgacagtagcagagaatgttcttcattttttagttgaacgaaatcacaaaaatgtcataaaaattaaagaacaaatagtaattaattttctgttttttttcaactttatctctcattttttggttgaatacataagatgtattagtcaatttgcattacgcatttttttttttatcatttcgccatgaaaaaataaaattcaaatgatgccaggacgaattcatgccaaaaccggacggtttcggctacaaatacccggtggtgcctgatatcgcatttctgttcctttttaaaaatggcattcattgaaattcgcgcttttcagagagttttcttcccgtcagtttcatattcgtccgttggtctatgaaaacgaactgagcgaagaacggaggcgcgaggatgaagacagtcaccacagccttctgctgaatgtgtacagcagcagagggaacggaccgacccatcaacagcagcagaggaagcaaagccaacaacttcggttggtggtccaaaatatttggaaaacgaaattcgaacttttgtcagatattccactaatggcaacagcctcggccttccactcccgacaatgtctcggccgccttctgtggtcgcattggacgattctgtcggcacaccgtcgcccgtctgatgaggaggagaaagaagcaaatggccgaagacattctcaacgaatggatgcgatgccatcagattaagaacaacattattattttaatgcgaccttttcacattttgtacataaatgtaattaaatacaatgtcagtcaaattgttaaagataataatttcaatttgaatataaagtgattggttgtctttagggtttccattttanagcaaattatagtccgatgaggaacagggaatcacacagttcatgggcaaatgaaagtaaagcttttaact

SEQ ID NO: 873 - DNA, 3348 bp, Heterodera glycines
  unsure (1)..(3348): unsure at all n locations
aaaaaatgataaacatgtatcaattaaaaaaataataaggaatcatattttgtcgataggaaaccaatgagtatacaaaaagaaaattttaaaaaatttaattcctgcagagggattgaaccaagggaaaaaagaaggaaaagtcaaggatagtagccactaggccatttgcaaaactgtgaatatattaattttttttttaattttttcctttaactccaagtttcgttcctaatttttcactcagccccccattcttaccagtgcttgtttttcccggttgccctaccgggaccgggacctgagcttttcaaaatccgggacctctgaggaccgggaatttccatcccggtcccggcgcactctacttaggggtgtattttttggttatattgcatttttgctaataaattctccgaaaaaatgtcgaatagtgaaaaaatagtaacaaaacgccaaaatagtgatttttagtgaccgatagtgacaacataatcgaaaaatttcaacggagaaatgtgttttttgagttcctttcttcaaaacaatttaaaacctaaaaattgcgaccctaattatgataccgccgggatttacgatttttcataaatatatgtacctaataataaaaaataggcaaaacgccctttcttttaggggtcttatcaacccgcgacttcagaaaaattctaatctttcattaaaaatatattttttccccaaaaattttaatatatgaaaaacttgggtttttaaaatttttactggtgatttctgacactttggcctactatctctttatatttaatagaattaaagttcaatgataccataattgttcagtttaattagggatgaaacgagttatggctgatcatcaaaataagcaatacacaaaacgcccataatttttgaattaacgctcaaaacattgccaatttttaatttttgaattaacgctcagaacatgccaattttggcactgggcttgtgacccattgccattgtgcctagtggaactggcataataattgttgaatttctttatcaccatttatttgtcatttatttagacttaacttttttattcaccgattggctgatcagcaatttattatggctttattatttactcgattgatcagaaatgtaattcttgttattgtgttttttaatgtcgtaagtttgcaaaaccattttatcttttgtttattaatatttttaggtttcctattatctccgctggaaatcttacaacatcgctgctcgggacttcaagaccgcttcggttaactctgcgagtaagttctgtctgttctcattttcatgttatttcgtttctttataaggtaacaatgcgctttcggcggtgtctaagtttcagtctgaactgaaacgcatcacaaagggacaatcggtttccagtgattcgacctgggtctgcatttattgcttattccgattggtctgtctttcatttgcttccttttcagattccactttctgttggaggattgcatttgcgtcttcagatcgcttatgccacactgttcgaagcgtaagtatttccattttcttgtttttgaatgtacttcgattttcctcacagtgtcactttattggtcgctccgtcgccgaccgtcggtcgttcgggcatccactgggccaattcgacttgtactgtgttagtgggggaagtcgtgcgccattccgatgcctacagcggactggtgaaagagacgttcacttcaggtttgtgtctttgttcatccatttttttacattgtggcaatagtcccttattatttttgttatatttttagcccaaaacttccgtcacggtcaatttgagagttacgtctacgagttcaaggagggcactcatgtcgtttgctactggcgtgggttcatccccgccagcggtttgtccgctttggtcggtgccgttgcttccggcgatttgctcggcgccgctcgtcttgtcttttcttattctaaggtccttcattattgcttttgtttaccaatattttttctttttttaggtgacctttgaaaacacctccgttttcttcgtggacactttcaatcacctcaaaaacaaagcgatgaagatggagttgtgagtgttcggatttcgacgttgtcacttctctttcatgtccgattcattttcgactcatcgcctcgctaacaaacgaaatcactttggcattaattcgatcattgggcttttgacttcccctttttatcaattgcacacctaactaaattgtaacagtacaactgacagtagtgcagaaatcaatttaaagaaatttaaaagggacatcttttggttgttttggattttcatttgttttttttattcttaaaagggttttgatcagcatttatttaattctgcccaactgcccgtttcctttggctcattgacattttttgtcattccaaatttgtattttagctcatcattaattatttattcgtacaatccatttttcaatctgttaaagaattcgtaataatgctcagttttaattggtaatattaactcctgaaaattatttcttagcaagtgattaaaatgccaaccgttattttattaataatttcccttttcgttacatttaattaattattttggttcggatggtttctgtggtcgctgggagagtgcatcttttgccgcgtgagttccataacatttgctaaattttaaagccaggaaaatgtagggctgctgcttcccccaccttttggtttcaacgaacacctaaattattaaataaaaaggtatcccattaggcaccgcctcttttggcaaatcgtttctttcatcggatgcgactaaaaagcctgataagacttcctttggcaatttgaacgactctgatcggattttcactaatctttacggtcgacatgactatcgcctcaaaggcgctttggcgagggtaattaattaatcagaaaattctatcgatcggcatttgccagatcattttaattaaaaaataaattttgtgatcttcagggcgattggttcaaaacaaaggaaattattctgaagggtcccaaatggattctcggcgaaattagcacttccgggctgcgcggccgaggcggggccggctttcccagcggaatgaagtggggcttcatgggtaaaccgttcgacggtcggcccaaatatttggtggtcaatgcagacgaggtacaccttcctttttacttttcatttgtcaatttccttttctttcagggcgagcccggcacatgcaaagatagagagataatggtacataaattagtttgatttcgatgnttattatttcataagtaaaa

SEQ ID NO: 874 - DNA, 6573 bp, Heterodera glycines
  unsure (1)..(6573): unsure at all n locations
agtcttgtaaaggtcaaattttgaaactgtttccgatggcgatgccgatagaggctaacttcttaagtagtagttagtaaattgagttttcaaaaaacccatcttttccctttcatctttacttctctcccattttcattattgttatttctttagagacacgaccctcacaaattgatcgaaggttgtcttatcgcgggcgttgcaatgggcgcgagagccgcttacatttacatccgaggcgaattttacaacgaggcgtgcattctgcaagaatcaattcacgaagcttacaaagtgagtgcttttgacgaatttctgattttgacttattaaatgagaatgattgtggggaaagttgtttttcttcaggcgggttacattggaaaggactgtcttggcaccggctacaacttcgacattttcgtactaactcatatttcagttccatcaattttcttttttctttcctttggcaggtccatcgcggagcgggcgcttatatctgtggggaggaaacggtagaagaagaagaagaagaaatagcgaagaattaaactcggaattggtccgtttccaggcactcattgagtcgttggaagggaagcagggaaagccccggctgaagccgccatttcccgcggacatcggattgttcggctgtcctacgaccgtaacaaatgtaagcattgagaaagtgtgcgttttcatccttcggatcagaaaatctgtcttttggtaataaaaagcgctgtttttagtattttctccagttttttccttttcattctgtgccttttccttattgttaggttgaaactgtcgctgttgctcccgcaatttgtcgccgcggtggcgcatggtttgccagttttggcagggaaagaaaccgcgggacaaaggtaagaaaaaagtaaaataaatttcatatgaaatacttaaatttgccccgctcagttgtattgcatctccggccatgtcaatgatccgaccaccgttgaggaggaaatgtccatcccattgcgcgatttgatcgaaaggcacagtggtggagtgatcggtggttgggacaaccttttggccatcattcctggcggttcatctgtcccattgttaccgaagaggtgtttatttggcattccgacaatggccctaaagattcgtcttttagcatttgtgacgatgttctaatggatttcgatgcgcttgtccaagtgaattcggggcttggcacagcggcggtcattgttatgaacaaacaggttcaccgatacccttgaacacaatgccgcctcttcaagtctattgcactcgtcgaattaaattttaaaaaaacagggacaaaggaaaatcggaaaatttaagaacttttattttaaggcctttaaaaatcttcatagaatttttgtgagaaattcatgctaaacgaactgccctaaattgcgagtattgttccattcccatttcagtgtgacgttgtcaaatgcattgcgcgtcttgccgagttttacaaacacgaaagttgtggacagtgcacgccttgccgggaggggtgcaattggctgaacaaaataatgtggcgcttcgtccagggcaaaggagtgcccagcgaaattgacatgctgtgggaactgacaaagcaaatagaggggcacaccatttgcgctttgggagacgcagctgcttggccagtacaggtcaaaaaaaattttactgtaaatttcgccaaaaagttggtggtaattttatttttataattacctgaatgggaaaaacatcaacggattttggtggttttcaaaatttttataattttattttatttttagaattactgtattacaatatgatgtattttccgggtgtcagattttttcacgagagggggagaagggtctttttaatttatttttgtgttcttaatgaatttcttaatttagggactgatccgacattttcgtcctgaattggagaggcgcatggcgaaatatgcggagagtcatcccgaaataaaggaaactttagcgaccgcataaaaacctttgttcatttgcttggattaggtgaatttttgctatgtttgtacagagtaaaaaatgatggataggctcataaataattatttattcgcttaattagttgttccgttttaattaatgaactcattgcgcaattggtttcggcacattaagctcaaattggccgcttcgatttgagttccccgcgggcctataaaatgctatgaccacaacttttttgactgcttcttctgagtgtccatttgtaattttctcgtccttttccatctgttgtgggaatgaacgcattgtcgaccgaccgactccgacctttggcgaaagggactgactttagaattgcccaaatgcattttttaccattgcaaaaagaatacctctctggtcgatttccatacgatttgtgtgaagtaattagtccctttatttttgtaatcgtttttcaattattttccatcaaattaccttcttgccagcctgnggagtcgtattcgtactttctgttctccgcgtaccaatagtcgaccatttcgcgggcgcatttcccctcggggaaaacagttacattttcacccactccttgattgttgtctgacagtgccattccttcccaactgcccatttattaccgctcatttcggcaaatgacacatggccttgccatgcgattcggtccgcccattctttggccatttcgctgagttcctcgcagagcgtcaattcggggcatccgtgcttaaaaaatagtgtgggtgaatgtgcggggactctccctttatggtcaccaatttgcgcagttcattgtgccgttccacgaattcctttgtgaattccctcccaaattccctttcattttccattttggcattggttttgtccgaattatgggaaggcgaaaggggacgaaagaacggaacggaggaggaggaaaaggacataaaaacactaaaaaaacaaaggaaaattgggggaagaatggggtttttgaaggacgaaaatgaggaaaagacgaaagaacggacagagggaggaaaagcaagtgacgtgaagaaaggaaagaagaaaacaagacggcgggagtatcgaattgaaagcattgggcggagggggaaattggcacggcactcgccccccccccctccatctccaatttgtggacactctccgctttcgagagtccacgggccatacaaatatggagcagttgggcccatgaataaattagctgccagcaaaagaatggaagaaaaaagtgacgagaaaaggtttctttcccataatgttcgccccccgcacttgggtatttatttatcaaaaccgataaaattaatgtaaatgtttgattgttcatcctccgattatgtatatcctgctcaaaaattgtacatttaaaatacacacacaaaaagagatcagaacacaaagcgttttctcaatggactgatcgactgaatgagggcgactgttggtgcgttctccgccgctgctcctcaaagcgtttctccatctcatccagcagtttgggggtgaagcggacgaccaatttgaccctgcctttggcactcttcagcaaacggaccgcagtttcgtggttctccctttcaacattctgaaggagacagagaatgaatgccaatggaatggtgaaaatgccaatggaaagagagtccttttttaccactccgttgacggctatcaattggtcgcctcgtttcaatccgccgtgaaggtcggccacgccgcctggaattgaaaaaagcatatttcggtcaaaagtgccattttaatgacccgggataatccgagaaacgtaaatgggcgagttttgctccttgccgcccatgacgttgaagccgagtccctggtcagtcttcggcagatcgatcacccgcggatgggccgaaccctcggcggcggaaaaaacggcgacctaaaaaaagccaccgtcatcagtgtacgagacaaaaagcaaaacgaaaaattcaccgtagacttggcagcggcattcgacagaaaagccttgggaaaattggcacagtaaaatttccgaatgattaatcagcatttttcccccataaaatggtttaaaacactttgtcctttttcaccgtttcttccgaacgttcggcagcactttgttgttgtgcgtagacaaattcatacacatttttgaccgcattgaaaaagggcgattggatattttgctgaaggcgcaccaaattgggcatttccctgccgcttttctgcagaatccgtccaatcagttcagtcatccgatgcaaatctgacggcgaatttcattttgcctaagggcaaaaaggacgactcaccacgctcgatggacaattcggcacgatcattaatgaattcaccattggccatcggatggagagaatttatttattaaaattagggttgagcgggaccgggacctgaatacggacaactgagtaccgaagtcacggttttgaccgggactagtcccggttttttcccggttttcccagccaaaaattcccggtttttcaacccgaaaaggtcccggtcccgtatttgcccaaaattcccggtcccgctcaactctatttaaaattagagagagaaaagaaagacggcgcggtttggaaaaagccaaagaaataaaataaaaacaaataaaaaaaatttttcttttgtataacaatgcacgattttaatgactgactaagcggcggaatttacaataattttgtaaatttaaatacataattcactaaaattctgttggcggttaaaaaaggaatcacaaagagaattaaatgcaaaaagaaataaattaatcggactcatcgtacaaaaggagaggaaatgaggaggaggaaaaatgggacatttgcgaaacgaaaaagaaattcagcggacaattcacaattcgtcgtgtcggaactcttttctgaatccgtcgatctcccaaatgctggaggaatatctgccaaagctttggaacagagcgaccaaatcatttctaaacggaaaatggcaaatttacttcattaattgtgaatgaatttgccaaatctaataaatattaataatgttattttaatgttttttatgtcgccatttatgactcaaaatcagaatttgaagctcttttgggcataggcacaaaagccggaggcgtaaatttaatgcaaaccgaaagccgaagccatggtggaagtcgatttttgaacgaaaataaggaaaaatttgtggaagagggaaaaagatcaaatccatcggcccctgaatcagttgatcccttatcgtttttaattccttttcttcaccttgtcaatttgaaaagtccgccgttcgctgcactttctccgttttccgtttgctctttccttccgttcgctttccctccgtttccgttccgcggaaggtccgaaaagagcactttcagtgccgttcccattccgtgcgtttgcaatttgccccaaagtcggcacttgtcgcagccgacacagtccataatacgcgaaatgttccaaaagtgctggcgaaactcttccttcagcagacgggcgtgggactcttggaaattctgaaagaaagacgcatttgaagtcaaatccgattgggaaaagggcaaaaaaggaaataaaaaatgaatgaaaatgggccaatgcctaccgagaaaagttgagtctcgtcgaattggttggggaactctttgagcacggcgaggaagtgttccaaggattgctgcgtttctcggtcttcctgacaattacgagttttggtattattttgtttatgcgttcctttggcccagaaatggtcccgggattggcttgagtggacacgtgtccctaatgccccctttccctcttcgttttgcccttcccaattgtgcccacaattcattattcacctgctcgttgcccgtgtagaacagttgactttttcggatgtacggcgtcgctttgaccaatgccctcagttccttcgcatttccattcattttctcattttccaatgatttttgggccaccactcaccagcatgtaagtgaagtacaaattcctcaaccgttcgggcccttctttgccccatttcgtaccgaagcgattttcaaaaaactagaaaaatcaagcgatgtcagcattaattaaaatttgttttacttcaacatttcggtaccaagtgccggtgccgaaaccgccgggggctaaaaggaaaattaagataatgcaaaaataagtctctggaaagcggataatacccggtctgtaattgtgggccgcaatcgaaacggtaatggccgagtgaaggccggagatgagccgatagaacactctcttctccaaacacatccctaaaggacaaaggcaatgaattgcgatgtttaattggtggcaattgcaaaaataaacccgttggcgtcggttggaggagaaactttttgtcgaatttcgggtcgggtcttaagaaaaaacaaagtgtcataatgccaaagggggtggacgacttgaaacagttctcgttgtaaatgcactcccaaactttg

SEQ ID NO: 875 - DNA, 8168 bp, Heterodera glycines
  unsure (1)..(8168): unsure at all n locations
tggagtgagataaagcagcggacgatgcttatcacctctccttcgatacttttatctgtacgcatttgtacaaaaaaactttttaaaaatgcactttaaaattctgacaattggggcattaaataagaatgttgtcaataatttttcgatttgagaattttttgtccattttccctctactgttaaaaattgaaaaaatgccaatttaccttcgacttcgcaaaatttgttgctgttgtcctcaaacatgtccaattcgcgcagttgcgctctgtcaaattcacttagcgaatcgtccagcgggtcgaatttgttactttcacttccaccgcacgaatcattcgaatttgactgaaaggaaaaagaaataaattttgtggaaaggaaaacaaaaagaatgacaccaaattttaaggcattttgtggttgaaaaaggcatcttaaaacaaaattgaacagaacaaaaccattaaaatccaaatttgatgtaatttcaaaaaacgaaggcccaccgtacggacatttccatcggcggaggtggaaaaatttgcggaacgaaccgccgacaatggcgcgatgggctcctttagcgccggtggcacttcgtcgtcgcaatatccgatggaacattctttggaggagcattggcccgcttcgtcttcccaaaacggacacggcttggccatatttacctgaatatgaggggacaatttgagggaaaatggtcagaaattgggacttttggaggacggaccttgtagaatttgaaaggctccttttgcaaaatgttctgcaaagccgggtaaatcttcgcgttgttaaacacatcgattgaattcgagtcgcacgcgcaactgtcaatcgcttcgccgactttgcaaaagcaaaatctgtggggcgagtcgaactgacaattgacgaaatgaacgaaggaaagaaacaccaaaagggaactgagaaagagtaaaaaacgaagacaaaacgcggattttggcacagaacgaataatcatccaattgttgtcagaaaaaaataaaattaatctgctcaattaccaaaattaacaactttatttaattaaacgtaaaaatttgattaaaaatttagagaatgatttcacgcatttcaatttgaaatttgtttagctgggcatgagagagggcacccgtccacgtgcactaatccgaaagcaaaaccaaaacagctgcgcttacgacgacgacgacacgacggcagagaacactcattctcattgtcagtaccacaattcgtcgtggcttttggcaaaatgtttttttttatttaaataattaaatgataaaatttacactcttacggtaattttgtctttctcaaaataaaaaacataatttttattcgatttgcttttaaatatttctcctcattaattaatgatctgattaacaattgaatttgtcctctggcggcttcaaattaatataattaattacaataattaattacacatctcttcttttgctcttccttctctttgtcagggaatggaaggtgagtcggttgttgacgatcgcgagaccgaacgtgagcacggggagaccaaagttctgctaaacggcgcaactcacaaatgataaattaaattaccaatccaaaagtcgcgagtcaatttcggcgattaaacggcgcatttcgtcggtttcatgctgaaaatagttaataatttccttaaatttgaaatgttaattttcttcccaactgttttggccattttccgcgtgtacatataaggcaccaccaatccccggggctctcccctcggcgtttttgccgcttcaaaaaatgtccatcttcgcctgtccgagtgctgctcccattgtccactggcgggctaaagcaaaaaaattttaaaatgccaccaaaaaaagagaaaataaaacaattggagtcgaatggacggagcagtgagtgtgggaggaggaagaaggagaagcggagagagaagcagtcactcgctgcacattctgctgacaatggctggtcaaaaagctgagaaatttgcaaaaaaaaggcaaaaagtgactcattcatttgggacgaaccgacggacgaagggggcgccgacggtggcggaggaactgacagtgagcgcaacgggcgaagaagtgagggaggaggaagcgatggccaagcggacattctgccgacggcgaaggatgggaaaatggcaaacatattaatttcgtgtttataaacccttttcggtgctattcactcacttttgcggatgagtcggccgattcgtttgatccgtcccttcccatcgaatttccctcctcccgactccgtcgtcccattgggctttgctctgtcggatgtcgcacgaatgaattctgctcagatgactcggtcaaagtttccttggtggaccactctttcattcactgtccttggtaccgtgctgtcccttggtttccgcccacctcctcgaccagttcatttgcggtttggttgagcagcgaatggtccgtcggttggtagcgaaatccatggacacagcaaaagtccgtttgagtggactttgagtactgaatccgcccatttatccatcatttatggcttattttttggcatttgcctggttcatccgcatttgaagcctccgaaggatcgcttctctccgcctccgtccgaatggaaacagtttaatcactcggcgcaaattgccttccgacagggcgatgttcggccattgtcgtgccgcgcactgggccttcccagcagacatccgtcgattgttctgtttgaattgcttttgttgtggcgcgtcgtccccgggcgccgtctcccccaaatccgtcgattgatctgaacactttcactgatcagcagccgtttccgtttcaacaaatgactccattaaccgtcaattacgtaattacccccctccctttttctgtgtcccgccatttccccccccccccccccccccctctatttccatttccattttattctgttcccatttgtctctgtcccccctttactccttcgttgccttctccgctgccaaactttccacaggtcgaccatgctcatcttcggcttcatcgttgcggttatttcttccaccgttggtccgcctgcctccacatattcttccatcatcgtcagcaaaagttcctcgaataattcctccaatttcaattgaatgacattgatgcacattgaaacctatttgggagcgggggagaaggaaatgggtttaagaaggccaaaaagggaaatggccgaaaagcggtggaaattcaagagtctcgagcaggaaaaaatggcggagaccagggaaagtccgacaatgatgaagccgaaaatgatgaacatatcctcggaatttgtgggggtcacatcgcctgaaacattcgctgataaaacgcatttaaaaagaaacattttgaaaagtaaattttaaaatgcgcaaaagtaccgtatccgatggtggtcaatgagcaaaagaaaaaataaaagctcttaaagtagtcccaatccttctcgaatttgaggaaaatggccgcacaaagaaactgagaaattaaaacataaaatgaaaaaggaggtaaaaatgacggaccatccaagcgaaggccacgccgatggcctaaaggggaagggacaccgatcagtgatcagctggggaatggaggaattctgatcagtgatcagctatgttgacttcaaccaatgatcattttgggtggatgactttaattgcaggtctgttcgaggaactccgaacagtgagaagctgataaattcaatggcttggaaccgaccaaaagcacgggcattcggcccgtcccgcgcacttttcccttcagcttttccgcgtccttaacacagctgacaaattccatgaaccaaatcaatttgttccaaaagtgttcgaaacagagcaaaaagaaacggcccaatttgtgcagaaccataaaagtcattctttaaggggaaatttcaaattgagacgaaatgagagacaaatggcattttacggaattccaatggcggcataaacctaaataaagggaggggacaaacaattcgagaattacagcaaattagtttcataaaattcataaaacgcaccatggcggccaattttcccaaattggtttttggcgtaatgttaccgtacccaatggttgagtaagtggttactgtaagaaggaggaaaggaatttgtgccatttttggcccaccgaccggccaaaaacatcgaattccaaaaggtccaactgggcgccaatgtgtgccgaagtccgacgaactcgttgaactcgcggatgctctttgtcagtttcgtctttttgtgatccgtcgagttcagttccacgcccaactcccaacaccgttcagccaactgaaaatgccaataattcgaaaccattcggtgctcacctgttcagtgtaatttttcagcgccacaattcttccaatgcttgacttggaagggctcaattggaaatgcgaccgccagtggcgctccgggttttttggatgaagcagagaggactttggaataaataatgaatgattgttggaaattaatcagtgatttatcagcagtgactctgacttaagtgctttatcaccttatatgtctgctgatctgaaaattgaacaagcaaagaatgagagacggattcaatcaacaaataccggtcaagaagtacaccagcagcacataccaataaatggtctgaaaatcatttctattccatccaattcatcccccaattgcccattttttctcacttttctgatccgattcatggcaaattgcttgtatttgcgcatctctttctttagcgtctgattagaaattaattaatcggataaaaatgttttaaataggcggacaaaaagcaccgaaatgctcgcgaatgtctccaatcggtccctattctgagaattggccaaattgtaatggccagtcatctcgcgaatgcgttgttcgaccagcagtacctcggccaaaatttgaatctctgtgaaacaaaatggtttacttcggctaataaatagttaattagtctgtctcatttggcactctttccaattgacttcccctcacttccgctgctcaccttctctgtcgaccatctccttcttacgtatcaacatgttctgttccgctggatgttcaattgtatagaaaatggccccgccaagaaaagagtaaatgacaaggacgagaattggcaaaaggtaatggacccgggacttttcgtaaatactctttgaaagtggaaagggaaaaaggcggagattagtggggacaacggactgatcagcggagaatgaattagtaaattgtctggctattgcgtttcgattggtccgtctaattcagccgatcagatttcgcaattcgccacttttctgatggtctgtgaatcactgaccagcaacacttcggtcactcgttggaaacgtgtcttctcctttttgatcaaagacttttggacaaaaaatgccgaaggttttcgtgacgatggtccaataaaaagggaagtctttcgagaagaagcaatgttagcggaggaaacgggcaaattgtagcgaaagccattcccgaaaggcaccaaattgacgccgagaaaagtcagcccttaagaaagtgagggaaattagcacggacagcagcccacagaccatcggggccaatcatttgagtggcctaaaagaaaagaggaacaaatggaacaacggacggacgcaaaaagtcaattccgaatcccgatcccagactttttcaaaaatccattctctaaaatagacagtcacttcggaaggacctgttcaaaagagcaggtagaaacacgcgaactaaacaaacagaataagtgatcgcctttttttggggggggggggggggagaaggaccctgcgacgcaattcattggttagcatcaaagcggcggacttgcggcgaaggcgcggcccgaaaaccgaattggcagccgattgcatcatttgctgacggatttcattgactgattaaccaaaaagcataaaagacaaatcaattggcacatgcacaaattcgcaaatttaaagggccccgagaaaataggacggtcggcgggtggagggacggaggcattggccaagtgccgaaacgctctttcttggcttttccctccgctcgttggccacatgggccttttcaatgctatccctttctttaacagattcgattcattgtcctgagataatcaaattaaatatctcccatttaaacacttttattcgaaatgcctgccaaatgcgagcaaatgaccaaaacgaaaattcaataatctttttgtgatctctttttcaaagactcgtgaaccgataccgagaatgacccccgatagttgagaccgatgaattcacatggattatctttatccagcatggaaatgttaatgataaatcattttatgctcaaattcttagcccggcatttgactgatttttttgaggcaaatacttagtttttcttctcgagtttgttccggtatcagcttaggcttacttcagcttaggcttaggcctaggcttaagcttaggcttaggcctataaccgtgttcagcaaactcgaaatctgtcttatgttctttttatagtgcggtcacctgagtcccagctgagtttggcactctaattccggcacttttcagcctgaaaaagggcaagcgcgcccctaattaaatctttacaacccatttttaacctttttacatcgattctgacgtttttaagcaattttgagtatggtgactatgatcaatatttaccttaatttaatccatatcggtttacagctgcattaaacaaaatgctcgatacagagtttcattattagggctcggatttatagttgctaaaaactgccaaaataattagtttttagtttctaaaaatccctcaaaatagttgctaaaaatgggtaaatagttgcaaaaaagtttcaaatttaggggtgtaaaatcgaaaattttattcaaaagtcaacaaatattaatccaaatcattattgaaattcacattgcaaataagtagcatttcaagatgttcgggagatagacatgagcgattgtcagtcaaaatagatttgtaaattgaaaatgatcgttcaacatcacatgaagtcaggggggcgtatttgtaaagtgaaatcagattgggaggcataccgaaattgattttatgaccagatagaatttttccaatatcacaaattgtatcaaatcccggggtttttgcaatgacagcatcgaatttccggcggattttcgctccaatttctcccgttgacgaaaagacagcttcgcggacttcacacagaatgttggcacattcgtgtatcgtaagcncctccttctccaaacgagtaattgctccggggagagaaccaaaattggccgcaatgtaggcaatgtcaaggggcactgttgtcatcgaaaagcatctttgagatttggcaatacactgggcctcctcagggtcaaatgaatcaacgacctgaaactttaaaaaaaaattaattaaaccaattcattcacttctttaatggcttcgaaattgtgagagtaaaagttgacggcatcaagccaagtgccccatcgtgtgataatgggtttgggaaccagaggaactgtaggtaatttctttctgtagaaagcaacacgtgacggtgctttgcgaaacaccattttggtagaagaaattaattcgtcgacgtctttagccatacagcgtccatttctgtctgtcgtttcgtcaaccgaacaccaaacgaatccattttcgccaatgtcgtccttgatttttgacaaaacctaaaggaaaaaaattggtcaatcaaaaaatttcaaattttaccccttcaaaacaatttttcacataattgtttctgagggtcgtacaatgcggaatggatcttccgcaatatttctccaaaaaagccttgaatgaaggattgttgaccttaaaaaaaattaaattgttaaaaatgaatatattattcactttacaaagaggaatattcgctgaaagcagcattgaacacaattcagcagcaaatttatcaacaacaaaaggaggactgatcaatggttgcttttgttttgacgacanaaaa

SEQ ID NO: 876 - DNA, 6961 bp, Heterodera glycines
ccaacaaagcgcagcgaatcgcaaactgaacatcagcagcagaacaactgaacagcgcaaagcccacggcaaacaacccacaatggcaagcctaatccaaaagggcatcacattcacactcaaggcgctggatagtgccagaacgaccacggcactttcactacatccagacgccgacctctcaaactgggaatacgcagtcaaattggagactcaatgcactcgcgtgaacagagaagtccaaacaatggaagcacaactggacaatctgcgcaacctctccaacaattggattgacctgctaaaccgcctcgaaggagcagaaaaagacaaaggcgaaaaggaatacgtgaaattcgacacgcatgagaaaattgccgaacgccatgacgcggctacaaccaaactccgggatctgggggatctcgaagcaatgctcagtgccgatgccaaactgtaccgaggcagagcagaaagagaagcaagagcagatcaacaggcaaatccgccaccacaagcagcaacgccacctatggcagcaccgacattcacggcaccgctctatcaattccagccaatccagctggacaaattcttcggccaaaagcgaaaatggcccgaattctacgagtctttcaaatcagccatcggcagccaaacaatcagcaaagcacagaagctgaacttgctccgcaatcttctgggcggagaagcacgggaactcattgctgggttccgccttgaggaccaaactacgagacggtcctccagctgctgaaggacacttacggtgcacctgaagagcacatcagagcgctacactttgagctggctaatctcaagacgtgccgaagtctccgagacacaaaagactttctgcttcagctcgaacgactgacaagagagctgaacaatgccggagaggacatcgagggaccgcaggtgttcctcatgttggagaaaaagctgactccagcattcctacgcaacatcctcaacaaaaagggagaggatccggcaaattggacaacaacaaaattccgggacgttcttaacgaagcagttcgcaaggaagttcaaattcaagaggtgatgggtgagtacggacaccaccatcagccactcaatcggccagcaaggccgcaagcacaagcacatcaggttcagcgagcacgcatgccgacagcaaatttccggaacagaaatgcatctcccgccaatcgggaacgcactttcatgtcctcaacaattgaggaggttcagcaacgaatgaaccacagaccgcaactgcgaaagtcccaacagaggggatcaaggccaactcaagcgccttacaacgtgccaatccggaatggcacagcacaagcagggtcaaggaatccgccttcaccctgcatcttctgcaatggcactcactggaatgagaaatgccagaaactcagtaccgttcagcaacggtcagcctttgttcgagaaaagggcttatgctttaagtgcatgaaaacaaatcatcgggcaaacgaatgcccccgaccagcaaaatgctacaaatgcaaacggtcacacccaccagcactttgtcctgaaggtaacaactcaatgacacaacatgccgccgccgtcgttacagaacgaccccaaggcgaaagtgaatccacgaatcagacagcacaactgtgcaacgccatccaaagcaaggacacccgagcgctgttaatgacagcgaaggccacgatttacaatccggcacagccatgcctcagcatgatggcaacagtgttcatagacccgggaagccaccggtcattcgtctcatgcaacacagccaagcagttggaactgaccaaccttggaacggaagaatgcttcctcacaagctttggcgagcgagagccaaagagatacgtaagcgaccgcgtcgctattggctttttgtgtcccgacggggaccgattcatcttcaacctgaacgcactgaagttcttgttgaacaatttgccagtcttacaactcaatgaaatggacaacatgcagcttcaacagaagaagctttacataccacatgagtcaagacagcctgacgtcatgctgggtatggacgtgtggcacgaactgcaagtgcaacccgtcgaacgactgccaagcggcttcacgatttgtcaatcgaaaattggcaaaatcatcagcggatccgggcgcattgaactcagtcaaccgtccaacgtcacattcgtcgtcacagtgacggacgaaaatgtcttcaccacagaggaagacttgaaagccgacgatgaactcaacaagttctacggcttgaacatcatcggcatggacgattcatcaccaccgattgaccacgacgaagtcatgaaaaacttcaaacggaatttgtcgttcgtcaacgaccggtaccaaatcgcattgccgtggaatgacaaagtgacacagttgccaacgaattatcatcaggcgaaagcaaggctaataagcctcgtccgaaaactgcggacaatcaacttggtcgacgagtaccaagttattttggatgaacaactgcagaatggcatcattgaaagggctaacccagaccattcttgtggaccagtgcattatctgccacacagggcggtaattcgcacggacagagccacaacgaagattcggatcgtgatggatgcctcagcaaagcccaaatccactccatcggcaccatcactcaacgaatgcctgcacacgggtccgttactgctcaaggacttgacaggcattctgctccgcttccgtcaaatggaaaaagtcgtactggccgacattgaaaaagcattcctacaagtgggagtacgagagcaagacagagacgctacacgattcctttggttggcaaatccaaaggaggcaaacctcgaccaactcagaaaagaggacatccacattctccggttctgccgagttagcttcggcttgaccgtgtcgccatttcttctaaatgccacaatacgtgaacacatggcactctacgacacagatgtggcacaacggataagcaacaacctgtacgtggacaacatcatgatggaagtgaagccgggcgaaaacatccgagaaattgccacagaggcaaaaaacatttttgagtctgccgggatgcgaatccgtgaattctacgggagccacatcgaagagctaaaagagctcgactcctcagacttggccaacgaattggaagacactaaggtgttgggcatcaagtggaagccaaaatacgaccaactcgttttctccatgccacacttcgacagcccaatcaccaagcgaaacattctttcgcacattgccaaagtatatgacccactgggactcatttcaccggcacttctgccagcaaaacacttccttcaaatcgtccaaaacgcaaattacaaatgggacgacccgttggcagaggatttgaaattgatgtggctaaaactgatgcgtgcgtgggacggatttggattcaactcactcgtcgaattcccacgccacatcatcgctgggataagcgaagagttccattgcttttgtgatgcgagcaaatctggtctgggtatcgcgttgtaccaggtcgcagaaacgcattacaacaaaagggaaagcaatttgatcttcggcaaaagccacgtcaagccactcaaggtcgcggaccacgattcgaccatacccaaattggaactccaggcgctcactttgggagtcaaggctaccaagttcgtccaaacacagctcaactttgccgacagccaagtcattttgtggacggacagccaatgctcgattgagcggttgaaggaaaaccgcacccacgacagattcgtagtcaatcggctaaagaagataagagaggcaaacttcaaagtccgacacatccgaacagctgagaatccagcagacatcgcctcacgcggcacagacccgcaaagcctccaagcatcattgctttggcgatatgggccagcctggctcaccaagacacacaaatggccagaaacgaacgtcacttacactcccggagaagagacacgggaagagactgagccaccgatcgtcgagtggagtgcaacactccaagaagagcagaaattcagcccgtcaatccaatttgaaagattttcgaattggaaccggctcaaggcggcagccgcctatgccattcgtttcgctttggcacttcttcaaaaaagaaatgtcgttccggcgatcgattcacttctgtatcagcaagaaagacaagcggggctgctaacagcaaaggaattggaaaatgccgaaacatggattttgttggaaacccaacgtcttcactcgcccacagaaacagccacaaacaatttaaaattgtccagctcgagctccattgagccactgagatgccaggggcgattggaaaacgccgatctgccctacgaaagcaagcacccgacctttttaccaacagaagcctggaccaccaagctcatcgttatccactacgatcgggcgctgaaacactgcggcccacggacgcttctctcaaaactccgagaaaagtattggataccaaaaggccgacagacagtccaacacatcctcaactccaacaaattcggatgtttgaagtgcagacgggagagactcaagccatatgcttatccggacgctcctgacctgccaaaggagcgagtcacggaaacacgacccttcaatcataccggagttgactacttcggaccgctgaaagtcaagcaaggaaacacgactgtgaaagtgtatgtggcacttttcacatgcctcgtcatcagagcgattcatctcgaggtagccgaggactactcagctgaagcatttctgagagccttccggcgatttgctgcacggcgcggcattccaagtttgatgatgtccgaccaagggacaaatttcaccgccggcgccaaaacgatccaagaaaattggacaacgcaattgttcccaaatgaaatccgtggacaattggcacaccaaggagtcacatggctcttcaacacggcacacgcaccttggcgaggtggtgcctgggaacgacttgttggcataacaaaaaatgccttacgacgaagcatcggtcgaaatctcctcacgtgggaggaattctgcacactcaccgttgagattgaaacgatcgtcaattatcggccattgacattcgagtcggatcgtgaaccgagccccgtcattcgaccaatcgattttctgattccgtactggtctgcggaaacgaatttcccagtgattgacgtggatccagaggatcctgagtacacaccaactccaaacaaactgacggaaatgctgcataaaacggacaaaagactcacccgtttttgggatctgtggagatcagaatatctcctatcgctgcgcgaacggccaagtctaaaccaaaaccacggagcacacatgccccaagaaggggatgtggtgttggtcgaggaggatggcactcctcgatccgtctggacaatggccagaattcttaagcttcagaggggacgagacggggaaactcgttccgccctcattttgcttaatggaaaggaaaaatggagggcaacgaaccaacttttcccaatggaagttcaatccgaaattccagaaacccagctcatcgcattcatcatggacgtcgacatggattcagtctcactgcccggaagcgaagacgaagcttcagagcgatcggcacccaactttaaaattccaaagaagcgccgcgccttcttgcgaccgatcggtcaacagcatagccctttgcaagggcctcgtcgaaaaaagatggaacttggcgactccggactacgcaagctctttgccgcaataagcgaagagcaaggcggcagcaaggcgacgacaaatgcgataacggagagccgacagatggaaaaggccccggagcgcgtcagaaaggagcacgacaaggaaatggccagaagacaaagagaaaaggtccaacgaataccaacggaggaaatcaggcagaaattggccgccctcccacacatcacagtttcttcggagaatgccgaaacacagagaaaggagcgaaaggaaaacgaagtgcgtcgcaaaaacaatcagcagtccacaagcgaaggatggaagcaactcgccaagcaactggattatgacttgaaggatcagcccgatgaaccagccctggaacggcgaaaagctaccgaagaacagtcggtaaaaggaagagaagtcgaacggcgtcaaattgcacggaaaaaaggcatcgtgcaaatgaagaagcgcgcaaaaccgctgaagtttcccaccgaagatgaaaccttgctgagctacgtaaagcggttttacgacaaggataattgggttctctcttggaaaagccgacgtattctggacgaacttcatgacttggagaacgaaggacgttggttcttataccacgcagcaaatggcgctcaactcactatctcaagaacgttcgatggaacacgaccatttgcagaatttcgatatgtggaagaaggacacctcgtggatctgactccaaaccaagtcatcttccgccaaacggttccagatgagcccgaagagagtccagcgagcaataataaaaagttggaagagaaggcagaaaaaccggcacgcaacgacaaacgaacaactctggccactcggaaggtggaggagtattgcacggcagagatgaagcagaacagctactgctatgacatatttgaaccgtgcgacgcaacgcacgaaacgtgtgccaagtcggcaacgtacagcgctcttgccgaaaacagacacaagctcgaagagttcaacaactgccatgccagctgcctctttgaggccctcatcttcagctggctgtcaaggaacacaaatctgcccgacagcgaagtatcaagaatgcatgaagaactgatcaagc

SEQ ID NO: 877 - DNA, 4268 bp, Heterodera glycines
aaacgactttgatcattggcaaggaggacaacgccaaaatggatcatgaacgaagaagcacctctttgatgtttgccgccagatgaaaggcaggattcatcgtgttcaatcgtgagatgggagaagcccgaaaaatctctgatcggataaggcaacgaatggaagaaccaatggaaattgacaacgaaatagtgccgtccacctcgagtgttgtttcgagcagccaggcatccagagctaccatggcttcaagcagtgtcatcacactgatgttgctcagtcttctaggccttcttcttgtgccatcagtttccgcagctccactgcgaatacaccgagcaagtctgtcactaacagcacaaaattatttgaaagcaatgcataactactataacacgctcacgacgacaaattcaactgataccacgacagccacaagtttgccatggacaagcacaacttcaaattggccaatttcgactttgccgacactcacaacgacgatggtcacacgcacagctccaccagggaccacgacgacgactcagcgaacaacccttgcaacgagagcaaggacacggatccagtatgtcaccagggcaagaatgcagaccacgacagagccaacaacacgcaccaggccggtcaaatcgtcaaaacgagacctcgggatcaaccgagatggccatgacattttctggtgttcggatcgcggaagcacgacccggcaacgaagtatcaagaatgcatgaagaactgatcaagcccaccacggaattggaagaagtggctaaacttttccacgacgaacaaatcgtgaaaaacaaacgcggactcgggaaggatcaacaagtgatgaaagtcatcgaaatctggagaaattcatgcgatcgcttcggagagcttttcaccaagccagcgatgcagcagatcaaattccggccaatcctgattgaacacaatggccagtataaccaatggatcaaccgccaaaacacgcgaatggcggaattattttccaaaatgcgaacgaaggctcagcatccgacctacttgagctacaactgcacaacggtgatcgtcggcgataacgtagcggaacttttcaccccactatttgatgatgccaaatggttcacgcatttcccagcggacacatgccgattgatacctgggccaaacgtcaaacatatcatcatgggatatcaagccacggacgagaacatggcggcgcagttggcaccgatgatccacaaattggcaaggacagaaatccaaacgactttgatcattggcaaggaggacaacgccaaatggatcatgaacaagaagcacctctttgatgtttgccgccagttgaaggcaggattcatcgtgttcaatcgtgagatgggagaagcccgaaaaatctctgatcggataaggcaacgaatggaagaaccaatggaaattgacaacgaaatagtgccgtccacctcgagtgttgtttcgagcagccaggcatccagagctaccatggcttcaagcagtgtcatcacactgatgttgctcagtcttctaggccttcttcttgtgccatcagtttccgcagctccactgcgaatacaccgagcaagtctgtcactaacagcacaaaattatttgaaagcaatgcataactactataacacgctcacgacgacaaattcaactgataccacgacagccacaagtttgccatggacaagcacaacttcaaattggccaatttcgactttgccgacactcacaacgacgatggtcacacgcacagctccaccagggaccacgacgacgactcagcgaacaacccttgcaacgagagcaaggacacggatccagtatgtcaccagggcaagaatgcagaccacgacagagccaacaacacgcaccaggccggtcaaatcgtcaaaacgagacctcgggatcaaccgagatggccatgacattttctggtgttcggatcgcggaagcacgatttgggaactcaagggcacggaaaattcacctttttgccgccccccgccatcactcactgctcaatggcacaacctggcaattgagctcttcgtaaaagtcatcaagcccgaacagatcacctttgcatggcattgttctgtaaagcgcactacggagcgctattacactaatcttttggccgataagttcgtcaccatcgagaaggagtttccaccggtcaacaagcggatctgcaaacaaatggccattcaccaggaatacccattcgccaaatctgaaatgacgaaccacgaaggacagctgtggtcgacgaacgacgagatggaagtcaacttccccggaccaatcgccggactgttcaaaggggaacaaatcagcacggcaaccaattgctttactcaaccagcaacactgttcgtcaaacggcacaacttacagatgttctcgccggtccaccatgttcaaaactgccaatacgccaccgaattctgccaactgcccgacaacacgactctcatttggaaatcaacctgcaatggcaatgaatgccaaacgtgtgactatgagaaagcggaaatcatcaacggcaaattcactgcggcctacggcgaatcaatggcaacttggatctccgaagatcaccaaaaggcattaacgttcgtcaaaaatgcgccagaattcatcgcctgtgatggcacacggatcgtcatgtccgaacagaatttcggaatcgccaaggatcagtacgaagacatcgtaagcacaacaacgagatggaaaagagggatccgaccagagcagctcgcatcacaactctcggcatcacaggtggcaacaagcgttgcgttgaatcagctctacacgcgggagtgccagcgaaacacgagagcagccaacccaactctccaagccagacgcttactacgacagcctaacgtccaggcgcgctggatcggagaaatgacaatggaagtgtttccatgcgtcaacgtttcgctccaggacatctcctaccgaccaatgaacgattgccgtgtctacattccagtgacagtgcatttccccgaccgagcgatagcagcattcctggaccccgaattacgcatcatttctttgacggcgcaatttgcaagctgcaacaatcaccgtttccatcatcttcaactgcgaagcaatccgaacatttggctactgatcgactcacgaaccgggattgcacgtcaaatgccaaaggactatacgcatgagctgtacgaaacgacactcaaccagtccaacagcaacatcgagcttcatcctctgatcttccacgcttggcagctggacaacgaatcagatgcgacacgttttccgcacattaacgagttcatcaacttggagcagttcaaggaaaagttggaacaacacatcacggcgagaaccgaggcgttaggtgccctaaaaggtggcatcgaaggactgaccatgcgctggctaaaaagcatgatcgacgaagtcatcacgtggtggattcgaatcgcctgtgtctactcaaccttcttgttcctgcgtgacattgtccttccatgcacactcgcctacttgttcaaccctgttcgggtcacatttttcagcttaatgggagttcgacgtcagccgcttcaaccaatgctcggcaaaacgctacgacaggaggaagtgccgcttcgagaagttctccgatcacctcagccacgcacttcaccgcaccgttctctgtcacccgtccacctggacgtgatcgctcgcagtgcccgttaccaacaaactcgagcgcaaagcgatgcaaatctggcagaagtcgacaccccgttcggacgacgaacgcgacgaagagaggagcactgaggaccacgaggatcaaggaacagacgagcccaccgagaaggaacagattagcccccacgagaacgaatgatggatgaacccatgcctcgggaatgtcgaaattttcgtaaaatcaaaatttgattttagcattaaaatgatgtaaaagggggtgataaggggatggtatgactgatcgatttccctcccgtgttttgtttgtttttaatcccttcccccgcccgttccacatcctgttcctccccaaatttccctccgccgcaaatttgccccacttttttctcccgcaatcgcaactgtgcggaattgtccgcccatctcccccccataaaaaatcgtttgttcgccaattttgccccctccaagtactttgctccccccaattgtagtgatcgggcccattt

SEQ ID NO: 878 - DNA, 4729 bp, Heterodera glycines
tgttcccaagcaattaattgaatttttcaacatttttttgatttttaaaattggtttaaaaaaatccaggtccaggcctggatccaggtctcgaggagcctggatttttcctggacctggattttcctggatttttgtccaggaaatccaggtccaggtccaacatggaatccaggtccaggtccaggtccaggcatttttcaaaatgtcgatctctacgaataacgttcaaccttttgttcttttataattttatacaataatactaataataatatttaactaataaaagtcacactaataagacaaaagacttaaatgctgaaaataaattaaattattagaaatttcattatataaaattttatcaaaaaattcattttaaaatatacaatattaatgtgtacttttgtattaattaggcttcaaaatttccaaatagaagaaaataataccgaataggaatggcaaatagagaatcatttttcgaatcatttattttgaaataaattgtttttgagtcaaataaagtaattaattatgaagaaataaatgtaagcagatccaagcctttttattattttattggaaaacttttaaataaaatccaatttattaacaaaatttgaattatgaaaatgatttaatattagtgtttaggtattgtatttttatttattttttttttttgttgcaattttttcatctctccagcctcattttctcggacaacctcaaacctaaactaaattttgtttttattatattaatagttttaatttattaattttttggcacccattatgccgtactgcttgccattgattgattggactatgcgctgtccttacacatttttcccacacatttaaccagtccattttcaccgccctgtaaatttagtatgtatttaaaaatattataattacataaattaaaagcaccaaattaccagatgcatttcattcctctcgtcatttaccccctcggccccaaaaaacattttcttaccgaaatttttcaaaaaaaatcttcgaaaatttaatattgaatttttttactaacaattattttttcaaactggaaaatttacaaattttcttttcttgaaaccttaatgaaaatatttcctaaattttttttggaaaactttctgtttgaaaatttctctttgaaaattggcgggaggggggacgggggggggaggggaggggacggacgacctgctgctccattaattaccaatttaatcgcaaatggacacttggcattgtcgtggtgcccaatcactcccaatttgccccccttttgggcaatgccggccaacatgtcataggccagcgcagtgactggctcctccatgctcaacagatagccccaaaatgatctgttcatgaacagttggtcggtgttgttcggcgcagtgcccacataaccgtccaaaattcggtactcaccaaacgaaatatttgagcatggaaattctccatacaaatcaacatgggttcgccttttgtcaaaaagtcattcattattgagcaattatgacttaactcatggccacagagtcatggaaaaggttgttacttttgttcagagttcagacaaatttttgtaacaaatttcagatcaaaccaaaaaaaaaatcgctgaaatttttgcagaaagatatcttgtgattaggacagtctgttattatcctgctgtaaaattgagtaagtttgttaagatatggatggtttcgaattcatttttttcgaccttttagagaaagtttcctcgaggagcaacccaaagaaaaatttcaataatttttgcatgaatacataataattatgtattttgcttcaaaaaatagttacaaaatccaaacattttccatgacagtgatttctcagctataaccaataaatatttgagtcaatgagacaacttgtacaatggcaactcttacaataaaaattaaaataataagcttaagtctagggctcgcaagcctaagcctggcctaaagcttaggactaagcataaaccttaggcctaagacctaaagcttaggactaagcataaaccttaggcctaagacctaaagcttaggactaagcataaaccttaggcctaagacctaaagcttaggactaagcataaaccttaggcctaagacctaaagcttaggactagcctaagccattgtacgagttgccttttgtacaagttgtcatgacaccaaaatttttagtacttttacttttcttggtgtgtcgatgtgtacaaatccataactttttcctcatccgtttcactcattacaatttgaaagccgtgcagcactttgtcctgttcaaaatgttttgcccattttgtttgctgtgccattttgcatttggtcgcaattttattgtcctcctcataattttccatgtgatactgcgaattcagtcgtgcatttgccgggtccatttgtccaagaaaacaaaacgtaattctaatacatttttttgaatatatttttaattatatttgaattatcaaattttaatatttatatttattattattgttttaatgacttataataaataatacatcgctttggccgcacattctccaactcggcacacactcattttcaaatggcgattatcaatgtccagggtggtgttgaaatacaacgtgattggattgggcacaatgttgttgatcaagcccacttgcaagacactaattagcaaaacttgatgataaataaacaattaatattttaatttgttttttttaaattttatttttcttacttatcagactcacatttcacctccgtccgaaattacgatcggcgctttttttagctcttcactgttcagctgcttgccggttgtccaatcaacgtttctgagacaatcagcgcaattgctgattaggagaacagctcccaaaacaaagtggtgccaaacgaatccattcattatttattttaaaataattttgcgcttagcttaaatgaaggagaagcttaattatcgcataatttacacatttttcatatttttcagtttcttaaaagcttagaaaactagggaaaataataaataactgatttataaatggatacaatggttcaattaggcttctttctatttagtattattgctaaatattcttccaattttttgacgtacaactgcaaaatgatttggctttcatcgctaaacgccaggcgattgagtgattattccattccaacattaatttattttattttacttataaatatgcaaaatgatggatgcattgatgggtgggtggtacttgttgatcaaaaaaaaatgatggttaaataaatgaatgcgatgattcattgcgaaatgggaaccatttttaatgaaaaaaaaaattaattcatttagcattatgattaaaaaatataatattgaaaaatagagattttatttcatttataaattcatcaaaatcacaaagtttgattaggaaagggacaaaatcattctttaggatagggttgctccccgaccccgagccccccgacccgacccgagacgtttttttacctattccccgacccgacccccgacatgtcgccccccgaggtccccggcccccgactttttgcccccgaccccccgacactaattcgggggattggggactcttgaaaatttttgaaattttgaacaattttcttaataaaattaattaaaaatttcgaaaaacttttcggcggcgcctatcggcaccgccggccccccaaaactccaaatttttcccaaaaattggctcgaaaatcacaaaatttggacaattttggacaaaattctcttaacaaatcatactcattttcaaaaaatttcccggcggcgcctatcggaaccgccggaacacatcccccccacctcaagtttccaaaaagttgccgccggggaaaattttggaaatttaatgcaatttgttaacagattttgtctaaaaattgccccaattttggtgatttttgagctaattttaaagaaaataaaggatttttagcgtccggcggtgccgataggcgccgccgagggaaattttgacagattttcaacaaaaaaggctggtttttgagattactaggctcaatttgtatggattttctttaaaaaatgatacaatttgtgtcaattaaaaaaatatgagggaaaaattaaaattgtccaaataaaaaaagaattttttaaaaaatcattcaaaaaaatattttgtcgataggaaaccaatgaatatacaaaaagaaaattcaaaatattttaatttctgtagagggattgaacaatgggaaagaagtagaaaatcaaggactagcctctagatcattttcataattgtgtgcgctacttttaaagtatatattaattattattttttaatttttccctttaaatctaaaaagatttagttgatcactacccgatcggggtccccgacatttgagctcccccccgatacgacgctggggccgacttcacgcggtgcgcactgtccttggtttaattgccactggcgtttatttatacgcagtaagcaaagaataaaaggagaaaggaactttaaatccgacaacataacataaaatgacatattttttaatgtcaattttgcatattcacaaatttgtgtgcgtacactttcaatcacatttgtatatttgcactttattacataaaaacattaaagcgtt

SEQ ID NO: 879 - DNA, 3217 bp, Heterodera glycines
  unsure (1)..(3217): unsure at all n locations
tttgcactatttttgacaaaattctgtagacaaatctatactcattttcataagatttccgggcgacgcctatcggagccgccgaaacacatcccccccacctcaagtttccaaaaagttgccgccggggaaaattttggaaatttaatgcaatttgttaacagattttgtctaaaaattgccccaattttggtgatttttgagctaattttaaagaaaataaaggatttttagcgtccggcggtgccgataggcgccgccgagggaaattttgacagattttcaacaaaaaaggctggtttttgagattactaggctcaatttgtatggattttctttaaaaaatgatacaatttgtgtcaattaaaaaaatatgagggaaaaattaaaattgtccaaataaaaaaagaattttttaaaaaatcattcaaaaaaatattttgtcgataggaaaccaatgaatatacaaaaagaaaattcaaaatattttaatttctgtagagggattgaacaatgggaaagaagtagaaaatcaaggactagcctctagatcattttcataatttgccccccgaggggtcggggagcaaccctactttaggatctcttaatattttataaaatttaatcagaattgcagcaaaagcgagatttaattgatcgagttcccatctcggactattttccagtctcgacactgatctcgtttttttgatcaaatttcatgctttactattattggacaaatttggacgaatcatttggttaatctttttctccaatttgcttattcatcatcatttccaatcactgggaaattttgctcttctggctaatagctaaaaccaacatgttaatgtgcataaatttatttgattttgtccatttttagtttaaattgatataggaatgggctaggaaatatataattcatttttatagaattcgttccaattttaatttaaatgcacagaaaaaatttcattgcttatctgctgaaattaaattagcaagattcattaatttatgaaattatttcttgtccattttaatgttttcagcggattttataataattaatttgatttttattcaacgtttgtttgcaaaaagattgaaaaaaggtggggcttttttgattaattaaattaatttatttcttacacaatttagtcaaaatgcatgattttgattttgcattgttttttctgtttgtctccgtgcatttgttgtgttcgtcaggtaaaaattatttttaaataaatatatattaaaaattatttaattaaaattaagctatgaaatgcaaaaaaggcactgtcctcgacactcttgacttagggatgaacccaaaaatgaacattagtgttgaagaatgcaaagccggctatgaatattgtgcagcttttacatgcacaaaaggtacttagtcaatcaggcatttcagttgagtgaaatttgtacataagacgctggaatttaaatgtaattaaaattaattaaatgccgtttaaatgtatttggaataatattagacttttagatggaattaaattaattaaatgcatttaaatatatataatattcggctgacctatatcactaatatttaacaattgatttaatcaagtttattattcgcattttacagctggtcgggcaggcttttcacgaatccaatggtattgtgccaggatcaaatcccctccttatgagtgtgccgagcggttcacaaagttggtggaagaatacatcacacattccaatggccattggtgcgaatgccatttcggggaaatgggcaaagagatggacaatgaacaatttgtgcttccgcccatccctgatgggatgatgtgcaaagtgggacagtttgatgagaacgaaattggccaagtgtcggaggggaaatgcctgcacgacgaccattactgttacattgccaaatgcacaaaaggtgagagagagagagagagagagagagggagagagaaaaagagatgagagtgagagtgagggagaggcgagagagagagagagagaaacagagatgagagtgagggagaggagagagggagagatgaagtagggagagagagaaggggagagatagagtgatgtaagagagagagagagagagagagaaggaatgatagagagagagagagagttagagagagagagagtaagagacgagaaagcgaaagggagagagtgtgagagacagcgagatgagtgatagagatggagagagatagagagagatgaggaaaggaaaggtgagggcgtgagagcgtgatgtaagggatagagagtgagaaagaaaagagagataaagagagaagaaacatgagagagagagagataatgaggctaatcatttttggaaaaaaatatgaatcgtttcataatttcgccactttattatattattattaaattacctatcttcaaaatactgaaaaatgtaaaaagtttcgccaaattaataaaaaaaaagatttaaaaaaaaagaattctagcaaagtgaaattttctgtacattataattactacaaaggatgctccaaaaaaaatatatgtaaaatgaattcttggtaaaagtatgaaaattgatggtcatatttttaaaaaaaaaacaatgagttatttttttaaatattttaaatttttattttaaatttacgacatgtgaaaatcccgcaaaaaatatgcacacggttttatgcaaattgcatttgtttttgtttttttcattttttaatccatgccattcccgccaaatgctctttagacaatgaatatttcaaaacggtgtgggattgcactgatcgccccaaacgtgatcacatcactgatcaaatcgggcaaaaggccagtgttacgttgtactgtgacgcaatgtttggcaagaagaacatggccatgtccaatgaacatttcacaattgaaaagctggaagagcacgtggaaatgatgaacatgatgacgacaaagaggcgacgacgtcggaaaaaaagcacaacaatcacaacgccaagcaccgatttggcaaccaccacaatgcctactgtaacggagcaaactgtgccagctactgttgaggaggcgacagtcacgggttacgatagcaagcaaagaaaaaaaacatacataattnngatattagtatacagtcttctgtaacaaaatatattaattctttttcatttttaaa

SEQ ID NO: 880 - DNA, 2674 bp, Heterodera glycines
aaaggagaaaataaactaatgaacaagaattcaatgagaaactcgaattcagcttctttcaagtacattaagaacaatttttgtctctgctaaaattccatagcgtcaattaggatggccattgattgactaattggactcgtaaaactgcagtagagccaaatgatttacctatatgtataatatgtatttatctattcaaaatgagcataaatgagttgaaggcataaaagtgaaaaatttattcaatgaaaactgaaatgaatttaaacaatatttcaaaaatggttaagttaatccttgaaaatattttactggacactgaaatccttcctctactaattaatttattcaaaaataattttaatcaaaactgctattttttataaatgtttaaaattcttagggatttgtattcttattttctgcaaaatttcaacccatttgaatgggctgaaccgagtcataaaaaattaacttgctcacaatccgagcttttgttgggaattaaaaatcagtgatctttggggaatctgatcctgtcaaattttagaaatttaatgaactcaaaattacgactcacttatttcaaattttttctatataagcaaaaaattctctaatattgtataaaatccataaaacttttcattgattataatacacaataaaatgttttaatattgaagaatttaaaaattttcagtcagccaataaccatcatatggcattgcacatgcgcaagaaaaatattttataaaaaaccaacagcaaaatttatttattttttaaatttttttttctattagggtgaaagagaccaaaaaaatattatttaatttattaaatatttgcattattttagaaaaataaatttctttttgattctttcgttcttccttctcttaatggcttgtttacacattgctttaggcacattgattgtcaaaacatttgcccaatccatcgccttcctgaatattaattaaatacattttaatcaaaataaaatttcttttctttttaaatgattttttaaattttgatttaaaaaacatgcaagaatatatattttttaaatttccttttccgaattagaaagatagacccactaagtctacatagacttagtgctctacgccaattaagcctctaatgacggggttttagtgaaaatgtaattttaaaattgcaaaagtgaaaacatatagaaatttttgggatgaggattgttaaaattccgtaccaaaatcaatttacaataatagcaaaaataattttaaaaaattccatggtcattagcccatggcaacaaaaaagttccgttccattgccatgtcattattatcaaatggtgccattgtaaatccgaatcaatgaccaagtactttgcccatggtaccagaatgattttgatgttacacgcgccacccgccgcaataatgccaattttgccgcctttttgcggaatgccggacaaaatgtcatagctcaattcggtgaagaagtcgttatccttttcaagctttttattgtccgtgtaatccttcagaaacccgtccaaattcttctcactcccgagatgaatgtcaaagcattgttgcgcattgcgaatggcatatgacgggcttaataaattaacaatgatggttaattagcggaatcgtgtcaaggagtaggactcaaaaataaattaatatttttttttgaaatttaatattcaatcatcgttattattttctatataaaattacactattttttatgattaatttacaattaaaaatacattgaagcatttaaaatcgattagcattaatttatttatatgaatatgagattatattcatttaaatattgcttcatctctgaccatcattttctttcactattactgaaaatactgtcaattacagtcgactttaccgtataccttttctggctggtcgatgacgtcaacaacagcttgtcctccgcaaatgcgatgttgaagccgtgcagcaccttccctatcgccaatgtttcacttccacccgattgttgcagctgttgctcacaactcgtcgcaattgaatttttttgcttgtaattttcaagactgaaacggccaccctttgtcgccacggttgggtccattttgccgacaaaacagaaagtcactctagcaaaaaattttgtattttggtaatgattttcaaataaaattccttttttaaaaattttttgcctttcattataattttattgctttttaaaaatcgtataatttcgggtttttatctaatttaaatattacaagaatagtaattatgtggcaatatttaaaaaaacaacaaatgcattcattattcttataaattttatgcttatttaattgactcctcctctaataaataaatgtattaaatataattaagtttttaatttaataataaaaataaatgcatttaaatatatgaacttataatttaataaaaataaaaatgcttgaaatataattaattactcattgtattaataataataaatatatttacttataaaaataaattatttaaaattttaacattttattaataataaaaaatgattttaaaataaataaatttatttgtttaattaatttgctgaccctttgtgacaaacaatgcccttcaaaacacacgttttgatg

SEQ ID NO: 881 - DNA, 3646 bp, Heterodera glycines
  unsure (1)..(3646): unsure at all n locations
agtccnttttgagcatagatttacatttaagcattagcatttgttttcaaaatgtgtgccgaactttgatgatgccaattaaaaaatcatattttaaataaagtcaattgaaaacgcattatttttagcaataaaaaataaaattaaaattaatttttcaatttgtctttatataaattaaattaaaaaagaagaaaaacattattttgaacccaaaaaattcatttaaaaatgcattaaattttttctaaaaaaagttcattttatcaaaaattttaatgttaagaaatgaaaaattttaagcaagagatttataaagggattttaaataaaaagaaatattttaatttattgtttttttcgcggcattttagcattttttaagaaactttcattttaaacctaatattgaaaattgggaatatttttgaaaaatataaattatataaatacgaaaattatatatgcattaaatcctcatttcgaattttagcattatatctttctttttataattgtaatattttatttatttctattttgtcttacactcgcccatccgggtttatcaccaatggcatttccatggcctccttcacttccaattgcttcccattttgccaatttgtccatttcttcaccggctccgcagcaaacacactttcaataacaggccccgagtggacaatggcatcagattttggcacaattttgccggaagaaattgctaaaaataaattttcaaaattaaaatttggtgtcaaaaactaggtttttggaaaaattattgcaaatgaaaaaagcaattaaattcaattttttaaaattttaggagaattttgtggggcgacggcgccttaggcaccgctgggaaaaaagtttagaattttcaatgaattttgttaagaacattttgcatcataaatgttgtttttggctataacttttttctttgcaaacaaaatcaagcaaatcttggtttcaattgatagccctactctattggtctgaaaaatttcaaaaattatgttatgtttgtacaaagttatggccagaaaaattcaaaaaactgagtgctcaaatattttttgccataactttgttcaaacttttgaaatttttcaggataatataggacacctagggctatcgaatgataccacgattggctggatttggttggcaaataaaaaagttatagccaaaaacatgctggggaccaactgagataaaccgggacagtgtgggttcgattcccacccgatgcctaacatattttgcccatttcttattgtagtaatgagacactctataggcctgactaattaatatcttttaatcacctttcgttacattttcttcattgtttttgtccgtggcatttgctgccgaacattgctgcagaacaacaacaagcaatgacgaaaacaacaagaaaaaattgtaaattgacatataattagttctaaattaacatccaattcatattaagagaaaatttaaagaaaataaaaattttatttttaaaattcttttgaactttccttaagatctcaaaacttacgaaaaaattatgaaattttctatttttatgcatttaagaaaaatttcattaaaaatcccaaaaaaataaataaataaaaagaaaaactgcaaaatttgtacgaaaaaatgtaaaaatgtgccaaaaatgtaaaaaaaaatatgtaaatcccaaaatatgtataaacataaaatcgcttttattaattaatttttaaaaattaaagaaatttgaaatcatcatcactttctgtgctttcgattaaaaatgaaaattgcacggaaatttttgtgatttatatttaataaaccaaaagcagtgaatgcaaaaataaataaaaatcagccaccacttttagttaatgtgaaacaaaaaacagaaattcctatgctaatcaaaatgtgtaatatgttgggacaaaatatctaaataaatgaagaaatatatatatatatatatatatatatatatatatatatatatatatatatatatatataatatatatatatatatatataaagattaatttaataaaccatttacattattaaatttttttcaataaataaccgaaaaataatttgagagtccttttgagcatagatttacatttaagcattagcatttgttttcaaaatgtgtgccgaactttgatgatgccaattttgttgatgaatcactgctttttgtgccaattactcaccaatcggaaagtgcaaagagattttagagaagcgcaatgaaaagcagaaacaaaagtgccggatgtgataaagacggaaaatgggataattaattaattaattattaattaactaaaattaagtaaaatttttaagggttttcgaatgataccattttgtctgggttggtttgacacttttaaaagataggagctttttttgcgggaagtagcagcctaagtaattcttatcatttaaatagctctgaaattttccaattcaagttttaactaccaaaagcttttcggtgaagggttcagaagttccggcaaataattttaaatttctgaattttaatctcaatttaaatgagtgatctggatagctgatcaatttaacgaggcaaataatgcccggcacgtagttttcgtgcttttttaactttacaagtcatttgtgggatttacttgaaatttcttaatcaaattgggaaaaaaacagcaggcctctctaattttcctgtccttgcagagctaggacttgaagtcatgaggccaacaccacttatgtgtcgactggcccttctttttcagtttttttaattaaaaaggagagattttatatctctgtaagataatgataatccatttatgcatttattaagatttatttaaaattttcaacttgtggcactttcaagatcatttgtctgttacataataaacaaaaaagttaatttttaagcaaattgggatacaatttttcatttttaatgctaaaaactgccgaaataattcctttttatttttttgctaagtacctaaaaatatcagaaaaattggaataaactccaaatttttaattccacacaaatcgctgttgggccttgtaggctcatcgagggtcgaaaaatttccaagactcgagaaccgaggccgagcattgaatccacgccgagactcgagaccaagaaataattctgaacactctatatgattttttcaaaaaaaaaaaatatatattcattatcaggaatgtctaaaactatctcggttttcaagcattaaatcttaattataaatgcagtacatttattgttaacaaatttttctaatttacaataattttctattaaaaaataatttttaatttctcaattgctaaatttttcttttcattaaaaatgaatgaatgtatgaagcataatcataattaattaatctttctgattacgtcccattatttcaaaaaaatataagccctatttattatatatattgaattttttaaatgctaggctaaattaaaagcaaaattaaaaatgtctttttatttatttcattttaaaatttgtgctataaagacaattctaaacggatttaaatattttaaatttggcattttgttctctattatt

SEQ ID NO: 882 - DNA, 3386 bp, Heterodera glycines
  unsure (1)..(3386): unsure at all n locations
attgcatcataccaatcttccacaactgttattaattgacttgttgtagacctatttctaacaaaaccaaattgatattccgaaattttattgttttttaataaaaaattgtaaatatttttgctgagaattctttccataactctgcacagagagcaggttaaagaaataggtctataattttcaggattgaatttatccccctttttaaaaagaggaaagacaattgattccttccagatatctggaagagaaccagagtctaatgaaatcctgaaaaggtcagtaataacagttgctaatgaaggatggcaatttttcaatgttttatagctaatattatccggagaagttccatttttattcggaagttttcttaaaagtttttgggtctcaatgatgttaaattctatatctgatataaagctttgattaacaaaagtgttgtccaagcttagaaagcctggatcaacttcagaattgttaaacgaatttacaaataaattggcaaataattcacatttttcttggtcattatgatagcatttgttttcagaaaccaaattcgatatttcaaagggattaacatcatatttttgtatatatttaaaaattgaattttttccctttgaaatagccttttgttcaagttgagaatgaaatttttttgtttgtatttttatgtgtaaactaatgctatcataaagtgccctttttgttgggtcgattttacacagcttatatagtttggccttttctttaatggatgccaataaatgcgttggatatttaggggctaactcatttttggtaagtctttttatcggaatacactcgtttaaggtttctagcagtgttttattaaaggcgttatatttttcatttacactaaaatgaccctgagataaggtgctaattctagatgaaataaccgtatttaaaagagacacattcgacggggtgaaccgtcgaatattaataaatttgggtttttgagtagtttttggaatagacatagtgaaaaattgcgccaaatgatctgatgaaaaaaccccgccttcaatattacactgctttacaatttgatcatttgccgatagaactaaatctaaccacgagttctccctcgttggtccattcgtggcattaaagagagaaagcttactgaaaaagtggcaaaaaatttcaccaaatttactcttagaaaatggatgcccttccttccataccaggtctctttttgaaaaattaaaatcacctaaaacaacgtaattttggcttgaaaatttttccaaaaatttgaaaagttccatagtttgtttgtacgttgtttttggtggtctatataccaatgcaaattttgttgattttaaattttgtaattggaaaattaaaatttcacaattaaattttgtgccggaaaattttatgaaaaatcctatttcctttttgatcaaaataccacaaccgccaccacgagaacaacttttggattttcgtgatgcaaaaatgcagttgtaattttctctagtccatggactaagaggaatttcctcattttcgttagtccatgattccgtgattagtaataaatctgtatttttgtttgttaaagttaaagatatttcgtcaattttgttcattatagaacgaatattaattaaacaacagcttagaccttttaaataattaacatcccctttaactgtttgtaagaaattaaaattgtttatttttttataaaaattttctaccaaccggaaaaagcaaaaactttttttgtaaaaatttatatgattttttggtgatttgacatgaaaatttaaaaatttttacgaattgtgtcaatgtcactgcgcaggatgacctgattcgcgtagataatccaatctcccgcgtcttcttttcttttctttgcgcactgctcaattaatttccggcgttcggccaattgctccttggtcatgctttccctgatgcgcgcaccatgtagagcattcaacgccaaagctttgcccttcattctgagcacatgccgagccgcatgtcgcgtgggaaattccattttgagcggtctcgctctgttgggcgttcgcatgccgacacggaacaccactggcgtttggtcgaggtccactgtgtccaaaatcaaattgaccagtgctctgtccgcctccccacgctccgacgctttcccggattggaactccggcacattggtgatgacaacggttcgctgtctgcggtcttcctcaatcgcgtcattcgccgtcacttgagattgaactagagacgaagcggtggccaacagcgagtgcaactgcttaataagcagttttgcgtagtcgggaatggcgctgtcgttgtcaatttcggggggaatttgaagctggtcaagggaagttaagaatttttttggtgcggtgttgtccatgggaggggaaaaattcgccgccgttctctttgccatcgattgatttttgggagatgacaatttgaaacgaatgacaatttgaaacgaatgacaatttgaaacgaatgacaatttgaaacgaatgacaatttgaaacgaatgacaatttgaaacgaatgacaatttgaaacgaatgacaatttgaaacgaatgacaatttgaattcgctgttaatccaaatattgcaattttttgtttgcttccttaaggttggatttaataactaaaaaactcaatagagagctttgaaaccaagtcaattagcacaaaattaattttaaatgcaaaaaggaacattgccaacatgctcacaatcagttgcggcgcaggtcctcccccccccccacctccgaaaatttttataaataatttcccacacaaatttttcaaatgcgtaggaattttttcataagctaattccaaacaaaaaaaaaatttttttttaatatggcgattttttcagaattttatgattaactactattttttccaaaaaatcgctgaaaaccaatcagttgataaataatatattaataaagattcaaatttaaggatcggctaagcattattaggatgggaatttattagaggaaaatgaccaaaaagacgattcgattagaaaatcaaaaaaaaaacgacaaaaagtcatgaaaaattagcgaaaagtaaaatataaatatttttctaagcaatttatagaattgcattttataaaaccgattaatttcgctagagtttcaaaaagatacattcacaaattatagtaaaacattaaaaaatatatacatgtttgggagatttcaagtatcgaaactgtgcaaaaaaatggtcttagactcgtattcatttgtcaagcgccttaaattagcctaaaaattgtgtattttggttttgccctntatttgtgtgggat

SEQ ID NO: 883 - DNA, 3995 bp, Heterodera glycines
ttgcggtgcgggcgccggtggcgggagcggcgcttttggcggtgccgcgcgcgtggactgcaaaatgctctgatggatggcaccggccgatcgattggatttccgtggctggctgactggtgatgatggtgatcaagaagtgatttgcagtactttttgcgagattttcttaatttcggatgttcacactttttctctttttttttgttttcgccgcttttctccgatgatgataattgatcactcaattttttttttgtttttgtccctctcctccgccgttggcatggtcttttgtttcttctttttgcttttgcattttttggtggcctatcgcgcaataattaatttttctgctgcttaatgagtgatagataatgcgtatgcatatgttgtgcatgtacatttgttatagctagtgttataaattattggactaaaaagctcaaaatatgaactaaaaactcctaaaatataagttttaaatcctcaaaaattccaaaaaatgtatatttattcaatatttgctttaaccgacttaaaaatacactaaaaactagggttcgagcccgtgggcgggggtggcttttcgcgggggcgggggtcagagtcgcgggggcggtggcgggggcacgataattccgcccccgcgggggcgggggcgggggtttgctttgaattagctccaaaaatctcacaaaaaaaatattttttatgaataatttctttggctccacattcttttattcgttgatcgccttgataatatttattttgacataaattgcacagattttgactaaaaataatcaaatttagcgatttttgggtaattttttaagaaaaaaaggtttttttttggggggggggggccggcgtgccgataggagcgaattttaaatttatttctaacagatattcaaatttgcaaaatatctactaaaatatgtaaataaaagtccaaacttttgtttgcaaacacaaaaaagaaagtgtttttcctactgattaggctatggagaagccaggaaaaaatatgtatttacataaaattagcagccctaatcatgatttactcaaggaaaattggaactcagattttttaaatttttcttgcggtacatttttccaaaaaatttgctgaatgtgcgaggggagaggtccggcggtgccgacaggcgccgccggggaaattttttgaaaatttgaatgcaatttgttaacaaattttgtacaaaaaataagcaaaattcgcgagcttgggataatttttaagaaaaaatataggaattttgggggccggcggtgcctataggcgccaccggggaaaattttaagaatttatatgaattttgttagaacttagccaaatttttcagaaattttcttcttttagatgaaaataaggcattacccccaaatcagaacatttcttagaaacaagaacataaagaaacactgtattaatcagaaaaaaaattaattaaaggaaaaaaaaaatttatttaaggaaaacgtcaaccggtgttgaactcataacaaagatttctattagtgctgaagcactaaccactaaaccacaaatattttaaaaaatataagcaaaatttactttatttcataaaaatttgtaaaagatgattaaaaaaatcaaaattgtataaattttttgccttttatccatgaatatgtcgttcttaggggtgtattttcacccccgcgcccccgcgggggtgaaggtcgcgggggcgggggatggcgggggtcagagtcgcgggggcggggacggggctgaggccaaaaaacctgtcccgcccccgcgggggcgggggtgacgggggcggggctcgaaccctactttaaaatgaaataaaaagtgttctaaactttgtttaagcttttaacatgcactttttgtgacttttgactttttgaggtaaaatttgaaattcatcaaagaaaatcccgaaaaataaaatttcgaccggtgaaaaggtactgaaacctgctggatgattactgaaactatgagatgcgaccttagtttgtgcccgaattttgttatcccttgggcccattggcaacagttaatgccgaacagattcaaaaattttttggataaaatgtgattttaatgcttctttcatccaaagtacaatccgtaaaaaataggaaaccctaaaaatccaggctttatccaacgcattaattcttctgctatttgtgtgacatcattcggaactcggcccaattgtgctaattgccaaaaaatgaaccgacggtaaggcatttgaaaagtcacaaattcgtcatttatttagctaacaataaactgttttcccacttcagttggatttgcaacgacgtttggatggacattttcccctgttttgatcgtccccaactcggcctcaaaatggcacttctttcgccacgtttcgatgcgttggtggacaaacatttcgatggcaaaagcgaattgacaatttggagaacgatcgaaattcgtcgcaaggacaaaggaccagaaccgaaactgtctgtgcggatggatagaaaatttatggaatttccattgcccgacgaccgtccgttgcccagtaaaagccgttttaagagccttgagattgtgtaattaaaaatcaaagctttatggcaataaaagcattccttccattttcacagttacattgatcactccgtcatcgcttttcttcgttcaaatcaccaaattttcgacaaaagaggcaccaatttacatttgtggattccttattcaaacaccacggatgggccgcggatttgggacatttttggtcgtgaaatttggccctttttttcgacaaacattcgccacttgcgcttttcccatcgtgatcatttggacaatttgcttcgtcgcacttcgtcgacaattctcactgatctcaaccaattgacttcaatctattcctgtggtttgtttcccgctgcgtttggtgatgattttgatgggccaatttctgctggccaagcattgtccaaatggttgcacacgccgagaaaagatggccaacccaaacgattgcgttgcgaagattacagcgaacaagggaacactgattgggtcaacaatttcaaggaggtgtggccataatttagacaaacgattgatttttgtttttccaatcaaattgtttagcattttctccgtgccaatgccatttcttccgtcagttaccaaattcatttttctgttcatgtgccgtcaatgccaatggtgccatttgaattgcttaacgaatggacaaaggaaaagctgacattggccaaagcaaatgaattggacaaccgatggataatgaaacgattcaaaattattggggagtccgcggcggttcagcagcagaagaaagatgataattgggacaacaattgtaacaatgtgttctttgggcttgttgctggcactaatagcattgggtgagcaataaaaaaaggcatttaatttttatccgaatttgaattttgcgcttaatttaggccattatctccgccaccaccagcagaagaagatgaagcgggacaaagcatcacaaaggggccgtcttctgctgacaaatgagtgacggacaaaagaacaaaatcaatgagcagacgcagaagaaatgaatattaattgaaaatgaccggacgatcataattcatcagtgatcaagtgcattttatgaagaaaatttttgttttcaaaagttggctaaatatggtgttaaaaattattttagaggaaaaaaacaagacgagctaatactcatttttagcgaaaaatcaaattgaaaagcgaaattttcgctttttgcttatttttgacataaatttatcaattttaataaaatttaaatttattcaattttacgagaaaatttttttttgtgccatcaaaaatattttggtgggcaatttaatattttttattcttcggccttattgaattttcgttgcacttttttcaaaac

SEQ ID NO: 884 - DNA, 1111 bp, Heterodera glycines
tgttggtcattattttgtgcaactctaagttgttatgttttcgtacattttttgccatttttatgcgtccgatttatttaccgaaattgagaggtttttcttcataaaatgcacttgatcactgatgaattatgatcgtccggtcattttcaattaatattcatttcttctgcgtctgcccattgattttgttcttttgtccgtcactcatttgtcagcagaagacgtcccttttgtgatgctttgtcccgtttgttcttcaacttcttccagtggcggagacaatggcctaaattaagcaaaattttaattatttaaacaaaattaaatgcctttttgaattgctcacccaatgctattagtgccagcaaaaagcccaaagaacacattgttacaattgttgtcccaatttttatctttcttctgcttctcctctttctccccaataattttgcatcgtttcattatccaactgttgtcccattcattttcatttgctttggccaatgtcagcttttcctttgtccattcgttaagcaattcaaatggcaccattggcattgacggcacatgaacagaaaaatgaatttggtaactgacggaagaaatggcattggcacggagaaattgctaaacaatttgattggaaaacaaaaatcagtcatttgccaaaaatgtggagccacaccagcagggatggcacagaattcggatttccgaaattttgataaaattcggaaattttcaaaaatttccgacttacgacgtttttggggtcggaattccgatttcagaaaataaaaaacttgaagctccccccccccccggaccggggacgggacgaaatctcgccgccgaaatctcgccggccgaaatctcgccgagacaaaatctcgccgccgaaatctcgccggctgaaatctcgccggccgaaatctcgccgcagaaatttcaaaaaaaaattcaaacttagaaattcttcaaggaaaaaattttagaacatttttttaataagaaaattccaaaaaaaaaactatttgctaagtttttttgaaaatttttcaaaaaaacagtaaatttcataaaatttcaaaaaaaaattgctgaaaaa

SEQ ID NO: 885 - DNA, 3239 bp, Heterodera glycines
  unsure (1)..(3239): unsure at all n locations
aaatggtacgcctttcaatgtttttgggaattagaaacgaaaattgctcagaaagtcgctgacaaaatgttgaaatntagtgattttccatttaatttgaataaaccgagcaaatcttctgcaaccttaaatttttaaaatttgctcttcaaaattagaatagttcattttaacataaaatttctccttttttcatttttacgtactctgcaaaaatttcgggggagaaacaaaaattaaatccgttagaaagaggtgtgattttccacaaaattgtcttgtgaatggtctgtcgatctatggcttttctttaagaagtcaaaattggtaacattttggtgataaattagtgtaaatatctttggcatggaaattatgagggcattctgtgcattggttgatgctcaaatagtgcttctcgtggcattttcaataagaaaatttgttttgtttggccaaatttggtggtcgccagtcagattaatacatttaaaaacaatttggggtcacattggttaatatttgttgccttaaaagtgtccaacattatttactcattgtcagatcaaagacatggcctcctattggcgtctgaaaagcattgaggagtacgagttggaaatgtccacgaaaagcaaggagacgcgtcgctatgtgttcaactgtttggacgacattggccaagtgcaccttccgtccgacttggacgacatcgaccgaatgtgcgagcggaatgaccggcttgaatttgtcgacattctgaagcaaatgctgagcatggaccaggtacagcttgaactccttgttggactcaaacaccggcatcagaaaaaatctcaacctttttaatttaaggaccgtcgtctgacaccgacccgcgggttgcagcacaaatttgtaaaaatgacgcatatgatcgagatggggcgcactaaatactgccaggtaataaacagttaactgtaagcaacaaattgtaagcaacatctgcaatttagtcccataattcggcatttgacatgccaagtctaataaaataccgttaaaacgtacttcgaaactgacaatgagccttttaaattttaaaaatatatggcttgaagtggggacgggacaaaatctcgccgcagaaatttcaaaaaaaaaaaaattctaacttagaaatttttcaaggaaaaaattttagaaaattttttttataagaaaattccaaaagaaaaactatttactaagtttttttgaaaatttttcaaaaaaaacagcaaattttcataaaatttcaaaaaaaaattgctgaaaaatttttcaacaattttttttatttaaattttcttataaaaaaaattttctaagaatttttgaattttttccttgaaaaatttctaagtttgaaatttttttttttttgaaatttctgcggcgagatttcggcggcgatattttggggtgcacccagatttcggcgggcgaagatttggggtgcacccccccgtaccacacctccttgaaattgttgatccaatcagtgttcgcttgtgcgttgtaatctatgcaacgcaatcgcttgggttgtccatcttttctcggcgtgtgcaatcatttggacaattcttggccagcagaaattgttgaatttggcccatcaaaaccatcaacaatcgcaattgccttgggcaccaaatgattggaatcgattaaaatcaattggttgagatcggtgagaattgttggcgaagtgcgatcgaaaaaaagggccaaatttcacgaacaaaaacatcccaaattggctggccattcgtggtatgtgaagaaggaagccacaaatataaatcgatgcctcttttgtcaaaaatttggtgatttgaacgaagaaaagcgatgacggagtgatcaatgtaactgtgaaaatggaaggaatgcttttattgccataactctgattttaaattactcaatccgaaggtctttaaaacggattttgctgggcagcggacggtcgggcaatggaaattccataaattttctatccatccgcacagacagtttcggttctggtcctttgtccttgcgacgaatttcgatcgttctccaaattgtcaattcgcttttgccatcgaaatgtttgtccaccaacgcatcgaaacgtggcgaaagaagtgccattttgaggccgagttggggacgatcaaaacaggggaaaatgtccatccaaacgtcgttgcaaatccaactgaagtgggaaaacagtttattgttagctaaataaatgacgaatttgtgacttttcaaatgccttaccgtcggttcattttttggcaattagcacaattgggccgagttccgaatgatgtcacacaaatagcagaagaattaatgcgttggataaagcctggatttttagggtttcctattttttacggattgtactttggatgaaagaagcactaaaatcacattttatccaaaaaatttttgaattttgttcgtcttaaattgttgccaatgggaggcgaaaaccaattgacaaaaacggaaggcgcggaaacattttggcataaaatgacgacggattggaagaaaaagggaacgcaacagaggagaatattttgcaaaatgatgactagggaacggatttttaagcgcgaaaaagtccaaactaaggccttaaataagggcgaaaaaaccaaaatttggtcaagaaagaaaataaattacaaaaattttggtcaatgaaaaaataaatttatgtggaaaattttttgaaaatttgcaaaaaatgtgatctcgtcaagaaaaattttcgaataaatgcgtcaaaacgaagaatttccgagcgaaaaatgtgtttttcgtgcatttctcgtcgagttaaagccgcagaaaaataagcaaaaacttaaaaatccgatccctaatgatgacatttgccgggcgttttaccttatccccaaatcaatcaattcgatggataatttttatccaactttcatttgtaaaaagttagaaattttctttgtcaaccaaatccaacatttgttggtagcaaaaatggagaaacaagggaagaggagggaaatagcattggggaaggaggagagacggaagagaaagagaggaaaaggaaaaattcgacggaaggaagaggaggatgagagaagaatgaagcagaaaagagagaggaacagcagcaaattaacacttacatttttttttaaatgcgggattaatcccgcgggatc

SEQ ID NO: 886 - DNA, 5132 bp, Heterodera glycines
  unsure (1)..(5132): unsure at all n locations
tttttgactcttttctgttcacattcgtctcccgtcttttattcatttaatcgagactgttattttcaagtaaatttatttcggtcgatttgatcactgatcggtaaattcaatttggttcattgtgttttcccttttcggcattttttttaattatcatttttcacttgcgatcgctttccaaattatctcgatatgcagcagatctttgcaaattaattctttttgaatgtatggaacaacgcacttgccctctctatttctctctctccctcttttctctctctctctctctcttctatctccatcccatacgatctctccttctctttcagtccattctctctctcttctcactctcttctctctctctctttctctctctctctctctcttctctctctcttctctctctcttctctctctcttcatctcatacgatctctccttctctttcactccattctcctctgctctctctctctctctctccacctccattccatacgatctctccttctctttcagtccattctctctctctttcttctcactctcttctctctctctctctttctctctctttctctctctttctctctctttctctctctctctctcttctctctctcttctctctctcttcatctcatacgatctcttcttctctttaactccattctcctctaatctctgctctctctctctctctctccatcccatacgctctctcgaccttgttgcgcatatataaagccacgcttctccttcccccccccccaaatcattggccagcaccagggcggcagtatatacttctccatcttcttctcctcctcctccatacatttcccataattcccattacaattccatcccaacaccatttcattcattcattcattacacacattctccccccccccccccccccctccgctgcccattcattcgccacacttttttttattatgtacatgcataacataacgccacacattattacatacacctacaagtacatgtgtgtgttgagcacgcatcaaacaacacacaaaagcgcatttgcctttttttagtggggttttcaataatttcttcatttttcattttaataattttctaggggtcattaatcagggttacccttgaaaatttccccgaaataagagcatcgctggtcaaaaataaggacattttttaaaacacgcttcgaaaactttgaatcgcatttttattgaacaaaatcaagcattactcaccgccaactattttctgagcaatttcggcttaaaatgagaaatttatacatttccgaaaatcaattttaaggttttaacaattttgtcgaaacataagcaattggtaaatttcagtgcatttagaataaaaaaaaaacatatttttaacaattttttcggcgaatttttccgaaaaatttttggatatggatgagggaagagagttcggcggtgccgataggcgccgctgggggaaaattttaagaatttttaatgaattttgttaggaattagccgaatttttcagaaatttcctcttttaaatgaaaataaggcactaccccaaatcagaacatttcttagaaataagaacagatacacccctgctctaataggcgccgccggaaaaatttttgtaatttttaatgcgaattcttaacgattttgttcaaaaaatgataaaattacgattttgagccaatttttttaagccgagagaaaaatttgaatatttaactgaatcttgttaagattttggatattaattcgcttaaaaaaacatttctttcaaaaattatcattaaaaatctaatttctccctgaatccaaaaaataagatgaaaataaggacaaatcttacgaataaggacatttcaaatttgtaagatttggaccctcaaaataaggacaaatcttacaaataaggacaaagggtaaccctgatttaaatgatctcgttcgaaaaatgcaaagcaaagtcagatgaatatgaagtgcaaatgttcttacaaaacatataacaaacaatagaatattgtgcatgggagaacaaaggtcaagagattggaagggcctggggaagggcaggctttctttttgatcacaattcctcgtccccctcctcgaacggaggtgggacaattgagaagcgttcgcagtactccgtgagcatgtggagttgccgcctcgtgctctcgtgggcacgctgttcctgaattggggagggttatttgatgatcatcgactgttttggggggactgaccgccacgagttgattacggcagtgttccaactcggcttccagctcccgtttctctgcgaccactttctgcaggcaccactggtacctgctcagctcgccgtccgtcgacactcgcctcctttgctgctgttccctgccgctgttcgtttcggcaaaaagtgtcgccgctgtttttgtggtggagggcagcgcaatgccgtcgcaaaaagaagtcgactgcacgaagggtgccgaattggaggagagaagcgactcctccagcgacattgccaagttggacactgacacttttgcggaggcggacggagcgggcggtttggtggccacgtcgtcggaacgggcacggctaaaggtggaggcggaggagcaggccgactgattctgtggggaggagtaaaatggaatcgccaattgatttagacagtcccacctgtggctgttgttcacccgtccccgtgagtgacgtgtgctgtggccgattggcgccgcgccgtgtttggatggagtcaacggacgcattgctctccaattggtaaatgcgactgactgccgaaccgaacgccggtgcccttaaacgcaaaatgtgaaatagaaatgccattttgtttttaacttacgaatattttttgcgttctgtcaccgccgtcagcgacgtgggcgacggtgtgctgttgccccaggaatcgccggacaaattggaactgagtttggagccgacccgacgctgctggtcacgcagagcaaacatttgctggtaggccaacggttggcgagcgaatgagtcgggggagagcaattgttggcattcgaggccacggacggcgggacaattcgggtctgtaaacaggggaatgaatgcagttgggttttagcctttttttaaagaaaaaggaggctcttcggggccgggccatgtcggagagacaattttgaaaatctgtgtcatttgttttaattgaaaaatttcggaatttcccccccccccctctcttttccatgttttaccttcacatccccgtctcggattaccatcagaggccggggcgatcattgtgagctgaagaaaatgaaaaatgataagcaaaaagctgccgaatgaatgccttaatttgcgaccgttccgccaacaaaacggcgatgtgttcggcgctgaacgtgaaaaaagccgcattttccaactgaaaatccaaacgtatttattaaactaaaagggccttaatgaaaaaaacctcgacaatgcgagagccctgccgaaggccaacgcgccaggcactcttaaggaaaacggggattattttgaaattcataattttttggctagtcattaaagaggattggcactttgttcatgtccacgtccgtgacgatgccctcctcctggacatggaaaccgaacgactcgccaagtgctttattcttatgcaaaatgacctagaaatatgaaacggaaattaattaacgtggaaatggaatttcactgacctccttcgcctcctccccatttgtgacggacgcaagtcgcttcaacaacagtcccaactcgcgctcactgccatcgggggaagcgcaccacaacagcagcaaatcgccatggtcaaagaaaattttgacacttaaatgtggaaattttgagacttaaaacttaggtggcgagatgaaaatgattaaccatccgtagaaatgaatcagtgaccaatccaggattcaggtttttggggatttggaggtaatttaatcttttgagccctttgaaattgctaaccctccatcggcggcttggatccatcccaggatggaatgggtgggcgtggagaacacggccagcccggagggtacggagaggaggacgagcgtgtcggcggacaaaccgagcacggcaggtgcacgttggccggtggaatggtcaaacacgtcgacttgcctaaggggggaagggtaagtcgaaaccttatatatttcccgactaataaattaccaggagagcgcagcacggactgcggcatcgagcacgggcctcggcaccacgcgctctttgcgcttaaccgaaccgcccaacagccgcgacgcaatgcgcgacgcgccttcgtttgaatgggcagtacccgcgtagttctccaccaaatccttcagcgcctcgcgccgggtacgcgccgccatcgaagcaaatttgcgggacctagaaaaagaggggaggaaatacaaaaaatagtgggaagaaacggcgcaccgatggacggcattttcggcgttgattattttggtgataagaaagtcatggaactcggcacttttctgcgaaaatttgaatgcataagaatgtgatactttgttcgttttgtttgttggcactacctgaaaagtggcacttgcggggattggggggccaaacgttggcacgtccttggcacgagagacagcgacccgataggtgacaccctcggttagcgggttgcaagcgcggatgacgatgaacacgtgttggaagtgggaacggacggtgatgggcgagaagggcaaggcgtcgggctcttggaagatgatggtcacctgaagagagtccaatcatttcaatgccttgccttcccttccccgtccgattgccatgtcatttccaatgtgtcgcttccggtacagctgctgtttgttgttcggagtgaatggcagcattgtggacacgtggaacattatctgggcagagtgatgctccgtgtaaatgctgtacagtccggtggtgtctccgcgcgtgtccaacccgcctttgtacgactcgaagcccttcagacgcacgcgggtgcccaaaaagtcgagaattctgcaaaaaggngaacgatatcatcatttatccgga

SEQ ID NO: 887 - DNA, 3369 bp, Heterodera glycines
gggcagagtgatgctccgtgtaaatgctgtacagttcggtggtgtctccgcgcgtgtccaacccgcctttgtacgactcgaagcccttcagtacgcacgcgggtgcccaaaatgtcgagaaaatttctcgcaaaaaatggggaaaccgatcatcatcatttcttccggaaaaaaggttcacggttatcaccttcaaaacgtggtgacgaacgttcgttcgttgtacattctaaaaagggacattcggtgtaatttgcttattgtcaaccgtgtcattcgtctggtgattcatcaaccaaattgcgtttttacgagtttcaaaatctcttggcaaatgaataacccaacctacattaaaaagggtggtgggtcggtacaaatccgcgccgatgatcttttttttttgcttttcaaaaacttttttttcggcgcgctttttccaaaaaactttcgggaacaggggccggcggtggcgccaggcgccgccgggaaaaatttttggactttttaatgaatttgttaagaaaattttcaaaatttgcgacccgccctcgctgcgaaccccccccccccaaaaatgtatgaacccaacaaatgtacaattgtttattttttaaaaatgccattctcatctctcccacttcatttgattttttccacctgctcctccgtcgactgtcccgccttgcagtagagaacaccgactttgtagcgcgtgtaaatgggctgttcgtcgattttgagcaacagttcctccactttgggaacactgagcgaaggacgaagacagccgaattggacctgaaaataaagggaaattcagcaaaaaatgcagtttttttgtttggcattgttttcttcacctgcggacacacaatctcaagcagttcacgcatcagtgtccgcgtgctcctgtcctggttggccgcgtcggacaacgcttcctccgggacggacacgcgcattgtgagcacgtcgctaacgcgtaaaatcaggcggtagatggcgtgcagcgtgccggcgccgccgtctttgctctcctcgcgaaccatcgacacgcaaatggggccctttggagagagaaaatgattgtttaccaacattggcttaatgtgacgacaacgatgatgatgaaacttaccgaggattcgtcaatgccgacgtattctacgtggttccgcccggcgaaacaatgtctgtagtaataggagcccaagtccaatggttccaccaccacccgtggctgtcgactggcacagagacggccgcccaagtaaacgttcgaaacatcttccaaaacgccgacctaaaacgacacatacatgacaattgaacggtcttcggccggtacttctgctgccatgtgttctctgtgccatgtctccgccaattcctccggcggtgtccgtctccgtccatttgtgtggtgttgttgcttaacgttgtgttgttggcactgcccactgctggtggtcggaaaggtttgccgtgacaatgcaatgcgtcggatgggctcttcgccgagttcgttgcgaaatgcgggacaatttgccaacaaatcgttgcatttcccatcgccggggtcatcctccgacggactttgggccttcaaacagaagcaacaaacatttcgcttgttcaactctgtgccctcccctccccccacctgtgaagcgccggtaggccgtgtcgtctccagactcgacgtcgacgtgccaagaccccacgcgtaggctaacgaccggcagtcgtggtaagcgcacagatgtgccgaggtcgggtgccattcgctgtgcgcgagttgaccgccgttgccgctactgatggacgaagcgaacgcaccgccgacgacgacactgtcgtggatggtcggctgggaaagcgaacattggagcaaatttgaagaggaaacaacggcagcggaggaattggcggaagccgaggacggcggcggtgggtggggagggagaggaggcaagtttctgtgctgttgcggtgcatcggcggcggtcacatcgatggccaattcagcgcagacattggactgaagcggagagcaaaaagtgatttcaatttcaaaagttttcattgtttacatttctggcatgcagagacaatttcagggtcttagcttagggtaatgttcggaggggtcaatggcagtttttacaatgatttcaaaaaagaacttggtagaaaatcaaatttggaatttctaataaaattatttaaaaaaaaaaataaaataaaaaactgtcgaactgttatgacacggttcggagataccataattataaagagatggccagttaattttcgattttccattaattttttcccctttggggtttatttccctccccttggaattgtccctgccgttgtatggtcacacttttgcattcgtcgtctgtgctatcttcgagtgctcaacgtcggctgatggcaccgcaacaggagggatcatttgtttgctgttggggtgcccaaacgaaggccaatgccccgcaatgtttccgcttccttcgcttcgtttttggctttcgcttcctccaaattcggcacttttcgttcgctttttgctgaaatttttgttgttctttttctgctgatgttgtcaccgtttttacggttcattggccgcttctttcacggccttggtaaagcatttgtgactttaaaagaaatttaaaaattcaaggtttctgaaaggacagaaaaaatgtgtaaataacaaaaaaatcagaggaaatgaaaaaatttccaattgtttattcggaagagcaaaaaattaatgaattgaaaaaatgtcagaaaaagcgaaaggactttaaaagagattatttgaaaaagaagctctaaattgaggagggaatctgataaataaacaaattggcatttattgcgaaaaaattataattcaagcagaaaaatgaatgaatttatttgccaagaaaaaagaaaggaaaggaaaaaaggaaagaaaaagtgttaacaatcggcggatcagtggacggattggtgttaaaagttaggccaaggccaatccatcccaataatccgccgctgtgtttgccattttacttctttaccgccccttttctccctttcacttcacacattctgttcacgaacgaacgaatcgcatttgtttaacttttgttctttggggatgcagcgggcggcatgaaaagagagcggaaagagagggcggagaaagggggaaaaggggggggagggagtaaatgaatgagagaagggcgagtgacaaggggaggagggtgatgagagaacggcgaaggatggacgaaaaaggcggaggagaggggcgacaaaataagtgggaatgatgaggacagcacggcagga

SEQ ID NO: 888 - DNA, 1483 bp, Heterodera glycines
aatttgaaaaacctcccccctccccccgccgctgtgcccctcatcttccggcagagccgccacgccaccgttttttcaggccttcatcaagtggataattgaaaagagagaatgggggaagggagtcaatgatgaagcgattgagtgctgctggcggcaacattagcgtaaaaagggggaggggaagaggagggaaggggataatggatgggaaagggggaaaagaggggaaagggccgactgaatgagggggacagacccaatccgacggagaaaggactaaatttaacatgtaggaaatgtgcagaaaacagcagctaacaacactatttgacgaggagaagcagagcaatttttaatccggaggacccaaatgaaaaggggaaattgccttcctttgctaaaatcaaaagacgaaagcgttgaaatggcaaggctaatgctgccacacctttccttctgcgctggcgttgcatcagcagcagcgagcaaagcaaaaactcaatccgtccgtccgtccgccccctccgtccgtcgtcgcttttcctcgcaaattgccatgcaaaatgtttaacaggaaacggaaagtgagtgagtgtcgtgtgtgggttgaaagcgtacatttatttgctttccccccattcgttttgtctgcggaaatttcaaaacgtaaaaaacacaaaaaatattcgtcggcctccgaccggcgcaagcggcggaagtgtgtaaaaagcgaatgaaaggagagcgcaatagggcacaaataattggattttgggcgtatgacctgtgctgctgctgtcatcgccacgctgcgcccgacgacgccaaagcgatggcacacaaatttaaaagggcggcgcgggcggaggaaaagtgggagagaaagggcaaaaatgggcggggggggcaggagacgggcgatcatttttgaaaaatggcattggcacaacaccaaacaacaaagtgatggagtggcatgcaaatatgtaaatattaaatgggattcaaataaatgctaattgtaagcaaaggaagcataaaatgcataaaaatggctgggccaaaaagtggggggggggggggagagtcggcccattgactcatcagcagctgatgagccaacatttgatgctcacagaggcaaagaaagccaagcgaaggaagcgagtgacgcactgtttgactgttgttttaaatgggcatattaagcctaaaatgcgggcatttgtaatccctaagatgcgccgctgtgacggaggacgaaagacatgcgacttttaaagggtcggccgagcaatggcgtcaaaatggggtcatcggaaaggcaattttattttttcatcaaccaaaatggcccaatcactcgtgccccccccccccgtcctgtccaaagttggccgagccgtctccggcaaagtgttgccctcagcagagcgcgcaataataatcaattccaccactgccaccaccagtccgagtt

SEQ ID NO: 889 - DNA, 3642 bp, Heterodera glycines
agcaagccaaccatggtgataataatccatttagacagaaaatcattaaatccgataaacaaaacagaaaatcatttcgacggtttttgttggtcaccgatgaaagtaacggcggaattatcgacgattcgtttttccatttctctccattgttcagaaaaggttgagactgatgccgaacttcttgccaatgttttggaaatagtaacgggaaaagccggtcttcgtgtcctcaatcagctgctccggcacttggtcagccttaagctcgagatcggtgctgtcgccctacaaaaaaatgaagaaaaaataaaaaacgaaacctccagaaacaaaaaaaagaaagataagctccgcttctcccttcttactttgtccttaagcgtaaatgtcacatccgcaaaatgtcctaaaaatgaaggaaaatgcgaaacggattcagacttttaggtttacctgatgggtaactcttcaaacgccatgccattgaaataagcgccgcatttgcctaaaatcaatttgcggtgttaattcggctaatcccgcaatttcaaaaaggcgggattgtgaattgagatcccccaaaatccgactcgggacccggtcacgcgcttatttcatatttttgaatgtagattaagccaatgatgtttcatccatttaccaatttggtgaaatgacccgacatcactccgccaagcaacgaaaactggccaccttctcgcgcatcaattgacgaattcggagaccaaacactgaccaactgaaagtttgtggagggaatgaaatgcgatttaaaatcaaattgtggcttaaaatcagaggtttcaagatgaaatgtttatccaaaaaaacacctcagacgcagtcaaaatctcaaaaaggcgttcgggcggcactttgaatgtttcggtcagttcgaaaccaccagttttgagagcgttttgagctaaaacgaaaattattagatttaaatacccataaatcaaatccgtgccgaattccctcccctcgccaacttcgtttattccccccccccccctcactttccgccgtggtcactttctcctccgtcttctgaatgatatcattctgaaagcgcttcttgtccaccaccgttttcccttgcgttgccaccgcctgcggacgaatggcgcctttgctgtccaccggcaaaataatccctttgctgaactcctccttcaactcgcgcacgtaagtgcccactttggaacggacgaatgagagcccatcggtggagagaatgtgccgaatttcgttttcatgtgggcccgccgtttcaatgtgcacggaaatctgtggcataaattttttgttttttttggtgccatttgaaccacaaatctgtaattgctacctcaatttcgtgcgcctcgttctcatcgctcaaattcagaatttccacacttcctttgtactcagtttcggaaccagaaacagttgctaaaaaaagcaaattaaaatcactcgtttattacaaaaaaaaggaaattacaaaccaatgaaattgacgtcgatggaccactcgaagaagaaaatcagtttcgccttccgattgttcgccgtcgcttcgccctccaattttttgaagtcggaaaattcaattcgcaccggccctttttccaaggtttgacccaacaaaagcacgcgaagcctttcccgagaccaaggagtggcattcttctcaacccttcaattgtttagaagtgcatatgaaatgtgtgtgtgagaccaaccaatgccaattgttcacatttgtggcatccggcctctgaaacaaccaaagtcaaagcaatggcacttatttaggaactctctctttttatgataatggggaaaagtattataatggaaagtgcaccgaaattaatatcgtaaaaaatgttcaaggtatcgttttaaaaaaaatcagtaagcgcaaaatagcagcgaatttttaatagctaactccaatatccaaataaatgtgtctaaatgaagcttttacctcttcgacaatccaacgagggtcccctaaatttcgggagaaatttaataagtatgcaatccacaaaatgaattttttaaaatcccaaaccttctccccacttcgccatgacgcaataaataggtttcaatcctcttcttttacaaaaatattaatttatgtttacaaagtttcaggtaacttgttcaggtatctatgacaaaaattatatatatctagtcggataacggaaagcaagaatgttaattacctacattgctattttgaaatttggtcctgatttttctcgtagtaaaacataatgccaattttaaaaatacgtataatctaaaaatctagagcatgtccgttcctcaaaaaggatagaaatctttacatatttaaaaaatacttaggtaggtatctaactaatatagttcattaaatgaaatctccaaatgatccattaggcgtgcgtacgtttttaataatttcgaagaattaggttttgcgtttatttccaagaagtaaataaataaataccggtaaagacatcaatattactatacaatgaaacaaacatacacttcatacaaaaacttgattttatgttcctaattcaattcgaaggtcaattccgtgggcactccgtttgctccgtccagaaccccccgagccttatgtggaaagtccgtaagaaatgggattttcaacttatgtgcgatccaagcctaaaacgcgttttatacttgtaaataggtaattaattagccatcaattcggaccatttcatttttgtcgttaacagtccacacgcacatgtgaaatccctggtcaaccatttcactcacaaaatttctgacaaaggaaaaaggaaagcgcatcgcattttacataaattaaatggcgaaagtcgttcaactcactcgcaaatttcgccacgcttaaaaaaatttttcttttttgtcagtggtatgagaatttaaaatagccaacctcaatgagcaacatgtcaacaccgaggaagtgaggaagacagactttgatactcctgaagagatgataaaacattgtttaaaggtttgtcagtgagttgagtggtcaatcaactccatttaccatctgtacaaagcatcgagcgcaaccgccgagcaatggtaaaacggagaagagaaacgagggattgtcatcttcagatcggtatatgaaatgttcctaaaaggaaaataggtatgttttattatggtatttaaagcgagaaacgaagaactgaccgacgacgaaaagtgaatcctaaaaacagggattgtggtttgtattttcggtcatcccctaccatttccaacctgtgagaatgtgactgttcctccgcttaatccaatagatgatccacggaaagaaggagcagacgatcgcccggtcgaacaaattatattcctcgaacagctcctcaattttgatgaccaactaaaaagcaaccaaatctttgccatgccaatttacaacaattttcagcatcactacctcatagtccgagtctttcacatcgagaatcctgtaattttcgcatttatgaaaccctcgttacgtcattcacttaaaagacgcacattttcacattgtttttcgtcgcccattcgaccacttccttcagc

SEQ ID NO: 890 - DNA, 3493 bp, Heterodera glycines
  unsure (1)..(3493): unsure at all n locations
aatttttattctaatttcattttaaaaaaagtacctcttaattaattcctttgcaattgaattcacagaaatgtttccatcggttttaattatttctcatggaaaaaaaattcccattttatcattttctccattttttaattatgtaattattttgggttttcactaaatattccactcatatgtagtcaatcacttgttttttaatgacaatccgtcgaatttcttatcccttccgttttttatgcgaaccgaattttttacattctttttccattaattattcattctttttttcacccctctatccaaaactaaagggcgtcgtgacaaccgctgaacaaaatgtgatcagcttgcgaaaattccacgtttttaacatttcctaccaaaattgtccaaacaaaaagggcgactgaatccataccgtgccccattttcctttttctcctttgaaacgtttcattccgtcaaaaaaaaccaagtcccaactatgttaagtggactcctcaaacggttggaagaggattgtattgagtcagccccggcagcaatggacaaggacgacgccaaacaatttgaagaatatcgggcgaggaaagtcgcaatgataactggcatttctggtcaggtaattgaccgtaaatgaattaataccaagtacaagatacatacctacttattttttctccctaggatgggtcgtaccttgccgaatttctcctcgccaaggggtaccaagtgcacggggtcatccgtcgttcctcctccttcaacactggtcgaattgagcatttgtactccaatccgatgacacacgctgtcggctccagcttcaacttgcactacggcgacatgaccgactcgtcctgtttgatcaaactgatcagcaccattcgtcccaccgaactgtaccatttggccgcacagagtcacgtcaaggcaggagatttgcttcctctcttttcttttatatttgcaactttctcaggtgtctttcgacttgcccgagtacaccgccgaagtggacgccgtcggcactttgcgcctcctcgacgcgatccacgcgtgcggactcacccgattggtccgcttctaccaagcatcaacatcggaactgtacggaaaagtgcaggaagtgccgcagcgggtgagagggtcaaattaattgcatttaaaaactcggaatgaatttaggaaaccacgccattctacccgcgttctccttacggtgagagactgactttcatttccatttttgtatgagaatcaaaggcatttgtttttttctaatttttacattggatcatttttgtacatttttcagcggttgccaagttgtattcctattggattgtggtcaattaccgcgaggcctaccaaatgtacgcctgcaatggcattctgttcaaccatgagagtccgcgaagaggtgaagcaaaagtgtaaagacaaaagcaatttcaattgtttaggcgaaacctttgtgacgcgtaagatttcgcgtggagtggccaaaatttcacttggccaacaggaattggtcgagttgggcaatttgaacgctttgcgcgactggggacacgcgcgggaatatgtcgaggtgacactcaaattcaaaacggaccaaaaattaaaaacaaattgtgcggtgtatttccctgcattccattttttgacacaaatcatgtcttgaatcatggttataatatttacgaggtttatgactctctgagttttcatttcctgctggcggtacggactgattacacaagaaattggggttttgtgtctgatcaaaatcgactatttttagaaatttacagggattttattatttctaatttgtgtcggatgaatgactgactcccttctgtttaaggccatgtggatgattttgcaacaggattcgcctgacgattttgtgattgccaccggaaggaattacacagtccgacattttgtcgaattggcctttaaagagatcggcgaaacgattatgtacagcattaaataattcactaaaacatcggacatttccccgagattgcctttttcagttgggagggcgaaggcgtcgacgaagtcggccgcgagaaagagaagggcactttgcgcgtccgcgtcaacccgaagttttaccgcccgacggaagtcgaacttttaattggggacccgagcaaagcgaagaaacaattgggctgggaaccgaaagtcgagattgaggtggaaaatacaacgactttaatttttaaaaatatttaaatgacaggaattggtaaaggaaatggtggccagcgacatcgaactgatgaagaagaatccgatggcatagacgcgggaccaatggattaatttaattatttttgactctgagccattttcacataattgcataactgtgattggctgggctcagattttcagtctcaaaaccccaaaaattaatttttgacaatttaccaaaatccgagccctagtaactgtacctcctcgcctctttctttttaattttaggccgtgatagttgcacttttctgttattttatcttttactgtgactcgcatagctttacgtaccataatggagctttaataaatttctaattggcaaaaaattacttataaacattaatggttctaaactatccatgaatgtaagatttttttatacaaaataagaaaacaaaaaaaaacaaagctttccccattttgggtagaataatttgtcctaattcaagacatttataatgtgcaattcccgccttttccacaattatcggtccacttctccgaacaccaaatccaaagtgccgataatggccacaatatctgcagaaaataaagattaaacatgtaaaattaatggggggggggaagttgcgattacccgggatcaaatgcatatagctgatgtcgtggattttggaaaggtgtgcaaatcctgaacaattttgaatttaattgacactcatgtgatgcctcgcctggtgctcggatgtaacatcggtacggtttgctggtcccatcggccaccaaataaacgccgaattcgccctttggtgcctcggttggcacatacaccgcccccgggggcacttggtagccctcggtgaagaatttgaagtggtggatcaacgattccatgctatcctgaagtaattactagagatgtgattttttttcgattggaataaagaaagattaatcactttgcccatttcctaccaaactttgagtgtttcaagtaataaaacaaaatttttagagagaagaaaggtggtcgagggtcggcagtttcgttagttttctaatttttcagaatttattttttccgaattttactaaattgcttcgaaatttgtataaaaatacgaatccacttatggtcttacaatttcatgtttttagtttgttttgccatcccanaaattaccttcatttccgctcgattaggcggcacaactttgtggtcatcaattttcacttcgcc

SEQ ID NO: 891 - DNA, 832 bp, Heterodera glycines
ccaacaatcggctagcggcggcacagcatcctctacctccatgccgtcgtcgcaaatgggcggtgccgtgccatgctcatcctcctcctcgtcatccgcttcggttccgccctcatccgccggtggcacagcaacgaccggggcggctggcggcacaacaatgggcagtggacgaagggtaattaatttttttttaataaaattccgaaataaaatttgccaattttgtggcaggctaatcgcacacgcttcacggacttccaactgagaacgctgcaacagttctttgacaaacaggcctatccgaaggacgacgacttggaaatgctcagcaaaaaaatgggtgagtgattaaattataattctctttgatcacttttgctgatcaatttcaatcctgatcgctctgtccaccggattttttttaaatctttgatcagttctagttttggttttctaatcaccttttttcttctaatcactgatcatccctcatttttacgcttgaattttcccactcaaaacactttttttctgatcactttcattggacaagtccttcttttcaatactcgttttgcaataagtaatttgcctcttccgatgatcactttatcactcttttattcccactgatcagaaacttttttgtctttctaattaccgatcacgttcacttggctctattgctgatcagtgatcactttttgtcaaaaaccatatcaattcaccattgctttgctttcataacaggtctgtcgccacgcgtgatccgccgtttggttccaaaatgcgcgccaaaaggggggcaaggtgttcaagcagcaacccc

SEQ ID NO: 892 - DNA, 4986 bp, Heterodera glycines
aaatttgtaaaaaaaaattgagatttttttttgattaaaaaattgcatttcaaattggatattagcatttgctcacaaaattgacttttgatttccaaattttatactgatttgaagggtccaaatcttaaaattttcaaattgtactgatacactgattcaccataacattctttatattgtctgctttttgattgtgccaaatttggcttaaaaatttttcaaaatttgactcaaaagcctcacaaatatgtttttatttcaaaaatttggagcaaagagcaaatttaggaaaaatttttcaacgataattttatttttgaaattttgttatttttgtgcctaataaattattattataattatttttcaattgtaaggaaattttggatgggttttaaataagctatatgagaaatatacttaagatttggtaccttagtttgtttattatgaaaaaaaacttgggagcactgaatttttgaacggggggtaggctttttccataaaaaatgggcaaattttttcaaatttacctacatattttctaacaaatttgatcctaattttaatatattttgacgatggtcttaacggaaccgccggatcccaatattcttatatttttgccaaagttttgtctcaaaatggccaaggctaaaatggctaaaaaatttcacgattttttcccactgaacaaaaaaaaaagagctcttcggccgccccctcccgaaatttttttttttttttttggttactgatttgatccaaattaaatacttcaatcttcgggacacctgccaattttattggaatttgaaatttcgcatgttaatttgcgggagcattcgaaatcagtgaaatgtgaaaaagaaattaaatttaaagcataaaagttcattaaaaaatttttaatttatcttcgttttctgggaatttgccgttttatcgggaaaatcgcatttgctcgagaacactttgccttgactcccgacggcttatatctccagcattaagccagagattcctcatttgatcgttccggcaaatattgaccccaaatttttgcgatcagatcaagcatgagggaggagcggacagtgacgcgcattgttactgtgtcgcctgtgaccaacagtttgcgagtcggcacgcgcttcaggcccaccggtgccattcgccgcatccgccgccggcggaccatgcggcggcacggcactacaacgaagcggcggcggcgacagctggcacaatgtcaaacgcgaaggaattactgccagcttccgccggcggcgttgagccattggatctgagcgtttcgtcgttttcggccgcctccatgccgccccactcgcgtgatgagtggatgatggtgccagcagctggcgccagccggtcatgcggtgccaattcgctgtcgcccaccgcgttttccatgtccgaggacgggggcggtggaactaatgagcaacaacaactacagtatggcgcaggcggggaatcccaggtacggtgtgtgggatagaaacacccttcgatgcatacggtaatgaaatgggaccgttaccgtaacatactgtattataccggcttaatacattatcattcctggaaaaatagctttattgtggcccagatactgtagttagagtatggtaaggaaattataaagttgcggagtggttttctacgtggctggatagtggataaaccgtatgcataaataccggatatactacagtggccctccgaaaaggttggaatattgtatagacaggaaatatcgtctttagaatacagtaggagaatgccaaaaacataaaatgccgtcctcctgactccgcaggtctgctcgccgatgggctcgtactgctccacctctggggccggcaccgcaatgcttaactcgttgttccattcgtcacccaacggacagttaatcggcaacaatagcaacaactacagtaacagcggtggttgtggcggaggaaacggtaatgggtctggtaacaacaacaacaacaatagccacaacaataacaatgccgccaataaacgtttccgcactcatttgacgccgatgcaagtgtttgtaagtacagtatgaacataaattaagggcgtaatatgggagcagcattggtatactgtggcgcataaaaatggtgatactgtggacgactgtaccatatccccttcaaatggccactctttatcgtattcttttcagacagcatatcgtatccattattttacataggatactacagtatattagttgtatcgtaccccttatgatcgacaatttcgattcatctagcgataccatattcccttcctacgctaccgtatacctgctggatttaataaatttttcattttttaatctcgatgtttaaaagccaaacataataattccgggacagatcatgaaatcactgttcaacgacttcaaaacgccatcgatggccgagtgcgacgcgttgggccaaaagattgggctgcacaagcgcgtggtgcaagtgtggttccaaaatgctcgggccaaggagcgcaagtgcgcgggcggtagctgcaccggcagcggcgcaggttggtgccaggccgccaatggcacaaattgggtgggattagtgccagcgcctccgatggcagaaatgggtgaattaatgccagccgttcggcattttgaatttaatgctgataaaaaagaattggagagcgggatgacagtcactaaggacacaaattgattggaatactgccagccaaacggggcatttttagttgctagctaaaaggaacttgtctggggcttaccggtaatcacaaaaattgaataatttgtgacagctggttacggtatttacgggataataccgactgatcaggaacaattttacagtatgttgtcctttggacgaaataattgttttaagcttttgtttaggacatccaccataattgcctgtaggttttttgatactataattgtgatttctgatactctaactgtctatgggtttcacatactgtatttgtcttggggatcttgcatacagtttttgacttggatactgtaattatcatttttttaaatgtgtatcctttgtacagaatcctctgatgatactgctgttacggtgccgcactgcgacttggctggccagcgctgccacctgtgcggcgtggagtttgacgcgcgactgtcgctgcaggaacatatcttcggcatcgaacatgtggagcgagtgcgcgagcagggcgtccaaatgcgcggaatttgcaccggcgtcgctgcggcaccgacggcacagccgctgacagacaatgccggcagcggcggtggcgacaaggagaagcggcagcgagtagcgagcggtgacgcggcagcgattgaagcggcggcggcggcgacgaccgctgcgacaacaacggcacaccaaattgacgccgccgcggcgatggcagcagcgcaacagttcccctatgagctgatgtacgcggcggctgccgccagcggtctgtcacctggtcagtgagtgcggttgatcagaggggctaattaccatgccccaaggaatttgggtacaaatttgttcggcactggttttcccggcatgggatttgacggcacaaattactaattggggttcactccatttttcaccattttttactccccaggcctttcgccctaccttggaaaatttttttaaaaattcaagtttctttctaaaaaattcaaaaaactttccttttttaagaaagttcaataaaaatttaagaaaattatgttattttttaaaattctgtcattttttaattttgtgagttttgcaaatttttattttggttttttttttctaaaattttatagttttcataaaaaaatttattttgttaatttttttttcgatctatagaacagttttcaaattcatttggccgcgccgaactgtctcattggcccaaattttcaaaattgagcatttttctttttttaaaatgaaaatttttggattttggctgtttgtagggctcttgctgggccccattttgaaaatgtgacgccaagacttgatcagcatagtgatcaaaatattcaaggacagcccaatcattttgcaggcactctcccatctctgctctatgatccgacggtgttcggcacgccggtgcccgcgctcaaaatccccaaatgcgtcatgcaacaaatccttgccgacatggcacagcgccgggagcacacgctgttcacacaggacgggctggagctgggtgaacttgcagcaaaggttgacgccgatgactttgccgccgcgggcaccaccgatttggaggtggggtgaaatggcactttaatgaactgtgtagcattttgttggcatacatttatggcattttccattggatttagcacaatccatttgacattcggacattttctctcattggcgccctctcccgtgacaaaattttgaaaaaacaaaatttttttctaaattgcttaaaggtttttttcaaaaaaaaaaaatttaagtaggtagaaaagatttaatattttctttcaaaaatgaaagcaaattaagcggggatttgcccatcatagggtgccattcgatttccggaaaatctttgacatcgtagtcccgatttccggaaaatttttggacctcggaatgccaaccttggatgattagacagtgatttaccaattatttttggggccattaaattagaccatggattatgccaatgtgccaatttcagttgggatttgtgccaacattttgaatggatttaggtgggctggggctgcacccaatgcggcaacgtgttccaacagtccgagcagttgcagaaccaccagaagctgatctgcgtgggcgcggacggcgtgttccggctggtccaaacccattaccaatgcaaccggtgcgcggaacgatttggcacacaggtgagaaggggagaaagccgtat

SEQ ID NO: 893 - DNA, 5020 bp, Heterodera glycines
cagccccacctgctaatgcatgccaatctggcagccggcggcggcattgccgggcccaccgatctgccagccgatgatcagcaacagcttcagcagcatggtggcaccaacttcaacccgttcaacaatgccaacaacaacagtagcgtgcagcagcagcaacaacagcaacgctttgtgcgtacgccgtccgccaatttccaatgtgttcgttgcaaattggtgcggcgtttaattatggctaattaactaattaattaccgattggagaacactctcccatctctgctctatgatccgacggtgttcggcacgccggtgcccgcgctcaaaatccccaaatgcgtcatgcaacaaatccttgccgacatggcacagcgccgggagcacacgctgttcacacaggacgggctggagctgggtgaacttgcagcaaaggttgacgccgatgactttgccgccgcgggcaccaccgatttggaggtggggtgaaatggcactttaatgaactgtttagcattttgttggcatacatttatggcattttccattggatttagcacaatccatttggcattcggacattttctctcattggcgccctctcccgtgacaaaattttgaaaaaacaaaatttttttctaaattccttaaaggtttttttcaaaaaaaaaaaatttaagtaggtagaaaagatttaatataattaaaaaattttctttcaaaaatgaaagcaaattaagcggggatttgcccatcattggatggcattcgatttccggaaaatctttggggtcgggtttctgaaaaatctttgaccttggaattcgatttccgaaaaatctttgacatcggggtcccgatttccggaaaatttttggacctcggaatgccaaccttggatgattaaacagtgatttaccaattatttttggggccattaaattgaccatggattatgccaatgtgccaatttcagttggtatttgtgccaacattttgaatggatttaggtgggctggggctgcacccaatgcggcaacgtgttccaacagtcggagcagttgcagaaccaccagaagctgatctgcgtgggcgcggacggcgtgttccggctggtccaaacccattaccaatgcaaccggtgcgcggaacgatttggcacacaggtgagaaggggagaaagccgtatggtgtggcacaatttagggctgggataaagccaattggccatggcacggcaaattttggggtgtgggattaatgcatcgatggacaagaaataaaattaaaaaattagtttttttaaatggaaaattggccaaatctttgagacagtggcactagagagggggcataaagcatatctaaaggagaaatagcataaaacataaaaggtgaagccttgctaaagggataaagcatgaaagggagtgcatcataaagcataatttaaatgggacaaaacataaaacagaattgaataaaaatagagggaacaaataggctatagcaaataagcacataaagcataggggggggggataaagcagtcattaattgaggaggcgggataaacgcataatgggttgagataccagcagagatttattcttggttctcgagtcaataaatttctctgggcttttctgtcgaggtcattaaagttttttgaagaaaaattgatacaattcttgagtcgagaaattctcaaattttttgggtaccattctctctcgttctcttgcaatcaattcttggtctccgttttctcgagtctctaggaaatttcaacactcccggcagccccagcaaacgaggggtttatccccgtgatccgttcgtggatggattggcggggatggcccctaaatcgggggcggggaccaaatgccatatcattactgtaattttttgtcataggccgagttccaagcacattgtcaagcggacttgcacaagttcaaacaggacaacagcagcagcggtgccaacaatgccgcctcggcacggggcacggaggttggcgcaactgagtgaacgcgaatgcgcgccaaatttggattggcaacaaacggacaaatttatacaacgaaagcctactgtagctgatcgatgatctccggcgagttaaagcatgcttcttcttcacagcacaaacacacaaacacacctactctcctctctgtacacatttaccacatttgtaatagtttctggaaaagctttaaattaccgcgtccaaaaaacaccacatttttggcattctcctcccccccactttttttggcataatgtcacacacaataattttgattttttttttcatttttttgtgttttcatctatttggtcagcaataggctttctctgttctctctctttctctttttgctatgtttgcgccccattgattttttttgatcgctttttcattgttttacacatcgccaaatttactcatatatttaaaacacattcgcgtgcagtattatttttgattaccatttatcacatttaaataaaaaaacaaaagttttaattgttttttttgctatttttcgagggctctctgatcattggcttttgatcaatatggtcatgcctcaactgatcgctcggttctttttggttctatcgatagatcagaagtggatcagttggtcatcgtttgatttcaattttcaaggacctgatcagagatgactggcacattcaaacgatctaagcttataggaactgatcaataatatagatcaaaggttggctgccagatcggaggactttgctgatgaattggttaacggatattagctcaatgatcatttatgactctgatcactccggtccgtgtcttaaaatctcctagacattgtttttgagagaaatcaactccataatttgtttaattgatgacttctgctgctgccgctgctgcccaatttccataatcgttcaccataatatattttgtaataattattttatcactgatcagttaattgtcgattgatcgttgatccgcttaaatttactcattattccccctccccgtccccgctttgttccccccgtgagtccaaaaatgatctttgaaaaatgatttaaaaatgtgccaaccctttcaaattgaggagcacataatgccaacacaaattttgctgctttcccttcctttttactgtcattccaaatatacgattaccgtaagaatttgtctgttattttcatatagtatacgatcaccatacatttttttaaagattttttggtgatcattttcccacacattttctgtatggcaataaataaaaaaacaagttcatttattccattattaattaattaattaaattattgataggaaacaatgtataattagaaatgtaattatcgtatattaattattagagtagaagtatactgtagtttggccaatgtaataacatagaacatttgtactgtacaaagaaagagaggacaattcagaaaagaatgatgaatgaattctgtacaatttgaatttgaacaattgaataagctaatgaattaattaattgattagtcataataatccgatcagaaatctgatcaaaaaggaggctggatcacttgatcatgaactgatcaatgagacaagaaaattgagaaaattaaacagacagaaaatgatcaatgatcaactcaaatcagtggatgatcaaagaaagccgagaaaattttgatctctgatcagtgaaatccattaaaaaaacgatcactaaggcagtgatcagaaaataccatgaaccatacaaaaaatcacttattaatacatagaagaggaaaagccctgctgaaaacaacaaaacaacaacaacaacgagttttgtgtgctgtgtgctaatgccatccatctcattttggcggattttgttgctgattgtgagcaacttgttgctgttgttgttgttgttgcggcagtggtggaggcgtcggttgtgtagcagcgatttgttgcagttgcaccagttgttgctgttgttgctgctgctgctgctcggtgaagccgatgccgccaaatgagtgttgccggaacagtccgttggcggtagcggcgccggcggcagcgactgccatcgcggcaagccgttgttgttgctgttgctgctggtgttgttgttgctggtgttggagcagttgctgaacggaagacagtgcgttgctcagtgcgaccgccgcaacggtcgctgacgcgttcgcggcgactgaggagggcgactgttgaggcggttgctgcgactgcaaaaggttggcaaccgcggcggctgcgggaggcggcggtcgaaatgcgctcggctgctgatagtcagggacgctgaacagatttggagtggaccgcctcatatgtgccggcaattgggctgaaatatttggaggggaattagttagtactgatcagacgggtgatcggaaaattggcagtgatcgaaaaagttgatcgaaaaatattggttccaatacgatatacaataaatgtgatcagggaatttgatcaagaccacgcgatatacaaatggatgtgttcagggggaattttgatcagccacagcagctttcagaaaattgatcagaaaaattttttaccgtgtagcgtggacagcaccatttgctggttcagtaagccctccagggatggcatgcgtgccgccgccgccgccgccgccgcttcttgtactgcttgatgctgctgctggttctgttgctgtgccgcggcggacaacagcttggcagccgcaaccatgtgctccatgtgctgctgctgtctctgttgttgttgctccattgccgccgttttgtggttgttgctgttgccgggctctgccggtgccgggtcaggcggcgccggaggttgtggttgcgcgatgacgggagtcgcttggggctcgtcccgtggcacagtcgccgacgacgccgatgacagcgacccgccagcgagaggagttgttgtcccagtgtcactgagcgactgttgagctgt

SEQ ID NO: 894 - DNA, 4945 bp, Heterodera glycines
  unsure (1)..(4945): unsure at all n locations
aatgggtacgcatgtgccgggtgatcatgtcgcgacgactctgtgtgaaanacagtgcaaattaggcacggcgatagttacttaacgatactaattgcgtcaattaaatctaattgggggcaaaaggactccttttcctaacattttaaatagaaaacaatttagtaaattttaaagaaattcaaaaaaaatttaaggatttaaatccatgtagatcttaaaaccttaactaacaagtttgaaaacaatttaaaatccctcagccgttcccttgtaaaaaaaatatttaaaaatttaaatttttcaagaagtagagaaaatcaactcgttttaaagagattaattttaaaaaatcaaaaaatttttaaaaccaaaatttttttaataatttaaaaaacctagaaattttgaagaaaaaaattctaatttttcatttcgaattttttttgtttgttgaagaacatcaaaatttgcaattcttagaattttactatcgtgggggaacaacaattaatgaatttgaaagcatttggccaaatttgtgggccaactcaccgcggaatagttgcactgcggacactgatacggcttctcgcccgtgtgcgttcgctgatgcgtgctcagatggtcgctgcgcgagaacacttggccacacagttggcacgcgtagggccgaatgccggtgtgcagacgcatgtgcctgtgccaacggaattgggctttactcgggttattggtggtcgagaatgttgaacccttgacaacttgagaaaagtgtctcgaatttttgctgatattggtcccggcttttcagtctcgggattaactctcggtgttcagttgtttcgggaactttttcggtttctcaaaccaaatttattatttaagagccaccaaattttaattagaaaaatcgtttgtaaatcaaaaaatgctgatcaatctgaatcagccaaaaaaaaaagaaaaaatgattgtgtgtgtttttatccaaaatggcccgggcggatttgagaaatttttgcaattcttgaaaatttggcgtgtcggataaaaaaaatttaccatttcttaaaaattaatttcattccctcacctggtaagcatgtccgatcggccaaaactctttgggcaaagtgtgcatttgtggacccgactgttctcgtcgttcattgacgatgatcggtcccggtgacggctggcgatgtgtttggcgagccgatcatgcattgagaagccctggaaccatgcaaatcctgatcaattgaatccagtaatcccggcaaaaccaggacttaagtatcggtaatcctatctcggcctgatgccaatccaaatcccaatcccgactttttcaaaattcctggatctagtatttagtccacagcccgcccccttcagcctaagaattttttattttgttttcttgaaaaaataaataaaataaataagtgattaattttaagacagtgccaatgccatctttatgtttcaagaaaaatattcgcttaattaatgatcaaattaattgtttgtgtatcattaatttcatttacttaatggctttattaatgagccaattaactaattaagcagcattaatcacctggccacaatgttcgcaaacgtgggtggcctcgttgagcggcactttgagcagcggtaccgtgtgctgttggcttgtccgtcgctggtgcattttggtcccagtcgctggtgttgtcgccgacgcgtcgccacagccgccgccgccgctttcggcgctcgcagtcgccgcggccgcttcagtcgcggcggagacgtccgattcggagcgactgcgacgccacatggtcgccggacggatgggcccggcggacgaattcgtggccgatgggctgggccacaaatgttccagcgaattttgcggcacaattgtgggcaccttaaaaatgccataaattgaatatcccggtcgagatttcacgttcatgtgtcaacagattttttcgccgtctcgcgcgcgcgaaaaaattaaaaattatttttattgaaaaaaatctgattttttttgaatttcaaaatttttgaacgatttttttcaattgtgttggtaattttttttcaagaaataaaaattggtgatattttagagcggaagacggaggattatgggcaagggggggggggggggaattgcccaaattatttggatttggcggataacgggggattaagatggctggccccacacatacaacaccacttgcctgcaacaggttggcctcctgctgcggcgggattagcgagtgccgaaatgcctccagggcagctgtttgttgccgaatccaatcctccacttgccgtttgcggtctttgtccaactggaaataggctttttgtatgtttttgtgccggatgcaaaccacgaatcccctttttcaatggcattttatttggatttgttatttttatcagcaattaatagctatcatgttaatcacaataattcaaataagttttggccttttttgttcttggaaataccaattatttccggaattctgatcagtgatcaatcagtgatctttgccagcccatgttgatttaataagccccgattgcacctcttttggcatttttttcacaattaatgattctgatacgtcattggaagacaaggccttcattggaaacgggcattgttacactaccaagagtatgtccttaaaattgtcaatcgcccgtgggtaattggagaaaaaataaatcatccattcttttttgaacaattttgacacaattgatcactcaaaaatctttttgatcactcggacctctatttgatcacttgaaactcgtttgatcactcgtgaactctttgatcacataatgagagaattggcattatttcaaaacattagacaaccagttgatcaaattacccaggtacgtacatcgccgggctggaacagttcggccagcgtcggagacgggggcggctcctcaatggtcggctgtcggctgacttgcgcgttggcgacaatggcactcgccaacgcttctccatcaccgccgctttccggcggtcggctgctgagcagcgacgcggcgtgcaccggcggcgactgttgttttaagacgcacacgctcgctggcggcactggcgagtgccgcccctccgcgcttgccgcccctgccgcgcgtttatgctggtgcaacaagcgccgcttttggcccgcgtgcaactgctgctgcgtgccgttggacgacgacggccgcgacacggtcatggcgactaccagcggggacgacgaggtcgcgtcgctggtgtccatgcgctcgtcctcgtcgtccagctgatgctggtgcgactgcagcagtcgctggtgctcgctgccgccgccgccgccgccgctgtgcagcgtctcgccatcggacagagagcgctcgcgcacctccgcgtcaagcacacgcgactgagacggaatacggaggtggcattcgctaccggcaccaaacgcgtccaacccgtagaagccggcgatcggattggagagggagctgcgcgagcggatttgatcaaaactgaaaaaatggatccgagagtaaatgaatgcgattatccggcacccatagaatccataacttaatatctagggatttatgccaagttttcctgatcggcaattagtaaagtaaccgatttttcgtgtcaataaaatccgaaagttttcggtaaatctgtaaatagaaataattgaaataaaaaatttctggcaaaaaataatattttttattttttatttttatattttttattatttatttatcgaggctcagtatgtttgctaactcactgagaatacaattttgaaaatataattaaaaaactaacaaataagcaaattttttggctttgttcaaatcgaacccaaaaatgatcagaaaatcgatcaaaaagatacccaaaaaatcgataaaaaattttgctcattttaaaaaattaaaataaaactgaattcttgttttaatggtcaaaaaatcagcaatctgttgacaagtgatcggaaagtttcatatttattttttgagacttttttgtgccaaatgcgtttttaaggctcggatacggaatttaaacggctaaactctgaaattgactcgacaaaatgaaaaacgctgatgctttgaaaggcatgaccacctgaagtgcaggttggtgccggcacggtgcactggcgacggtgacaaatttggcgatctgctcgagaacggcgtgccggtgacggaagtgccgcccatatgcaaatccgccaccccgtagtcggagaagggcgagaatggtgccggtgacaacagttggtgcggcgtcaagaaacctccaccgccgccggcaccgcccgccttggcactcgccgcttcatccaccgacaacagctcgcactcgccgctgcgccgacgcgcgacgtaagcgtcgcggaacgcttgccagttggacgcgttgattcccagcgcggtataatgcgaggcggagatggaggaacggggggaggagcccaggtccgaggttgggtagctgggcgacacgggcggcagtctcggcggacctgtgccaaaagtggcggtttgattttggcattccgtgtggcgtagtggcaaagcaacaaaaaaaaaacataccaccggcgtccattgttccgttcggaatgtagttaggactgagctacaaaaaaaagggggaattttaattttaaaaatggcactgatcgggaaatgccagaaaccaaaagcctgaatttttggcaattttagtatgcaaaatagtgatcggaagcgatttgattaaaaaaaatttcaacttgatcagtctcttattgagcaacgaagtctaaaaagtgctcattttgaactatgagccggaaaattcaagtcctataaacaactcataaaatttttgcgaaaa

SEQ ID NO: 895 - DNA, 6704 bp, Heterodera glycines
gaacccgaaaacttcgttgaagttatcttttccatttatgtcttaaaaatttggagtaaccatttttatcccttttttccatttgtgcactgtccaaaagtgtgtttgattaattggccccatttacaataaattcactttagaattcgtgatgcttgttctgaacctgcttcaacacgaataaatttcgacgcgaatccatcgacctaatgtggaccaattgtttttatgaacccattcgtttgtacaaatctgtcggtgacttggatgaagaggaccgtttgcttattaagcagtttatatcagcgagcatttcgtcgatttctttgcttctcgaccaattcgtggacattcgcgcgactcttttcatccatttgggagacctgcacagatattcctacacaactgttgagcaaaatatgcaacatttaacagcagctgctgaatattacaaaaaagcgctgagattggaccccaaaaacggacatccgttcaatcagttggcattgctgttgaaggaacacaatttggagcattcgctttcgctgtttcttcgtgcttgcattgtgccaaggcctttctctcatgctttaaagaatttgcgtgcatttaagcaaaataaatttgagcacaattcgtctctttctctgtttaatcttgtggacattcttatctacgattttgggcaagtttaatttgtcttctttttttttggttaaatattttaatgatttagacgagtttcgttcgaagatgagcgaaagcgttttgatggactatttgacgaacttctaaagcaatcccactatctttttgctgttagactcattcattcgttcgcattggcttcaatttacactttattaaacgaaggtgtgcctcaattaatttgttttaacttttaaacaaaaattaagaggacgacgagaaattccgatgttccgtttcttttctttttcgcaaatgggctttattattggttgaagttgagaagcacttagaagagcacactttaaaagaagatgaacaacaactcgcaaaaaaacgccgccagaatagaaagtcttcgtcttccagtgaatcgtccgaagaaaatttggaattcaaaaacggaactgcgggggaagagtcgcagatttgcgccgactttgcctgggtgttactctcttcaatttttgaatttttgaacttcacggatgggcgatttactggcagaaaactgtctgtttctctcaaatttgtgagttttcaaaatgatttttctaatcaaacaaatttttttagcaattccaaaatttgctcaaaactttagtcgatatactcaatgaattgttgccaaaattgagcgcaaaaatgcaaaaaaatgacaatgaaatggaaacgatggaacaaattgccgaatggtccataaatgggccatttactgaaggcaatgaagaagaacagtgcgaaattgctgccagttttattcgccatgtcgtcaaaaaacaaaaattcgctatcgtttttgacaaattctttcaaatgagcagcaatttgatggaagaaaaagagcttaaaccgatagaggcgttttcaaagatgcaccttcaacacgtgacaaatgaggtgatggaaaggggtcgaacttacatccttttcaaaaggctattttggaaacattttgggaacgaccctccaccccctcagggcgtctcatcgaaaatcttcttcccatcccttttttaattatcatcttctaaaatttaaccaaaaaacaataaataattcaccgaactaatttcagaatgagaagacaagcaaagttcctgtttatgtcgcgcccgattcgtccgttttcctccacaaattggacctcgttaaacatttgcttctgtcgatgaaccaaacgattataattgcgcgcagtgttttgagccgattggacaaagtcaaaagggaaaataataatgcgagggaggcgataaggcaaaaagcacacgaacaacaaccaatgggccacttctgggctttccctttatttaggtggattcagagtcgcattcccgagggccgagttcgaatgcttccacacacaggcgagaaattcatcaatgaatgcctccaatttgtgcgcgaaaagggactattggacaagaaaacattgttctgttcaattttgacaactggagaagcttccgaggaatacgaacggcagaaggaggaaatgcgccaatacaattgtcagttccgaagacaattcaattaaaaaattttcgtttttggtgttaagctgtgtcagtggaagacatcggagattttatcacaagaattgtcagaatcaatgcaaacacttaaatttggggaacataacgaatcgctgtttggaatgatgctttatcgtccggtattaggtatttcatttataaattacttaaatcctaataaatatacttaaaattagtgtcgaagttagcggaccgtcattgggctgccctacggaggtcaaatgaaatttcggtaaatgcgattttgtttttcgagactcattgtcagaatgattattccgaagaataaatttgtttttcttttttcgtttaatttgtccttaaaatagcaaattgcttcattaaatatcttaaagcataattcttttttattttttaatgaattgtttgatattctgtcatccgttcaaatggcacaagttgacgacgattatgaagcgaacaaaagggtggcggagagtttgagggagtatatgggcagggtatgttcatgttttcgtgtattttcttgtctgccttatctccaaatccattcagaggctaaatgttgcgaatgccttcgaaacgcccattttggaagggctaatggctgctgtgaaagtggagccgctgcaacgcattggcactgtgttggacggttagtcatttgttcgtcggatgtttcatttgttaagcattgaaacggcacttttcagccagcgccagatgctatgcattccgtgtggacaacacttacagtgcgtagcctttgcttttgaaaatggaccctttgttaattgtcagcatacaaaatatcatactgaaacagttggattagtgatgagttgtattggctcattgtcatacttaaaatcgtaaaattcattggagtattattttcttttttcaacatttatttgttaggtgcctgctacaaagttctttcagcggcttcaggaggaggtacaattgaaccaaccttaaatacaatttacgttgtatttagagaaaattgccccatttcaaaacgacgattggcagaacgatcgggatgaggtcgagacggtcaatgcgaacgacgagggaggggacaaaagcggaacaattgcgagcggtgaagatggagaagggagcggcgaaggaaacaaacgggacaaaaacaaactgtcgaagccattggactcgtcgagaaaagcgaagcttttgacgcgagagactcaccaattggctgagggactttggaagcgatttgcttccgctcaacactttggggacacggaagatgatttgcatgcattgttcgaccaattatcaactgatgttactgggacggtaatgaaacgacgtcttggagcagtacatgggtcgttggaccgaaaggacaaccaattttcgattgaggatgccatctacaggtgtttctgaatgcacactactcaatgttctgcgccatgttaatttttttgtaaatttcagaaagatttcaaaggatttcgaagaagggtccgctcgaagtttcgtcagcaatcaaattctgatgaacgaccatggttagtggtaccaaatggtatctccttctcatttacctgcttatttttaggcaattttctgattttgcacacaaattggccgggggacgagccgtccaatccgttgccttcgttggtcaatcatctctcagccgcatcggcgcaatgccaaacaaaagcacttgaccaaatgacttctgctgtgaaacgtgcccagtccaaacggccctccgagttcgctcttctcactcaaatttgtgcggacgatgggcagaatttgcccacaatcgatttccaagaggaaaatagctacgaacagcgaattgattgtgttgtcgatgtttttgagaacgacggcggtgatgaggtgtggtggcaagaagcaccaagcccgtctcaaaaaaaatttttggaaggggaaccaggattttttttactctgtgagacaaaaaaatgtttccagtgttttcaccgcataagcgaaaaagcaggaatttgtagcggtgccgattggcgttgccgggaaattttttttggcaatttaatgaaatatgataagaaaataatacactaaaaatatataatttttcatttcggggccccttcccccaagttactcttccgttctttgttgcttttttattttcaaaattgggccacaaaaatattttgatggtaattaatttatataactttttactttgaagcatgcctcgacattggaaagtggtgatggtgcgcctttgcattcgtgtcgaatggctgtcgatgaaaccatcgctaattcgccttttgctgactcggccattgctcctctcacaaatggcataaatgtgccccatggaaatctcgaagaagatggtttaatcgttgaaacgttcagccaaaacattgatgaaggaactgacaatgagtcaaaagcaaccacagcttacttaggcagagatggggaagctttcggcacagaagtggtgagtttggcacggtattcctcccccatttaacttagcactcaaaaggctgaacgtgaaaagcaattggctggaggcgacgaggacattggcgatgaacaaatctgccgtctaattgacgaaaaccttttgccgctcactcaaacggacaatgaaaattttgtgccattaaaaaatacacttgttgaagatgattcccattggatggttgttttttttgggtttcttttttagcattttaaagtttgttctttagggggatcaaaatgttgaccatggcttagcgccaactgatgaaattcgacccaaaaaagggaaaacgaagcgcctgattcacgaggccggcagcgcaaaaggtatttttatttatttttttattttatggcattggaaacattcgcagtttaattaacttcagcaaaacgtcgtctgcaaaagggaaatgatttcgaggaaataagcggaattgcggatgatatgtgttggattccaaaaagagttgtcagctcattcgtgaagagagcaatagcggacattcagcggacatcgctggccaagcgaaggttggagatggacgccgacttcagcgacgacactccgttgccctttttgaacaagagactgacgagggacagggccaaacagctcgagtcaatggcatacgactcgaccaatctcctcagggcccgcattttctacaaggtggagagcaggatggtgtgacccggcacggcatatgccgaaaagtgccgtcggggaaatttggatttgcggcctaatgattttttcattttctacctcttttccacttgtttgttgtttttgcgttaatttttgcttaacggttaagagccacctcggagtttggtccttctttccctttgatgactctctgaaaagtgtccgtctgatcagtcggccccatttgctgccgcccttttcactgcctctccctcgcgacgaacaacacaacgaatttatcaaattttacctcgaattgatggatggtcagggtacggcggatacggaagcagcagatgtcatttccctggataatggggaggaaaattggcaaatggacgaccagaacggcacatttggagacgaagttcccatagacgctgaatttgctgtttctccgcacatggcatcagacgatggaagtcccaaacgaagaagatggggcagtgactgcactgatgaagaggacgacgaccaattggacactggctttggtttcctgaacaacataactctgaggtattcttacaatcagtcgttgggaaaccaacaattgtttttcagtgaaataaagcaaatttactatcaaacgaatttgaatgtggcaaaagtgaagaaggcgatgctaagggtcatttcctcccataagaaggtatttgcgtggtaaatgactaatttaatttaattgcatggtaaatgattaatttgatttctatcggtgatcgtttaagtgtgctcctccggcagttgattttgtgatgggtttggacgacgaagctgatgcagaagaccatctgtcatcttgtccatcagaggacaatgattcggaacagattgaaagcgatgttgaaagtatggctgccatttccgacgatgggacgccaactgcggagggagttcaggtgggcaccgccgagtcattagttaaggcactttggacagcactttcagaacaccgcagcgaaagcccgggggatcaacagcagagagttattcgcgaatgtcccgcgttttttgagtggaatgacaaagcgaaatttgactgtcacaaattcattcgctgttctgctgcatctatgcaacgataaggtgagaaaagaaggaaagaaaacaccgacggattggctgtaaagaaaattaaccacgcaaattttagcaattcactttggcacaaatggaaggagagaataaattagtcgaagggcattctatggctg

SEQ ID NO: 896 - DNA, 2688 bp, Heterodera glycines
tggctacgactcgaccaatctcctcagggcccgcattttctacaaggtggagagcaggatggtgtgacccggcacggcatatgccgaaaagtgccgtcggggaaatttggatttgcggcccaatgattttttcattttctacctcttttccacttgtttgttgtttttgcgttaatttttgcttaacggttaagagccacctcggagtttggtccttctttccctttgatgactctctgaaaagtgtccgtctgatcagtcggccccatttgctgccgcccttttcactgcctctccctcgcgacgaacaacacaacgaatttatcaaattttacctcgaattgatggatggtcagggtacggcggatacggaagcagcagatgtcatttccctggataatggggaggaaaattggcaaatggacgaccagaacggcacacttggagacgaagttcccatagacgctgaatttgctgtttctccgcacatggcatcagacgatggaagtcccaaacgaagaagatggggcagtgactgcactgatgaagaggacgacgaccaattggacactggctttggtttcctgaacaacataactctgaggtattcttacaatcagtcgttgggaaaccaacaattgtttttcagtgaaataaagcaaatttactatcaaacgaatttgaatgtggcaaaagtgaagaaggcgatgctaagggtcatttcctcccataagaaggtatttgtgtggtaaatgactaatttaatttaattgcatggtaaatgattaatttgatttaattgcatggtaaatgattaatttgatttctatcggtgatcgtttaagtgtgctcctccggcagttgattttgtgatgggtttggacgacgaagctgatgcagaagaccatctgtcatcttgtccatcacaggacaatgattcggaacagattgaaagcgatgttgaaagtatggctgccatttccgacgatgggacgccaactgcggagggagttcaggtgggcaccgccgagtcattagttaaggcactttggacagcactttcagaacaccgcagcgaaagcccgggggatcaacagcagagagttattcgcgaatgtcccgcgttttttgaatggaatgacaaagcgaaatttgactgtcacaaattcattcgctgttctgctgcatctatgcaacgataaggtgagaaaagaaagaaagaaaacaccgacggattggctgtaaagaaaattaaccacgcaaattttagcaattcactttggcacaaatggaaggagagaataaattagtcgaagggcattctatggctgaattcttcgttaaatttccaaattgagtccgagtaccttgtatctcacaaatccgaaaccgatctccagacaaattgtatagtttattattgtttctacattcttttgctgaatacgaatgtggtatacaaagaatatcaaatggaatgactgattatactgtatgtgataataaatcagctttcatttcgccagttcttcttcccctccatgttcaaatgaagtccctttcctccccagcaaagactgtctccaaattaagtactccgctgttggggaacggatgcacacatttcgtttctcttttcccacttacacttcaaaagttcgtctggccaaccctccgtttgtgatgtattggctggggatgcgcagtttcactttgcgttgtcctgcaatgcttcttcccctttgggttgtcctccccaatccccccccccccctcacctggcattatcccatcgtcacagtcgtgatctgttttgtttgtttgttttttgccattattaaataaatccccctcccccgacgactgacaaatcttcagcacggggtcaatgtttgtcagttcgcgtgtcgaccctctcatttggaaggagccagaagagtcggtaaacgcctcgtcaagcctaaagaaaggatgtttggcgagtgtcgctgctaggaaagaaccgacacgtcgtcggggtcgggcccgtcgtcctcgtcccacaactgaacgtacgttttccgcaagtgtcccctcccctcttccccccccccttgggcccaccttcactttgacccccgaggcgggtctgttcccacaacggagttggccacgtacggccaccgcctgctgccgcatcgcttgtccacaattggccattatcataatgaggcccaaaacaattaagagggaatggcgagtgccagcgatgcaattgtgcacgaggggcatttggtggaagttaaaaggaaagggacggacggaattatagtagagtcacaaaaagagagaatggagagagacgaatggaacagtgccattcatataaacacttcgttatcaacaaattgttgtttacccattcgagtgaatattaatggcaaagaaacggaagagtccaaaaatgaaaaaccaagacaaaggacttttggcagtgacaaatggccgatcactttatcattcattccatcgtattttcatgatacggtcgaaagaacagacgaagaaataaataaatgtcaaatgagtaatgcacgtacaataaaaatccccatttgtcgtctcacatttgggaactcgttgtcggtttctgggattggccagctttctactgattgttgggacgcttctccaactcaaacaaataca

SEQ ID NO: 897 - DNA, 970 bp, Heterodera glycines
ccccccccccccctcacctgcattatcccatcgtcacagtcgtgatctgttttgtttgtttgtttttgccattataaataaattcccccctccccccgacgactgacaaatcttcagcacggggtcaatgtttgtcagttcgcgtgtcgaccctctcatttggaaggagccagaagagtcggtaaacgcctcgtcaagcctaaagaaaggatgtttggcgagtgtcgctgctaggaaagaaccgacacgtcgtcggggtcgggcccgtcgtcctcgtcccacaactgaacgtacgttttccgcaagtgtcccctcccctcttcccccccccccttgggcccaccttcactttgacccccgaggcgggtctgttcccacaacggagttggccacgtacggccaccgcctgctgccgcatcgcttgtccacaattggccattatcataatgaggcccaaaacaattaagagggaatggcgagtgccagcgatgcaattgtgcacgaggggcatttggtggaagttaaaaggaaagggacggacggaattatagtagagtcacaaaaagagagaatggagagagacgaatggaacagtgccattcatataaacacttcgttatcagcaaattgttgtttacccattcgagtgaatattaatggcaaagaaacggaagagtccaaaaatgaaaaaccaagacaaaggacttttggcagtgacaaatggccgatcactttatcattccatcgtattttcatgatacggtcgaaagaacagacgaagaaataaataaatgtcaaatgagtaatgcacgtacaataaaaatccccatttgtcgtctcacatttgggaactcgttgtcggtttctgggattggccagctttctgctgattgttgggacgcttctccaactcaaacaaatacatcacgtcatccttgctcaaattgcccaactttttagcggcactaaa

SEQ ID NO: 898 - DNA, 2229 bp, Heterodera glycines
  unsure (1)..(2229): unsure at all n locations
gtacgcgctgtcaatggtcgaggcacacacaaatctgagcaaatcgatagtaagcagcagagggcacgtccaccactcacttgtggatgaacacattcttcttctggcncaaacggtggattctgtcggacgcctgcaactccaacgcggggttccaatgcaaatcaatcataaacaaatgatttcccccaatcagattctaaaattaataatagtattggtaacatttaaacccaaaagcaaataccaatccaacgccgccggcggtcaatgataaaagcatcactttgggtcccgtgttggttctgttgaaagcatccacccttgactgactgaagcaaaccagaaaatgcactcgccttttcgaaagaaacacaaaccgttcttccgtgcgcacttctcccgttatgctagtaaaagagatggccttttgtcgcaagtgaaattcaatgagagccaacatcgaagtccattggcttacgataacgctaaaaatgagagggcgatgaaagcaaaaattttattccgtaagtttccattgccgtcctcgtccccattttaccatttatcaccgttctgaacgactccatccaaacggttcatcaaagcgttcacctaaaaaccaaaagaaaaatggacaagactctcttgaatactttggtgctttggtgttccttctcaaaaaggcgttcgatttgctgcccttcgtccttttcccgctcctcatttctctcgagggcttcttcttcgagactcatttgagccattgacatttcgagggctttcgcaactaaattctccgcatcgctgtccgtctcaccctcgtcttgtttaaatgcgtcaatgtcaattgcctaaaaaatcagagtcaattaagtttgctcactgttttatatactgaaattgtgtaaagagtactcacattcctggtcagagacaggtgaacacacgcctgacgaagtcggagcagcagtgaaagaatgcaggagtaagctttgaaattggcatcgacggccatccgagcaccgcccccttaaaagaagcaatgattttgcacccaaaaaccgcgacaatactgaccaatgaatgggtttttgattttcgccccgggcttaaaccgccgaagagtgccacagccaccaaatgcaccgtctcgaagcaactcgcgcaccttctgcctatattgggtagtctcagaaatttgttaccctcccttaatctcgcccccccccctattttagtacggtacgtcttaacttaatgaatccaaacaagaattagaaaaggatgttacttggatgcctcaaacaaaattgaataacaatgctgttcaagtttttggagttccagggtgaccagctcgtacttctttggttgcaggtcaacctgacaatgagtaatttattgttcgactgtctcaattttgatctgtccgaactcacaatcggtcggttcgtttccgtacaaatttgatttttggtacgacggagcagaatactcttcacaataacattcaacctttgagcacttgttccttaatcatttaattaaaacaacttttgtgggaaaggcataaaacctgacgaagtcataatgaattccttccacattttctcttcggaaaagggagaaattcgcaaaaagcttaaaaaggaaacccgttggctttttgttccaatttcagccttttgagaaactcaccgtatgagtgagaaaaggtcccaaagtttgttgtgaatgggcgtccccgtaaggcaccaccgatggacggcctccaaagcgcagcaacaatggaacttctgcgaattcttgttccgaatttcatgggcttcgtcgagaataatgcgctcccatgcaattttcgccagcacagaggaaggagccctgggaaacttaaaaaaggcaatgaatttaattaggtgacaagtcgtcggtcgccaacttttttgctcattctcttcccctggaatttccccgctgcgctctctccgctgtcatccgccccaatcaaattcatccgttggttcttcagttcactggccaaggtatcgtaagtggtgatgaccaagtcgtatttgatgagtctaatcgaaaattgagatttatttcgacagagggtataattttactttgtaaaaattcagtggattttgtgagaaagaaaaaaatattcctcttctttgacgaatggggtggggtggggggggggttgtcagacgcaccccttga

SEQ ID NO: 899 - DNA, 2064 bp, Heterodera glycines
  unsure (1)..(2064): unsure at all n locations
tccgttcattctttttgtgcaaaatcagtgaaatcatcgccaacgttttgccaagtcccatatcatccgccaaaattccgctgggcggtatttgctgttcacgccaaagtagccaagtgagccccgtcttctgatggggcagcaaatccacgcgaagtccattcggcgaatctgtcgccacattttcgggcagagttgaaagagaactgaacgagtgaatgctttatcacttggggggggggggcacaaacctatgcatggcattgatgacgtcattggacactgatgagattttcatgaatctttcatcagtcatttttccaccaaaaaggcgaccaggttggacagctaaaaatcagtttctgttaggtcaaaagttctaacttacgcattgcattgtaaatttcggcacgattttgctcagaaactatggttggttgggaaagtaagatggttcgtggcacattgcctaaaatcctttgtaagtggtgaatgtaaagtctgagggattcacccgggagattcttgcggccttcaattctgttcggtaaagctccaactttatcagccgattcttcgtcttcatcaatcagcacactttccccctcactttggctgtccccgactgtttcgatgtcttcctccgtctcttcttcggctgttgtctcactcgaattgtgctcgacttgggcctcctcttcgctgctcctcccactttcgtcttcactttgaacttgaagctgtcgtccttcgtcggttccacttgaatcagataacactctcttgcgattttggtcttcttcagctgccacaatcgaattttgttcattttgtcggttttcgtttccattcgacgaacttgacacaatgctgtcctcgacatccgaagagataattttcttcgctttatatttgtgatcgtttttcacgtgaattggagaaagcgaacattcgataatttcctttttctgcgatgagtttgagcacgaagttacttctgacactgaagacaacacttttttctgccgattctcttgcccttcttcctcaaatgaaaatccgtccgaacttttcttgtcgtaaaagaaaaggtccggcattgtctcatttgacaacgattcttcagcagaaattggtgttttcttactggcaggagaagctgagatcgtattgttctgaaaatggtcaaatttttaactaatgtgcaaacactgactttttctttgagtaaaggtcgttttttcagatattggcacgtggatgtgggcattggagtagaagttgcagaaaaatgttggaagctaaaatcattaactgtccgatccattgtaaatctgaaaagcgttgttcttataatccctctccaagacctctctcacataatttccaaaaaaatcgctattttttccaaaaatcctcaaaaaattggctcaaaaacgaagtttgatcatttttggataaaaacacacagcgagccaattttgaactcaagttcaaatttaaaaataattttttaatcgtaacgccaaaattattaaatttaatttgaagttttccttgtaaaaaatgtaagatctatatagttagtgtctactttttactgtctttcttagtttacacacagtacatagaagtagaactcgaacctaggacctttgcttttttccatcgtaactttatttaaattttttaaataataaaaaccgctattttttcctctacaaaaggcattttattaaataaaatttggtttttggtactaataaacaaaatttgccaaatattcctgttaacaaactaggtactctattttacccggcgacgcctatcgacactacaccttccctaaaattttttgggagtgtaccaaaaatttaacgtatttttgactaattttttattattttgtcttttatagaaagaattaaaatttaaatattaggtaaatacatttctattatttaataaattattanattgctcccgctctcactgngactcccataaaaaatagacgggatttttacgagaatcccgctcccaaatttggactcctgcattttt

SEQ ID NO: 900 - DNA, 2076 bp, Heterodera glycines
atcagcatagcatttagaaatatttaaattaataaataaccctgtttcatatgcaacaatgtcacattgtgcaaaaaaaataaagttcaaaaataactctattcttcattacgcaaatatgatattttaaaaaataaaaatctcttaaaaataaaaaatccacattccacttgtctatttccaatagaaaatcagctagtgctccaatagaaattcgttcttcctgctctaatgtcatattattggcagtctataggaacaactaaaactcagatagtggaaaataccacatctcaagtggaagtaaataaggaggattttctcggtagtctttgcaactgcgatagaaaaatagtgttagtccaatctgagaatcttgtgcctcagtcctggccttcgtcattgtccagcgagctctcattttcgcatgagctaacgtagtataagtccgcgtttctcctcacaatatattgaactcgaatggagaaaatatgcaaatcataccccacccacaatgtatgtgatcgtgagtttataactttcctttcaagtccagaccaacaccccccccccccccccttctcccacttgtcgcgaccgctctcaactctctcttgccccactttacatagtttcaatcagagtagacgatgaaaagtaacgaatgacacaacaaataaaaataaaatttaaaaacgaacgagtggatagaaagaagagagcttcggatggagcttgaaaaatgatcagaaaagaaaaccgtccattactcacacacataaaaatcgatgctcaaaattcaacgctcacatttaaaaaaaataaatcatagatattatagaataataaaccaatctacggtatataattcaacatgtcgtctggtgtaatggtgaattccgaatgtcaaaacgctttccaacaactttcggaagggaaacgctatcgttacatcatctacaaaatagtggacaaggaagtgattgttgaggtggcagtttcttcggaagacgtaataagagaaggggaattaatttgaccatctgacagcaaaatattttcagattggctccactggaactgaaagttatgatgacaattcaaaggccgcgtatgaaacatttgtgaaagacctcaaggagcgaactgagggttttgtggactgtcgctacgcagtgttcgacttcaaattccagacacagcgccccggcgcaggcacttccaagatggataagattgtcttcattcaggttttaccaaatttgttttttcggtattcactgttttagctttgcccggacggtgcgtcaatcaaaaagaaaatgctttatgcttcatctgcgtcggccatcaaggcgtctctcggaaccgctaaaattctgcaatttcaggtgaatagaagccgcaaaaaactgtgaaagactaaggaacaaggcgtaataatatctggtagtcctcccccccccccctctttctacaaaatttttgtccgtaaaaagtcatgaaaatgttttatggggttttcgagatccctccgtacgaaaattacatctattttcgaatcaatagctttgaattttggtccaaaaatggactcatgatcattgaaagttattttctttgtattttcttagggcaattgttttttttattttcattatcttttttttaataattgaggtgtctgatgagtcggaaattgcccacaaggaattgctgagcaagctgaacgacaaataccgcgacaattgaatgattggttgggatatgatgtcctacacattcctctcaatttttgtcatttatacccaaatttaatgacgcttttatgttaaaatcaaatcatgtcacttgatcgccacaatatgtttattttaatatcgggtggataaaaaagacattaattcattcatatccgagaaaatttttgttttcataattcccgttatttactatttcaaaaaagaattgtcataattaaatgaatttgccttgttaaacatagaaatgcaacataaaacaatccatttgggcaaaatgatacaataatatgctaaaggtatgggaatttgcaaa

SEQ ID NO: 901 - DNA, 14428 bp, Heterodera glycines
  unsure (1)..(14428): unsure at all n locations
cgtttgctgcttcgttcattcctccccgtttctcntcattgtccgctcaacggacattcgcgnctgcgttcagtcgcgacattcccacgggctttgaaaacgtcgttttgagcggaacgcgaccatttgtcgtttcagttccatcaccagcggtgacggctcggggtcctcttgttgcgaacttgccgtttcgttcgctctcatttcctggggcattgaaggcggtaccagctcaattgcttcaatccttgaaattgccggtgctcgccgtgtgcctcgagtagctctgttccgctgcatccactgattttccgtcaccaaattgcggatggtaacgatgacgggccccattaagtagacccataccaagggtatcaggacatcgcgcccaaaaatgaatgtgacgtaaatgcagcatgccgttgtccagtaggagacgagcagccgaagtttgtccatgaaccattcttcggtgaggccaatcactccgttcgggagagctcccagtgtgagcgcacgcgccgttttgtgctccttctccttcgacttccattgatccaaacgcagccattcatccaagtgcgcgaatagcccttcgcctgtttcgttgtcgatcgtccatcgatgaaaaactagcggcgtgatttccaacaacgatttgtctccagaggcttcgtggatctcagagatgctgctggagtcgattttctggatcgtagcggtgcgtgtgtcgattttgatccaattgctctggctcagttgcagataatggtagcggaaatttccacaatctgcgaatggtgatgacgctgtgaggatgtgaagctccggatccaggaatgcgttgagcgtcttcttgtcaatgcggatttggaccggaatgtagcggtaacagttgttgactgcttgatattccacattttgcattgaaaactcagcgcacgagaagatttgcatcgtgtcctcgtttagccacctggccataacatccttgcgtcgtaaaagtcgtctggcctgaatggtcggatttcctcctctggaacttcttcggcattccttggaaaaaagctgcgcgattgatcggcttgtggcgagttgtcctgcggttaattgtgctgcgacttgttcctcctggatggctctttttcccaatctacgatcgttgacgatcttcaggtactcatcctccaggattccgaacgattggtccgacaagcgaatcggttttccgttgcatgccgtttccattttcgcctctgctaaacgttagcgcctgttccttgcttttggatatccatgttccgcctgcccaatccgttgatcctgtgtgctctccgtccatactttcgacgaaatggtagtcgcatggcttacagctctcgttgcactccgtttcccaatttagggttgtgttgtctgccaagttgcagtttccggtcaaatagttgcaatcctgcaagtgtgagtagagcgggctgatcaactcaaaattgtcttgacggtaaaacagcgtcgccttctcgacaaaacaattcagcgttacgctctctcgctcccccgaaattagacttgagaatcttcccggaaattcctcgttcagtgggttgttgctgctccatcctcctccttcaatcggagtcattggcttatcttcgtacgggcatttgtgctgttcgatcatggccatgcagattctcttttgtactggcaagaattctttctccgtacgaacgaactgatcccccagaaggttagtataaaaatactccttcgttcgtttgatggcacatctgtaggccttcttcactttttgtggcttccgatacggcatgtaaagtgagatggtcaatcttttccactgagaggtgaggcctggcggtggtttgcagaacggtgatttatccgcgtccggtattctccacaaggatgatcctttgtgggcacaccaataaatggggtcggctccacggtgaacttcctccaattctcgattgagtcgtcgtaccgccggtttcgtttcatcggtcaccgtgccctcggttgggttcggctttgtcgttgttggcatggcactggcttgagatgggcgttccgtggttgctcagatttgatcagtccagcgacggcttggagtttgagtccactgcctccgtcttgagtccgtccttggttcttgattcgtagtcttccgctgtggttgcgtggtgactccctttgttttcgtcgtcgttctcgtggttaccgtcgtttcgggagttcgtagagtagtcatttctgtactggcactggtactcgtacgcactgtcgtcgttgctgccgaagtttgagtcgtaccacttgtttgcatccgcgcctttttgtaccattcccggatatgcgcaatggacatatccgccgctgttgtcggcaaagtgggcgtgatttgccctctcttgtcgaggctcagccgaggtaccgtcggctccgtaaatccaacgagttcctccattcgtagtggtcttccgaagggatttacaggaatccatctgccgtttcgttccggccgaatgacttgtccattgatcatcattggttgcaacagtgtgatcaataacatgaccagcatggtcaatcctgtcagacttttggttacggctcgcctccatccagttgtactcttctgggctgactctcctgactcgggatttgttcccgtgttggccggtgttcctctgatcgccgctgcgagttctccaattttttcgtattggtaaattccacagccttgcatctcggcgaattcctcaaactctcgtggcaaacgtgcatttttccgagtcgccaaatgaacttccagtcctgcccttgcaatatcttttatgtcttctttgaacacttccaattcttctctttcttccctcctcagctccaaattgaagataattttgatattccaattggccgggaacatcttttcacgcaacggtttgtcaccaaaatggacgaaccagctcgagccttcttcctcaaattccttggctaccagctcagcggcttcttggttactcacaaccaataccctcttgctttggagatggcagtccttccagtactccttggctctcagtttggtcaaggtctggccgaatctctccgtgagattcctgagccaactctcaaattgcgcctctgcacttatcacattcgttttcactggcacttcctccagaccaactggtccatagatttttcctttccactcttgtccaaaaacttggcacgaattgtcccatgccatcagcacacactcgagttgcttctgtggtatcgtcttctcattgttttggagcactttcgtccaccaattcttcaatgaatcctcaatctcgcttccgcttcccagcaaggcgcaccaattttcattaaatttcttggcgtgcatacgtcctagccaatcgaatgcgaaggcttgggccaggcagaccgcctttgattcggcttgcgggattttggttagccggccgtgggacagacttcccatggtgcaattcctttgacaaccttcatgtccctttacaccaggctcacatcgcgtaaacagcgaataattgatggtacgtcggtagccgggacttgctggtgccagctttattctgccagggttctcttcagcttgttgccctttttgccttcttttcaactgttcgtccaacggatctctggctttgaatcgtcgctgggaccgcacgggctcctttgactgactctcatcccgtgctcgcttgtcattccgaatttgcccttccatctccgaacttagagccagcaattcggttgtagcgccatttggttgccgtagcggagaaatgtcatgggcacgtggatgtcggtacttccgcccagtttggatctcattaatgtgccgtccacggtgccatttctgccttttgttgatcccttggtgcggggcataatgcccctttctccgaaccattccgcgtggtagtccccaacgcctccgatccttctcagcatttctctctgctcttcgtttttcgtacatcttcctttgttcaagtgccatttccctatcaaatttctcctggcgtgccaattcctccaaaggaacttctggttcggggtctccgggaagcacttccatcggttcgaaaggattacgtgtcgttccgcccgacgatgattcgacattcgtttgccgttgagaatccttcattgatttttccaatttctcctccgctgcctttctttcactctcagcgacgcgcctggcgtcatcttccatgaatttgactttatcttttcgcagcctttcttctcttagagccgggttagccttctcttgcagctctcgtctcacaaattcagtgccgcccaatccagcgaacaacttcctcaatcccgaaagatcaatcgtcctcccccgtcgtcgtcgatacgtgcgtgtttgctcattgtacgctacttgtgacggaaagaacgggtttcggcgaggaattctgtagttgcccggtcgcagtggatcatatggtccattcttcttcgatttgcctttgcctctgacttcctccgttggctgtctctttcgaattcttctctctttcacagcttgccgctccttccttcctctgacaggagacaaactcgattctgtcgtgacgatttgtgaatcctgcatcaccgtccctggaggcaaactggactccgttgtggctgcttgcgggtccccgccttccatcacagcacttggtgaatccataatggcagtcacttgaatttgactgacttcgtcctccgcagaagtgttaatttctagagggtacaaaaggttaatcgctcgaaccagagtttttccttttgtgtgtactcgtgccgtgcgcacgagtccatccctccccttcaaaagcttttcgacttttcccatcgtccaaatggaccgtgggtcttcctcttcttcaaccaggacaatatccccctctcttgggagacttccttctgctcggttggttcgatctctttctctgagtgaaagtaagtactccgttttccactgtttccagaatcgatcaattctttttattgcaactctcatcaattgatgcaattccccccttttccggggttggtatgtatagtcgggatccattggatcttcgtccgacaatggaaggcttgtttccacacgtttatatggcaataaaaaatcgacgggtctgagcggttgtgtgaattcttcttctgattggaatgtaagaggccttgtgttcaccacagcttcgatttcgcaaacaagcgtatcgaattcttgcctttccattaggctttttcccactgttcttcgtaacgcacttctggtgatgcccaccagtctttcccatgcgccaccttgccagggtgctcgtggtacgttgaatttccaactcactcctgagtggctggtttccaccagtatttctcttctccattcctcttttatgcactctgctccagcaataaaattggtgccattatctgaccacattaggcttgggaggccgcggcgtgagctgaaccttcgaaaggtcctcaaaaattctgttgccgtacaatcatcggccacttccaaatgaaccgctcgtattacgagacaggtataaagtgcgatgtagactttaactccgccttttatcgttaatgggccaaaatagtcaacgcccgtcttctcaaatggccttatcatcgcaactcgttcactgggcaagtttggcatttgtggataggcatatggtttaagcctctctttgcggcaattcaaacatccgtgtcgatcagacaatatcgtgtttctgatgaaccttcttcctttgggtatccagtacttttccctcatgtaccccaacagagtactgtgagttggatgcttcattttccagtgtgcttccagcacaatgagttttgtggtccatgcttcaggaggcaagaaaatcgggaatttcgtatcctcctttactgttgcttctccaatgcgtcctcggcatctccagatttctttgtctttgaacagacgaagattttcctttgttttttcctccgttggaaattgtcgttgtgcttcccatatcagcaaatgttcggatgcacataattcgggcactgacagtacacccttatcttggttcccgtgcttttttgggcccattttgctcagaattggcaacaaatttccattgtatccattttttgccaccgaatgtatccagcgtaagacataggcacccacggttttggcctttttccagctggagtaccggttcacatcaatggttggttggaaaggcacctcattcatgactgcggctgttttcacttcttcatcttcagcacttcccctgagcttctcttcatctgggtgataaacctttgctggttttggccacagggccttttcttctgataaccattttgggccatgcttccataacaaatttctgctcaactctcttggtgttgtgccgcgtgatgccacgtccgcgggattatctgcactgaccaaatgtttgacttcaaactgtccacgtatttttgctaatcgatttgaaacaaatcgatcgcatttcttatgctccttaattcgttcaacggaacacaagctgtcagtccaaatcgttgtctgtgttggtttgagtttgagatgttggagcacgtactttaacaacttcactcccagcgttatggattgtaattccatttttggaattgttgccgcaacatctgatatgttggagggcttcaccaggctctttgcaaacaccaaattgacgctcattttttctgtcgattcccggatgtaaatggcaacgcctaagccttttccgctcgcatctgcgaagcaatgcatttccttgtccacttcgtcttcgttgtcgactcttcgtgcgaatcgaatttggacctctgtcccctctttcgtttgccaagtctccatgatttgattccattcatgaatcaattcttcttccaatccttcatcccagccgtttttggcttcaaaacgtttttgcaaaaaatgctttgctgggagcactgcaggcgccactaaccccaaagggtcataaatttttgcaatgtgtgccaagatgttcctcttcgtgtgctttccggcaaattttttaaatcggaagcaaatttcatcatcctcattcgtccacggaattccgagaacttttatctccttttggtttttggccaataattccgcaggaaggcttcgtatggcgatcggcttactgcagaaaaattcctgcagcttcattcccccttgacggaacagctcgatcgattcgtggcaaatttgcgccatgtcttcattcttcttcacattgatcagtatgttgtccacgtacaaattctccattatggtttgcggtagaaccgtgtcgtagaatgagagatgttcacggatggttgcatttaaaagaaatggtgaagttgtcaatccaaatgagacccgacagaaccgaaacacaacggttctcacatatgttgggcttgaaatttctgtcttttgtggatcctccagccacagaaatctggtcgcgtctctgtcctcctctctcactgataattggaggaaggctttttcgatgtccgccaggattagatccttcattcttctccatcttagaaggatcccggtcaattcatttagcaacaacggccctgtgtgcaagcattcgttcaacgatggggctcctttgcggtttgctggcttcgcggatgcatccatcacaattcttatttttgtcgtggccttgtccatttttatcacgggccgatgtgggagataatgtaccggtccagttgtttgtgttggatccggcactctttcgattatcccgttcctctcccactcattgaaaattttttggtattcgtccaccaaatttaattctcgcaattttttcactgtgccacaaagtcttgccctcgcttgttgaaaatttgtcggcaaatcctttactctttcgttccatggtaggccacattcatatcttccttctttgaatgtcaagctttttctgaacgttctcatcacttcttctttgtcgttttcttctggattgtcactcaatccgattatgttcagcccgaaaaatgtctttatctgttcttcaatttcttcgtcagcatctcttctgctattggcacattgtaaggcacttatgagtgctccagtgtacgtcacttgcacactcatgtccattgggccctggacttggccataaccacttatcatccgcccgactcgagacgttgacaatgtgaatccacttggcaacttttctgtttcgtctcttattttcaggtcatgtctgacatccattcccaacagaatgtctggctgtcttggccgcgatggaagggaaagttttttcttgcttaattccgcttcatccatcgaattcagcgttacgatgggcatcgctttcacaatgaattccatttcattgagtgcgcatatatatgggtctccgttgactcccaaaaatcctacgcggacaacattgctcacgtagcgtttggcttctttctcgccaaaaccagtcaaatggcactcttccgtttcaatcaccggaaggcctaattgttttgccacattggcacggatgaatgagcgttcacttccgtcatccacaaaaactgatgcgaccatgcttctttttggattggatggattgaagatggtcacctctgctgttctcagcaggactcgcgaatttccttgcactgaattgcattgcgagggcgtgaacgaaacttctttgaattcgtcccgtttgtccggtttctcttctttccggacgttcatgactttgtttgccatgtttctccactctgttgccctttgtgggttgtttgtctgatggcataatgccgttgggtgtgcttgctggcacttgaaacatttcattgggcatgggcaatttcttccgatatgatttgacttcaggcatttgtagcataagcccttctcctggaggactgcaaatcgttgttgcaccgtccttgccttttcgcaactgtcgtgtctgtgtttccctccacagaaaacacacagaaacagttcaccttgtgtgttaactgctgttggattccgctgaatttttgggcttcttccttgtcccttacgttctcggaatgcggaattttgtggagtctgctgaaaacttcgttggccttgcctcggacttggcattttttgttccgggatttttcttcgctctccattgggtttcccgaaatgtgttgtggctacattgactgagcctccgaatctgttccgccttaattgtcgtttgaatccatgctctggatttgcctctttgccttcgaagccatactccctcatgacttctttgattgctagctctttgctcaatgcacttcctaaggcctttcggagggatgacgtgtcccaaaagtctggattttttgctttctcttccagaatttcacgcaggaaaggcttgtatagcttcttctcaagcattaaataaattggcggcccttcaatgtcttcttccgctgcttccaattctcttgccaggcgttccaattccatgcaaaaatgctttgtgtcttccaccgaaagtatcgcttgaggttcgacaactccgtgtgcaacctccttacatattcgcctttgtctccataggtgtcctttaacagcttcatggcaatttcgtaatttttctcttccaagcgtaggcctccgatgagcaatgcggcctctcgctcaaccagcgatttcagcaaatttagcttctccgttttgcttcctggcttttggtccacagccactttaaatgcttcttcaaacatgggccattcccgtttgtctcccccaaacggcttaattcttagtgttggcaattggtacaacgcggcagtcatttcattgcctctcgcacggttattccctttgtctgcttctgcatttgacttcgccattgcttttgcatgttctctttgctccactcgcgcgtctctgtccgctttggagcgttgcagctttgctcctgcttccaccttcatctccaggtccttaagctctgttagctttgtgttggctgcttccatttttgtgttcagtttctccgttgtttgaaattgttcatacgctgtctgctcactttttctttcgtccttgtccattttttgtatgacgtcatgccatttgcttgcggttatccaaatttgctcgattttggcattcactgcctccacctctgactttattctctctgccgcgctttccaggagaattgcattttccaatgaggtcagagtttggtccggctcagcatacaattctgttgccgtttttgccttttcaagagcctttagctctattgcgatttttgtacgcaaaaatcccgacatttttgctcacttttgggttctgctacccgacttccgaacaaattgtgtggggttcggggtcacaaaatagcagtaagttgaacaaacagtggacaaagtgagtttgacttcagacccaccaagagtcttacagtgtatgaagaaggacgctacgagttacgaaaaactcgatgggtccgaccgtgtaagcgggaggcgccttgggtcacaaaaaaccctaggagcgacctgctcacaatgggggacgccttgggttacaaaaaacccgaggggtcggtcactggagaaaggaacacgcctcgggttacgaaaaacccgaggggccaactgagcaaggaaaaagacgcctcggattacaaaaaatccgaggggccaaaccctggggaaggcaagcgacacgaattacaaaaaattcgtgcggccgaactatgggaccggggaagcgcctcggattacaaaaaatccgtggggccaaaccctggggaaggcaagcgacacgaattacaaaaaattcgtgaggccgaactatgggaccagggaagcgcctcggattacaaaaaatccgtggggctgcgctaattggcaagggaagtgccacgaattacaaaaaattcgcgggactcagctctgggaccaaaggaagcgctacggattacagaaaatccgaagggcaaccttccgggttcaaatcctaccgtcccctgtttttcccttttttgccctgcccaaatctcaaaatttcctcttcccccaatttactcactaatcccaaatgctcctgtgcgcaatgtctgttcggccgctttttgtccacgcacggtccgttgaagtgccagggtcgccacttgacgcagatgggggaggggtctgcgccgatttgtccgtttttcgctgccgccaattgcccaaatttgccgcccaagaaattgcaccaaaatattccacaagtttatggctcaaacttgggtaattaaacccatacataagaaatgtgtgagaaatacaatggggggaaattgtgacaatggggacaaaatgcgagggggaaatgcaaagggaaaaatggcacaattggggggcacaaaagtggggtgagtcgcggggaggggggggcacatcaccggagaaaggcgggaggggaagggtccgggcgaatttgctctcccgcaaattcgtaattttccatcaaatgatcgccgatttcatcggctgtccgcctgggtgatgtgtcgtttcgtccgtcgcaccgcgatggtccgatcggcgtttttgcactgcttcgggcgtccttcacgcggagaaggcgccacatccgctttttatcgctttccttcccctcattcacgtgctcgcctgctgccgtccctcccttcgccccctttttgtcctcccttcccttcatcatttcccgtttgccctatttttcccatctttccatccatttatcactccttgttcgcaacttcattcactcctccccgtcctcctcatttgtccgctcaacggacattcgcggctgtcgttcagccgcgacaccacagcacacaaaattgttttttgtaagcaacaaacaaaaaacttggtttaacttcaatttctattcattttcaggtgctgtatttgcaacaaaattgttgatgagccacagcacacaaaattgttttttgtaagcaacaaacaaaaaacttggtttaacttcaatttctattcatttacaggtgctgtatttgcaacaaaattgttgatgagccacagcacacaaaattgttttttgtaagcaacaaacaaaaaacttttgatgagccacagcacacaaaattgttttttgtaagcaacaaacaaaaaacttggtttaacttcaatttctattcattttcaggtgctgtatttgcaacaaaattgttgatgagccacagcacacaaaattgttttttgtaagcaacaaacaaaaaacttggtttaacttcaatttctattcattttcaggtgctgtatttgcaacaaaattgttgatgagacaaaaattgttttttgtaagcaaatcactttttttggttcattaattcttatttttattttaaagtgttttggtttttggtcccggattgaactggagcgaaaaaactccaaaaaaactttttatttaaattctttaatacttgtgtttaaataattgtcacaagttttattgaatttgaataaatttgtttaaatatttcaacatttgtctctactaattaaaatgttattgcgtcacaatattatctgcttgcaattcattccgtcttttcttcattccttgcttccttttttcccttccttccttcctcccttcctttcttccttccttaattattcaatttttagataaaatgtcaaatcctcctaatcctcctaattccccctatcattttttaaaagaattccaaatcccttggcaaccgccttcaagatccccatcgccgcttccttgtcctcatcaacctccttctacaccaacgggcgctacaactcccccgggttgcgagcctcttataacctggcctccggaggactggtcacctgaggaatgtatgcagacgaacaattttgatttattatggaattctaaaattaatataggttcttcgtcccagtgcatgcctgaagagccacaaattgtccaaactgatgtttaggacattgtgcaaccagttcatgaaattgaacggtaaaagagccaaaaattaactcgtgctaaattttgaaaaatctcttggtttagaaatgattcgccaaagcctccgccggtcttattgttctctgagtttaaaaaaaagctcgaaaacaaaaaaagaaacgaacggaaggccaagtatggcttgaactttaaacaaaaacaacaactttttaagaaaaaaactcttggaccgtgcagaaaaagctgaaaaggaggcaattgagaagaaaagaaaggaggaaacaaaagagtaatttgttatttttaaattagtaaaataaaaaaataattctttaaaattaaataaaagtttaaaaactaatttatttactaaatttaaataaattattaaattttttgtataaatataataaaattttagtcttcttggttggaaaaaataacttttttttgaattatttaaggaaatcttttaaaaaagtattttaattatacaacaatttattttatcacgaaaattttaatacagctacttttttattatttgacgaatgatattacaaaacattcaatattcctaattttatgccaattactcatgggaaaaaagaaatgccgtcgtaaaaatatgcctatagtgcctgtggttgggtaccagcatattttttggaaaactctaatgcttctctctagaatttgggtactatcattctcattaagaattataactgtttaaaatgaaatactttttgatactattcatttaacagattcaaaactgtaaaagagcgattttttgaatcaaactaaagtaatttctgaaaatctaaattaaagtcattccttccaacaaaacagaaccaacagtttaataaaggtaattatacaacaatttattttatcaagaaaattttaatacagctacttttttattatttgacgaatgatattacaaaacattcaatattcctaattttatgcaaattactcatgggaaaaaagaaatgccgtcgtaaaaatatgcctatagtgcctgtggttgggtaccagcatattttttggaaaactctaatgcttctctctagaatttgggtactatcattctcattaagaattataactgtttaaaatgaaatactttttgatactattcatttaacagattcaaaactgtaaaagagcgatttttttgaatcaaactgaagtaatttctgaaaatctaaattatagtcattccttccaacaaaacagaacaaacagtttaataaaggtaattatacaacaatttattttatcaagaaaattttaatacagctacttttttattat

SEQ ID NO: 902 - DNA, 6567 bp, Heterodera glycines
ttatttttgttgagctttttctttgcgtttttttttagtcgttaattgtagtaatttgttttaataatgattcgtggtaattgcggatatttgtgtgctgtggaataatcttgtttgtgttttaattgtgcagtcaattgcatttattgcgaattgactgagtcggcataattggaaagaagccgaacgaattggtcaaagtccctaataataatattgtccccaatctctcctgtcctaattaaagactgttcccgtgcccctgccctaattaatctaaggcaaataagcagcgaacagcaccgaacggcgagaagtttttactatttggcgctcctggacagaacacaaggtaacaacgacatcggttcaaatttttggaggatttcggcattttatcgatctctgggggagacgataaacttttcgacttttgatattgttctctgggggagacaatcaacatcaacaatcgttctctgggggagacgaaacaaaaacgcttaaaaagaacaaacaaaaaccaattgtttgttaagttctctgggggagacaaattcggaaatttttcgacactcaagtcacctggggggtgcaaatagtcgattttgaaatggaaaacttggaacggacactcaatcatactcgtttgactagacagcgagctcaaaatgaaggaatattgctcgacagagatggaaatgttttttttcgggagaatccaccaaatagaactttaggcgtgatgaaccaaaacgtggtggtggcggatcccaatttggagaattcggagcagctggactcgatggaaatgagacggcgccttttgaacccgaacaatgacagcgcacttggacagttgcgacaaaatgaacgtgccagccttgacgaaaacgaagaagaggaggcaaaccaaggttttatgcgaaaccgaacggactggacacaaaatttgggagagagggcaggcccaacccaacaaatttttcgaaattttgtctttggacattcccaaaatgaagatgacttcttcgatcatccaaacattagaagaacttcgactccggtcaatgaaaaccgctgtgttggggttggcccgcaaaaccttaatgaaatagggttgttagccgaacaaattgggagggtcatcgttggtcagctaaatagtgctcatcaaaatccgaacacaaacccggcaccaaatttgacgcaacatggtgttgaaatccaccagcaaatacaccattcggctgtttttgcgcgtcgagccaataacataccgtttcgaatgccgggtcagcaaaatccagcagcgattcaacaaaattttggtcgccctcaatctcaacaaattcaaccaccaaatttccaaccccgtcagccatatgcttggcaaatgaacgaacagtgcgttcaagtgcaacaaccaccaatgccgcagatgaactatcagccgcccccgacctttaacacacatcaaaatcagcctaattttggcatgggaaattttgattttgggattgtattggagcggatccctgacctctcaggcaccgaaggatcggatggtatcaaaaaattttttaaaaagtttgacttttattcattgaattggtcggatgcgcaaaagattagggctctagaatcaaagctgtatggtcgcgctgagcgcgcattccaaactgcgcaaagtacgcaaccctttcgctacgaaccaattaagcgcgaaatgcttaatctcctggacgaaactgacgcacgcaatttgaatgcgtttgatgaactgatgcaaggcgtgagacggggaccaaacgaaagcattgacgagttagcgaaccgtatttcaggcttggtacagagagcttacaacggtttgccacagcatttgagcaacgaatacgccattaagtttctggttagagcgatgggcaatcctgagctcgcgttaaacctcgagcttgtgagaacgccaggcatgaccctggaccacttcgtgtcacttgccgcgcgtgctgaatctacgcaaaaggcaacacaacgattttcgaggccggacaacagagaaaggacttggagaacgaacacaccgcaacatttttcccagacgaataatgggccctcaagaagcaattttgaggaacggggccagcaaatgcaaaaatttggaacccaatcaaaccgaagttggagttgcttcaactgtaacagcccaggacatttggccagagattgtccccaaggaaaaatttttcgcgcaattgagcgaactaactcttctacgacaatgaatcaacaaggcaaacaacaaatgggttataatcggcagcaaatgcctgagcccaacgaaaacccaccaaatcggcactaccagcaaaagaattatttgaagcaaaattgcttagttctgcaagaggaacaagttcatcaaaacaatttcattgttggtgaattgaagcaggacctggaagatttttttgacgaaataaggaaatgcgcgacggaagacaaaaattcaaatttttcaaaagtcggaaaagtaatggcagttttggttgaagtttttggaacgaagacgaaggcaatgctcgacggaggcgcacaaatttctgtaattgaggcaaagttcctctacaatttgataagggacaaaaaattggacgttcggaatttgagtgttttgaaagcggaaaatcgcatttccgatgcgaatggcaatcctttggaatgtttaggagttatttgtctgccgataaaacggcatgagaattcgagcgaggtcaaagtcgcgatgcatatcgccaaatcgtcgattggatttgaccttctttttggcacgaatgcgcttaatgaattgggctataaaatgtacgatgccatcagcgacactataattgattttgaaaaagctaagcaaaacaaaatcaattcactcgctgtgatctataaaacggtgctagaaccacgagccacgaaatttaatggatatggcgagccggatcaatatgaaggcagagaaatgttattgccgtctgatcaaggaaacgatcaaattcggttggagccaacaatcgcgattagccgtgacaagcaagtaatggtgaagaaggaagggaaaggtggagacaaaccgccaaagaaagggcagctgcagaagagacggacaccttatgacgttcgggaggacgaaggcgagcaaattactgccatcaccaaatgtaaacgcgtgaaaaatgtgtcgaatttgctcccggctgtggtgccgccacccgagggaatgtcttacaacccgccgattgacggttatttgagaatggccgtaataaatgcgaacgaagaaagacaaattgaaaagaaacggcggcggacagagcgaaggattggcattggcactgacgaagtgtcggcattgccggctttgcgggaagaagtgacatattccgtcagaggaggagtgaccgtgagaatgaaagaggaaaaagtgaaggaaatggcggggggagagaacgaaaaagttagtcccaatgagttgcgacttcaaaagcgaaaaaccacaaaaggaaagaaacggcagaagttgcgaataaaaaaaagagagaaagaaaacggtggaaaaggaagtggagggaaagatgagaagacaattggacagttttgaagtctgtgaatcagatggacaaatggcccattatgagcaattaggggcaattgctaatttaaagggtggcgaaggaatgattagaaaaatggtaaaggcggcgcaatcaagagaaattcccttttcagagatggaaattgacaacgaagatgaagcagaggacacgttcggttggaatgccaagtgtgacgtcggtcaaggcgaacatgaattttgtgccattctccgtgtcgcagaactcgatccagcgcttggaaatgctgaattgggctcaatcacagtgaagacaccactgcaggcacttttggcggtgttccttttgaaggccgggactgtcaaatcaatgacagccgcaagaagtttcgtcaaatcaataattgaaggagcgccaaaagaggaactccatctgttcgtgaccaaaaagggagactatgtggcgacaggacaatgtccaactgaagaagaccaaatgaaggcgctggagtgttggttcgaaaagtgctccgtggcaaagcatgctttggaagagagcggattcaaaaaaatcggcatgtacgaacccgtcggactcaatcatttggccgattctgagaagaagaaatgggaagaagcgatgggagagacaccgtgggtgctggagaaattgagggccaaaatcattcacaaggccacaaaactgatcgccttgccacgtgtcataatcggagattcgacagcccaccaattggccgaaatcttggaccaaacggcggtgatcgggccaaaaaatggaacattggcggagacagtgcgaagcctgaagcccgtggtgctctccagcaaagtgaaggccgcactgatcattgtcggacgagattcactcttgggcggagaaaccattgaagtgatgatggagcaatacgagatgattgccaatttgtgccgccgattcccgcaagtgaagttcttttggacatgcccaccgtacgtgcacgacaaacacgacgagtacgaagaactgatcgaaagcttggtgccgatgatgagccaaaaaccttttcttcctgtttgggtgacagaaaaagggcgatcgcttcacgaagtgttccgattcgccaattcattcgacaaccaaagagtgacaacggatggactgatgaaagaggccggtttgcgagcgctgaaggcatggctgttcacccaatccgacttcccgggcgatcagaagctgaaaattcggtcaattcgatcgaccgttcgtgccgttgctacgataggtctgggggaccatcgccaagcaagcacttcgtctttggccgtaaatgactcgataggtctgggggaccgtcgacgtcacacaattggatcagttggacatcgcgatcgtgatcagcgacgtcagagcttgggctcgattggtctgggggaccatcggcgccacacattcggagaagtgcccagccgtgaacgccatcatccatacagccgttggaacaaccgcgccgtgatgccgtaccgtggtcgtggcccgtcgcactctcgtcgttagccttgttgttctgatcgacccaccaaacctttccaatttgacggcagggacgccttttttgaggagcgggggatgtagtgatattttgactttgaccattcgatattattttaatttattatttttggcattttgtttagttatttttgttgagctttttcatttgcgttttttttagtcgttaattgtagtaatttgttttaataatgattcgtggtaattgcggatatttgtgtgctgtggaataatcttgtttgtgttttaattgtgcagtcaattgcatttattgcgaattgactgagtcggcataattggaaagaagccgaacgaattggtcaaagtccctaataataatattgtccccaatctctcctgtcctaattaaagactgttcccgtgcccctgccctaattaatctaaggcaaataagcagcgaacggcgagaagttttactattttgccaccattttcacttaattaacttttcacgcatttgttcggcagcagttgtcatgggaatcattgtcactatctgttgtaacattttgtacatataacatgtagatgtgtttatccgcatgccggccgagatgacactttcaagcgcaagaatgcgttatgctattcttttttttttggcatttaagtcaaggtcagtacagaattttagtaattttttgtaaaatttgtataaatatttagggatttttaattaatataattcccagtcctagttattattatttttccccgaaaagttttctaaaattttgccaatttttgtatcaattttaaaatgataaaaatttatttatttatttatttatgtattagttttcatttttaattacattttaatgctaaaaaaagaaaaaatttgttgcatttttttgttttcctctttcacacatacaaatagatatttgctctaattgtgtgtgaatgaccttaaatcccccgccccgcactcgtccactttttttttgaagtgtatcgatttccataattttgtgcggattgaggaagttcatgtttaaaccgtccaaaaactacatacctatttttatttttctaaaaaataaatagaattcattgaggcttaaccgtctttttttgttgtaatgctcgagcttctttattctcgggctaagttctgagcaaatatatttctgcatttaaactcttggtaatagtgtacatggtagcgcccttttttgaaatcgaaaattttcaaaaaagttttcgaaataaagttgttttataggttttcagggtcggagaacacgattctgacacctatttcgacaaatttcgaatccctgacccggattcgaacaaaaattcgaaaattcaattctcgaaaaattcaaaacatacaaaataa

SEQ ID NO: 903 - DNA, 972 bp, Heterodera glycines
  unsure (1)..(972): unsure at all n locations
tataaaacactttatttcgaaaaatctttttgaaaatttaatttttcaaaaaaaggggggggctaccatgtacactattattcaaatcaaatgcttttgtgtattttatatttaacgaatcatttaaacaaattttctatttgtgagtggttgtgtgtattcgagcccgaacccggaatcggatcctccgggattttcccgatagccctgcttttaatcaatttttgcattcttgatacaattcgatagcccagatgtttctctattatcctgtcaaatttgaaaaaaaattggtcggtcaactttcgaaaaagatgtatgaaaataagtactattatctatagggcggggaattatatggaaatccatatttttttcctggactgtggggggcctgaaatgcacgaaaaacatgtttttagcttgatttgaagcttctaggatggagttccatatcgatatttttccatatttcacgatttatgtccatatttgtccatattatggcatttttatccatattttatgtccatattttggcatttttccaaaaaacctctattagaacggcccccagcagctaaattggactttttgagcccaaaaaccggaaaattttccaaaaaaatcattttttcgccaaattttctcgggaatattgaataaatttaaattttcttaaaaattaataagtttatgtcaaaaataagcaaaaaagataaaatttcacttttctggttgatttttcgctaaaaatgagtaaattttagctttatcttgtttttttcttctaaatgatttttaataccatatttagccatttttgaagggctttactttatattaacaaatttaaagaaattttgggaaattataccctncatttganaaatttatgtccatatttttgccattttatgtccatatntctcgatttttggtccatatnntatgtccatatntctcgatttt

SEQ ID NO: 904 - DNA, 4638 bp, Heterodera glycines
ctatcatatgctgtattttgtttgaaaatagctaaaatggcggtttttacgagacggacaagcacccataaaaggaatgctttcgctccctccatgcaaaagaaaaggccaatttttggaaaaaatgactcaacggccgacggctgcagcacacaacaaaaacatcattttatagtgggaaatggaagtgtaaaaattgggaggggagaaagcgtagagagattgagagaagagagagagagagagagacagagagaattgagaggaaatcagaaagagatgaaagaacgaaggagggggagggggagagagagagagagagagatgtgatgagagaacgaggaagagagcaaaaggtatggtaagtgagcaacagagagaaagtgagagaggtaaagagaaagagagagagagagttagagagggagaggaaatgaaaaaacatttacgacaagggtgggatggagtggggggaggggttggaggaattggaacgaagtgaatgctttcccatcctccaacaaatctaatccattgcaaacagaattcgttgttggaattttctaatttgcattgaataagccgcattcatttctttttaatacagtgtttggtgaatgaaaccaaataattttttaaatttcgactaatttttaaaatttgagttagaacccacattctatataaatattttttatgtaggtaattttattttttgacctctgacaaaatttttaatcgcgaattctttgttcaatttcctgttcacagtcttgggttttttatcttgaaaaccgagaattttatactattattggtaattaagagttaaggcatggctcgaagatgaaatttttcaatcggagaaaaattttttttaattaaaaggaattttataatttatagcaaattttgatcaaaaaagcaaataatagctcaaatttttgaaaatctaaggcattggtggtccagcgatgcctataggcgccgctaggaatttttatttttatttttttgcaatttccttaagttaataacaaaatttgcctgaaaaaaatcagtcattttcgtcaaagaatcagcatttcaacaaagaaatcagctttaacccttcaaaagcagaaaaattatatggcaaatccaatatcagattcgtgatcagcatcccgaatatccccatataccatttttttgcttaaaaaaaatacaaagttaaattagggacacaattctccatgattgtccatattttttgcgattcgtttttttaattactaggacttccttttttaggcacaaaaaatcgcgaaataggcacctaaaaaggcataaaaaaatcgcaaaatagacacaaaaatcctcaaataggcactaaaataggcatataaaattttttattaacgctttttaggtaacaaaacactttaaatcttaaatatttcaatagaaattattaaatattttaatgtttttttcgaatatgaacaactttttaaaccaaaaaattaagaaaaaatattaagttttgggaccaatttttgaaaattttttcaattcttagggggtgtattttctgaaaattttttttgggtcatttcttaggggtgtgtgtttcgtttttattgcatttttgttaaggattttttttcaaaaatcctaaaataggcacaaaaaccccgaaataggcattataaaagtcatcgtagacaccccaaaccaagcggaaaacgcgtttttgtgtgcttatctatgcgtatcaagtacgcaaaatttctttcttttcctttttgcttaactattcattccttttaggtattttttcatcgatctttctttctttctttgtttctctctctctctcatcctatccttgctcctcctgtgtagcaaaaatctcttttttccttttcttttttctctcatttgtaccctgctcctcctcttctccccccactcttcctcctttccctccttttgccctgcttttatcccttcgtcattattctttttttctcccacacaatgcactcactcactatgtacataataatgtacataaatatcgctgctgctgccacgccactctcactcttaacatatcccctcttgacacatttttcggcaaaatgcgtaacttcccttccccctcccccacttcccacatttccctgccacttatgcctattacagcagcgacaggtccatccgccttggatcgatacggtgcttaattgagctctgcctatctgctcaatgtacattatttttgttaagatgaattgcacaacaatccaatcccttcaatttttttcttctttgttttctgtaccctcgtaaattttcactgaattttttttttttaatttaccaagcatatctggctaaattttgttttcagaatttcttgaggagataaatgtcttcccccggctgccttttgtgcaatatgttcataggtgtctcaagtttttctggcatatttgcttccccatgtcacaggttttttttttcttaattggtttaaatatgtgccgacagttttttctctcgtcgcaacgaaaaccaagattttcctcaaaataaggacaaatgcaacgaatttgttcatcttttgtgaacccttaaactttctcgcaaaaatttcataccaaaaataaaattagcatttaaataaacggcatccgattttcactgaattttttagtttttgtttgaaaaaaaaattcccattcgtttactcatcgatgtttgcatatttttcgtttcattcactcgcttctcgcattacaaatgatgtgaaaattgtacatagataatcgattaaaatggaatggctttgtgctgtttgaaaatacataaagcaaaaagcgaggattggatttaaccaatttttggaaaaccaaaattttttttatttccgtattactaaaccaatgcgatttattttttgctttgttaagatcggagaatttagatttgagttgaacggacggacaaagacccccattaaatttgcttgtaccataaattttttcttttttgatgacatcaccgcaattaacgacgacatggccaaatttggacaaagatgagaaatggcggagacgacggcggaagggccaacaaatttccgtgtgcaacaatgggaagaggaagtgggaaaaataatgaaaattttacatttgttttgtaaggggtaaacaacaattttttgtcgatcggtccaacattgtgaatttgtttagtctggatagtttcgatcagaggccaaacgcaatttttttttatcggggattgcttgaatgagtccaagccgacttttatgagtccaaacgctttttatgactccaatcaattaaccatacctgttttttagcttctttagactttgtgctctcgaatgataccaaaaagattgggtttgttcaagcatgaacaaagttttgtatagaaaccaggtatggttaattggttggactcataaagtgcaatagaacgaaaaagtcgctttttgatcgggtcaaccgaaaaagttcgggtcgtcaggaaaaaggccgaaattttcggatatcgagtttcaggcatggcaaccttgttttgatgaaaaattcatcccgcctcccacccaaattgatttgcacaattcttccacaggatgatgctgccgtcattcaatgctgctccgatcattggcatctgtttgctgttggtgttcattccgtgttcaacagcagcattgacatcacaacaaccgcatacaaaaaacaacaccaacaacgacactgacaataatggatcatcaacagaatcttcggtgttagggccaccatcacggccaccgtcatcatcggcggcaccatcatcctcatcatcatcaatgatggtgatggcagcacaaaaatcgcagctgacggtgaccaatgaggacaagctgtgtgtgatgcgcaaaatttgtggcaaggacggtgaactgcgtcagaattgcccgtaagtcagtcgatgatgtattactggcatgagcgtgcatgtataaatttgcaacaaaaaaaaatcactaaaaatttccattgtcttaattttttaaaatcaagtgtggcttgttttttcaggttgaccaaattcaagtccgtagtcagaaaacaattttggaaggaggatttttttttttttttggttgctcttcgggccaaaatttttttctcttgaaaattttttcattttgcgagggagggagaattccccccctggctactggcctgtctaaattgtccgtcttattagacgtggagtctgacattcatttcgcaccattccaaatctcggatttggatttaagcaaaattcgaatttaaaaattgctcaagacttacaaaaaaaaaaaaattaaaccaaaaaaaaagtcgacagacatatttgcccgtaacataaaaatattaaaaaaaaaaatttttttttttcagttatccttaccaacccttccccatcaatttgaccatggaaattgaatacaaagaattgtgcccgcaactgtttaaaggttggttggttggttgtgcgattaatggctatcgtccattttattataaaatttttttttttttttttgatggtaacttcgccttatgctgtgacaacgag

SEQ ID NO: 905 - DNA, 2469 bp, Heterodera glycines
attgaaagtgattgtatccgataatttgatccctatcaaattttgaaaaaattaaaattttcaaaccaaagaattattgtttctaataaagcaaaagacaatgttttcttaaatataatgctgtttaagacctccggattgaaaattttaaagtttaaacccgattttggatataggagccaatgtgggataacccccaaaaatttgttcagaaataaggaaatatatttttgaaatttttttcagttacgaacaattaccggtccccataaattcgagcatggaaatcgaatacagcagcgcgttgtgcccgcaattgtttaagggttagttgtttgcgcaatgaatagctgtcgtcgattattaaaaaattagatggcaacaccgacttatgctgtgacaacgaacagttcgatattttgaaagagcaattggaacgcgcgcgtactattctctggcattgtccgagctgttacgcaaattttgtcaacttttggtgggtttgaatttttttaaatttgcggatggggggtatcccttccgtccaatttttggacaagtttaatgttatttaaaataatgttggtatgcattccggcatatttttgaatggtgaatccgaatttgtgcctagaaaagatatttgcatttaattttttctcgaatagttttcgaatgaatgtgttaccactcaaaagcctattatgtgttctaggttagcctgcaaaattaaaaaaaaaaattttttttaaatgatatggtcaaaaaaactgattttccaacatttttgtctaaacttttttttgaataaaatcttaatgaatttttctaagaatttgcaagctaatagaggaaatttatagctatcaaatggtattaaattgatacaatttggactgattatataaggagttatatcccaaaaagttgatgattttggctatatttttgcctcaacaggtgccaattcacttgttcgccatatcaggcacaatttgtggacattgttcaaatgcgtaatgattccaataaaatttatcccgacgatgaggagggatatgtgtcagaagtcaattactacgtaatccttttatggggattttaaatatattttttaaaataaatttgtttaaggttaccaggcgctatgccgacgaactatttgattcatgcagaaatgtaagcgcgccttttttaaatttaaaactcttaattatttattgaatttcccaattgatcagccattaaaaaaaaatttttttttggcaatttgtgccatttccaacttttgtttcgtacaaattcaaattttctctttttaaaggtgcgcacttcgtccacggcctttgtgttaagcattctttgcggcacttcaattgaactgtgcacgccgaagaagttcttccaatacattggcacgtacagcaaggtcacccatgtgccgttcaccatcaacgtggtgatgctcaatgacagccatcctgtgaaacaaaacaacaaaatgatacgcccgatggacacgtaaggattttctggctatattatacaattaatgaatccgatcattcaatttacagcctatacacaaaaaaaatttttttttcaaatttctcacttttttgtggaaaatttttactctatttattgggttttttaatttcggatttaaaaaaaaataataatgataatattttgttattggtttattcaaattgcacaaagattcgaatgaattgtttcgtcagtgtggatttaattcaaatttacgaaacgtctaaaatttggccaaaaaactgcgcaaaaattaattttttggagaaattacgttttttttaaaattttgtaatcatttgtgcattttttgctttttgttatgtgtagtataaacaaatgagaaaataatgttataataaaatgatttttttttttttgccagggtcacttacaaatgcaacgaagtgccggataaattcgaccactcatgcgcttgcattgattgtcaacacgcctgcacttcgtccgcaccattcccacttctttttcatgtgagtgaattcaaaaaaaacaaatttaaatttttatcaatgttttttaaaaaatttgtttttccaattgagaacattttctaaactaaatttttttttgccttgaccccccaccaaacggatccgaaaaaaccaataaaatctttttattaatatgttttttattttgatttattactacaatttgtcaattttatttgttttttagtatttgatcgattaaaattgagaaattttaaatatttatttatcaggaaagctgcaaagtcgccggcatggattgtaagacggcaatcagagttttggtgagtctatgattattaaattatattttaaaataattttaaaaaactaatttgtactaacttcccccccccccccccccatgttcccaccatcacaggccatcggcgttttattggca

SEQ ID NO: 906 - DNA, 4527 bp, Heterodera glycines
  unsure (1)..(4527): unsure at all n locations
cattaaaaaaattaataattttaacctattgaagcgcctccatccctacccacaagaacaagacgtgtgatggtcaatcgtcgaatttttaatgataaaaacattgctgcaaatattgcgacaacaaaaaacggaaatggagtaagaaaaaaatttttaattttaaaatacataattaaaaaagcattcaataaaataacatgaaacttcctcataaaggttcatcctcgtcgaaagttttcgctaccattaaatccggaaaaggcccggaatggaaagaatgaatgaaagaaaaaaatccaaaaaaaaattattattagtttgttgtgcgaattatatgcaattaaatgaaattataacagacactgtacagttttaaactttaagataacttatgaaaatgatttttttaattcaaaaaatatatatatttagaattgttaaagaattttaaaaaatacaaaaagacttctattacatctcatcataaaagcattttcgaaaaaagtaacaactaaaactcgaaaataaacggtgactgaacatttgcgcccctacatttgcgccccgcacatttgcgccccgcacatttgcgcccctacatttgcgccccgcacatttgcgcccctacatttgcgcccctacatttgcgccccacacatttgcgcccctacatttgcgccccgcacatttgcgccccaattatgaacaaaaaaaaatatttataaaattgcctttcccaagggctaacgggagattaatatgattgtttgtttattcaatccaattatcaattcctttggtggtcagacgaaatgaaattgcgtgcagatgtcgtagccaatgctgttcattgcgatcatctggatcttgctcgtcaaattgggcaaccaagtctcgaatagcacggtcgttttcaagatattttttcgaacgaggtacttcagatacaggtctagtttgatcaagttcatggggtctcatccggtttcgttggtactcatcttcatctttgattcgactaataaacctttaattgttttctgttttggtaatttaatgtttaaatacgttgccaaaggtggattaggagccgaaaatcgcttgttgaaactgtcatgaaagccttccaggccattatttgtgcgccctaaatcaccaaggaccgaatcatgcatattccacgtttctggcacaaataaagcaggtcgtcgatttccatttccatcaacacggaagagatatgtactataaaaaacatcagaattatttaaaaacatgaccataacctacgatgcaaagtaatcaaaaattggatgcgcttgtataggcgcatgatttctgagaatttgataaccttcttccacataaattaaaggtagaaacgaaatcgctgacaatgatctgacagactttctaaaatcgatatctactaagaattgtggtgctagtccttccctctgcactcttctgttgactgattgggccaagtgaaacagacaatgtctgatcattgtgttcggccaaacatcaagaaatgccgatctcgcagctaaatgatcaaatatttaaaataaaatcgattaaatatcaatataaccaggttcaaaatccagcataaaactgcttggtattacaccttcaacacgctgctgtataacagagaaggctcgacgatatgtttgttgcatccggtttgccattattatatatgcgcatggtatgcttgagtgttgtgcaataatgtttagggtatataattgcatgaaattcgatggccgagctacaaaactttagaaaatggtcacacccctgtcatatatcacttttgaaagtgccgtcgcccgcccaattttggtatgtccgtagccattcaatgcctttgtcacttgcaaagataaaaaaaattggctcctcaatatcgtgctcacgtgagtcccaaatcaaaaattggttccctcttttatccgtcgcgaaggcacccttgaaaaatgagttggaaaatgtcagagacagcgaggatatgagtaagcgtccaagtagggttgcgcgcggtcggttaaccgaaccgaaaccgaaaaccgggggtacgcggttaataaccggtcgtgcgcaacactacgttcaaggaaaaccattgtttaatttttggcacgatttttggtttttaatggctcacttctatctctatttccaaaggatttgccgcatttacagcatctcgacccggtatttgacgttgcctttgtatttttattctacttgcgccataagttggcaatcgaacaagttgatcatcagagagtccttctcttgacgatccaattaaattgcgcggggcagcttcaggttgatccatagcagcgtcttttagctgttcctgacgctgccttttctataatttaataaaattaaataggaaatattccaattttaacaacagatttcaccacgttagactctgggtccggcaaatggttatgatttgttcttccaattaagtttgtgctgtcgataggtgaatgggccctgcctgggcatgatttcttgacacatctccatacctatttaagatagaatatttaatatatacaagtactgaaaaatagcctgggtttggcctgctgctattattctatcagtacgcatttcatagccttcaaaaacagtcatcgttttgcttttcgttgtcctcttatcgggttctaatcggtctgaaaattgatttcgattttttttttgcttaaactacaaaacttgccttgttgtggttgaacatgacataattgaagcaaaattaaaaaaaaactttgaaatacattctataatatttataagtgggttggtaaaaaatattcaaataaaatcgtaaaaattctacataaaaacggtgtttttcttttcatttcccgctattttcctctttttgccagccgtccgcctctcttgttattgccagccgtccgcctctcttgttattgccagccgcccatttctcttgttattgccgtccgcccgcactttataactatttcttttatgaaacgtgaaaatattattgaactctaaatgaaaactttatttctattttctctgttatttttctcttcatatgaaaacccaattcgcaaacaacgagctgttcgcaatgaacgggcaatagctgggttagcacaattggcagcatcacttgtggccgtgaaagcatttattgccgcaaatgcagctttaacggcttctacagccgtagctttggcagcacttggaaccgatatctaccttgctattgagctcgtgagatgtaagtttatgataattgaaaaggcggttgtgactctaataactcatgttaagcctctgatcactatgaggaattgctcaaagacttcttcccgttaacatttgttttggacgattatgaattcactgtctcggccaaagattataccccggattatatttttggaaaaatatcacaacattttggccataagacagaggaaatatgcataaacagtatgttttaataaacaaaaatgttttttaataaattaaaatgtaaattttactcctctactaaagcaaagacaatggcgagacgaaaagtgaaaaattcaagggccgatcttggcctactgatgctgtacgcagtcaaaggagaaggaaaacaagagctattcggatgtgcatgatgattttttaataatataatcactcccgttagcccttgggaaaggcaattttatgaatatattttttattcacaattggggcgcaaatgtgcggggcgcaaatgtgcggggcgcaaatgtaggggcgcaaatgtaggggcgcaaatgtaggggcgcaaatgtaggggcgcaaatgtaggggcgcaaatgtgcggggcgcaaatgtaggggcgcaaatgtaggggcgcaaatgtgcggggcgcaaatgtaggggcgcaaatgtagcagctccagataaataatattttgttattgtaagaaaaatttaacccataaaattgaaggataatgaaataaataaataaacaatattacattaaaaagaagaaacaattattaaaagatattaaaatctgtaaatgttggacaaaaaataatgtttaaattatgactaaataaaatattttttatgtcaaattgtcgactaatactttgaaaatttatttaattaataaataactataaaattttttaattaattagaaaatattactattttttttatttccagatgttttaaatgattgccttgttttgattatcaataatttaattgccatattttctaagttaagaattttttaaattattggtaaataaaaaatttttttaatagatctaaaaatattgttttttggtaaaataaataaagaaatttaatttaattttacataaatttaagaaaaaaattaatataaataaaatattaaaaaataaaaacttaaattaaattcaatcttaaaaagacagaacaataaatattnatcagcatatttaagtttttattatacatttt

SEQ ID NO: 907 - DNA, 4633 bp, Heterodera glycines
atatgatttacatacagaacttgaagctaaaatcacctttttttaattgaatattctccaaattgaagacaattataaaaataaatggacaaataagaaaagtgttaaaataaaatatttaaacatagtaaagtatgtaaaagggtttacagcttgccatagacaatttaatttataaaataaagccaaaaattgaactatttcttttctctgcgtctgtatttgatttcgccagtaagtgaactcgccgtcgagagatgtcaccatatgataactgatcagcccgtggtgactctattacttcatgtaaacactctgatcactatgaggaattgctcagagactacttcccgttaacatttgttttggacgattatgaattcactgtctcggccaaagattataccccggattatatttttggaaaaatatcacaacattttggccataagacagaggaaatatgcataaacagtatgttttaataaacaaaaatgttttttaataaattaaaatgtaaattttactcctctactaaagcaaagacaatggcgagacgaaaagtgaaaaattcaagggccgatcttggcctactgatgctgtacgcagtcaaaggagaaggaaaacaagagctattcggatgtgcatgatgattttttaataatataatcactcccgttagcccttgggaaaggcaattttatgaatatattttttattcacaattggggcgcaaatgtgcggggcgcaaatgtgcggggcgcaaatgtaggggcgcaaatgtaggggcgcaaatgtaggggcgcaaatgtaggggcgcaaatgtaggggcgcaaatgtaggggcgcaaatgtaggggcgcaaatgtgcggggcgcaaatgtaggggcgcaaatgtagcagctccaaataaacaataacaaaagccaatcaaggtgtcactcaacaattgccctgacagtctacaaaaatattatcatcattaagggtgttttttaaaaaccaaaaaatcaaaagcagtaaaactggtacccccggctttcgggttccggttattggtttaagttcggccgcgaacaaccttacttaaagtctgtgccattctttaaggcgggttaccgactgcacaaccgcatcatcgaccttggcgtcttaattgaagcgcctgccgcgtaataaactttgatgaatgattgcttagcggtgaacttagttaagccatataatcagccgtacccattaattacaggaaggacatttctgaaaacatttgtagcatcgttagaaaaaaggatagaaaccttaatatggatgccgaaaaacaaaacggtgccatgggtgaatcaggcagaaattttccgcaattgttaaaaagacccaacaatccctttcgatattcaaagtatgaatctttcacattatttttttatgtttttaaaataagcgaatttttaaagtttttttttatcatttttgaggttttaaagctatttttttattgagttttggttttttatttggccattattcgtatttttatctatatttcaggggttttaaccttcgtttgaagcatgcattttcatatctttaaaatgagcttaaccctgaaacagatttattttaaaaaatcttaaaaaggacttatcagaagaaaaataattccgcaaatattggaattaagcttttattaataagttaaaaaaatgaaaaactaggaaaatcaaatatttgggagaaatcaatcactgactgattctttggcttaatcaaatgttttggcagaattaggtggaaatcatgagttaaaatcggaagccaatttaatttgccagtaaaacaagtatgggagcgcaactgtataaatactgagacataatttgtaaaaaacaccattcaaatcgatcatttaaaaacccaatttaataaatatgtcaaacattaccaaaacccttctcctgctgattttgctggtggccgtttcattccgtttttcggcttcgactaatggaaaaagtgagttatggaaaaattcattttcatttttagtctaatactcgcttgttaaggtctttagcttttatctgtagcaaagtcttttggcaatttcttctagtctcaagcatattaagtttcaaataatgttaaaattccattattttattggcacttaaaatattccccctaaatccatgtcctgtgggccttattaataattgaatataaataatatttattgaattaaagaaaatgctaatgatgggaatggtagcaacgcatccgttggcattgggacgaaaatcaaacgaattgtgaccgccggactgctcttcacttcactggcgacaggcggggcgggcgaaattcaacgaagcaatgttcagagaagaaatgtcatgggactgacgcacccaatggtacaaagaattatcagtaatagcaattaagcctaattagcatgatacgactgacactcaccttttctagcctcctcgacctccgccagagcttactccatttcaaaaagcaaaagcaatcatagaagaacatgctaaaaaaaataatttcactgagtcagaggtacaaattcgacttagccaattatactttttaaattacgatatatagcgcgagccaattatactttttaattacgatatttagcgcgagtcacccggaggacccgacccacaccatcatttcaatttcactgagtcaaatgtacaaattcgatttagccaattatactttttaaattacgatatatagcgcgagccaattatactttttaattacgatatttagcgcgagtcacccggaggacccgacgcacaccataatttcaatttcactgagtcaaaggtacaaattcgacttagccaattatcctttttaattactatatttagcgcatgggaccccaacgacccaatggacagcataatttcaaaaatcatactgattgagaggtacaaattaaacttttcaattatgcgtttttaattacgaattttcagcgcggctacgtatccggtggacccgactcactcacaatcattgaaatatagaaagaaatgatgcatcgagtgtgattagttcttttaagggtttattttctcttcttttcattataaactttctagaataaagtggactctatcaaaaatttatgcttttattgaaagcaaatttgtgaaacattactctgaccacctttcgaatgaaattagccttatcttactacacttgataaaattttaaagaaaagtattttaatgccaaaatatataaagtaaatattaaggttagaactctgatttcttttttaaaatttttctatttttgttcattttctacaaattgatactgtacacttcagtacagtgatgagtaaattgaaattttactgcttttgaatatgaagaggacagcaatccttaatgaagcctcaactcaataagcaaattgtttctcaaaaaagaaagttgaaagattagccaaagattgctgtacgactgatcaagccgaagttttgagccagttcaatacacttctaggctcaaattcgagccagtgaatatcaatgctaggacatcggagaacataaggacaggccatcaattcagcggagatttgccgatacagtaccaaatggccacacctttagactactgtatgaataatgaaaaattgagcggtcttccaattagagaaaaggcaaattatagaataaaaaattgacactaattaaaactgtttaaaaccaatgaaaactatctgtcaagaaaataaattaaggaaaaaattatcaaggtaccgatggtgaatttttcaaaattcctgtattatcagtaatagcaattaattaacatgatactaatgattttcactttatccagcctcctccgcctccgccagagcttagtccattggaaaaagcaaaagcaatcatcgaagaacatgctaagaaacacacttataacccgtcgttggattattcaaaagttattaattctgcttttttctttttttaattacgatatttagcgcgatgtacacgaaggacccgacccacgccaccattgaaattgcaaaagaaatgacccctcgatttagtgctttccttttaagctgctttattatttataacaaatctgtcattttcttttcatttcatctaaaatttttagtttctagaataaagtggactctatccaaaaatttatgcttttattgaaactccttaattaagtgcctttgttgtgtgcaacatttgctacggtaaaccaataaaaataaatataaatgatttaaattactttaatttaattataagaacacaacattttttgtggctggcgagaaataaaaataaacaaattacaaaattgaggaaatgactagagaaaaatttgggcgaccaatgataacaagaatgtaaactttttcatctttaagcaaaattatgccatattttgtgccgaaaaaacagttaaaattgcggattttacgaaacgacccagcacgtttttaatactttctaacatttaaaaccttgtggtttacttgtttaaaagctgtctctaagctattgattgaccatttaattattattacactagagatcggcattt

SEQ ID NO: 908 - DNA, 3815 bp, Heterodera glycines
  unsure (1)..(3815): unsure at all n locations
tttcaaaatttataaaaacaaaatgagtctaatttcgatttttagggttttcggggtcgctgaatacgaatataccctttatattaccccttgcctaaccttaggcccatctgaataataaaaaactcaaattcgagacttggacatttcgtgggctggacattttgtgggtcagcggaaaaaatgggccgcgctctgtttgccaactgtgtctgttctgtgctatggtcaactgggtcatctttcctatgcactctctccaccagtctctttctgcgagtcacccggaggacccaacccacaccaccatttcaattttacgtatccggtggacccgattcactcacaatcattgaaatatagaaagaaatgatgcatcgagtgtgattagttcttttaagggtttattttctcttcttttcattatataactttctagaataaagtggactctatcaaaaatttatgcttttattgaaagcaaatttgtgaaacattactctgaccacctttcgaatgaaattaaccttatcttactacacttgataaaattttaaagaaaagtattttaatgccgaaatatataaagtaaatattaaggttagaactctgatttctttttaaaatttttctatttttgttcatttctacaaattgatactgtacacttcagtacagtgatgagtaaattgaaattttactgcttttgaatatgaagaggacagcaatccttaatgaagcctcaactcaataagcaaattgtttctcaaaaaagaaagttgaaagattagccaaagattgctgtacgactgatcaagcacaatttgtttcactcacaaatcagacgcatcaatgcaagatgttggtcctcaaatacgaccaaacaaattatagaataaaaaattgacactaattaaaactgtttaaaaccaatgaaaactatctgtcaagaaaataaattaaggaaaaaattatcaaggtaccgatggtgaatttttcaaaattcctgtaaaagtatgctctttcacactgttttttgtgttttattgtaaataatcaaatttttaaatgtttttgtctttttttaggatttgaagctatttaagattttttaatttggccattttcgtatatttatctaaatttcggggtttttaacctttgtttgaagcttaaaataggaaattacgttttttttgtaatagtttaaattttgtttacagtttttaatatagaaatcacttaattaaagatatttttttgttaatgaaataatattgaatgggaaattttacaaaatcaggcggaaatcatacgttaatgaaaaaataatacaacaacatgaataaatcggaagtcactaaattttccaacaaaacaaacatgtcagagcaaatgcataaatactggcctcaagtttgtaaagaaataccatacattcatttcacaacgacatagtaataaagcaaaaaataaatgtcattcattaccaaaccctttctcctgctgattttgctggtggccgtttcattccgtttttcggcttcgactaatggaaagagtgagttataaaaacaagaattaattctcagccttttctatcatttaagttttggcaatttattttctagttttaagtcaattagctttcaaattatgtgaaagtttcatcattttttgcctctgaaagtattctcctaatccatgtcttgtgaacattgtaaataactgacttaaaaagtgtaatcaattaaagaaaatgctaatgatgggaatggtagcaacgcatccgttggcattgggacgaaaatcaaacgaattgtgaccgccggactgctcttcacttcactggcgacgggcggggcgggcgcaattcagcgaagcaatgttcagggaggaaatgccacgggactgacgcacccaatggtacaaagaattatcagtaatagcaattaagcctaattagcatgatacgactgacactcaccttttctagcctcctccacctccgccagagcttactccatttcaaaaagcagaagcaatcatagaagaacatgctaaaaaaattaatttcactgagtcaaaggtacaaattcgatttagccaattatactttttatttacgatatttagcgcgagtcacccggaggacccaacccacaccatcatttcaatttcactgagtcaaaggtcaaattcgatttagccaattatactttttaattacgatatttagcgcgagccaaccagacgacccaacccacaatatttagcgcgagtcacccggaggacccgacccacaccatcattgaaattgcaaaagaaatgacccctcgatttagatgctttccttttaagctgctttattatttataacaaatctgtcattttcttttcatttcatctaaaatttttgtttctagaataaaatggactctatccaaaaatttatgcttttattgaaactccttaagtaagtggctttgttgtgtgcaacatttgctacggtaaaccaataaaaataaatataaatgatttaaattactttattttaattataagaacacaacattttttgtggctggcgagaaataagaaaataaacaaattacaaaattgaggaaacgactagagaaaatttgggctaccaattataacaagaatgtaaaatttttcatctttaagcaaaattatgccatattttgtgccgaaaaaacagttaaaattgcggattttacgtaacgacccagcacgtttttaatactttctaacatttaaaaccttgtggtttacttgtttaaaagctgtctctaagctattgattgaccatttaattattattacactagagatcgacattttgaaaaaagcctggacctgggatttcctggataaaaatccaggaaaatccaggtccatgaaaaggacctggactttttttcatatagaacggctccattttgagcactaaagaccggaaaaactcccgaaaaaaatcattttttagcaaaattttctcaagaatattatttatttaaattttattaaaatttggtaaatttatattaaaaataagcaaaaagacgaaactttttgggttggtttttcgctaaaaattagtaaattttagttttatcatgttttttcttctaaaatgatttttaataacatattagccatttttgaacgttttactttacattcagcaaatttgaagaaattttgagaaagtatacccttatttttgaaaatttatgtatatttttgccattttatgtccatatttcgcgatttttggtccatattttatggccacatttcgcaatttttggtccatatttttgaagccctactaattacaagactaaaattgcaaaaaaaaaatcgatttttttaaaaattaaaagaggaaatttctgaaaaatttggctaattcctaacaaaattcattaaaaattcttaaaattttcccccagcggcgcctatcggcaccgccggctccccaaaactcttagtttttcttaaaaattagccaaagatcgcaaattttggtcattttttggacagagcttgttaacaaattgcattaaatttttaaaaaatttcccctcggtggcgcctatcggcaccgccgaactctcttccctcatccatacccaaaaatttttcggaaaaatgcgtcgaaaaaattgttaaaaatatgtttttttaaattttaaatgcactgaaatttaccaattgcttatgtttcgacaaaattgttaaaatcttaaaattgattttcggaaatgntataaatttctctattttaa

SEQ ID NO: 909 - DNA, 1656 bp, Heterodera glycines
  unsure (1)..(1656): unsure at all n locations
cttttcctccctgttcgaaggactcccaccattgggtgattccgccatgggacacttttgtgcaggcccagcagcatcacattgacacgcgacggcaccaacagacgcaagacggtggcaacgacaacgacgaggaggggaaggaggacggagtggtgaccaacaaacggtcaaaagtggtgagtatttgtaccatttataatagatttttctccgaaaaatcgctaatttgtggatttttggagaaaagttagcgaatttttgtttggaaaactgtaccaggggaagatttcatcccaccacccatcgagaaaaattgttgaaaaaaattcatttttattcaaatctccgaattacaaccccccccccccccccctcgttcgtcgtaaggggggcggctgtaaaggagggtggggtcgtaacgcaaaaaaaaaggtcgtcgccgggcaaaattgggggccttcgtacgaaaaattggtcctggcgcacaatcgtccgcgtatgggcctcgccctggcgcaccccttgttcatgtatgcccccgaaacaaaaaaaaaatttgagttcccattttattggatttttttttaatttttggttttggcttgggagtggattgtggcgacatgaaatgaatttgtccacaaaaattgggggcattttttccattttcaacaatttggcaattatttccctcccttccccagtcggtgacacttgacgagacggaagaaatttcggtgctcgacgaagaggagggcaaggaggaggaggcagaggagggcgaactaactgatgaggaggaagaggagaaggatgaaaacgatgcggacgtgctgtttgtggacgcacgaagtcggacaacgaagaagaaaaagaagggcaaaagcggcggcgccaatgtgtcgctggaggagggcgaaattgtggacgaatcggaggaggaacagcagcagcaaatggtcgttaccaaaaaattttaaatcaaaaaagaggaaaacctgaaaaaatttggctattatctaacaataagcaaaggcattaagaatttttaaattttgcccgtcggcgccttatgcaccaacggccccaaaaattctcctaaaattttgaagacgaaaaggggcggggaggggaaggggccttcgtaatcgagggcaggcaggatttaatttaaaaaaagctcgtcggttacatggcttggacccaccctccgctttttgggatccggttcccgaccctcggagttgtaaagccgcggaacccgactaaaaaaaaatcggttatccggggcacaaatggaccggggggcatcagtcatcggagggttgacaaatgcgtttaattgctgcatccaaaaaacaaaatttggtttcatcaaactctgaaaattcaaagttgttgccgaataaaaatgggtggaaatttacaaaaaaaaaaaaaaaagaaatttccatgtatcgctaaacattttccccagacatggacttgaggacgcacagcgacagaaacaacggcaaaacaaagccacagacaccgccgaaaatgatgacaaagtgacgaaancgaggnaaaagagaagcatcggcaaaagacgacganaaagttggcaaaaagagcgaaaggtgcgcaaaaaagtgcggaaaaatcagcacg

SEQ ID NO: 910 - DNA, 8398 bp, Heterodera glycines
aggagagaatggcaagggcagcggcggcagatgccgaagggcccgttcggcgagtcaccagtggcggaattgagacaattactttgttgtgaacaaaaaattgtcccaatccgtttccctcatatgcacgtttgacagactgaaacgcgaatcggatgtgcatctgtaatagtaaataaaagtctaactatttttttctaaactttttcgatatttttcaatgagtcccaccccattctcgccccgggtgctccgaaaaatttcgccgggacaaaattacgccaattttttttttgaaaaatttttaaaagaaattttccattccccagtttcaaggctaaactccattcatatttgtcagaattggctttgttagattgaaaaatttcttaaatttattaggtttctaaaaagttgtgggcaaaaactaaaaaaaaaagttgaccgataacgatttttcacggtggtgagccatcggaaatgagcaaggaaatttaacttcaaaatactctgaaaaaatgttttgcagcattttacactgatgccgaagaatttgtcactttagagaaaaaccataaaattttctgcatctcatttgttaaattcaaaaaaaaaaatttttttttcagggggaccctaaaaaataggcgactttaaacaatttttttgtgttgcaaatttttttcagaaataaatttgaaatttaccctcatgacatcgtcgatatttccacgcacaaccatgtcctcaacttgatcgtccggcgcaatttgggctctgacggtgattttcttgccttgaaaaggggaaaaccttcagattattttcgcgacctcaaaaattccctttattttacggcgtgtgccttccctgcgcttccttactccaaaatcccaactcctcctcgtcccctgccctcctaaatcccggttttttctcatccgaatcccgcattttgaccgaatttgccatcccgggcaagaatctcgatatttttctcatcccgcggtaaccctgcttctcttccttcctcccccccccgccccgttttactgcactttctcccctttccgtgtctcgtaatgcaaaaaccagtgcggggcaaacggcactttgttgggttgcctccccccacccccgcccaatacgaaattatgtccctttgccctgagcataaactttaatttttttttggtgtaaaacataccaaacggtctcgaacccctcctgttcacaacgcctaggccaacaacgtccacttgattttgaagcatttttttgacgaaaattttacttctaaataaatagaagaaattgattatatgtatctaacttttgttattaggttaatatgaaagaacaaaaaacacagtggaaatggataggtttgggaatcggagactctctgttcatgaacctgaaaagccattttgaaaaatgttttttttcagtgtttcaagcatttgcttaataaaaaaatgtcaaaaattccgaaataagggcaaaacgatggtactcttaaaaccctctgcttttttaacgaaaaagaaccaaaaaggaaacggcactttttcgtacggttatatttcaagaaattcaacaaaaattgtcggcgtcgacggaacctatctttctatttttaaagatggttcaaaaacaccccaaaaagcgttgaactttaatcaatttggacaaattctattaaaaaattgtctaaaattttacataacttttcccggaagcgtctaaaggccccgcctctgaccccatatttccagagttttttgtaaaagcgcgccgcataaaaatgcgggactgggtcgttttggcgcccacgttttggcgccgacgatttggcgcccacgttttggcgcccactttttggcgccagggtcgttttggcgcccacgttttggcgcgaagccaaaaattaaaaaaggtaaaaatatgatcaaaaattttacaaaaaaaagtgaaaaacttttaccttccaatgggtttttcaaattttcaaaaaattcacaaccccctagaatttttttcaaacttcccgattttgactgtgttttatgggtgtagattagagatcaacatgtacctggatccagccctgtatttttccttgatccaggtacaggcacaggccatttttcggcaacctggatttttcctgtacatttattttcctgtacttatgtacagaaaaaaataggtacaggccattttttgaaacaggtacagctacggttttttcaaaatgttgatctctagtgtagatcaacatgaaggagtgatatgatcaacttgctgtgaacattttgttggtcaacatgaaaaattgacttagcaagaattttttcaaatttttctcttcgctatgcttcaaaaaatgtcaaaacattttgaatatttttaaactcttaaattttttcggttgaaatttcaagagttagtgattataaacataaccttaacggtatatttaataaataatagtcactatccctaaatcagaatctggtaaatcattttctcagatttggacccaccatattaaaacatttgaaaaacaaaacagatagaaggcctgatctaatatgttcaaaaattgtatttcatttaaatcaagtccgggcttcgcaattgtcaaaatgaatacaatattcgtgattagcgactcagaaaactgacgaatacatattttcatttattcaaacatagaaaaaatttaaaaacctgaccctggcgccaaaacgtgggcgccaaaacgtcggcgccaaaacgtgggcgccaaaacgaccccgactctaaaaatgcacatgaggaaatgaggaaaaaacagcagaaacaaaaaaacatttaaatatggtaaaagtttcaagtgtcattgaaataatgaaatttcacattatgttttttggaaatcgttatgcccgtattttaaaagtgactttttccgatggaagactgaataaacaaaatcctcaaattctaaaatcacaaaaaatatcgaagactttttaatacaccattttttggggcagggagtacggttgtgcctacaggtgataacaggaatttcttttgaaatagaacaaaattaattaaatggcttttctttatatatgaaggaagtcatttttggagataatttgtgatgggttgaaaaggcgcgctgtcaaaatgtcgccgcgtcgaaatgtcgcccaagccaaaaatagtgaaaaagtcgggaaattgattaaaatttaagaattttaaaatttttctattaaattttaaaaaatgaattttatttctaaaattttgcaggatatagctctttttattttctctttttttttgcctatactctctctttgcatctctcttttcttttccttcactctcctttgtccctttccctcttttttcccaccagtgcatttgtctgcctgctaatgctcctacaaattaggaagggaaagagaaagacggagtgcaaaaaagtgaaaacttttcagacaaaagatgagcatagggcgatgaaatagcgcacggctctcaaggaaaagaaacgagtgagccttgggagagagtgcgctctctccccaaattttctatcttttctctcccttttccaccccatttcactttctctttttgaattgcatgtctttggctttgcttgctgctcgttaaacttacctggctggggagctcctgcgaccacgaaggcaagactcctgtggcgaggctccaccattgcactttcggtcggggctgacccgcagggcgatcccgaactgggattggcccacagctaaatttttgggtgagggggatggcgttcgcgcctccctttaaaatctgtgcatcgtttatttttttaaggcttttttggtgccatttgtagaggacatacagataaaactattaaaatgacatacctaatcaattttttcaagtcaaacttttgcggatttttcaatttatcaaaaaaaaaagacaataataattatgcgccaacccaaataattttttgtctaaaaaacggcaatacgaattaaaaaatgtaatttttcgttaattaattgtcctccgatttttcatttgtctatccgcttcatcttctttcttctcttctgtcttccatttgtcagatgtctttgaatcttttttgcacaaaattgtgttcgcattggcctttgggccaaaatttgtccaattgaacggtgtacgttttgaatgtgtcgctgtgcctttgtttgtgcgcaatttcgcacaattggcacagcggtggctgaatgccatgcccactccgatgcttttggtacgttttggtccaattgaaatagctaaataaacgtcacaaatttggtataaacggcaaaatttatctattttatttaccccgacttcaacatcttatttaaggaaattcgcattatcggatttttaagatatttttggaaatttggttgatacaaatttacgaatttctaataaatttatattaattttacaaatttttttttgtttcatttgaaaaagaatttaaaatgaatatttttatgtgttaacttttaattttttaagaaaaatgatgaatttttcaaaatgatttttgattttaatctataattttattaaaaatacaattatattccctctaattacccttttgacattaattaccctcatttacaataattgtttctctcaattacccttttggcattaattacctgcacgataattatttccctctaattacccccttttggcattaattactctcattaaattaccctcacttacaatcattaattatttcccttattggacaatcaatttccctaatctcatactaattaattacctcatgtatttgtctttgtccctttgcaattccttcaaatattccgccaatgctttcacactgttaaagtcgtccgccgcaatgaaagtgccattcggaatgccaacttcttccatcacttttctactcaacacaattggcactatcaaattgcgcaatgccttccaaaatttctccgtcacataatttgggcagacggcattctcgaaagcaaagtagaaaaagtgggactctgaaaatgaggggggggggggtggcaattgataagattgcgcaatgacttccgggtaaaaataaattccagtcggcacaggaaatggaagtgtcaacggtaggctatgagaaaaagtcggtctgcaaatgtcgcactagggttgtaaaaaaatagcggtttcggtctcgaaaatggaaaatcgatcgtgatcaaaaatgcgagaccgaaaaatagccgagacttttcttgagtcgtgtccgagactctcttgagctctcgaatctgtaactgatcaatgcccaccattattgagaccatctaataccaaattttcgacaaaaatagtgccaaagtcgctgacattgacaaatgaatgccaaatattcccagattcctaccttgttctctttggtagcattcttctttacagtttgtgttgttattgcatttcccaaacacatcaacttggagcagtctttggagttgtgccgtcagcgcatctcttcccgacggcacattgcaattggacacaaattggacggccgaccgcttcttcagcgtcatacgcttttgaatctgcgctttttttaaaaataactaatggcaatccgttatcccattttattagttttactgatagtgccgcgtgcccctgtgattaattaaatttttgtcataatttttaaaaattaattttattttaaataatttttcccaaaatttggaatctaatcccaaatttccagcaccgaaaaatctcaaatccccggaaaagccagtgttaatacagtatcactgacgcattttccgtatataaatttggcacttttttgaccacctccgcgtcggtccaaatgtattggggcaacgtttgagcagtgattggtagggatgcaatttttaggcaaaagcctatttttttcctgagctccccgtggcatgaaacgcacgaaaaacatgttttttttcgggtgttgttaagctacttttcgagttattagtgcctattttctaggcttttatttttagcgcctatggggagacatcaggagcaattgaatatgccgaaaaggcaacttgttatggtaattttttcctttcttattcaatttcggctaattttaagtcagttccgacgagatggaactcgatttaccgaatcgaatgttgaccgctttcaaagagcaaaaaaaagtgttgatggcaatgcaatttgaaagagaccaaagaaatgccggcgttttatctgcaccaaaaagacctcggatggccgagatggaaataatttcttcttcattgccgtccatttcattcaaagacttcgaacttttgcgccaaatttgtccaattcttaaaatttttgatgtggaaactcaaaaagtaaaatattttttaagtttatactaaataaaaaaatgtttttaagttatcccgcgaaaaatcaacggcgtctgtgatactgccgacgatcaagcgtctccacgattttttactggaagaaaaatttcctccattcattcagccattaatcgatggtttggttgactcattgaatgaaagggtgcaaaaaatggtccaaaatttgttaattcgtgtttgttctttgttggacccgcgttttgcctacgatgaatcaattttttccaaagcaaattggagtcttatcgaggaggatttaattgaatttgcgcatcaaaaaagtaaaaatgaaacttttaaatattttctaattactttacagtcaacagagaatgtagcacaagtgtggaagaagcaatggctgcgccttttgaagacctcgattctttggttgacgacacgggatcagcaagcgacgacagcattaaatgtattttcaataattcattattttttaactttatcatgctttaagtcgatatatggaagcccaagtcaccaggaagtgaaaacgaacttcaccgtcagcactcggcttgtgaaaaatgtatgaatgaccgttgtgttgaagctttgtacggttcttttgtgttagaattgcctgcattttctaatctataacttaaacaaaaaaatttattgtcttataattcacgagaaacatcaaaatgttgaaaataccctttctctttttgaaatttttccgtaaaatttcgaaaaaatttttggtagggaaatggcccaaatgccttagtagggaatggcggtagggaaatggctggtagggaaacggccggtagggaaatggcggtagggaaatggctcgatccccttaaactgccgattggttaatcaaaagatgaattgcaattttattcaaagaagtaaattttcataaaatggtaaaagcaataacaaatcaaaatgggaaaacaatagtctaaatcaacaacgagaacaaatcatcgacatcggccaaagtctttcggcttaactggtttcgaatccagcgatcgagcttcttaaactgattcagcttttctaacggaaaagccatcttcgtcatatttgccctggcggcggcgcaggagagaatcgcaagggcagcggcggcagatgccgaagggcccgttctgcgggtctgggttggcggaatggagacaattactttgtgttgaacaaagaaatttcccaaatttcttctctcatatgtccgtttgacagcatcaaacgcgaatcggatcgcaacctgtaaagtaaagaaaattgtactattttttcaacaatgttcttaaacagcagaataggcctctaaaaccaatgctttggcaccagaaaagattttctcgaccgaagttttttatttctggaaaaattagattctttcggaacacatcatgggttccataaaaaaaactttttcgatattttaaaatgagtcgcaccccattctcgcccagggtgctccgaaaaatttcgccgggacaaaattacgccattttttttgaaaaatttgcaaaaagaaatttttcataaaactggaaaatttttttcgcgatttttggaaaaatttacttgtcataaaaattaaaaaactttggcgtcgaatttttcctgtccgccttccccctccctaacttggtccccagtttcaagcctaaactccattcatatttgtcagaattggctttgttagattggaaaatttcgtaaatttattaggtttctaaaaagttgtgggcaaaaactaaaaaaaaaattggccgataccgatttttcacggtggtgagccatcggaaatgagcaaggaaatttaacttcaaaatactctgaaaaaaattttttgcaccatttgcgcagaagtcgaaaagtttggtcactttagagaaaaaccataaaatttt

SEQ ID NO: 911 - DNA, 3169 bp, Heterodera glycines
  unsure (1)..(3169): unsure at all n locations
cgaaaaattttaaaaaaaattttcaaaaaaattttnttgacataatattaactaaaatttcttaaacgaagcctagcgaagaaaactttaaaattctaagcgatttttgaaaaattttagatgaatgaataagtatttcacaaaattttacaacaaaaaaaatcgctaaaaattttcttttcctgaaatttcattataaaaaaatttaattgataaaaaagtaaattaaaaaaaaatttttcggataggagagaaacgttgtgcgccgacaaaaacccaccttttggatggccgaccagcacaaattcaacaccactgttttgcattcgcgtgaagcggtcgcgcaaatcgaagtttccaacattgtacacttcagtgacggaaggcgcaaggactttcattcccttcatttgcatcatttgcctgtaacgatcaacaaagtctctccagttggccaaactgatctgaaagaggtcggcaatggatcatgtatgaaaaaaaaatatattttttaaatttcctaaaaaaatttttggaaaaatcgacacggggttcgtactccgccccgccatggacccattcacagtcgaaatttttttagggataaaaataaatattttgtgctgaatattttcgatttattggtactcactcaaaagaactactgcacccaaatttcccagaatttttaaagccacaaaaaaaaatttgttgaaaatcctaaaaaacggattctaaataatgtcccctcacattgttgtcgcggctgttgtccaccaacgcgatggcacaccagctgttgatctgtgccggcaacaggtatctgccggcacgccaccgacaggtgtcgttcggcatttccagtttgtcgtcggcatatttcagtttcattgggttcagaatgcgcgccggcacttccattggtcgttcagcaaatcggatggacgccctcgcaagatggtcactttggttcagcgcaagcacatttgtcagctgatccgtctgccttcgcagcaaaaatggagggatggcacaagctttgatcatttcctgaaaataggaaccaaaatttccaaaaaaaatgtgtatgaaaggggtgcaaaattttatccaccccccccccccccgccgtttcacgaaaaaaaaaatcgccaaaaaagttttctaattttttttaaactaagttcttgtaaaaaaatttctaatttttttttactttgttcttgtaaagaaaattaatatttttttgaaaaacttatttaaaaatgaaacatttgcctttttattcgtttttttcttttgtattatacgggacaaattgtgtgcacctggtgggtctctggtgtcatctgagcggagcggacacgttggtagtcgcaaatcttcagcagttccatcggataatgcgtggatttgccacgctctcgacggatcaccaaaggtgcacaaggcgcactgaaaaattttaaattccataaaaaaatttttccaaacctaagttttttcgaaatttttccaataaatcgataaaaaattttcaactaattgttttattgaaattctcatataaaaaaaaatttttcggcggcggaattttggggtgcacccggaaaaaatgggggacctcaatttgatgtcgtatcggcgggcataatattgctcaaccgtgatttgcccgtcttcaaccatcataatttctgttttggcattggttggcgaaaaagcggagatcggaaagcgttgaattgcttgctggttataagtggtgtgcacatacaggcctgtaaaaatggtatgtgacaggggaggaaaagggctcacaatcagctcgtttccgccccgtttcacttcctcagaattgttttttttaaaatatattcaaacttaaattttttgttttttttataaaaactttaagaaaaaaaaaattgaaaaattttcttacaatcaaattttttggaaattttttaaaataaaatcgcaaaacgctaataaaaaatttgtgagattgtcttataaaaattaatgttttattgaaaaaataaaaaaatttttgcgagggagggggagatgcataaggataaaagcaatttttaacgaattttaagatgatgttgtgcccatcccgtcctactttacctctcaacatgcgactgacatgggccaattcaccgttttccaacagtccgccattccatcgagggaccactttttcgaacttttcgagcatcgattcgaccaagtgaaacggcgtctgaaagtgaaggagcgttttgttcttgtgatgacaatgagaaagagtctttaatgaatgcgtaattaatcctttggaattttagtaagactcaaaaaaaaaaaaattattttccgccgggatactaattccgaaaaataccaatgaaggagataaaattcgaattaaaatcctcactttttgcacttggacgaccatcgcagcttttgctccagcgacatcgccttgcttcaagccgtctgcgaaaaaaaaaaaatttttttaattgcgacgtacggttcgaatttttgttttaaacccactttcaacaattcggacacttttgtccattccgatgccaagaaatgagctgttgctgcggaagtagggcgagtcagcggcggtgaagcggtgctcatccggacgcatcagataaatggaggacgcactgtagtgcatgaattgtccattcctgtcaaatggcagagtgagcgagtataaaaaatatgtgaaaatttaggccaaaaaaacgacgaatgaaattacggcacaaatttttttgtcacggcacctttttttgtttttgaaattttcttagagaaaatttttcaatttttttataaaaaatttgtttaaaaactttcgagagggggggggggggaaaggaatacttgggggaattgattcgggggtggggggacgtactgctataagaggcaaaaatgtcaaaaaatgagcgtacgggtcgctgaagacgctctgtgaagaggcgatgttcagaaattgggccaacgactggtccatttgggcgacgtcgttgggtgaggaaggcgaagtcgccgatggtcagttggccgccttcggaaaccaccggcgtaacggtgaccgaatattgcggaaaatgcttcaggagttcgtctctgtcggtgatttcgt

SEQ ID NO: 912 - DNA, 13265 bp, Heterodera glycines
  unsure (1)..(13265): unsure at all n locations
aaattttaattttttttttttttttaattttggtttaaaaaaatttccaaagaattttttcttgaaaatttcaaggtttgagaaatcttttttttatttttccagccgggggggggggggtgacgagctgctcgcgacgaaanccancaactcgatttggtttgctcggttaggtcgataatcanctcttctccgcttcggagcataatgtgtccgctgattttcacttcgtaacggacacgggtcactgggcgtttcatgtcgatgccgaacagctacaaaatgggaaaaaaggtattcccgtgttttgctacccccccccccctcggaaaattcatattttggggttttcaaagtcactgatcacgaacatggtgtcatcaaaggtcgaaacaaacaccagaatctaccaaaatatgaatttttttttcaattttcgaagggggaggggtagcaaaacacggaagtatcggaaaaaattggtaaatgcccatcgtcagtcattttgttacaacgcctcacttacattggtcgttacttgggtggcaactgttgatcccccttttcctggttccttttttgcagccattacagtgctgcccttttcaatctgaaaaatgggtcatgtcaaatccaatttttgaaaattttaaaagttagaagcctccaatgcacttaggcgtccaatcttcagtttcttagtccgtaatttttccttatttggtcaatgcatagatttgtggtatcaaacgaaagcataaagtctgtagaattttctgtagaactaaatgctgggccctaagcaacagacaaaaagtagttacctattcataaatatacccgaaaaaagctaaattactttttctcagtttttttttttcttggtgtcaatatttgtctcttttctatgaattccttgcactttaagctttcgtttaatactaagaatgtgttaagtgttgaacaagtaaaaaaaaagttatatggccaacaaaaacagatgattggacacatttaaaaactgattggatgatgcctaaaccataagtttttccttatttggtcaatgcctacatttgtggcatcaaacggaagcctaaaagtcaactttggacgccgcctaaagtgcaacagaggcgctaaagcaaaaaaacttacgcctcgctgcaccaaataattctccgcttctctgttcttcagattttgggtgcttctcagcagctccatttgttgtttgttcgttcgtcgtataaaagattatttatacaatttttaattgttaaaagctggacaaataggtatgttatttgaaaaaaaaaatggttacgaataggaatagtaacggtgtgaaccagggatggcacggaattccggtttacgacatttttggagtctgaattccgatttgcgaaaaatttttgagcctcggaattttccgaaattttttggggcctcggaatgtctgtcatccctggtgtggaccagaaatttagtcaaccaatcaacaaactcggtaagcacattgaaagcccggcacttttatagaatgggtcccgcgtggattttcggggtcgctaatcacgaatttgagacatttctgtaatccaattccaaatcctaacttaaatatgaaaaaatcgaaattcgatgggttttagactttttttaattcgagtttttggtgctttccttctataaaagtgccaagtgaaatgaagatgtaaaagctttgtaagttttgcagggccatttaacgagtgacgactttaaaaagcttctgtaatactatcgatggtagcttaaaaaaggaaaatcgaatttttttcgcaattaggtagtaagttgtttttgccgttttcagggtcggaaatcctattcgggaatccatttcggaccccaaaccccgaattcgaacaaaaaatcttagaatctgtataaaacgaacatattttttgctctttttcaatgtattatagtgaaggtgctgatgtccagcccagaatatgaggaagggaacgagtgagaacgaggattggatttggggggaaaacggaataagccaaaatccgggccctggataaatggcctccccaaattggtaatcccttgggcgcccactagatcgaatacgcgtgcggggatgggcgagaaggagtaaaatataagataaatattggccaatcacataaaataataattccgccgcgctttgctctcggctctcgctcgccgattaactgcccactcaactgactccttatcgagagaatgctcccgattaaatagttggacttatggaacggaaaatggaatggaagagagcggggatatgtgcttgggaaagagataaaacggatgtgattaattgcgctttacacgtccacccttccttaagtttgtcctcaaactttgatttacttttgagttggaatgaatcaaaaaataatcaagcatcaaaacgtgacagattgaccgaagtcataggaaattaaattattgatacataaataattcgatttcgactgaatacccgaaagttggtgtgaaaactgacgtggattaatttattctatcaacagggatgtctagaaacaaaactttgttttaatgttgtaaacatagttttattttgtcataaaaaaaggcacggattttcaggcgcttaatcgcaaaataaatcatggctcatcatcaataaaagtatggttaagatttatttaaaaaaaaataaaattacctaattgcttgactaatggaccaaagtcctttctactatgagtgtttcattttcttaacgattctccgctcttttcacattgggattctaagaaatattaaaaagatttttgatttgttttaattctataattctgagtccgtttgcttccgtaaaagtttcactcattaaaataattactcattgtcaaccatgacgaatgacccaaaggtcgattttaacaattttacacagcatgccaaaaaaactccattaccaaaaagttgatttgtggttctggttaagatagtaaaggcaggacttaggttagagtccattccaaagcattaatattttaatatatttttttgagaatattagttttagtaaaaaaaaattgggagatcttggtatcactcaaagctattgaaaaggagaagttttttaaagcaaatgataaacgattgactcacatgaaattcgaattgggaaaaaaaattaattcgatatattcgatgcagaattttcttactgccgcaaaatttgaaaaaattaaataaaattttataaagcaaaaataattttgtttatatctattagcaaaaagaaagattataatttttctgataatcttctacaaatcagtggaatattcagaattgtctaaatggcatagatttgtatgtgtcgaaattgaaaattttatattatcatcgactttactgaacgatgtgaaataggggatttacgatatctgagcaccaaattttggtattaagacacaagagtaattaaaaatgtccgtctaaatagattccttttggccgattttttagtattctattaattaaaaaaacattcataaaatttaatgtatattaaccacaaggcccgtaatcttgacagtgctgccgaagcagagaacttttgcagacacgaattaacataaaatactgctacgatttgaatatttagctgtgcctcagttttgtgcttttccaagaattgcactttccttgacagatggaccgaaatccttgggtttaatcttctttatatttaacggcgatagtttcccaatacatttcgaaaattaaaataatttgacttatttttggttcaaaattttaatggtttattttaataagaaagaatttaaaataagtttttaaatgctgcaaatttttaataattagggaaaaaatcacatgactggtgacccgagggtacttttgttctcaatataattctaccttcggtgatggtagtcttgatcatggttggaagtagaccgttgttttgcgagaaactcacaccattgacggtaatcctcctctactggatcaatttgtctgacaatcttgataactaaatcaatgctggttccaatgtattggtgaggtactatttgggttggttcatcacttaacgtatttagaccagttaaagtagacagactgtcttcaaagccttgaattcgaaaacctaaggtaataacttctacccaagcatcatcaacaattgctgaaacatcaacatctgatccaaactggtgtgaatagaaacgttgtagtgactcccctacatcaaaacagacatcgacggcaattattttgccggttttttcgcattttagaattctttcaattgacccacagccatcctctgggagcaaggtaaaatttgtcgcaaatttgttagaagcattaagagaatttgactcattttccacaaattcttttatatctatgatttcacccaatcgaaaatattcatctgattgtgatttctttttcatcagcaaaaaatgaggccaagaactcacttcagttaatcgtgatgccaaggtccaatttatccctgtttgaataacaataaatttgtcatccgttgaaatagtttcagattttctattctctgattcactcagagatttgggctgtaacatagcccataacagagggtctgtcaaagttcccaaaatctgatatgttcgagcaaaataattttcaaaggttgtgaaaaagctattaatgtcctcaatattctctattgttatattgtttatagctaaattagctctgctatgcatgactggtgaccctaaggccgtcttagttgttttgtccaagacctcaattctcacctcactctcttcataatttggctcattatcgccaccacttttattttcaatcatgacggatgaccccaaggccgagttcacagacatttttttaatgtgttgcccgttttcagagcgagaaactcgcttcccatcctcatctgccatttcaggatcacccgaaaaaattcggtcaacgacgacattcgttgttggagttaatggcgaatgtttgtcgacagtggcggattcgcgcgatgatgtgaggtcttcataattttgtgccagtggcatttgtcgtgacggggccgccgagatggattttttagaactcttattctttttgatttttggcattttaaagctacattttatttttattatacaagcgaaagagaaataaatattgaaaataaaaggaaattaaaagaaagtgaaaaataaataaataaataattgtcgaaaatataaataaatgagcaagcatattgaaaatgaacaaaaaatgagcggagatctgtggattatgggcagagtttgaaatcaacgaaatggcggaacaatctcgtttaagagaaagcattagctcctgccacagagcattgagtggccatgaatcacgtgaaccataaatgaatggatggctaatacattaagaatagctaaaaatatgatgatggacagagataagttggataacggtggcaaaaagtatcaattataagtgaaatttgacaattataaattaaaaatatgtttaaaaaaaataatttgtctatctttattagtagaaagtgtaaggattaattctttttgttttttgagcaccttatttggatggttataagtcggacgagaatcaaccgaagaagtatttgggagatgattcaatagtcctaattctgctctttcgaatgagcatttatttgttcaaaactattaaaatttcagagactagttaagttttttgtaacagtaacgaaatgagaggacaaaaaacaaatacagaaaatgtttaaaaaatatgaaacatttaattttaattttgtttggtatttattaattgcaaataatgattgtatataaattgaataaataataaatattaaatggaaaaggccagcggtgtgagtaaaaattagcattgaagggacattcattcaccttaccttccttcacatttgcgcaccaaaaaaaaaattaaaaggcggccacaacaacggtcaaaggagaattatggatggaaatttgaatatgcatttgtgtgtgaataggagagagagaatgaaaaaatggtgttattatacagtatattatatataagaaagtgggaaacataataattttaatttaaatataaaataataacaaagaaaatattttaattactatatatattttgagttggattcattgcttttcatgacgagttctgcgaacagaaagtagaagtagcacagtattccaactttattaagatttgtttacatttattaaattcgcgccaataagttgaaattaaattaaatatttaattttttaagtgatttaatattctttactgactttaaaggtctaatttgtattttcagtgtagatttggccttcgactcagcagggataacttcggataacgattgtttattcaacatgccactaataaaagaaagaaatttgtcgttacctgctgcttaaaatttttttttatctttgtttcgaacatcatgcgaaaacccgctaacgggtataatcattattctcttttttaatcatttcttcacaaaaattaatgacaaaaaaaggtaatttgaagattttttttgtcaaattctttgtaaattaaaagaaaattgatagtacttaaatagaaaagcagacttagaaagaagattatgacttgtcaataattcgtcagttaagctgaaacttcgctgaatgaagctgaaataaaatgttagttatagattttgttcattgtgatacaatgaaaagcaattgaaaatgtcaacaaagttcggatattcataactgatttatttaacataataatttttttttacagttatcctagttgctaaaaaaataattgattttcttcaattattataaattaaacttatcgactaagcatgaagaggcatgcgaacaaaatgggtttttattatctaattttaatgatacgggtcgaatatacaaattcagtaatttgaaccagagattaccaatttaaagagtggcacggaccgcgggttaaaatatcataattaatttgagttaattcatattttctatccatgcgacttgaaattactttaagtctgataactttgttttagtgcacaataagcttgacgtggtccgcgaacggagaaaaaacaaataatgatatttttaaatattcaagctggcttggccaaactatgttagagttaactcataatggtggttatgtctaggttggcacatatttcgatgtgctcactttcagtacaattattatgataaaattagatcactgtggggaaaaaaaggaaaaaaacaatatgtataatgctttaaattttcaaaatagtcgtaaaagaaaacctaaattgtttaaaaaaataatttttaaaatttctttgtaaatatatttcgcccaatggtgacgattaagacaagtattgtaaaaaagctaaacaaaccataaatttctgtctaaacaactgaatattttaccgctttctcgatttaatctatccaaattaaaaaaaataattttccaattaataataacaccatcagtctgcctttgaagaaactcagattgaatttatcataattacttttgagttgcaagaattagggcatcgatggttcattaaacttgacggtcgccccgaaagacttttaagtagagatgtgtaaatgaaatacaaaaacaaaaaaaaaacaaaatttcgggcaaaagatgcctattttattttttgtaaattcgtttaataaacttatgcataagactgaataaaaagaatcacaaaaattaatcagcataaaaaaatttgtgtagcgttctgactggtaacattttttttatattacaaaaaaaaaactttgttaattcttaatacttctttgcttgcaaaaaataaaaataataataaacatccattttctcaacaaaattttgatgtcataattgaaaacgaaaataaaggcaccaaaaatcgcgaaaaggcactataataggcatctaaaaattgcaaaaaggtatgaaaaagactctgcaaaacaaatcagattatgataagccaatgaaatagtcgtaaaatgaaccgaaaaattctattcataataatgaaaaaaatgtttaacatcccaagattattctgtaataccgtttaactacatggttctcaagttctcagaatatattgaattttctacaacataaaatgtgaattgttcgttcacgcaaaaacatcagtttatgtgatagttttaaaaggaccaaaataaaattatacgcgtaatgatgatttgaaagcgcagtttaagtgagtgaatgcgcacgaactcctaattttacataaataatttcgagttaaaaaaatactatttgctcgattcttcaatttaactgggacaatgaatgcatgacgatttccccaaagggaataaattaaaatattccttataatgcataccaacatgatcatattttattagcataaactcatgttattggcatccaatgaaactaataagaaatgggactgaaaggccaaaaaaaaattgctcaccttctgactggcgttaaaagtccgcaaagataaaaaatttgtttttgttaccctttgtgtgttttaagtttatttcagcaagttaaaattcttttatccaaatgcacgaattgaaattaaagggatgcttagcatcattttttaaaataaaaatcaccgttcaatgctcattatggatcattaaaagaaccaaggtctaaccgcggtttgggttcaaattttttttgaattaagtatattttacctgtcaagcgacttctttcacttatcatagtaaatgttgaaattttttatgggatttgaggtttattatttcattcgaaatacttatttaatattgctataatttgcacattagctaagttattgacttcgtatttggtccctctagaactttctgattctgaaacacgaaaaatattctaagagttcgtgccacttcattcttgacggtatttcccgagggcatttgctctaaaagcgcaggatttatttaatgatttacgccttttttaagttttgttaatgagtaaaatattggtttcttcttccagaacatgcatgacggcaggcccgaaagccaaaggcatttaaatgataataaatacttttcatttttatattaaatgtaattctcccaaaaaaaaattgaaaattaatgccaacccgaataataatgatcaaataatacttataaaatcgaaccaattctcagagaaaatgctacagcatactctacgggattcttttttttaagtattgaatcaaaatgaagccatccgattaatccattcatttgttaaaaaattatcatggcagtttcaagtaagggatgaccaacttttcctctattaataattctgggccaaaatctttttggcatgtaaaatattatgtaattcatacatttaaaaaaaaaattgatccaaaaaaaactaaataatattttccccattatttctccctcaattaaaattaagttggcatggtgaaatcaatagaaaacagcctgagattaaaatcaaagaataatattttaaagactattcgtcgatttgaacatttagaaaaaaaatacataaaaaataactcgtttcttcatccaaacttttctttggttcatgttctgaggtataattttgactgcttagtttaaagaaaaatttcactgtttacaattattggactttattaaaatctctaagatattctgccattcatgcttgacggaatgtccgaagaccttgattttaaacactcgaatgggcaactgccaatattacactctgttaaaaaattataagttcaagtctttaagtacttcttatgatccatttaaggggaggtctaagcctctaactgtatcaaaatgcgaaaaaaaacaacttaagcaataccaaaataatccgttgaaaaaaaaatttttgtttttatttgactaaacccggaaactttgccaaactgagcggacttggcacatttttaaatgggcacatcgtttttattcggtaaaattggaaacaaaggaaaaaacctaggtgatttcaagagaaaaaaaaatcttagaaaattaatatgagatagtaccgcagtatttgctagaaaacccttttggatcattgcttgaggcaagtctctgttaagtgtatggggccttttgacggaatgcccaaaggctacaattttgaatgtccatttcagaaatcggcatagctacattttgaattataaattgtttcgtattatactcatcattattggaactcatatttttaaaatcatgactggatcctccatagatcgattgagagacgaaaattcttgaaatacaaaatttctttcgacgaattttacccgtaaaaaaaaaattatttggcctagcactcattgtgactttactttctcaaacatcagcattttaaaaatatattgaaaattttagatgcttttaaaatatgaattaatcagcaaggtttatatttttgtgttaattcgaacagtgaaattatttcaattaattaaaattattccaatattagtttgtctaatccagattcttcaatcggtttaaattccgttctttgcttcaaaaaaacatgaccgaatgcccaaaggccacaataaaatattggttttctaatgattgttacttcggcaatgtttggttaaaatgagtgatcactgatcagaaacagtgaaggaaattttgtttccgcaagaacgttcacatataatagataaaagctgcttgtctttagatggatgtaatggatttccggtactcggagaatgcactgtgagagaaaaaaaaactttggccgattaagcaatttaaagtgtaaagattaaagtttgtcagcataaaataaaacaacaaaataaatttaattaaaaatcaacaaaatgatactcagcaattagataattaaagcatatcgaagatttttatttgatctgacggattatcatggattgatttacaaattttaattttggcctcttacttgacggtactcccaaaggagttcaatattaaacttttttttgctgacaaaaaaaggaatacagaaaattcttatttattagcaaatattcgaagagagcgagcagaataaataaatttcttataaaatggtcacggcgaatggggcagagcaaatagaaacgaattttggcgcaataaaaaaagactcctgcttttgggcgcaacattagacttgccgtttggcgcaaaatatgtaaattggcctattatttttagcgcaaaatgaatttgacaaatttttttaataaaattcagtcttcccattttgggagcaataagaatgtgatgatcttcccattttggggcaaaataatagaattgtcgttttggcgcggcgcttgacttgcctttctggcgcaattagttctggcgcaaaaataaaattgttttttttttgtaattaaaaatcgacttcccatttttggggcaaaaattaaaaatattttcaaattggttcgaaattggccatttaatttttttgatccgaacatgactgatctcccgaaggagcggtgcacctcattccattctcgttccccaacacgcgcaaatcccactcgtcctcctggggatggattgccggcggcgtgccagcaaccatccaatacatacatagtgaaggtgctgatgtccagcccagaatatgaggaagggacgagggaaattggggattggatttgggggaaaaaggaataagccaaaatccgggccctggataaatgacctccccaaatttgtaatcccatgggcgcctattagatctaatacgcgtgcggggatgggcgagaaggagtaaaataataatataaatattggccaattacttaataataattccgccgcgttctgctctcggctctcgctcgccgattaactgcccgctcaactgaccctttatcgagagaatgcttccgattaaatagttggacttatggaacggaaaatggaatggaggagagcgtggatatgtgcttgggaaagagattaaacggatgtgattaattgcgctttacaatatataatatatatatatatttaaatatgttttctaaattactttaaaataattcgagacctttcttttttctcatgtgcttcaatgtacatttcaccatatggtgttgaatgaatttttttaaataaattttttaataattttttaataaatataagaacattaaaaattggatatttcttaattgatattataagaacataaactaatttcttatgtaatcatattttcaataacaacactaatcattcaaatatattcaacaaaaaattgacacctacagaatagaaaaaaaaattcttgatggaatatgtagaaattaaatagaagaaatatactttcattataaaataacaataccaggaatttaataattattgttaattacaaatatttagaagatatttaaaaacctaaaacaaatgaaactaaataatttaaactatttttttcacacaaacatttgaatagcatcaattgtaaaaacgaataaataaaatataaaatttttatttcaaatattttgtaaaccatcaaatatctaatcagcatttagcaagatagctccagtgcaacgaacaattggttccccaagatatcaatttttcgaataaaaattaaataccaaatgtaaatattttgtaagatgaaaataaaataataatatttatcatcatttaaaaaccaatatactttaatcaaatttatttatgaataatgtaatttgcagcattaaaaattttatattaaagaattaattaacttattctttttgatagcttctctagaaaattcatcataagttaataaatcagccaattttaaaaatgagctttagcttgtcaaatgcgctacatattggggaacatcactcattaatcggatacaaaaaagtcattagagcagataattttattttttttactggtttgagtgctgctgataaaaaatttaattttttagatttttggtaaaaatccacaaaaaatagctaaaagtattttttagctatttttttatatggaagaaaccctcccgttaaatggaataatatatttttagtatttaaattttgtcatttt

SEQ ID NO: 913 - DNA, 1547 bp, Heterodera glycines
aggggacaccctcgtttcggcgccgctcgtttcggcgccagcccagtttttggactataactttcaaccaaatctaacattattggtatcattcgaaagccctaagtgttctctattagcctgctaagtttcaaaaaatttcgttaatgctaaaaaaattatgactagaagaattcaaaaaaccaggccacatgtgtacttttggccataactttgttcaaaattgatcaaattttttggaattatgcaaaataatagagcatcagaagggttctcgaatgatatcaacaatattagatttggtggaaaaagaaaaaagttatagtccaaaaactgggctggcgccgaaacgagcggcgccgaaacgaagtggaccccaaccgcacgtataattttaaaaggatgtcattttacctctcctttgtaagggtggtcgcttgtctctgaacgaagagaaaattctgaaatttttcatgataataaattaacctaagggctatcgaatgataccaagattattttttaggacatatttaagaaaagtcatgacggatttttcttgaaaaacctgacctgtaaatttggcagttttacaacatatttttaaagtgcgttttcagtttttttgcataaattaattttgcgcaatttacttcaaaaattttcttagctttttgcataaaattatttcaaaatgtaaaatcaaaattaataaaaatgaattatgaacttttcacctatcactcccttccctaaaaggatcgtccctgatccatttttttttaaaaaaaatttattgccaaagcataaagtcgtcatttccgccctttttatcattcctatttatttccattgccctttgccccttggttgaccacgtcctgctgattgtccatccgcatatcaacagttctttgccaaattcccgacacgtttgcacacaaagcaagcaccacgaggacccgttggttcgcgacttctgacaaaaacggcaccgctgaattgtccaagacgttgctgcggcctccatgtctcatttcggcgtgcactcggaccttggtcgggctcatccgctcttctttttcgcgactcaaatgtggacgtgctgcttgaagtgctcttaatgccccatctcgaagactcgttcttgttgttaccaaaattaccaaatcactttcttgtgcttgatagccatcgaccgtcacgacaagtacctcaattcgctgcttttcgaattcagtttgaagtgattctttttgataagagtacaaacaaatcacaactaatgaaacatttggcgacaaaattgtgtctttcaacgcagttactatctgaattgccgcagcagtttgagaatcgttcgtcaacgaatgcgagagcaaggtcttgtctgcactttccgacaacattcagcaaaacaattggacaattttgaattgatagaggaaacttcaaagctgccaggagggaccgatcttcagctgctcttcctgggtcgaatgtatctccatttgaatcatatactgccgaatcaactgctatcacca

SEQ ID NO: 914 - DNA, 4117 bp, Heterodera glycines
cacaatcgtggctgaaccatcttcggcggcgagtgtcgccttatcgactaagaaagaggagaaaaagaagaaatgatggaaaatggaaaaagagagagagaattgaggaagaagaattaattgtgttaattggaataatttaatatttgtgattgattttcttattatctaaattgtgatatttcctattcaatgtgattttcgtgcttagtattagtcactcttttttgttgttgatcgttctgtctaaattgctccacctccgcttttcctctctatttaaacacgcacgtttttcgcttcaacgcattcttttcatctgacatttctttttcgcgactcaaatgtggacgtgctgcttgaagtactctgctgttgcatcgttcgccaattttcatcattcttttgtaaccactgtagatcctggactactctgccaatgccatcaattaattgcccatatcgatcacgcatgtatcgaccatttcgtaggatctgaagatattcctcaccaacaatttgagagtcctcacttgctgtttccaaaaacttattccacacctctccctcacttaaagttttgaaatcgccaatcaaaaataaaccactttttgctctgcttaaagctactgtagcccttctcgaatccttcaaaaattctgaattctcacttaatgccccatctcgaagactcgttcttgttgttaccaaaattaccaaatcactttcttgtgcttgatagccatcgaccgtcacgacaagtacctcaattcgctgcttttcgaattcagtttgaagtgattctttttgataagagtacaaacaaatcacaactaatgaaacatttggcgacaaaattgtgtctttcaacgcagttactatctgaattgccgcagcagtttgagaatcgttcgtcaacgaatgcgagagcgggtcttgtctgcactttccgacaacattcagcagaacaattggacaattttgaattggtagaggaaacttcgaagctgtcaggagggaccgatcttcagctgctcttcctggttcgaatttttctccatttggctcatatactgccgaagcaactgctttcaccagtgtcgggtgcattctgtaacaagtcgttagacgagtttgaacaactgtcggagacatgatcaactgatcaaccattgattcaagaccaaaaccggattgtagcaaaggcgggagtttctgcagatgaacaccaagctgcaattggtcaccagttaccaagactttctccaattttggcattctggctactaaatgtgctaagcagacccacgacccctgagtagcttcatcaaagattaagactgttgtgccgtctaaagctgtgtgaatcaaattttctgccatcgacactgtggtgaagacaatccgcaaatccgcaacttctgagtacaaattcgctacttttcgttctttcgttaagcgtggtcgaacttcgaaattcttacaataagtctcaatttccttcacatcgtcttgtgtctcaaacttgcttattatttcttcgttcgaaattttggaaatcaacaaatgccttttcaacttttctaacatttctttgtacttttctttggcataacccgagaagaatgcaactgaacctgattcttccatctcatcagaaccaaatacatcattcaattcttggactaattttgcaagtggcaaatttgctgctgtcacaatggcaatttttatttctttttctatcgacaaaagaattgctgcaacaattgcggcaacatacgttttgccaacacccggtggagcatgctgaaaaacaaagtgcgactccttgctcaacaaaagttttgctgtctgctgctgcttttcatttaattttttcatcaatgcgtgattaatttgtattgccgaagcattttggtccacattttcctcaattatctcctcagttctgcctaataccgcacgcatcattttcccttgttttgtttccaaatttgcaatttttgatggcaaattagaagcaaagcaatcccttctgtgtttcactccaatcggaatgatcgggtgtactacaaagacacctccttcttctgctgcttccaattcggcatgaacatcacgaaactttctctcttggacattggtgactttggccattatccaaaaattaaattttggttttccttcctctctgattctctcaatgtcaatttgtttgacatagccaaaagcaaagtgcggcaaatccaacgcagttctgaagaagacattcgcttcttctgtccaaacttctttcaattttttcattttttcggtatcaatttcagcaaatctcaaccaaaaagtgtcgttctgccattctgctcttccttcaaatttgcactcaacaattctcttttcctcatcttcaaagctgtaggcaatcgctgaactcatgatttgttctgacaactcaatttccggcagagtcatctctggcaaaagcggaaagaagacattgcgagagttcgattggtatggccacggcgcatgatttccgacaatggagagaactcctttgccttcctctatctgcttttcagtccccagtcgaaattggctttgaggtggaagtatgaacgaattttctactaatgtttgctctggaacaaaagcagtccaaacttttatcaactgcccttcttggagagactccaattccaactcagaaagctgacgccgataacatctcgaactcaactgcagaccaggagaaataatgatagcacaaagctttttcgtgacaccatttgagaccatttctctgattcttaagaccaaacccggatgttccctcagaattgcatatcttatatgaccgaggtcaatgactgttgcttgactgtttattttttgcacataccacattttgttgaaatgacttttgtcagtttctctttttgctaagtatcggtaatcatttttccactcaaattttttcactccaactatgtctcccatttgcaatttctttttaaactctcttgctttttcagccacctcatttgagattgctacaaaatgtggccagcctttgtttgccattgtcctcaattttcctccaatcactatattttcttctacttggcaaaccaggtattcaacaatttttccttcattttctctcacattaaaacttgaaaattcttccatcatttcttcagccatttcatccgggtttttgtcaaatccttgattcgcaaatttttcataatctcttgggcttgccgaagcaacatttttatttaatttttgattcttttcccctttttcttgcccactgttccctttttcccctccccaagttatttgacttgccgaagcaactaaatccacacttattgcactactacaggtttccttagaaatatttgagtttccacttgggcttgccgaggcaattttgttctttttccttacatcctccaatgttaacttttccaacggcgggaactcgctcaggtcccgaacatttggtggtgctgttggtgccgacatttctgtaataaatcatttgttattgcggtgttatttgaaaaaatttataggatttaatataattataattaaattattattattattatatgtaatattaaaaaaaatcttggatttatttatttattattttttatttatttatttatttttttattgtttttttttgttttcatttcaccagatttcttacgcaggaatttcttcatcaaggctgagagaatccgtccaaggatatttttaccaggccatcggtttatgtcgcggattttttcaacatccgaaagcgccactcctgcaccccagtacacgtcatttgctgtacattcaacaaattcaacatcgggaccaaaattgaagagatggcgcatcaggtgttcgttctgtctatatttgtgccagttggcgcaagtcatcacgaatatgcttatgcgtcgccaaagcagttgtgccaaacagccgaattcgcgatccaattcgcttgcactcctttggatttggtgtccgcagaattgcagatgccgcttcttcgtctccgaaagcgctcgctttggcccacatgtacatttgttcgctg

SEQ ID NO: 915 - DNA, 2695 bp, Heterodera glycines
tttttcctccactatgtctcccatttgcaatttctttttaaactctcttgccttttcagccacctcatttgagattgctacaaaatgtggccagcctttgtttgccattgtcctcaattttcctccaatcactatattttcttctacttggcaaaccaggtattcaacaatttttccttcattttctctcacattaaaacttgaaaattcttccatcatttcttcagccatttcatccgggtttttgtcaaatccttgattcgcaaatttttcataatctcttgggcttgccgaagcaacatttttatttaatttttgattcttttcccctttttcttgcccactgttccctttttcccctccccaagttatttgacttgccgaagcaactaaatccacacttattgcactactacaggtttccttagaaatatttgagtttccacttgggcttgccgaggcaattttgttctttttccttacatcctccaatgttaacttttccaacggcgggaactcgctcaggtcccgaacatttggtggtgctggtggtgccgacatatctgtaaaaaaatcatttgttattgctgtgttatttgaatgaatacgatttaatataattataattaaattaaattattattcttattattatatgtaatttttttggattcatttcaccagatttcttacgcaaaaatttcttcatcaaagctgagagaatcttcccaaggacgttttttcctggccaacggttcgtgttgcgaattttttcaacatccgaaattgctactcctgcgccccagtacacgtcatttgctgtacattcaacaaattcagcatcgggaccaaaattgaagagatggcgcatcaggtgttcgttctgtctatatttgtgccaattggcgcaagtcatcacgaatatgcttatgcgtcgccaagcagttgtgtcaaacagccgaattcgcgatccaatgcgcttgcactcctttggatttgatgtccgcagaattgcagatgccgcttcttcgtctccgaaaacgctcgctttggcccacatgtacatttgttcgctggaggaaaattcaagcccatcaatgacaaatcggcaggagaagtgattggaaaatggatatgctgatgtgaagaatggcacgagtttccttccatcttgcgatatgacaactttcgcagtcggcatgctgaatggatacgacactaataattttatttgtttccttattttcttattaaattaaaactgttttatttatttatatatatttttttaacccctctttctgaacttttacttgccaaagcaaaattaattatttaaactgagttttcttgctctcggatttttcctaagattatatctcggactgatttgctcaggttcatccgtttcttctacttctttttcaacttcagaatttgatttttgacctaatttgtggtaatgtcccggttcatttattaattcctttgcatttgcctcatgtaatgctttttcttcatcatcatcaagcttaggaatagtgcatgctggcccaaggggttctatgcattttttaagttggttaatatgtactactcttggattagactgaggcgaattacagcttagtattgttgttctgaccccttctatgtctatgactctaaatacacctttccaaggtaagtggaatttctttgaagtacctatttttcctgaataatttctgagtaaaactctgtctccaacagaaattgttggatttctaactaatttatcataagaagattttgttcttgcctgagcctcttgattggccaaatttgctgcttgccaagcttttctaagtgtgactacaattttttgacgtatttcttcatcatcactaaatgcgactggttccctaatttttggatctaaaattagatcaatgcagaaaatcggatctctaccatacataagaaagaatggtgtttcatttgtcgaacgatgtaccgaagtattatagcaaaagcttacaaagtctaaatgctcatcaaagtcaggctcatccttagaaatatatttagagagaatattatggaaagtcctaaaggatctctcagttacagcatttccttgactccaatgtggaatagcgtatgtcttatttatgtaaagcaaagcacataaacttttgaagaaatctgacgtaaatgccgttgcattgtcagtaattaattcagtacaacccccaaaacgcaaataacaattctttaaaaatgccgaggctatggttttagcttttgcgtctggtagaggcacagaaatcacaaacttagtaaaccaacaaataatatttaaaatgtgtttatttccattttccgttttcggaaatggacctgccaaatccaaaccaactttagcaaaaagtgtatttactggtggtgtgcacatttctgctctataaggaggatttggagaatgcctaagctgacaagtaatacattctttgtaccatcttaatatgtctgcatgcattaatggccaaaaatatttgcaacatttctttaatgttttactcaaatccatgtgtccaccacccagacgagtggtatggaaagagtcaaagataagagcccttaatgatactggaatgtaaattcttggcttaaagtctttctgacgaaaatagagaatattagactctatgca

SEQ ID NO: 916 - DNA, 5183 bp, Heterodera glycines
ttttgatgtgtttctgccttttttaatagaaaagctaatggcttgtgatctgtatgtaattcgatatttgacataaaaatgaacggtttgaattgccgaagcgcataaattattgctcctaattcagtctgaacaggaggccaatttctctcagttttagaaagcgttctgctacaataagcaattgcattatagactcggttttcagaatcccattgcattaatgcgcctccctgacccacagaagaagcatcacaaaatatatgaaatggcttagaatagtcagggaatataagaacaggcttttcagaaagaatttttttaattttttcaaaagctttttcttgctcatcagtccaattgaattgcttctctttcctagttaatctcgttaatggttccacaatagttgaaaaattcggaatatgctttctgaaaaagcttgccattcccactacttgcctgatttcctttacattggttggattttgcagattaagaattgattcaactttgcttatgcttggagtatatccatttttgtttacaatataccccagaaaattcatacttgccgaagccaaaatacatttttgtggtttaagttttaaattaaaccttctgaatctttcaaaaacacttttaagagagtctaagtgttcatcaaagtcatcagattttgtgaaaaccaaaatgtcatccacataagcaataacattttcaagacctgttaacacatgtgccatgactctggcaaatgcacttgttgcattttttaatccaaaaggcaaattaatcatctgaaaaattttgtcctcagtgattactccacattttctggatgcttgttcacttaattttatttgtaaatacccactggccaagtcaagtgatgtgtaatagcaacaatttcccactttttctaaaataacttctaaacggggtaacggaaaatgatcaggtacagtaacctcatttaattttctgaaatcaatacatggcctaagccccccatcctttttctgtaccaagactatgtttgacacccatggtgtgtctgactcaaccataactcctgaggctaaaagttggtcaatatgtttctgcagttcatccctatatttaaatggaattcgatggggtttggaagcaattggctcattagacgttgtgacaatttcatgttcacctgctatacaattgcctaagtcatattgacttttgctaaaaatgtccttaaatttttcacaaagatccattagcttgattagatcattccctttaactgaagttttcccaaaatctaacttaaatgccgggtcaatttcaatttctttttctatcaatgcattgaattcatactcactgtcctctttctcaatttcagtaaaaatagtgctattttccgtttttaagacttcatttgcattgccgaggcatgttcctttaaaaattctttttacagttgaggtgggatttgtaataattacactgattgtttctgatttgaaatcagataatgatggcacaaacccaattccctcatttaaaagttttttatcaatttcattaaaaacaatttcatgccgaagcttttgaagacttttggtttttgccttaacgatgcattgctcattaggacttaattcagtagtgtcagttgcatatattttaagtccatataaaattttatttgtggcatttcccaatggcaaagtagcatttcctatggatagccatttattttgaaagtcaaaagtaataggcggcagtgaagcaagagcatcacatcccaaaataaaattataatctttcattgtccatgaaagttcatcatcaaaaagacgaataattatgtccacatattcatttcctatttttaaagtcacacgagcagcttctttgacatgtactggatgaccggaagcactcattaaatgtgcctctgatttaaatgttttaatacctaagtaatcagctaacgcttttggtgcaactgaggtgcttgagcctgtgtccactaagcatttcatttggaaattattaagagagacgagagtggtcactgtcattttattattatttaacgacccaagctgtcccatcaaagaatttaattcaaaatgagtgctcatttgtgttggatttggtccatgcctatttcttttgaaaggtctggtgaaagattttttaaatgaatttcctgcccttctaattcttggtggccaattaatctgattaattggctcttcataaatttctccttgttgaattttagtctccctcaattttcttactcttctcccagctttctgaattgttgtaccaaataataaattgcctaagcgcccattccctgcaaaaattcacttaaaccaattgtcaatcttatcgccaagtcaattgacagaatggtaataattagagacataattattaaccacatttttctgtaatcaccaatcactgctttgatcatttggctttcaacctcttcccattcttgagaaattgtagctgtgattttggtgtccttttcatgaatctgataagtcatttgactcaatattaccatattgctcacaaaagcatgatctttttatgtctgtcagatttagtagaaccaatttgtgaaaagcatgtgcttctatttgaggaagcaaattgtttagcccaaattttatttcatgatgaatcagtttatttgggcttaccgaagtaatttttccttctatttggtcatttttaaaatttgaccttcaatttgaattataattcatctaaattcctcacaggaaccttttcttgatgatggagagattatcattgacttagggccaatgaaagcacagcgttaccactagcgtgcgttttcgacttgagtggtaggatttcgaaccactgtttctgtaatgacgttccgccctaatctgataatccgtatgcacccaatcagcccgtgccctaattcttcctttctccagtggttatgcggaagaaaagaaggaaatagtgcactgtctgactgtctggttacgcttttgaaaaatttggccaaaaatgtggatacaaacccaattagtaccgacgagttctctaaatggaaaattaattttgcgagaagctcgcccccccccgtatcagattcacccgagaaaatttttaaatgttcagggaaaattaataaaaagaaaatttcaagaaaaatttccagcgtatgaattggaaaaaattttaaattcgtaaaattcagcataaaattaaaaaaaaatgctagaaagttttatttattttcttgaaattttcttaagatttttaacaaaaattactcatagtaaaggttatattttttggcttttggcataacaacgtgtaagggcaaagttttagaacctatgatgctttaccattcgaacgtgtgcttcggcggcaaatgccgcaatccccgagccaccgaatcccttatccatttcattcagccaaatgacaaattccgccattttttcaggcactttttccgcggtcacttcgatcggtcggccaccgacgtttacatcgacttcgcggtacacaccggccgcttccgccccatccggctcgcgcacccaaatgtggtgatgcagggctttgatggtctcaaaaaaaacatgcttccgattaaatgcattacagtatcaccttgtagaattgctcaatgaatgagttaaatgtaaaaatgatgatcgataggccttgagaaaagcaattggaaaatttaaaaaaaaattttgtgttcattgaatctaatagaatatgaaaaaaataattagatgtgatttattgttttaaattttggtatatcgatggtgaactttgggtaaagccgcaaatgtccgattttggcttgggccacaaaatacaacaaaaaattgggccgcaaatgtccgaaaatggcccttaagaaatgggccgcaaatgtcgacgcaacgcaaatgtctgtaccaaaataccataagcattttatttacgggagggaatggcctaaaagaaagcaaagaaccatttacatttactttaaagccgatttaagcgtttagtgaataaatgaattttacaattggctcattgttagtgtttgaccgcaacacttttctcggaacttttatcgattttttctgatctgtttggcgctcaggaccaaaaaagccgaaagtttacaatagcaaatcgactatgactttacacgataaaaatggtcatgcattttttttcttaaaagtggcttaaaatcgcaaaaataggccatttttttggtgaaaatctgttaacaaatcgcattaaaaattacaaaaattttttggagaaccgcgccgaaaaaaaatgttttttgaaaagcaaaaaaagtcttcgacggcggaccgggtcgattgggccccgccggttgggccccgccgattgggccccgccgattgggccccgccgattgggccccagtacgattgggccccgccgattgggccccagtacgattgggccccgccgattgggccccgccggttgggccccgccgattgggccccgccgattgggccccatggggcagccacttttttttagtttcacatgttttaaaaaaattaaattattcataaatttattaagtatgaaattctatccattcttacaaaggcaataactcgtacaatagcagttcgtacaatacattttttttacaaaattaagcttatagcttgggccaaatctaacaagggaaccgtcagaactgtgtcagaaaatgcatgtatcataactatttgatagtgcagggccggctactctgaatttttaatgttagcggtgtgttgaagccaaatagaaaagttattggacctcaaaaatcaaaattttgactgtgttttccccttcagggaaggtggtgacgtggggaaaattaaaaaaaacggtggatcagtgggttaaattcctatttttcggaggtccaggttcgaacccaacatgaaaaaaatacattttaattaatgtgtaaccaaagttaacgattaaaaaccacgttttatttttaaaaataatttttctttagtgaaagtaaaccaaaagtcgactaaaaaagtgactgccccatggggcccaatcgtaccggggcccaatcggcggggcccaaccggcggggcccaatcggcggg

SEQ ID NO: 917 - DNA, 1500 bp, Heterodera glycines
acgtatttgcatacagatgagaaatgattggattggccagcttagaagaagcagatcaaatgagaagacaggtgagagaaacagagacagagaaaaatatacgtgagagagagaggggagagagaaagagatagtatgagagagagagagtgagaaaggggaggggaggagagagagagagtgagaaagatagagaacgctagaagaagagaaagaatgagacagagagaaatatagagagtgagagaaagatagagagcgagagagagatagtatgataatgactcgagctttagggtactcgaaaagtatcaaacaaaggaggatttagactgggtttccgagactctacacggtaggaaaaatcttttcacgcgtcaaaagccgacccgaaacccgagactctcgaatagcaataaaatttaatttgacttttatcccattcaaattaggcttattaatcgtctattttgcctcctttcttttttctgttcagattcatctgagactgccagaattggttggaggagaaaagcaaagggttaacgaattaatggaaatgttgtcaattcgttcgagtggaaatggtaagcatcaaattaagttttgttcaaataaagcgaactctttttaacgcaaaaacaatttttattttttatttactttatattttcattaaacaaaacttattttattttaatttaaaaaattatgattttcaatatttttttagtaattaaaaagaaatttattattgttgtttaactctcatattaaaattcatttattttgtccatttgttttttattttcccatttttacgcaattttaattttaaattaattaaatattccctttaaattggttataagatatgcttggtttggtccaattcttctacacaaatgtgctgttgtcaagtgtcaattctgtggccaatgaggcgaagtggcagaatgaaattgcgcaaatgaatgccttcgctttgatccatcgaattgacgcgtttcattggcgcaacggacggatcgccaacgattgggcggaagtgcggaaagcggtgggcacacttgtggacgaattgggcacagaacaaacgggcaaattgacatcacaggtgaaggaggaagcaggggacaatttagaggaaaaaattaaagcaaattaattaattgatttaattaattaattggtttaaataaattaattttttatttgccaatttttaccttaaatttttcggtactttaggttttgaaaccccccggaaattttgaaattagaccccataattagttttgatccgtcatgttgactaattgataagattttgattagcatcgttgactttatgccgcctgtttaattttttattttatttttaagtttttacgtaactcactgaaatgcataaaagcccaaaataaacggcatattcgtctctagcgcccaaaattagtctaaattttcttgtggagagcatacatgaaaagggggggg

SEQ ID NO: 918 - DNA, 1237 bp, Heterodera glycines
cccccccccccctttcgcccgcaaagtgccccaagggaccccttcgcatcgagggggggccggtgtaaaagaagtggaggggggggggggggggccgccggcgaaggggaaaagagggaaatgccccccaaaaaaactattttttttcttaaaaaattagcccaaaatctcaaaaaattggatcatttttagacaaaatatgttaacaaattgcactcgaattttcaaaaattttcccggcggcgcctatcgggcccgccggtcccctgttcccaaaaagttttttgacaaaaacgcgtcaattccgcctcaactttgtccaaattttctatgcttattattacgatgacattggcacaattctcgacatttgtcccaactctcggaattgtcgatctcatttttcctcaggtgaatttgtgcctttggactttgcattgggtcagaaatgagttggcacggagaaatgcgttaaatgagcagaaaaaatggtggtcagtgaatgaaatgagcggagaactgatgaaacacattgaagaagagggaaatgtgggagtgagcaaaataaaggcacaaattgttggcattttgttgcatatccatttcgaaaatttggacaaattaattgaacggagagagacatttcggcaaacattgcaaggtaataaggcctaattgatttaatagcccatatccgctggtctgatttattatgctcaaaatttttgggttattttttacgggtgccaacaaattgaactaacgctttatcaaaattctctcacatttttttaatttgccaaagtaccggtataaattcgccaattatacttttgattttgacaatatattttaaagatatgtttatttatttgcaaaaggttataaaaataattattaaaaataaactgattgagtgtcgtaaatatgcaattatttttcaaatttctatgaaattttcgggtcggtcctctgaaattcttaacagttttgggcaggaagaatccttccttaaataatatttatatacctacactttcttttctgacagtaaaatttaaaacaaaagcaaattaactttaaaatttttgcaaaaattaataaaaaaattttacaaatttttgccttccgtccactaaaatgcaattcgtttgagtgcaaaaaactttcactttccacctcaattttcgatttttcatattaattgcccacagaaatgagcggtgttcaactgttg

SEQ ID NO: 919 - DNA, 13126 bp, Heterodera glycines
  unsure (1)..(13126): unsure at all n locations
ttaatttgccaagtaccggtataaattcgccaattatacttttgattttgacaatatattttaaagatatgtttatttatttgcaaaaggttataaaaataattattaaaaataaactgattgagtgtcgtaaatatgcaattatttttcaaatttctatgaaattttcgggtcggtcctctgaaattcttaacagttttgggcaggaagaatccttccttaaataatatttatatacctacactttcttttctgacagtaaaattttaaaaccaaaagcaaattaaatataaaatttttgcaaaaattaataaaaatttaaacaaatttttgccttccatccactaaaatgcaattcgtttgagtgtaaaaaactttcacttttcacggtaatttttgatttttcattttaattgcccacagaaatgagcggtgttcaactgttgcgcaatttgagtgcctttttggagggtgacttggcaaaaattgtcaaattaattaggaaatgccgacaaaaggaaggcgtcactaattggtttattgctgtccacaaaccgggctttgttcagcagtgccccagcgaattgttcacagcagacgatgattcatatccttacaaaggtcgaattaattagtcacaagcaattaatccaattgatttattaataaagccaaatgcaatggcattggcacggacttgcccctttttggtatgaaaatgcttttccaaattgattggttcgtcattcgcgaagaaatttccgcttttcgttcatgtttaaaaaactcagcctatgccttaaggattttaaggtgttttggtctgctaaattaaaaatattctaattaaaaataatgtttttttctctcatttgcattggattttctgatatttatttattttctattttttttgaaatccagccaattattgtaaattttttcctgaatttccgcatttttcagactccgatgctgaacaccttgcccttgcctatgaacaattgctgtccaataaaagctatcgcttctcaaaccaagctgaattcgccgaccgtataaacagtatgccaattgctgttgctgctccgttgtggcttttctccgcttttgtcgacgatttgctggtctatttggaggcaaattttaagatggacgaatactacgatatgccgatggccaaggatacggtaatgaacgaactgtggacggcatggggaagactgcagttgctacaagcgacggcacaaggcggcgaacgcgagagagagaaagtgaaactgtgccaagtttattgcttcctaggtactactgtcgcacactgtggggttactgtatgaaaaatgagcctaaggcattccagaaaaataaaattttagagagaagaaatttaaaataaaatttcgaaactttatttattggcgagaaatttttttggatgatttgctcgtttcgtttccgattaaaatggacatcttcagcaaaaaaatgctataacttttcgctagagctcgacctggacctgcatccgaggtctgagtttttcctggatccgagttccagtcgagtttttggcgacctggtttttatgaacctggattttccacgattttggccttcaggcctaggcttttttcgctagtagtttttttgaaaaattgccgaataatcgagaccatttgcggagacgttggatgataccaaaatgtttttaaaaaaatttttaacggactttaggggtcaccgatcacgaatctaacatacatttcgacaaacttacgaactgcggacctgcattngaaaaaagttcgaacaaaaagttgaagataaaaaaatgcgaaatttgaaggtttgacttaacgcacgagtttggttccggggttcgaaattggccgaaatggatgttatattcgtaatcagtgaccccaaaaaacttttttatcatttaatatagataatttaagtacatttaaattaaaaatatatatgaaattggcttgtaaactaaaaaagtgtctttttttgtcagcaaatgcatttttttggtttagccaattaggctcataacttgaggattaccgccgatgttttaacagtagtcatttaccgtaacagtcgcaccacttacagtacaccaacaacaccgttcgtcctttttcagattgggcaattcgcaaaagttggccacacattggagacacggcttcttttgcaatcattttagacaacattcattggaaagattttgaagcaacaacactggtaggctttttctcgagcttctgcggaaatccgccagtcccgaaatcccaatcccttcccattttctggtcttttttgcccggggcactatttttactttttacgggaacggaggccaatcataattacgaaggacaaatcggacgaccaatcacacatttggcatttgtctccaaatttatcgttacgacaaaaattaggtcgtttgtctctgtcgtcaaattgtccgtaaatttgtcgtcatttttctttaaaatgaaccaaacatttaagataaggcaaaaaattaaaaattctgattggtgctatgtcattattttaaaaccatcattatgtgcgttatttaaaaaaccatcaaaataaaaattttgcttataacttttctttaaaataaccaaatttttaattcttgatatcattcgatagaactaagtgttctttaagagcctgcaaaatttcaaaaaaatttataactttaaaaaaaagttatgaccaaaaatgttcgaaaaccaaggttttttgagttcctcgagctataacttttttgaaacttaacgaaattttttgaaattttgcagactgatagagaacacttagggctatcgaatatttcaagaattaaacatttatttaccttagagcaaaattataaataattattcgacaaaaattttcataatgatggttttttaaataacgactccgccccttctgattgaccccccagggaaaaggcgggaaaggaagaaatttcttctttgaaaaagggttccattatttcctgctgaaaaacatacctccgatttagcgatttaggagcataatatttagtggattttttgcgcaattttttattgccaattaattaaataataaatatttgtttagcttaaaaatttgaatctcaattcccaaaacggtgcggcgcctctgaaagggccgatttgtacagaaagtgtggctgatcggctgttcgctgagctgaccaacgcgcaaaactttggttttttgcacactcatgccattttcacactgatcaaacgacggaccaatggcattttggcatttctctgctcaaaaaagaagctgaacgaaatcatggaggtcaaagagcgcattcaaatgctgacaagaagcgtagacaaattggattggttggaaatggcatttccggacattctgcacataggcaagcggaaggaagcggggtccaccgatgcctttgtggcggaaatttcattgggccgaaatgtcattgacataacccatattgggatgatcaatgacagcagaacccatttattgtccacaatcgacattaatgcctttttttggcagggttggcattggcattactttatgacctaattgttggcacaatttgcgagcactgaataggcattggcacccactacaaaatttttcgtttctctcgcctttgtgccattcactgtcatgccaaaaaaaaaagcttaaatccatcagatattttcactccccgacttcgcgtcgctttgtatcagtgccttttgtcctcccgcagcggctcaacgcccgcgcaacgtgccgaggcgcgcattgtggtgccgttgttgtacggcgagctgagcaaccggtacgcgctgtattatgaagaccgaacgaaatggccaattgtgggcaatgccgaggaaaaattgttcattgtgtgggaccaattttggcaacgcattcactccgaaatagacaccatgacgggcatgtgcctaaccatgtttatgatgacggtaataaagaagcaggcggaacgaacccggccaaaaggccagcggagcaaaaagaaaaatggggggggacgattgttgaataattagcactaattatatattaatcttaaattccaaaattttttggcgttggatctcccctaaaattctgtagcattaagtattgggtacaaaagtgtcaaaattgtataagataattctgattcgtccattaagttttttggaaacgttcaaaagcttagaagaaaattattataaattagagaatcgaattttccgaatttgccgggccgggtttacattttcaggtttccgggtccgggtctcgcaaaaaaccggtcaattacgatcaaaaagctaaaattgtatgcccgatccaactcaatctgatcaatcaggttaacccaagagaagacacgaccaaaattaagcggaattctgttgtcatagactgacgggatatttattcgaaaacttttcgttgttttttcctaatttttcatcaaattccctcaaattgcaccaaattgacttttctaatcagatgatgcccccaccccctgctggaaattccatctgatcatgccattccattggccattcattcattccttggccaatcacttctcggcttattcccccacccctttcacagatgaccgacgattggtgcgccggagaagcggtgacgattgcctttccgtccgatcagcagctccaaaattgtgtccttcggagggcacggctgagcttcttccagcgccaatggcaacgcatggagcaaaatcatttcgactttttgcgcagttttattcttttggttttccccgagggcgaattgccggcgggcgcaaagcgaaggctgacaaatttagtgggcccaaaattattcgacactttgtgggcccattccgcaaatctgctcagggacaaacaaagtcagtaatttaaagaccaaaaaatataaataaatttaaaaaatcaaatttaaattaaatctttgcctttttacttttaaattatcaccaaactttcaaaataatgagataaaaactccaatatttatttttcagttcattttaaaattgggaagaaaaaccacaaatttaaactgctaattgtttagtcgaatacatttcgaattaaaaaattattttccaaaaattcacacgcagaagaataattaataagtgaaaattttatgtgtgaaataaggttcggctttaacatttgtaagaaataacggaagaattaattttattaaaataaatatttttaatttttgatatttttacattttgtcagtgtttgacaatgacatcagtctgatgagtcattatttggtcgttctgtgcccatcgccgggtgctcacactttcgccgatcaattggcccacaaaatggccgctgatatcactgtgttcgtccggctgatcgaagcggtgccccggggggcaaaatttgacaaaatttggaaagaaaaaaaggaaaaccaaatcatcgatttgtacgacagctttttcgagatggactatagcaacgaatatcgaacacaaatgcattttacgtggaaattgtttgacgctgtccgatcagagctggccgatcttggttttttgatcaacgagaaaaagctgagacagaaatgggacggcatggaaaagcgggcacagcgcgacgccgcggaccaaacagcgagcgacgatggcacagtgccaaccgcgccaattttggtggccaaattacatgcgcaaacgctgcaaaagttggcatttgaaaatgccgaaacggcgaaacggaagacggcagaaatggccaaacatttcagggaaaagctgaagacaggtgaactcataaaaggggggaagcaaacattcggaatttttgcatgtgctaatattggcacaatgacatcaattagtgccaaatcccgctgattatggcatgggcattttggtgccaaagacctctgacgttatgacaactcatacaaaaggcattgtattttattgtacgagttgccttttgtatgagttgcaaagaatttgccaaatgccgacgagaatttcggtgtgtcgaacaatttggccaaaaatgtccatgtttatttttatcgctaatcatggcatgctgttttggcgttagtgtcatttccttgggactctttttggcaaattattttcttttctccattttaaatctttatagaattgagcgaatcaactggcgcaaggcaccaacttttgctttttttggaactcagtgacatcaaagtgctgcttgaacagcttggcatagaattcactgagaaggaatttgaggacgacccaatggaagaagaaggacaaaagagtaccagtgatcagcagcagacagagaaacgaaagaagaaaaagaagaacaggaagaaaggaggcatgaaaaagaaggcagacaaagcgggagagactgtgcagaatggagagagtgcagagaaaccttgtgatcagagtgggagagagaacgtgcaaattgaagagaaggccgcagaaaaattggagaatggaagagagagcgtgcaaaacgaagaaaaccgaaaaaattcgccagcagagaatggcgaaaagagagtgaaaaacgaagagagtgcagagaaaacagagcaaataatctgtgacctgcagagaaaaacaattgagagagcagacagtcatccgccgataataagacaagacagagaatgaaactctgttgatcagaagaaattaattgaaaatgaaaagagagaaaattctgatcagaaaaaagaaaaagggactgaaatgggacagaacggaacttgggaagagactgatcaaagccgggaaattgatgctcaaattggcaacaatttgctgtcattttcaaatggggaggattcgaaagaggaaaaaacacctgcgaaatttttcaaagtttcgggtgaatgcccaaatcggtgtcaattttattagttttatttattttttaaatttttgatagatttaaaaaaacataattttttggccggcaaatatttggaattgatggccgagccgagcaaattcgagagttttacagcagccgaaaacccggaaaggattttattggatttgagtgtttttgcgaatgaaatatcgcgcagatttgaaacactgcaacaattgggacaaaatgcaaaaaaaattgccaatatgaatatgaaagtgccaaaacagttgataaaatattggaaaaaattggaagagaatgcccaaatagaaaatgaaataataaaaatgcgaaagtttagggcggaattctgcacaatgttaaaggaaattctgctgatcggaatcgcattgaaaaatgatcagacaaataagatgaaaagtgatcgaaaagtaaataatatggtaattacaaatgatggcaaaatgccaattaatcggatttatcatgaaaatttaattgataatcagcaaaatcatacagtaactgatctaagtgaccggaaagaaaatgggaaaagtgatgaaaaaatgcataaacaaagtgatcagaagttacggaaaagtcatcggaaaaagaaaacaccactgcctctaattacgttaaattatcaacagcagaatacagttgatgagcaacgaaatgatacagtaaccgatgcaaatgatcagaaaacgactgtgccagcaactgaccaaaaaatgaatgggcaaagtgatcaaatcgaaagcgagccgcaactgatcgcaattcgtgatcaattgcacaggaacaactttgcccgactgatcagtggggatgacgaaacggcacgcgcagcgtggcacaatttgacggaggaggcgcaatttggcgtcattacggtactgttgggacgaagaggtggcagagacggtggcaaaaagtacagtaacactcgggcacagttcctcaaatatttggccaaatggaagaagttgcgcgaccagactgagttgggtcagtgttcggttattttctttaattaattaaataaataaataaaaataaataattttttaaataaatttacaatttttgtggccttttttaatatttgttggcacattgtaaataaaataattattaaattaattaattttagatgaacgtttatttgatgaatataacaaacaaaattcagaacaaattttggacagaaattacgtacaaaatatgcagcaaatcaaatataacactcaaacggacatttacacaaatttggtgacgaaaaaaaatcttaataattaatgattaaattaatttttgttattttattagctcatcaagattctgcgggcaaatggctttgatggcattgaaatgcataagcaaaaacaaattgaagaagaattggaaaaaatcagagacactgtcgccaaatgggtgagatttccaaaacccattccttcgtggcttaattcggttttaaaatgccagaaatttccaccaactactcgcccttcccccattaaaatgcgaattaaattttaatttaaaatagtaagagtgaaatgtttttgtagtcaaatggcaccggtgcccttctgttgggcggctcctctctgatgggcgttcaaacggcggactcggacattgacaccgtttgcattgtgccggcgcacattcatttggacgccttttttggcactttgcactgtttgagcagcggcgaagaaaaggaagggcaaaagtgtgaagatgactcattgttttacatgcttggtcaggtaatatatttccggcaattgatcattttgcttttgttgggtgaggggattttcgtttgttttgctaattttcgctcgcctaaagacaagcttcaccttcactgtattgcaaaatctcgacttacatctgttgccaaatcgtgcctgaatcaaaaggccgtaaaatacgagttcagttcattttccgcttccctccgtcgtttcccccaccatttccgccccctccccacgaaaaatttttaaaaaatttaaaaaagatttacaaaaaaattcacagggaatttttcataagaaaattcaaaaaaaaaattttttttaatgcataacgatttttcagagaactactaagatttttcaaaaatttttttccaaaaaatagaaatttaaaaaatttcttgaaattttcttatgaaaaatttccctcagtttttttgaaaaataatagtttaataatcccgagtggttcttctcgcttaaaagcatgcttcattctgcttcatcctccccgttcttcagcttgccgactttggctctgtccgtgccattgccaacacttcggtccctttgatccgtctcatttcccgctccggccaccaatttgacatcgttttcgcttcagttgcgcagatggaaagcatttcgatggcacaactgctgaacggaaatgccgagacatttggccaattagcgcaaaaaatggccacagaattgatggaagagggcgatggcattttggagagggaggaggaggaaacggtgaaaattgcaagaatggcacggtcattgtccggtgattagggggggggggcaaaaataatttaaaaaataaatttgtaaaatattttaattaatgagtcaggtaaaaaataaatgatagataaacaattagttttttaaatgaaataaattctaatttttatacaaaaacaacattcattaatatgtcatttaattaaaaaaatttatacctaatgcataatatttattttaattaattattttatttattgcatttatttattaaattttatttcatattcaattaaattttctcggaaataattaaattttcccagaaaataatttaaaaacacttttaggctaccacgccgatttaaccattctcaaaatggtgccaaacattgacatctttcgactgtttgtgcgtacactgaaactgtggagcaaaagtggaaaataaaaaaataaaaattcggaaaatatatattttagacaattttatttacaacaatgtgctgggctttctgcacggactgtcactgtatgtgatggcggcgaaaatttgcatactgtacccaagcggaacggtaccctttttggtgcaacagttcttcctcacctattcactgtggtgaacacattatcggacaaaaatgaactaaattgccgaaaaaggggacgaaagaaaaataaaacgattttaattccgtctctggtcataagggctcccggacaatccgtcagctaattttatattgtgaaaatgaattgaaaaaaatttaaataatatttttttatattataaagtaatgaaaaagcattttaaaaaatttaaacgatactttcttaagaaaataaattaaattgaattattaaacaaagaaatgccgttaataaatctaataatcgcattcgcaagattttatttttaattattgctcaacaaataaaatttgctgacgaattttgcactgacggagattccgtagagacattttctaagacgaatatcaccttttttgactcaaaattttcctcagcatttttttcggctttcaaattaaaaaaaattattagaattcatttcataattccttaaaatgccatttggccattggctccctcagggaatggcctttccccgactaattggccgcagttcggccccatttgtgggcctggagtgccgacaaagagcagtcagtgctcttccgttggttcggcgtcggccttttctcttcgctttccatgccaattatttcgcccggttttccccaacaaaatgccggctttaacatcaattttcacacagcaaaaatcatacagaaagcgatgcgcgaaggtcattcattcattcattcattcattcattcaaccatcatgaaatgcttttaaattaaattgcattttcagcattggcacaattggggggaaatccgtcggtacataaatgagaaaagctgcttcagaagagggcattcagcgacatggtagtctccacatttaaactaaagttcgatttccggcatttttagaatgaattctaattgcattttttgcatatttaattttttatttttctaatttttagaaatcgctctatctctatttcatcttttaagaattcaattaaccagcattgaattttgttcttttaaattactagagagagatcggctcttccccggaaccccaattaaatacattcattcattacggtatttgtttttactttcgtttacagtacccgcacagtttcgccattgaatgtgccgcctcgagcagagagctcagcgacgaattttgcggctttgttagcacccgaattcgcgtccaattgctgaggagcagcgaatgcgtaaggggcgaagtgaacttttgccacgcccgttcactggtcgaatgtcccgggcacattctcgacaaatacaaagcgatgtgaggccaattattattttttaaatttaattatttgttttattattaaatggacatttttcgcatgctaaaaaatagattaggtgaaaaacccatcaaaaaagcaccagaataagcacaaaaaatgaaaagtcaacaaatttagcgattttagagaaatttatagcatgcaccaaactgtaaatgccgaattcatatttgtcatttcatttttatcaacaaatttcactagcgcggagatgaaggagtggcacaaccaaaaatatttgcatattacattttttgccaatttcagctctcccaatgcgtcctgcttggtttggctggtgggcgtcgacttcaaacagtaccccttcccctccgtccaatctgccggcgtccgtttggccaccgaattggacgccgccgccgcagcgacaccgccgcccattgatcagcagaatttgtgggaagaaattgtgacaccgatcatggccagcttcaaaaaagtagttctaggagaacagcaccagcagcagaagaagaagaagaagcagcctctgttgagtgcggaagcgaaaaaaatccaaaaatttttcgcaaaatttaataattttaaatggaaaatggcggaagagatggccaatagtgccgaagactttgtccacttggaagcaaattatgtgcacagagaacaactccgaaaggatgggggggggggtgaggggaatgaatagaataatgtaaaaatgaattaccgtatgcataagcactgtgccttttgttaatgatgcacttacaatgtataatttttgaaatttaattatgtaaaaaaaagcgagaatggaaattaattgtctttttttgtttttgttcacgatgaaaaataaaaatgaactacaaaaagttgagtgttattttaagaaatcagaacgaaaaagccattttgactactagatagtcaggttctgagttgggaaatttatctgtttttagggaaatggttccggctcgtgggatcaatgttttcagctaactgataaaatataaaaaataaccattttttattttattcatttttgctcataattgataattagggttgtaaattatatggactaaaaaacgcgaaatatggatcaattatgcgcaataaaactgaattttagtgaaaaatgaatttttgtattttggttcaaatccgggtccggggttcgaatttggtcgaaatagatatcagaatcgtttttccgaccctgaaaacccctaacagttcattatttcaaaaaatttgaattatttgaagtctgagtacagatagttaagaagtaccaaaagttcgtagtcaaaatgtgccctgtttaattctattgtttggtgctaaatgtttcatataaaataaacttgctttttttcgctttccccgcttcatcatttcacaactcaagcacatcgaatggtggccacgcaaacatgtgatttcgtgccccttattatggaggcacatcaattttttgaggtaaaagaggagacaaaaaactatttgttaacattgatagggatatacatatactatctggataaaactaataaattgaatttgtaacaacaacaatgataaccttcttggctctttaaaattaaataattgcatggcttattaaataatagaaatagaagaaaaatgaatattcttcaaataac

SEQ ID NO: 920 - DNA, 1435 bp, Heterodera glycines
gggattcccgttcgcctctcacgtcccggaaaatcctgaactcccgatcccgctcccgctcccggaaatttttacccaaaaacgggagtaaaaatgcactggtaagaattgagtttctttggtaaaaataatgatttttcattgaaaatctgttaaatatatagtcaaaattcgaatttggtcgaaatagatatcagaattgtttttctgaccctgaaaacccctaacagttcattatttcaaaaaatttgaaattttttgaagtctgagtacagatagttaagaagtaccaaaagttcgtagtcaaaatgtgccctgtttaattctattgtttggtgccaaatgtttcatataaaataaacttgctttttttcgctttccccgcttcatcatttcacaactcaagcacatcgaatggtggctacgcaaacatgtgatttcgtgccccttattatggaggcacatcaattttttgaggtacaagaggagacaaaaaactatttgttaacattgatagggatatacacatactatcgggataaaaactaataaattggatttgtaataccaatgataaccttcttattgttagctcttgaaaaaagaataattgcacggcctattaaataaaaagaaatagaagaaaaatgggtattcttcaaataacatttatgcgacaaaagaaaatacaactaattcgtcaacttcactatttcgtccataaaattattggcccaaatttttcattcatgcgcaccaatgaataatcctcgggcatattgaaaaatgcctgttcaaccatttcaagtggcactatttttcccatcatcactactcgaagacaactcatgttggtggttgattctccaaaactaaataacccaattatcaaaataaatgtctttttgctcgagtccgggtccggaattggttgaaataaatatcggatcctaccctgaaaacccctaaaacaaattcattgttaaaaaaagtgaaatctgattgtgagtaccgataattaaaaagtaccaaaagtttagtcaaaaattgttctctcttgattttctattttttcctttccttgcatgtttggtgccaaatatttcttataaaataaatttgcttttttcgctttccccaattcgtcattgcataactagtttggaaaatcgtccggcaagcacaacgaatgctggccacgcaaacattcttattgccaaattcgttatgcaccattgaaataacggtgccaccctcgccgctgcaggcgcaatcccaaactcccttcatgcttgccccttccactaaagatcaaggggatagacccgtctagatatgtataacctaatgggctgaatctttattgcattaatttgatcttttttcgaatcttatttttgaactcaaattaaatcagaggtttctcgttgccata

SEQ ID NO: 921 - DNA, 7178 bp, Heterodera glycines
ctccacgcagagtacgaaaagttggaactccacctttccaccacagtgaacacatctaggaaaggaagaatgtcgacacctttagaaaagtggatgagttcatccagggtggcagtgttgtcatacacccggtccctgccactgcggttgaggacagactgttctgtttccgctgcaacgtcccatcaataattgctgatgaagactccccgaggggaaggataatggcagtcctactgggccgtccagccatggagggcattcgtatggagaaggaaagcgttgatgactcaacggattcgtggatggaagaagagggaccgctccaccctgcaattcttgctctcaactcgcggcagagagtgactgcacgcctaatgttgggaggaggtctggtgcaacaacaggcgccgccaggcaccggcaaaaccaaagtcgctgcggcgatcattaaggcaatgatggactcaaatcccgggttccggattgtggtgatggcttgtgccaacattccagttgcaaagctggtacaagaggcggaaggcacatgtgctgaaaaggatttggatggagcacgagcaattgccttattttccggttttgccagatgcaaatacacggatcaaataaaagatgttcaacggcatacgctgccgaacaaagtaaactctgaggagttcgtcaagcagttatcgcccaatgtacagaagcaagtgaaggagtaccttgctcattgtgagaagaacccgcgcttggcgcctgagagagcgattggaaaagtattcaactcatgtatggcaccgaaaatagtcttctcaacagctgccatggctgcgaatttacttcatggtgaaggaaacatcactgatgcagacgttttgctcttgatgaaagcactcaagctcagtgggcagtggtggttcacttggttgcgcggatgcccaagctcaaggcattgcttttgacgggcgatcgtcatcagctcggagtgcatctgcaagaactgcctgacatcttccactcaggatatggattggaaagcgtcatcctacaagccgaggcttcggttgggacgaactacactttcctcacaaagatgtacagaagccatccatttttggcaaagctcatcagctatgcctcatatgagttgcacaatgaacaactcattccagcaagaagtgctgaagaacgctcactcattacgggctcaggctttcttatgccagttcaagaatgtcctgtgggacttatcaatgctttttcatcattccgtgtggacccaaaaagcgactcgctcacagatgaccatcaaacagaagtggcatcgttcttggtacaagcacttttggaacattttggcaacgctttttcgtccagaattattgttctgtgtatgtacacgtaccaaacttcggaaattgaacgaaagctgaagcactgcggtgttcgtgcactcacagttgatgcctatcaggcacaggagtgcgacattcccaaagttatttttgatcagtcccaccctgaagggcacacaaatggcacatttcggtcaatcagtaccatccatttttctgatcaaatggtgcccattctcttttgatcagtgccatttccccatggcacctattatctgttgatcagtgccattccccaattttttttttgatcattaggcacacattatcttttgatcagtgccattccccaatttttctttgatcattaggcacacattctcctttgatcagtgccattctccttttaatcaattggcacacatttttttctgatcaatgcctttccccttttgatcaattggcacatattatcttttgatcatgccattcccccatttctttttgatcatttggcacacactctcttttgatcagtgccattccctcatttctttttgatcatttggcacacattctcttttgatcagtgccattccctcatttcttattgatcatttggcacacattctcttttgatcatgccattccctcatttcttattgatcatttggcacacattctcttttgatcatgccattcccccatttctttttgatcattaggcacacattctcttttgatcagtgccattccctcatttctttttgatcatttggcacacattctcttttgatcagtgccattcccccatttcttttgatcagttggcacacattatcttttgatcactgccaccctaattttcgtttgattaaatttgtccatttattttatcagcctccttttcggccatttactttgatcagtcccaccctgaggggttcatttattgcttcacatttacatgttatatttgaatgtggccactttatactttatgttgatttattaatgttaatatatttactgaatttcatatcttgattttatttcacaaattaaaaaaaaatagcaataataatcttaaataataattaaatgcacataaataaaattaaattaaaattaaatattgatactcaattaaatttaactcacgcattcgtcacatctttatacaaattaattcgaatcgcatattcgaatatgtaggggtcccattcagtatgaatccatgcatttttcatagatggctcaaatatgcccttcttacccgtgccaattatcatgcatgagtcttcgctcatgcttgcctcatctatttattcattcatgccatgtgctttcataggatcatgcattcataaactattcatctattatctaaattagcgtatctcatttagatgcgaaccaaaaatctgccttctaagcattcaaatcacgaagtttctgaccaaatagacgacaacgcattaacgagtgatgctaggtcatcaagtgttgagagccctgcggggaccatttatgaatcattcgaggcgttgagcattgatagctcaaaagtagcttcaagccccgaggggtacactaatgttggggctgaaatcgttattgaagggactgaatccaatgaaaaccctgaggggtccggatatgatgaagtgagaaacgagggtagtagcgttacgtttaaagcgatggaagtgacccttgaccaggtcgatgcagagggttttgcgaataatggctttgatgatgaggaacctgaagcatgtcctccggctaaagatgtgagcaaatcatcgcttctttatttggtttcgcaagccggagatggctacgtaattgcttgcaagaagtcgcctaagtcgaagccaaattggccattcttcatgaacatcgaagacaagctgattgagtcggccccaggctttcagcgtaaacttgaagttggtgactttgtggcggtttcatcatttgagtggaaccagaagctgcgatatttggctcaacatcgccaagatgccacacagtcctgcaaattttggttcaacgaaaacacgcaactgttgccaaagcaggctgatgacactggcgtggttcaactcatgtacatgaacatcggacgcaagcagatcaccggggtcgtttactggataaagaggaagatccaaagcgttccatccagcttcgttcacgcaaacatcgcgtgctgtggtctagcggtttcggcacgcataaatcggcgtcatcttgatggcatcaatccggaagacctcaagctgggctcgcttgtgacggtggttgttgccaacattccacaggactcacttgtatcaatgggatacattctgcctgatgcttcaccgtacaaattgggaacggaaagaagagccgaaacaccagaattcttcggtgcaattgcgtctgttcgtcctcatctattggagtggccaaatctgaatgcaaacatgacgcccaaggtttatccatgctccgcggagcttactaaacatcatgttgtggcgatggagcatgttgttggagcagctctccagattgagatggagcgagaggttgacatgatgattgaagcatgctttgaaggaagggctcggaagttcgatggtgctgattgtctgattgtctttggttcgagatcgaagaaagaagtgaatgagttggccaaggtctgggagccggagtcccaagtgaaggtcttcaaagaattggatgagaagcattttgctctgggagtggtcaaggatgttgaggtgctccacgcagagtacgaaaagttggaactccacatcgtcatcttcttgaacaacatccaggaaaggaagaatgtcgacatcgcaagaaaagtggatgagttcatccagggtggcagtgttgtaatacacccggtccctgccactgcggttgaggacagactgttctgtttccgctgcaacgtcccatcaataattgctgatgaagactccccgaggggaaggataatggcagttctgctcggccgtccagccatggaaggcattcgaatggagaagcaaagcgttgacgactcaacggattcgtggatggaagaagaaggaccgctccaccctgcaattcttgctctcaactcgcggcagagagtgactgcacgcctaatgttgggaggaggtctggtgcaacaacaggcgccgccaggcaccggcaaaaccaaagtcgctgcggcgatcattaaggcaatgatggactccaatcccgggttccggattgtggtgatggcttgtgccaacattccagtcgcaaagctggtacaagaagcggaaggaacgtgtgctggaaatgatttggatggagcacgagcaattgccttattttccggttttgccagatgcaaatacacggatcaaataaaagatgttcaacggcatacgctgccgaacaaagtaaactctgaggagttcgtcaagcagttatcgcccaatgtacagaagcaagtgaaggagtaccttgctcattgtgagaagaacccgcgcttggcgcctgagagagcgattggaaaagtattcaactcatgtatggcaccgaaaatagtcttctcaacagctgccatggctgcgaatttacttcatggtgaaggaaacatcactgatgctgacgttttgctctttgatgaaagcactcaagctcagtgggcagtggtggttcacttggttgcgcggatgcccaagctcaaggcattgcttttgacgggcgatcgtcatcagctcggagtgcatcttcaagaactacctgacatcttccactcaggatatggattggaaagcgtcatccttcaagcagaggcttcgatagggacgaactatacattcctcacaaagatgtacagaagccatccatttttggcaaagctcatcagctatgcctcatatgaattgcacaatgagcaactcattccagcaagaagcgctgaagaacgctcactcatcacgggctcagattttcttctgccggttcaagaatgtcctgtgggactaattaatgctttctcatcatttcgtgtggacccaaaaagcgattcgctcacagatgaccatcaaacagaagtggcatcgttcttggtacaagcacttttggaacattttggcaacgctttttcgtccagaattattgttctgtgtatgtacacgtaccaaacttcggaaattgaacgaaagctgaagcactgcggtgttcgtgcactcacagttgatgcctatcaggcacaggagtgcgacattcccaaagttatttttgatcagtcccaccctgaagggcacacaaatggcacatttcggtcaatcagtaccatccatttttctgatcaaatggtgcccattctcttttgatcagtgccatttccccatggcacctattatctgttgatcagtgccattccctcatttcttattgatcatttggcacacattctcttttgatcatgccattccctcatttcttattgatcatttggcacacattctcttttgatcatgccattcccccatttctttttgatcattaggcacacattctcttttgatcagtgccattccctcatttctttttgatcatttggcacacattctcttttgatcagtgccattcccccatttcttttgatcagttggcacacattatcttttgatcactgccaccctaattttcgtttgattaaatttgtccatttattttatcagcctccttttcggccatttactttgatcagtcccaccctgaggggttcatttattgcttcacatttacatgttatatttgaatgtggccactttatactttatgttgatttattaatgttaatatatttactgaatttcatatcttgattttatttcacaaattaaaaaaaaatagcaataataatcttaaataataattaaatgcacataaataaaataaaattaaaattaaatattgatactcaattaaatttaactcacgcattcgtcacatctttatacaaattaattcgaatcgcatattcgaatatgtaggggtcccattcagtatgaatccatgcatttttcatagatggctcaaatatgcccttcttacccgtgccaattatcatgcatgagtcttcgctcatgcttgcctcatctatgtattcattcatgccatgtgctttcataggatcatgcattcataaactattcatctattatctaaattagcgtatctcatttagatgcgaaccaaaaatctgccttctaagcattcaaatcacgaagtttctgaccaaatagacgacaacgcattaacgagtgatgctaggtcatcaagtgttgagagccctgcggggaccatttatgaatcattcgaggcgttgagcattgatagctcaaaagtagcttcaagccccgaggggtatactaatgttggggctgaaatcgttattgaagggactgaatccaatgaaaaccctgaggggtcctgatatgatgaagtgagaaacgagggtagtagcgttacgtttaaagctatggaagtgacccttgaccaggtcgatgcagagggttttgcgaataatggctttgatgatgaggaacctgaagcatgtcctccggctaaagatgtgagcaaatcatcgcttctttatttggtttcgcaagccggagatggctacgtaattgcttgcaagaagtcgcctaagtcgaagccaaattggccattcttcatgaacatcgaagactaaatgattgagtccgacccaggctttcagcccacccttgaagctggtgactttgtgccggtttcatc

SEQ ID NO: 922 - DNA, 1814 bp, Heterodera glycines
ttttcacaaatattttccaattaattttcaaatttcctcctccacccctcggggcccaattggctgacttcgacagttgccaaaaacatcatcagccgactcatccgtcccaaggaattctctccgccgcccctttcgcttctccgcagcaattcgctcaaacagttcaaatatctgtcccgtgccctttccaccgtttctctgccattttcactgagacggggcactgaaaataaattcaaaaacatttaaaatgcaagttgctaattaacatttaatgacctggcgaaaacaggcacagagcgcggagaatgacatattcggactcagtgagacggagcttccgaaacgggagcactaattcagtgaatgccatcgtggcactgtccagaaacatccgtttaagtctgaaggagtggcaaggcatacgcgaggatgaccagacactaatctctcaatgagtgatcagaaaacggatcatttacactacattgatcagcagagtgaccatttccgcgagattattagcagatcactcccgcggcactaatgagcaaactcatgaccttcgtataactgatcagccgacttccgggaggatctgatcagcagacggattacttccgcgacactggtcagcggactgttgcgattactttggtccactcactccgggtccagcctttcgcgttgttccggactgtaggggaacattcgctcgcaacagcccgcaatcccagcaatgttaagcagcgcggaacggaaagagcacagcagccaaacgcaacgcattgcccgctttacggtcagtgtttgctaaatgtcaatgaaaggatcagaagatcaatctcattcggcggtaaaatgtcgtcccgatgttcttccccagcttctgttccactgtagggttcgtttcgtttacttttgcccccccatttcgccccgaaaactccagggttttttgatttattatggccataaaggagtgcaccctccgccccctccaactcctccaactttcccaccttgtcctcctccgtcagttcgttcatttccggcacgtaactgacccaatcgaagtaatggaccatcacccgacagtacgaccgtgccaatgtttcattgccgatcagatgcttcccactccagtcgaccttccacagaatgtccgtctcattttccccctctctctcaccggcgttctcactgacactttgcccggctgtttcagtgccacttccaccggcacttccaaactgtacagtgcggagatgccgcgagggtcggcacacgaagggggcttaggcaattcgacgtacaaatcgcaaagtctgaggcaaagaaaaagcggaagattatagaacccagcaaaaggactgaacttttcaacggccaaaaagtaatttgaaagtgccacgcaatcattgccgacggggccaaagccgcccctattggaaaagcccaacgcaacggaggacaaatcacgcacattgaccagctgatggtgctgcacaagcgtagtttcggcacttgggccaccaaatgcgggtggaagggacaaaagttcgcaattggcatggaatttggccatctttggaagggcatcagaccttcaagggggggggggtgaattaaaggtagggtgaatacgacaaactttgacgattggccaagagaaaaggatacggtggtggttccgttttgaccccaatcgccgtgaaccactgaatacggtatactcaagggatacggtaggagacggaaaatgattggtacagtttgggtccattccaatgcgcaaacacttccgaaag

SEQ ID NO: 923 - DNA, 6717 bp, Heterodera glycines
  unsure (1)..(6717): unsure at all n locations
cagcaaaaggtccgggcagtgnaagctgttccatttgccaataatgaaacttgcttttccagattatcacagagattttaatggcatcttcgcaatgtttggcctaaaaagccatggaaacggcggaatgaaaggccaaagggccgactgagtgaatttgctatttgccatcactccccatttagacaaattgccaattatttgcaatttcctcccttctcatttagtgcattaataggcatttcagtcccccccccgcccttcaaaaaagatttggtcgagcccatggcttcgtttgtatgctgggccggcagagggggatttgtaacgggtttttttaaatctttttaaaatttacttaaatttccagtgttcttgacgcaaaatttaatggcaaaaaatgtctccaaattttgggaggtttaaagtaagtcttggggtgccatcgaacatacgatttcatttaacaaatttcacaactttctttttaatgacgaacaaagaaaaacaaaaaattttgaaatggaaaacgaaaataaaatcaaaggaaaggtttgagccgtgtgaacacttccaccatcaaattcctctcacgaaaacgcgcatcttttggcaacaagttgaaaagcactttcagttgcagaacctgtgaacaaatccccaattattccaaaccaagggcttacaattcgacaggggaatgactgacaatggaggggccactccccgctaaaaatccaaggcaggaggggggggggggggcacgggttcgtccccaaatccaattctcccgacctcgtggtcttcaaatgatcgtccctttgccaattgccacctgttccatgaagctcagctggtgccgttcgacctcctcaaattggtccctcgagttgacttcgtccattagcaccacactgtccacgcattggtttttgctgttgtacaacgagaaaaacacagtgttccctttgtggtcgtaaaagggctgaagaagacgctcagcgcactgaaaaaagcgatgggagaatgaaaagaatatggaagaaaaagccatcactaattgacgttaattaattagccaaaagggcaaaatccggcgacgctttttacacactcattcaattcccttgcccttattcactcacatggtcccacggtcggtggtcgttgtccgacagaaaatagcgcaaatcgtgcggcattcccatcaaataatggggcaccgtggtgacgaaacatccgtgcatttgcccactccgccggtcaaaccttaaaccgaaaattgggcaattaattagtccaatcaaattccaatttttcaaatggatgatgattcaatgaccaaccattctttgctgtttgtgtgtttgaaaaagtcggccatcctaaaaagcgtcacttttgaatgccatcaatcaaaaactgtgccaaaaattcacccgttctcttcgatcgttttcaaattccttttgtcttcgtccgtcgcttggaaaatttcgtcgcccattggactgaaatgttgggaaaagcacagaacggtgcggtggccacgcgaaatccaatagaaaaggcaacgaacgattggcatgagggggaaactgacaatgagaagggagtgaaggcacggcacaaaacaacaaagggaaatgccgtggcaattactgcaactcgtagggatggcttcggtcgggcaattcgttgttctccgtgcagcaggcgcggtacgctttgatcagtccgaccccgtcgaggaaaatgggccgcaggaaagggtaactgagcaacgcacggccgtccgaatgggccgggggcagaaaggtgcgtttgtgctcaaccactccgatgggttgcgtggtgtagtcgtaaatgatggcctgcctgggcaatttgtcggcacggaaggtgctcggaactgtgaactacggcgtatttgaagggaaactccagttcctccgatgaagaatgccataaatttccagaattcgctggcattggccatgccccgaagcaaaaatgctgggctaatcccccggatgatggaccgactccggaacagatcgtccgcccacccaccatttcccaccaggaataccaaaaaattcaaacttttgaaaccccaaaaaattaaagttcgaaaattttttttcagaaaaaatcttcttttgttactttttttcgggtagaaaaccgcggggggggaatgaatgaagcgtccgcccccagcaggccgacttcgtaccggtggcggacggggccatcggatggactgtccatcccgcggacagtgactcccactgatctccgccgtttgaccattccaagtcgtcgtcggtggaacatgtctcgtccccgtcattgtttttgtaatttccttcgttgtcgccgtttccatttttgtcgggcgaagggtcactcaaatcgatcaaatcgccttaacatttagacaaaataactgaatttactgaaaatgagttaccaaattaaattagcattttttggggagattagcttagtgagaggtttaaaaacctccgaatcgtaaaatttaggcgattacgaaaaaattgttatagtcaattggtttggctcattaagggactctgccgcccattcgatggaagcgaattgttcccccaatttcatccccccgccgccctctttgcgttgccttcggcattacagtaacacgtcccctatcaccgtactcacattcctccgctttgcgtcgcatctccgcgaatgcgtcgatttcttcatatgtgctgagaatctttgccggccgcgacgggggcggcggagcgccccacggacaatgccatcggtcactggccgcagaaaatgaactctccgtaaagggagggcggtggggagggagtgacgacgacgtaacgctaaagacaacacatacagtaacaccacccacggaacggtaactttcaaagcgaaacaatttttaaaaccacccgaatcgacacactttccatccaaattgattctgctaaatttcgtcgattggacttcgccggcgccatttcctttgctattattacttttggtacagtgttcaatgattttcctttgctgctccaagaaaaaagaaaaggacggcgattggcgcctttgcttggcgttgtgttgcatttgattggcattatgtttcgtttggtttggctttccgtcgctgccggccgattccaacggatcgaggcccaccccttggccaaacttcggtgggtcatcaaatgggtccataccaattcattgccgtagaaatcatatgcattatttattcactcgcaattaaattaggcaatgggacaccgcccaatgggataaacagacaatccacgaattggcaatgaaaaacaaaaataaattttgaaacacaactttatttggaggaaaacgggaaaaaatgcaattgaatgatgaatgaatgggcaattcgcagaacaatacaaatatgaaaaattaagtgtaaaagtatgaaaaaatgaaaatgcttacaaatgtcactggtaaaatagaataaatgcttttgggtacttgtgtggtttacctgacagatttcacatacattttcagatgcctataaatttattttataaattcatggaaataagttttaagaggtttttggggtcgctgatcacgaatacagcaccaatttttgtcaatttcgaagccctgacccgaactcgaacaaaaataaaattaaaaaatttgtatggaaaatatcctcattggcatcttgcccatgcgggtacccttggtacaggaaaaataaaattcgaaaattgtacggatgatatcctcatgggcatcttgcccatgagggtactcttgatacaggaagtctatcaatttctcgaatattgaagtcttttaataattccatgcttaaaaaaactgtaaaattaatacatttataggcatttgaaaatgtatgtgaaatctgtcaggtaaaccacacaagttccggcttttgttagaaatctaatttgatcaaaaattgcaaataatgttcactcactccgttttgatttcgccactggcactttttgtgccctgcagcgattgagaggacagcggctgcatttcctcatgattcttcgtccatccttcgacttcgtctatcgtttcaagaaacttcatgccagtcgtttcgggcaaaaaaatgatgacgacggcggcggcacaaatgcccaaaatggcgaaaggataaattatctgaaaaattcaaccatttcaagtgtatttattgcgacgattccaaagaagtggaagaaaatctgaccacatttttgccgaattcatcgaccagccaaaacataagcaaagaggccaaaatggcgccaaaccgagccatcacagaacaggcgctggtggccatgttgcgaattacggtcgggaacagttcctaggtaagaaaacgaagacagtaagaaatgccaagaaatactgaacaccggtgtgatggtgtacagagtggcgtaagtgacggtactcgaagcttttccggtgagaaattgggcaactgccaccattgtgttcactgaaaaatggtagaggatgttaaggaaagacatgggaaatggtggaaaacataaattagtggaaaaccgttatgggaacgggacaaaaccttgctgcagaaattctttaaaaaattttgcatactcacaatcagaaaatttcaaaaaaatctaattcccacgttttacactttttctcacaaatatggatggaagaattattcgaataaaatttaaatgaactgctttacctttttcaccaagtaacaaatttgagatcatgcaaagtgcagcgattgtgaaccctccggcaatgattggcttccgaccgatgcgatcaatcagaaaatacatcaaaaaaagagccggaatttcaaccaatccgccaaaaatgaatgtcatgtacatgtcaccgcctagaaaatcagtctaaaaattgaaataagcgagaaacagaaaaacagaaccaaacaatgtaaacgaacataccttcattgacatgccgtagtaaagcatcgaaacgaccggcctaaaaaagcgaggagaaataaagtaaaaccaaatacaaataaaaaaggggaccaattagaaaagttaaaagccgaccaacaaaagaatgccgtgaaggaaatgcgccgtattttcggcgttctcaaaaggtccgtgtaattatgcttgcgcgtcgtccgcttctgtgctgtgcattcatccgcccttttttcccctccgccatttgcttcttcctcaatgtcgtcccaccatttgtccggaagttcccttttgttaatgcgtgccgcatttcgcaaaatttggtcagcttcgacgtaacgcttttgagagacgagccaacggggactttcaggcacaacccttaaaagaaaaggaagatttggggaataaacaatgcttaatagagatggattaaaagacgcaccaccaataaaagaggaaaatggtggcaaaagcagcaattgaagcatgaaggtattgataattccgaataaaaaaagccaaaaggccgagtaaaacttggccaacagcaaagaaaacgccggtgaacagcgaagcgattttccttttgcttgggccaaccaattccattcctttgataaccgtaaattggggttaaaagaaacgaaaaaaaaaaattaacaaccgatgatgactgcgatgacaaaaatacctaaatacataaattattttcgacatattaatttaaaataatggtaaatgaccaggatgggcaaagccgacacaggcgcggtaaacggcatacatttgccaaaaaggggcaactgccatgccggaactgccgataatttggaggacaatggcgatgaaaaacacctttttgcgtccaatcctaggacagcgaagcggtaaaaaggaaaatgacatggccaacaaaatacaaaatgaatgaaacctgtcgccaagaaagccgaagatgagcgaacccatcatctgaccaatgtaatacgatgactgaatcatcgccttgagatattgccgatcgcacacgaattcccactgaaaaacgagaaaaataaacatgaacagtcagagagagttaggcaaatgtcaaaccctttcaatggcggaataagtgacgatggaacggtcaaaaacgaagccattgcccgtctctgtgcagcgggggccatccactcccaatgaacacttttcgaactgacattccgacttgttgaggaccccttcgcagttgactcgcgggatggagaagcccagcgggacggaggaataatccgtatcagtgaaattgttgacgcggcatctgccgggagaaaagggacacgaaaccaatgaatgaatcaacattataagtgaaacaaccgatcaacctatgtttcacgtcggccccggcaaaagtccaacttaatgcgttcatcgaagtgatcagtgcaggaagacataccagaaagagttgagctttttggtacaactgaaattgatacgaaatgcaatagtgacaaaattcaaaacagcaaattaagtaattaccccaaattcgccaatgttagtgataaggtcgtcgaatttcattatcgatattagttatttcggtgttgagaatgttagtagcatttttgttgttctaataaaaaaaattgaattgaacgaaatgttcagaagtcaccctaattctgctgaacgacataca

SEQ ID NO: 924 - DNA, 6559 bp, Heterodera glycines
acatacatatcataattaaatttataatttccttccagcggagtcacttttaaaactaataaatgagtgttgatttttatgacccaaaaatgttccagcattattacataaaataaaacgaacgtgaacatttgcagtaacaatcgattataaagccattaatcataacgcagcattaaatttccgacctttacggaaccatagataaaaatgatcgttccctcgcaaaacaccgttgttatggaaaagacggaggaaggccaattcctatagagagcgcttctctctccattctcaccattcacacacacacacagccactcaacaactcctacgcttaaaataagccgtccatcacatgcactctctttcaatgtcaaaaacagtcgagcgaaaaggaaaaaataaaataaattcaaggacttaaacagatgaaaagtacatctgccaatgaaatttattttgagaatttcaatgtcgaagtaaagtacgattttgacaaaatatgtacggagtaatgtacagttgtgagacacacaatgactagcaaatggaaaatttttgtttgcgttaattgtgtcttctgaactttgaccaatcctttggcacgtagttgatgcaattcgggtctttaggttttacattaacaaattcatatgaaaaagggaaacccaccaattctcagcggccgcttttcttgggagcgacttaattttgtttactttttatattaccgatgaaaatgtgatgtgtaaataaaacctactgataagcctcgatcatttcgtttgtcaatgtgagtacgtattccccgcgaaggtaattgttcatgtcatggagcttaagttgcgatttacaagtgcctttcatgaaaaaccacctgaagtgtagacaaaacgtcctccttgcgaatgctggtcaactcgcaaaggtccatgatggacagtgacacttgcgtgtcctcctcctcctcgccgtcctcgccctgcgacggaatgggccgtccttgttggctcacaatttttagcattgtctcaaggattgtttggaaccaataagagcggtaagaaagcttaattggtcatgttatttgaaaaataataatgtgaaatgagtaccaatccgaggtcagaaagaggcttttctggaacacattgttactgaaatgccgcggatttaaaatgccctacctggagatcctgtcctgccctcaatcttcgaaagttcgtaactgaattcaatcaacaaacggccgtacccgcgtttttgatagggtggcaacaccaaaatgcaggcgacgttatactcctcggcagactctttttcctaacaaaatatagatatttttgacatttagaagaatgtaccttggagaagtatcctacgatatgaaagcccttctggtcgtattcggtcaacacgtaaaacaggaaagggtccgtgtcgtaataaagtgttttgtggtccaaaaaaagctttgccagcagacacaaattttgggcataaatctaaaataaattagagagaataacaaaaagatcttcaattccaccttatttttccgaccgtcaatctcataaaatgaaattgaatctttccggtaaatttcgtttccaggcgggtaatataagttgcattttttcttcacaaattttggacattaaagaggatgggcaattagtctcacaacgtgtctggcgagtgccgactgactcttgagataggtcaaacaaaactcgcagaggtaaatgcagggcaaatgggtcatttccttggggtagggcgaaaagtaccatggctgaatgatgtttcggcccagctgaactttctccacattgcgaatccgagtgagcgcatcttcactatgaccgacctggaaattcaaataatagttttagtcgtcagaatttattattttaagggaaaagcaaactggcctttgacatggaaccacgcaaactgggaacttaaatagtgggaagtgaaacacagaaggcaattgttcagtgataccgcttggtgctgtggaattaggtagaccatttgtggtgacggaaggacagcattcggaagaggttgaattggcatcgacgtattcgatggtgtgtcctaagtgcttcctctttcgacttccggtcagtgatcgagtcggtgttcgaaacatttcaatcactttttcgggagttgagctacgtgagctgaaggaattgtttaagaaaaacatttataagtacttctggtacctttgtgcgtcacttatcgcaaaattttggtcgaatgattggtccaacgactgagcaattgcctgctgtgatgctgacttcttcacgcgttggggaatacgaacagacatgagatcgatccggtcctccgctacccactcgtccaagcgccgattacaatccacgtaatgcacataaaacctgtatgttccatccggctccttccgcttcgatataatttcggcatccactaaacttattgtcagtattagcccattttccagcggtatcataagtgtgcactcactcattaaacccgatcccgtcattcgcactttcatccgacagctttcgtacagcgcttccacagtccattttttgcttccacaactcccactgttgtacacctggacaatcgaagagcaacaactctcggactcactgccctcctccttaaactcgatgccattcggttcacataccatctcttttagtcgttttaaaatgatataaagaacacttattaacgcgtcaatatttaacatggattagaaccattacaaagaattgttccaacaccaattggccaacaatgaaaaactgtcccaatatcaatcaactccaaaataatttggtctaaacattaatcgtcttccaatatgaatgagtattaatttgtctcaatatcaatcagtggacttggtctcttttttgggtgactcttcgttggaatcggtgatcgcttccttcggcggctccttcttaagcacattgttcacgttcacttcctctacggctctgagctcctgaaagtcatcgtagagcttggagaggacttgagtgaattgcggaattgctctgattgaaaggacgacggaattgcgcactcccatgaatgacttcaactaaattagtcgttcaaattattactcaaaatattattagctacaaacaaacatacctcggtgattttcagaaagtccccgcgagaattgtggccaggatcaaaaaaaaagcttttcccatcagtacgaatcatctgagaatggggaagttcggcttcctcctcttaaggaaaaagtttttgtaatcgtagaagtgagttgcctaaccaatgaacccttcgccatattcctccagaattgagtccagtgcatcgtgcaattggccgatcccctcaaatggcaatgccactgagttgcgaatcccggaatgcgtctcgagctgagtaatccgcaaaaaggaaccacgccgattttcgcgaaggtcgatgaaatatcgacgtctctcggtcacgatagattcagattgaatggtcacattctccgctttcccattcacttcctcttaattgtttgttcggcttgcaagtagtgttcaataaaaaaaaatgttacccgacgctggcacgtgcccctcaaacttccccaacaattccttaatattcttgcaaattcgcattgacatgaacaaacgattctttcgaccattcatagcaacctgaaacaatcagtcaaatactggttggtatacaagcgaagtgcgtaaattacttgtaattttttctattaattataataagacctcagccaatttgacgaaacgtccacgatcattttgcttgacgtccaaataaaaacgcttcgattgaatacttaaagaagtaaaataatacacaaaaggagaaaggccaaaatctcacttaagtgtcttgctagcaatttcttttcctcccttcacttcttcctcgccacgaacgccattgcgtccattacccttttccgacccgctggacgatggcatctcctaagcagttggtatccctttgcgaattaagcactttccttaatttgtgattggcaataaagtttttagatcaaaatgaaaatatacaacatagtgtttaaaatgtcgttaatttggcaatggtaaagaattgcggtcaataattaaactcttttattttgggatcaaaatcaatttacgagggtactgatcagtgatcacgaatctgaatctcggatttgctcaaatccgaactctggacttgcacaaaaattcgtttttccccaatttgcattaaaataaatcaaattttggcgcaaatttgtgaagcaattgttttacaccaaaataaataatgttaaatgaattcgaagcttttaccccaggaaaatgcatattttgaaaaaattcaactttttgttcgaattttctattccctaatgattgccattgctactattttaatattataccaatatttaatatgatactatacgtgtgtaagtaggtaaatatatggatttgcataacaatgaaaaagtcaaatgtagaaaatgtaattttaacgtttccaaattcgattttataaaacagacaacgaaagttgagatatcttatctttaactattttatttctcgctcatcaatacatagtccatacggtccaaaaattcttccaaattgaaaatgggtataactaattctctgagattgttgtaaaatggagtcgaatggcctactctgagcacacgaagaccttaactaatttgtcaagcaagcctaaaaattgattccgaccacactccatgtcctcccaaattcgcatcgtagtttgatcgatagacttttcaagtggctggatggttttctgtccctcaatcagaacactttgctgtgacttcaccgactcatataattcacgtaactccggcaccgtcaagatgagacgagcatttatagaaccatccaaatgatactgaattgtgattacctaattcacgatatccttttgaagacttgcctcagctatttgaaccgcctttccgacatcagattgttcgacaaacccaaaagtaacaaagtaatttttcagtatacaaacagccgatggggaagaaattttgctggtcggttgcaaaaaatccatttcacgcctcatgaaaacatttttttgtcgtacaagatctactggagagaccgctatttgtcgttttgaatttcttaaatgatgacccagaaagcggtaaagaaacggcaacttagcggtcacattattcattttgaactcttaaaacaattaataaaaaataaaaagtaaagcaaaaataaaagaatatttgcacagagaacaaatgtttgttgtaaaattacacacagaaataaaattatgatgaaaaagtaacaaaatcagaaatccactcgggttcaacagaagcgacatttcttacacattttttatgtgccatttgtacgatttcttggtacaggacataatcgggctgttctttatgaagcactgaactttggtcaatgaacacgtaacccttaattattttttacgaaaccattggtttgccatttttactcaaaaatgaaaccgattaaacttttttcctgcatattctcgccagtgctcactcacctccaaaataagtgttttatatgcgccctttggtgcatccaatgactgaactttctttgccaatttatccggatggcatttcaccattatatgcctaaatcgaccatattaagttaaggaattgaattaattcagcttcactcaaccttaatctcctcagttgttcttgggagggtgcatccattctgaacttctcgggcaacttctccacagaatcggatttgttcagaagaagcgtcagctgatgtctctgtttgttgatttcctttagggccttagggcgaagtcctagggcttcgattgcgcgagcgttctgtttgaaaatggtacctcatttttcataaataaccaaaatttatggtcaaaatggcaagaagaaagagttttttgagtattctggttatgagtattttaagatgattttttttgcgcaaattaatagtgacagtaacaaatgtttattctggaaatctggctaatattcctttacaaatctcctttaatttttcgtaaaatattggctcaaaatcacaaaattagcatttttggaccgattctattaaaatactctaaatttttaaatttgaagtgcttggtctgtggcccacctcttcctcatagtcagcagcaccaacagtgttcagaattactgtcaaatcaccaaagagtcgagcctccccaacagcacaccaaagaaatctttgcttaatcacttcggacattctttttcgtctctcttccgttccgtcctcttttgtgcttgaaatgaacaataatggttcacgaacggagagagccgacaccaaagtgacggcaaaaggaagaagtccgccacgaattgaactgatgacgaccttcgcaaaagaaggagaagaggcagctgcgcaagtgattgtccaagttgtgtgat

SEQ ID NO: 925 - DNA, 2034 bp, Heterodera glycines
aaattcactggtaggagagaatagagagggatggccagcagaggagggtactttttgaacgattgcgaagcattaagtgattcatcgtcagacccaaaaaaaggtattttgccacgcctcatcttcaaggtccatatccgaagttccgaactcgtcgttgtcaagcagtagtccctcttcctcctcctcttttgtctctttcttccgacactttttcattttctcttttctcagtaattttgatgcagatatttttgtgtatttgttttctagcaatttgaccaaatgtgtgacttcacgttgacctgtgacgaacgcaaggatgccacccgctgggtattcctcgtggattttacacacttttttgaatgttgcttccaaataatttgttggagtgcgccgttcaaaataaattgtaactggaaactgacgagcttggacactgacaacttttggttgactgatggaaaaaagtctaaaagaaagaaattggcactgtaaaaaaagtgaattgacctttgtcgaagaaaatcctgaagtttcagtgttgccgacatgataatcagttttaaaggataaccgcgtttcattctgagcgcacaaatccttgacaaaagcccaattaaaacgtcactataaatggaacgttcgtgcgcctcatcaatgacaacgactgagtaacgcgaaagtgtaaagtccgtctgcaactctttcaagagtactccgtccgtcataaatagtatttttgtctcttcacttcgattcccttcatgtctgatctataaccaattagtattgtaattaattagtgattcgtaattcacctggtatgatgccaatttttcgttgtccaactcgtggccaactcgcgatgccatacttatcgcagcaatacgccttggttcggtcactccaattaagtgtccattggaggtgtagccagcctcatacaaaaattggggtatttgcgtagttttcccggaaccagtctcgccgcaaattatgaccacgggatattcgttgattgcctcaacaattggctgttcctcagcattaattggtaattgtcgtctcttcttttcaatgttttcgtcccgtggaacaataatttggcgtcctttgatgcgagaaagggcgttggagcattgcaattgtcctttggcatgctgtttattttgttttgacgcagcctcatatctttgttctgaaatttaaaacagggaagaattaatggtttgctcaaaatgcgctaattgaatgatcaattaatagaaaattaatcaaaataaaataccgtttttgtcaattgggagattctgtgcagtccgcgcgttatttcctgccagcaaacaagtttcaatttgatgcgtcaactttggcattcgttctatgcttttcccaggttgttgctgttcaccattcccactaaagtcctcttcacaagaactgctgtccgtttcaatgtgattgagttgtttcgatgttgctctgatatttttcaatttttcaccggaaacgcatctcagctttttcacaacttcaattttgtgtctgaaacacatatgagatatttgacaaaacacatggaactacttttgattgcctgcttctttttggctacttgcaatggaagttagtaaattcatgttcccttcgtcaagctgatattgttgcaacatttcgaacaatgattcacgcttaaaaaaatttttttttttttttggtaaatgagaaatataccgtttgctttattttctttcgttcagcaagttgggcaagtttttttgatttattttttgatattttcgtttcatttttacgccgaagtcgttcgatattctccaactttttcttgttgattcttttgtccggaactggatcagacattgtgctctcactttaatcgactcaatttgtgagaatgagcctgtctatgccttgctcttaaatttttcaattttttttttcaagacacaaagccaaaataaaataaataagaaaaattgatgattgtgaggtcactaaagtgaagga

SEQ ID NO: 926 - DNA, 7786 bp, Heterodera glycines
tttgtcgataagaaacccatgagtagacaataagcaaaatcttaaatattttaatttctgtagagggattgaaccaggggaaagaagaagggaaagtcaagggactagcactaggccatttgcaaatttaatttttttttcctttcactctaatttttatcactaatttttcactcagacccccattcttaccagtgcttgtttttcccggttcccggtcccgctcaactctaattttgacaaatgaatgacttaaaaaacttcttatttttcttagaaagaccaaaaatcgtaaaatttaacaaacttttacaattaaattagttaaatttttgaatttttaataatcctttgcattcaaaactataatttttaattcatcaggaattttcataatgcaaatgtttcagacgcagcgaaaaataaacattgactaactgagaatcattcggtataaaaccaacaccttaattttccaagactttttttataaaataataaaaaagttatgcaaataaaatttaaatatcttaatttagattttttgtccagaacttttttttcaagaaatgggaaaattagtctgttttttcttgataaaatgaccttttttaacaattctttttcataaaaacatttgaaacagtcgggcctatgtaatattaaaatgggttgtaaaaagtaagtccgtattttataagggcattttttgccaaatttccaaaaatggtaaaaacctttacaattaattcgctgatgccttcatgattttttgtgcatttttgccattttgtacaaatgtttaatctcataaataaaatgacgaaacaaacaaaaatgaaatgaaaaaatgggcaaaaataattggatgaggagggggaagaaaacgcacttttaaaatggctaattgaatttaaattgaccaatgatcagcagagacgaaaattaacattaaagaataaagaaaagatttggaatgtaagagaggggcaattaattaattaattagttttagcagaatggtgctcaaaaatgttgagggaacagcaaaaaagcaaaagacgtttctttggtgtgccattggcttaaacttcggatacaaaactgttcgttgtgcgcgtactgcgcctgaattagtgaattaatttgctgtccatctggtcaattaattctcctacagatgggaaaatgacatttgccgcttcattgggtcggccgtcgccaaattttccacccgaatttgttaatggaaatttctgagctgcgtgaactccttccgccgcccaaatttgtcgcgctggcattttggcactgcgcataatttgcgatggcgccggagacggcgaaaaaggcggcattgttataaaatggtaccaagttaattagccaaacaaatttcgatcattttgtgcccactttcttctgtgatccatgtaacccaacggcggaggctttggtggaatttgtgtgccgcaaggtaacggggaaagattggcacattctctttgacgccaaaagttgtttttgtcgacgaattgtgcgagtattacgatggaaactctttgaaggagtgcttttggcgctaaacattttttgggctttttatttttattattttgcttttggcctttttcctaatcacttctttttgtatctgatggtgggcttaacgcatagaatgcatttggccagcgaaatgctcaaagcattttggggagcagcgaacaaaaagagaaaacagaaatgggtagaagtcggaggaggacgaagacgaagaggagaggccgcggcacgaaggaggacagaaggaacgggtcgcaggtgttctgcaagttcagccaattcaaaaggacagagcgacggacgcacccgcggattcatttgacgtttgaaagtctcgtaaagattctggtcaaagatgcaaccgaatcggtgttccatctgagccaagcccccggggttaaagtgaatggcatggtcgagaaggacaacggtggaattgggcagcttggaaaggtacggagagacgagcaaaacaaacagcgacacctccaccagcgcaaacagaaggccgagcagaaggaacacctagggatttgtaaggattgggccagagtttaattggaatgccaaattggcattttgcaatggcattttggagtataaaactgaattcagtaaatcacccaaaaaggacgcggatgaggccccttgaggtttcggcactgaagtaaaagaaggcagcgatggcgaagatgagcagggaacagaggtcggccagcagaaaggcccacatcagcgatttgtactgaaacggcggcgaaatgccaatttgggggacgaacaatcggtactgaaccaaaaatgacaaaaaacaaacaaatattacaatataagtaagtttttacccaaataatcgacgggttcttcgtaaatggttctatcccttagggcgtatttgaaaatgaaaacgggggagaaaagaatggccatgctgacggcgatcacgaacagaatgccaatagattcgcgtacatttcccatttgatttttttgctgtgtgagggaatgcaaaatcagtctcacaactttttttacgccccgcgggggaattggcggcgacggatcgccggatgggccaccgaacgcacttagcattaattaagagagagaatgttcagtcttgaatatatacaaaagttagccgaaacaaaggcactaattagaaagaaaaatgccaaaaaagaggagaattaaaaatcgaaaattgaagccgaggaaaagaagtgaccttaagctttaaaagggaagataatttattattatatgaaatcaaaagatttgtttatacatgagattgtgaacattcttcaacggaatgaccgcacttcggaggggccgtctcttgcgcggattctgagtctggcaaaagcaaagattgaatagacaaacgagttggacacaaaattgttttttgtatggaagtgtgtctctaattacaccttacaaacaattagtcttctgtcgaatcgccgaactccacacaacgggtggatgaaattaacaatacaatttttagacaccggaattccgtcgaaattttggtaacccataaaaaacattttttgtaaggaacaatcaaaataaaatgtgtttttaaatatgactccctttgcaataattacaaaatcagattctaaaaaaattgcaatagaaactgtctcaacaaaacctaaaatatctttttaaattttggtgtttcatgtgcatttactcgtcaaaacgctcaccttcggttcatttcctccccatttgcctcatcaaaatgagagaattcgtctccgccgctcacgaaagagggcgactgcacactttcgctgctctgtcgcccgaagttggcccattctgcgacttcctcctcctccccaacaaagttgaccagctcaactttgcccaccgcgttgttatggcaattatcttcaattaaagagttcgtccctttccggtccgttccttttccctttggcactgcccaccgcttttgctccgattcgccatgccgtgctcctcatcctttgggctcgcttcgtccatactttccgactcgcccagcccattgctctccttttgttggtcgaccaatgctttttcctccccattttcaactattagcagatctgtcgtttgtattgtctttttattagttaattcccatttacctttacattttgatatttatttgttgcttgctgcttgcttatggtcggtttgaatccgcattacattttcccaagttgacgaaaataaccaatcatatccaacaaatcttgatcattttcaatcacaatttcgtcgtcttaaatttgagaaaatctgttcatttctgaatttcgccaatctctgtcgaccaatataacaaattgagccattgaatgccgggacgcgtttttgcaattcgagaaaaagtgcgcagaaatccaatgagaccagctcaaatcgtctgaagtgactatcgttaagccattttatttgaacaaacattgacgataaattgctaaataaaaaaggaaaatattcctttttctgctgatgcatttgaaacatttcgccataattgtttaattttttcaaaattatgccgatttcgatctttttttggttgattgatgccacataattggagatgcctgtcctttaattttcaagtaaaaagcagtaaagccatctaaaaaaggaatttgtatttcgtttcaaagacttcaagacctttctttgaatttccccgtaaaatgttcctcgtgtgttaatggatgtaatgagttttgtgccgcctctttcgtgggcttcaacttcagtcgatggaaacaacatttttcaacacgtgcagtgcgaatttgccatggttaaatttattggcattttgtttgaattccccccaatttctcgaagaaaatgaactcaacaatttgcttgccattttgcatcgcgtgctaaactctctgctcgatgactcaatgcgttccaatcgcgtgcttttggagggagtggaaacgcgagaaatcagcgactttttcgtgatgttcgagaaagtgatttggcacggttttcggactttttgtaaaattaaaatttgaaactgaggcaaaaatgtaacatttatgcattgcagcttctttgttggccaaaaagaggcccgaggcgcaactttggaatttaattgggcagacaaacgaaggaaagggcgaaattggcaatttatacgaaagcgtaaatgagatgagcaatttgaggtgtgattggaagaaatggtttttattggctattgagataacaaaattcagttctccgctcgccaaaatgagcaccttttggcgtttagcattggtgcagaaacggctgtccgattatttcaatgcgatttgtgaattcaatgggaaaaagtaagttttggatgggaatgatcagtttcaaaggccgggaggaaatttcaaagcaaaatgaaagaacaaagatcactttctttgattttacttagccacattaaaccacccgccaaagacaaacattagtaaaaccttaatttatacctaaagggccttcattgtttgaataattaggaaccattaaattttggccatttcggcccggcatggctaagatgtctgctgatcacttgtgctttactctttgaagaaattccgcatttttagccctttttacgaccatttggcttttatgtgctgcgacagttgctgtgcttttttgttttggctttgaatgctttcgatttgtccattgaaaatgtccatggaagtataatctttctcttttacatctcaatactgctaatggcacttttttttcatttgaggagcaaataaattcgttcgaattgtccccttatctccgtctgcccacccttcccggccatgtgccaaattcggccaaggaattattcgccaatgaaagtgccggagctggagatgcttctatcagtggccattattgaaaagatagtgaattttaacaatggcccaactggtataaaatctgcctttattttcctggtgctgcttggtaaacttcgtgtttttgtgccccaaaaattccaaagttttagtcggattttgcattatctttttaacaaaatccacgcatttttgagtcgccggggaatttaaaaagaagtgttctaccacactttgccattattttgtaattgtttgaataattttatatattttccaaatttgagagccgacgacaacgccatcggcacaatgaggccccaacaattgtcggctgcatcagcctaaccgaggtgtacctgtagcagaacctgatcggcgaattgcccagcaccgtcggggatttgaaggcatgttttggtcaggcccgtatcaagaaaaaatttcggggaggacatccgaagtaaataaaatagtttttaaaatcacacacagacatttctaggggatttttgttgattgatcacgaatctggcatcaattttactaattttgagccccggacccgaatccgaacaaaagtaaaaaattaatttttcaccaaaatgcacttttattttacatagaatctgaattgaattcaggtccggggttcgaaattggtcgaaatgggtatcagattcgtgatcagcgaccccgaaaagcccatagaaaattttttaaactaccaaaatttaatgggcaaatttttttaatcaaaaattttttgtaattgcatttattaaaaaatttccggcggcacctaattcggcatcgccgaaccccaattttaacttttatttttcaaaatgtaaccattatggcaaaaataattcatttttgcttaaaaagactataatttcgtgcttttttgttccaccggtgcttaaaattttgaaaaataactggagaaacaatatgacccaaagagcaaagaaaaggccttcggattcgaacccgtaatttttttttttgatattgacctggttttgggaaagttatgttgtactattactttcacatttttccttcatccgttcctatttttacagacaaaaaaaaatgcttttttaactcttaaaaaaggagaattttcaaaaatttttgtcagacgccaaaacaaaacaaaaaaaaatccttggcaagtaaatatttggaaataaaattcgaaaatttcttgcgtacttaaaataccacccatgcaaatttcccggaaatccaaaccctcccccccccccctcaaaaaatacattttccatttccatccgtcgcgtcgcgtcctttgcgctcagaagcaacatatttttaattcgtaatatcactagattgtttttctattagcttacatagtttacaaaaaacgtcagacgacaaaatgttagataacgaaggttctatggttgatctagatcacaattgtttgaatcaccaagaagatccgaatattgaaggagacagttatgctagaaataaatgacatgacaaggaggtatcaaacatatggatcatgaacaagtagcacctgtatgattctcaagtcatctgaagacaggaatcctcgtgatcaatcgtaagatgggagcagtcagagagatctatgatcggataagacatcgaatgaaagataacacatggcaatagacaatgacacagtcccgtcctcgtagactgtaagatagagcagacagccatccagagctagctatgccgtcaaccagtgtcatctcatatgatgatagaatcagtcttatagacaatcgtaatgatccatcagtataagcagctccactgcgaatacaccgaacaagcctgtcagtatcagcacacaattatatgataagcaatgctcaggtagcgtatatcacaatcagaaggacaaattcaaaagataacacgccagccacaagttagccatggccaagcacaactacaaattggacaatatagattaagcggacaatcccaacgacgatggtcacacgcacagctccatgcaggacaacgaagatcgaggaaatcatcgtaacaactcctggtaacgagagcaaggacaaggatccagatatgtcaggcagggcaagaacgacagaactcgacagagccaacaacactcatcaggccggtcaaatcgtgcaaacgagacctcgggatcatccgagatgaccatgacattttctggtgttaggatcgcggaagcaagatttgggaactcaagggcacggaaaattctcctttcaaacgcccaccactcatcactctctgctcaatggcacaacctg

SEQ ID NO: 927 - DNA, 1173 bp, Heterodera glycines
tcgcgtccttgcgctcagaagcacatattttttaattcgtaatatcactagatgtttttctattagcttacatagtttacaaaaaacttttgacaaaaaatgttagataaacaaggttttttggtttatcttggtcacaatttttttgaatcaacaaaaatttctgaattttgaaggagaaagttttggtagaaataaatggaaatggaatcaaaattattaaagttaaaaaatttaaaaaaatattattttgaatatttcacaatataattttcccagatgaatgcactttaaaattctgataaattgtacaatcatagagaattattttgcttcggaattttctctgatgagtaagcatccagtaggccctgtcagctgcctttcatcgaacacactaagagaaatttgatttcatttttaattcagttaacagttaccaatgtattcgtaatatttaataaataatttttagttaaaaatgaaattatgtttatttaaaattatttttgctttttatctcttaccatatgcttgcctgtctttggaatcattggaatctcttttcgattcggaaggtttgtcgaatgagatgtgttaattaattaagaaagatccatttaaattttaatttttgaccttatttcaaaagtattacgaatggaaaaataaagtgcaaaatacatattaaaatacggaaacgccctaaaacatgaaaacaagaattactgaaaaattctaaattttttgatcaacaatttttgatcaattttttttatcattagggatgtcaattttatgtaaatacatattttttcctggcttctccatgctctaaataggcggaaaacactttcttttttgtgtttgcgaacaaaaatctggacttttatttacatattcggggtttttatagttattttggactttttcatacatttttttcttacatattttgaggattttttactgttttggaaattctcaaaaaaatccaaaattttggctattgcttatttttcatttttctttaatttttgaaaatttatagaatggctcgtgaaaaaataaaaattaaccaaaaatcaatttttcaaatacttatctggttctacgcctatttagctaattttatggcattttagcaaaatttgcaattttgagccattttta

SEQ ID NO: 928 - DNA, 3973 bp, Heterodera glycines
agcaattatttattattaaagcttattaataaagcgtcccacacgggaataactgttaattcctacctaatgggagcgccgtgcggattagaaccccaaagcatttaatcaaaagcgttaaccactatgctacggcgctcccattcgctctcatcatatttttcatatataacacaaaactattttgcaaaaaagtctcatcaaataatgatttgtcattgaattattaatatttttgacatgaattttttaaataaatatgtgcactcctttatgtaattattattatttttgcataagacaaattgatttaagcatcagagtcaagcacaaaacggcgcatacaaatggcacaacgattttggtgcataagccaatctctagcgcatgacaaatgataaagatgtttacatgggagttcggtagcattcaatgaccccaagtcaaatcccatttggcaaataacacatcgctcatcatttcggaccattgcctcgttcacttccagattgggaagtatactatcgcattgttcacgtgttaaaccttggccatgttgaaccactgatggagaaagtatttggaccgtttggggttgggacgactgaattcgttcgctttggggctgttgacgagcattctttatttaaaaataaacaaataataataattcacaaaatgtttttttaatcttcattcattcatgcgtctcaccgctctgcgtctggttcctcctcctcttcctcggccacgtccggcattggcattgtttcggcgacgagatgaagatgctgacgaagaaatttgtggattctaaaacaaaatggaatattagacaaataaacaaaccaaaaattcttgctaaccatattattgttgttgttgttatccaaggcgataggttgcatttcagcggaagtggtgagatcctgtaattggcatgtcaattgctggttattatttttttattttgctaccaaaaaaatttggttcaaaagctgatcgtcattgtcgtggtcaagtgccaaaaactgatgactttgctgctgctgctgctgcgcttgaaccatgtttgtttgcaaggtggcgtttgcccggatttgtggatgttcaccctgcgttggttgtacactctgttggcgctcgttcagcggactcggtacagttggttgttgctgctgtacattgtttgtttgtggcgacagtggtggcggatgttgctcagcttgaagtgtcggcattgtgtctctaccttgcattggttgctgattatgtggacgatcattgtgcgaaatcgttccactgtgctgctgatgttgagggggtagggaatttttttgaccatcgactattttattttatttagttttttggacaaacaaattgaggaacccggtcgctcggacttcgaagagttaatggattaaatgctactgtcggccccttaaactcattaaattcaaaatgacaaataaataaataaaacaggataacccgaatcaagtgaactgaacttccaaatgcgaaagataaagtgtagttcacagattgtccaaaatcgcgcttcggtctcacattcaaatgcatgaaccggtaagtgcctccaaccaagagagtgtttgataaaagggtagccctggcctctctagcacaaatatgaacacgcaaatgttgctcattttccaacaaaaggtttatgccgggcgcggatgtgccattgcgaaaaggaattctttccgcaaaattaaattcaagcagcttaagggttagtccactaaaaacacaatccctttccttcaatattaaaaaaaaggattacggaatgtatgaaccaatttgccgattgaagtcgagaaaatcatttgttgtagtaccatcctggtaaaattcctcctgccatggtccaacgccagcaattccctcattagtccttggtacaatttgttgctgttgctgttgtgcaatgttttggccatgaacatgtgtagcaatgcgttcaatttgttggcgatttgaaaatgttatccctggcgggaggggaaagggagaagggctcgatgtgtgaacaaaaaccggatgggggaatggccccataattggatgagcaaattggttcagaaatggaagatgtgggaattgatgtggcattggcatcgaattaaagaatgggctttgaacaaatggcagcatttgtgacatatgcggcgaaagcaacagcggtggtgctggtggtaaaggcattaatggatggggatgagccgtcagtggaaaagtgaatccatcacaccaagtagcaggctgaatcagggtaggaattgataaatatttaaaaccataacagtacaaaatctgtttgtccattattaacaccagacggtgccctaagaccagcgaagttctaaattttttaatatgaagataagttaatgacaacttgcccgcgaattggacattgtcgagttggtgaacaaaaaaaaaatctgaagtttaattttgtttttgatattgaaaaaaatgtggtagtcaagtgtcataacgtttttaaatacggaattttttattccatatcaattgaaagctgcagtaaataaaggtgtaatgctacaaaaaaaactgattttcacttcgccttgttgttgtttaatgtttatcgaggaaagaaatatgagtatccgagttcaaaggtcatcaaggcaattaggatgaaggggggggggtgaaagtttatataactactaccttttttaaaagaaaggacgctcaaatatttttttttaatatttattaccatggaatggcatgacatgtgatatttgcaatgccatgtctcgatattgttatgaaggacgaactgtatgaccaaatgacatggcatggaacagcatgaaattatcatgaaagaccatggtaagttaggaatgtgacctttgaataccaaaaacatattaacacatgcaacggtttgctctttttttgaaaaccttaattagcaacatttttaaaagcaatcaaacaatcacattgtaatcattgatcactccttctagaacggcacaagattcgacaattcgtactggaaattcgggccaaaattcgcctgaatgcgatcctcaaaatccaccagcgtacaacaaccaaaaagatgaattgggtcagcgtacaaattcccagtttctcaaataataaaaatgaatttgtttaaaaatatgttgtttaataccgagacgggtcccattgatcgtaaaaaaaattctgcggttaaacaaatcaatgccgcatccaaccacgtccccctcgccatattgcgtgtaaccatccaaaggagaagacaacgagtcacagcaaccgtgaatggtgccgtcgctccaatatgcgaatgaattttcggtgtgtccaacaatttcgtgcatgcccatccaatggggtgccagcccaattccgaaatcgcttaatttgggattagaattatttagattgttccatgatttttttttttgccttttcatcttgaacacggaaatttcaaagtaaaaaatgccgtaagtgcatcgcgccggcaccaatgctctcagagaaacgaaatctttaaaaaataaaattcaatttttttttaatttttttacatttttgctgggacgcgtgttcagcaataagttcgtcatgcaaaaagatagcggagtgacaatgactgatgtcccattcgttcagtttttgagtcgtcagcaactgaaaagataaatgagttattttatttacataactaaatgacgctttgacaaccgagaactggtaagtgcgcatcgcctcgactgtttcgctcaaacggtcctgaaatattggcactttggaaagatgtgtggtaaaatcattgaataaaaaattatcaatttaaaaaaaacttgaaaattagagccatccacgaaaaaaaattttgaaaaattaagtaaataaattaatttgaccaatcaaaatt

SEQ ID NO: 929 - DNA, 4072 bp, Heterodera glycines
  unsure (1)..(4072): unsure at all n locations
aaaacaaaaaaatttnttgcgcttaaataattttattaaataatgattaaagtgagatccggtaacaaaagcaaaaacaatctccccgctttatctcatctatcatctttgtcggaagatcaaagcattttttcaacctttggactttaaaacaacctttaaatgtttgtaaaatatgatcgggaattttttaacgtttactgtaaaaaaattaaccgaaatctacagttcgaaatgtaccacttacgcatgaaatggcgtccaaaaagtttgttcaatgtcaaaaagaggccggaaatttgttcacgatcatgccaggagaggaggccaaccacccgttcagcgacagaatgggtcaatgcattgctttttgaacaggaacagcaaaagcgacggatgaatggtctaaggggaaaagtgaatgaaaaaggggaatgccaatttcggagttttacccttcgaaagtgagaaacacagttcgccatatttgctaatgtccccttcggcattgtcctccacgttggaccgtttccattcgactaaatttctttttcatttttatgaccaccgatcaaaaacaaacaaaagaaaaacacaaaaattttgccaaagttctctgactaaacccttctttctattcggttagttaattactttttagaaattaacatctttcattgtattttccccccccccactcgaggacatttaatgcatagcaataaagcatcataatgaaagccaatgcctgaagacgatgttcgatgcgttcaaaatcaacacctgcaaatttgagttcacaattcagcaatcaaaaccaaatcgaagcaccggatttattgggcaaggaacgccgtagacgagtcactgcttcaatttcagcctggaccaggtcaatctgagggtgttgttgcgttagaacaacggacccctcaatttgcgtcacttcacctgcccattgatccgtttcttccgctcttccgtctcgcaccaatcaaacaaacgctgtcctttgaccttcgcctcacacacaacttgcggattgtaagcattgcctgtgggaaaagaaaggccaatcaattcgcattttattataaaagcaaaaagttttacccggttcaaatttgagatcactaaattgcgattttgggccaaatccctcgagagagtcgagcaaatccatctcgagcacttccgcaatggataccattccaaaagacccttccgccccaaccgaaaaaggcgattttggagaaccgggggattctgaaaaatatgcaatttggtcaaagaatgtttaagatggatgaacagtccaaccaatgtcactggtgctgttctcattctccgccgactgtcccttttggactgtccgtcttcgagaatattcctgcacactctttaaggtaagtgctgaaaatgtttgcaatctctcggcaattcgccgccttcggcagttggaagaagcgtttttcccatccgaacatttttccgatggcgtaggtttttgttcatcaactgtcgattgcgagacgttggaccgtttccgttcggctaaagaaaaacaaacattttgccaatgttctcccactaacccttcgttctattcggttagttaattcctttttaggcttaccaatttcatcactggctaatttgatgaaagtgtcgtcatcgaaagtgtattggtcggtcgattgacattctttgctttgtgccccctccaaacaatttgtatggcacaccaaatcgcatttctcgcattgatttgcccatttcagccaaattttcccgccgcagactccgcaactcatattgaaatctgaaaactaaaaaataaattaatcaattcattgacaacactttatttgtgtttcaatggcacccatcagtgtttgtggttagccaaacttcggcacggatcatccaaatgatgtgtttatgggcgggggagattgtgagagagaagcacattcgcccaattcaccgggtaatccgtcggggaaaaatataaagagatgagcaaattgccgaagtataaacgccggtcgaacccattgtgacgaatcaattggtcaaactcagtagggacaaatcactgaaggggagggataattgaacaacgaatgaaattgaactcaatgaggccaaagagattggccattaattgggttctgaaaaatcaaaggttttgcccggcttatttttttgattttaacaaggcaattatcaaaaaaacctttctaaataaattccgctccaaattccgtaatgtcgtctcaaattgctttgtacagttcgttcagtttggctaactgtatcttctcataatttgcctacatttcaacacccaaggccggttttggcgttgccacaacgccaatcgcaaaaattctgtctccgtccttcaatttgtgctcggccaaccgccggtccatcggggcgataatgtatttgcctaaaaattaaaaaataataatctcagtacaatttttttttgtaaatttttgtgaaaattttagtgatacctcctctcataagcaaatatgctaaaccatctttttcccgtgaaattaaacgtcatttataaacagtgtttaaagttttatagaatatgtgcaccgtccccgtctcaaaattcagggcaatatcaataaaacaataaatttcattggtaaatgccaaacttcaacaaaacccatccaccaccttttctcacttccattggtatcatttacctttgtgtatgagcttcattgtaccatttccatagccgatctcctcacaaattcgctctctcaattccccaaaatttgttggcatttgctgcctcacttcgcttggtttcgcccccgcttaacaattgtttagtgtgcaaaaaacctcctgacaattaattcaggaaaattattgtgacataaattaatgataattattgcaaaccttataaaccaacgcgttggcaaacacggcgcctcgcgccacaaacgaattggcaaagttgcgcttgtttatgcgcttaaattttttttccaaaaattatggttaatacctgaaaatataaataaattaaacatattttaaaatatggtataaacatttaaaaataaaaacaattctacaaatttattaatcatagtattgatattttttagccgggcaaaaaatagcacaattaatttatttttaatggctaccgatttttctctatttctctaacacaattcttttcattttttctctctctctctctctcacttttctatttttctatcgcacactctcctccctcactattttctctctttatctaactaccgtatttgatctaattatcccccatgggggattattttttaacctcctcatagactggggataattggagactgtgtgattatgatagagagattatttttcaaacgcctcctagactgggggataattagagactgagggattaatggagattggtgggataattagagcaaatacagaattttctctttctcaaccccatccaataggtttgggtttgtggaaggggatgtcagagaaaaaaatctccaatcaaattatcgggcgaaaatcaatcgataatttgattgggaatattatctactactaaccaaaaatttttccaaatccctcacctaattgacttgaaaatgcaactctctgtgctttcttttgcattcgttgccctgtttttggtcggttttaatttaactagttgtttctttttttgcgttttaaaatttccggggatattttttgacttttttagtgcctcgggttttcagtgagtccaattccgattccttaaatatgttcaaataaaaacttttgcggtaatttttctttaagacttctgcgctaattgagttcaccgaagcgaatgcgccaaagcagaacaacggtaccgacacgaacgcggaaaaggaggaaaacgtaagggcttgtaattaattggcttattagccctaattaattaagtaattaggtttgccttttgaaaaacacgaggggagcggcatggaccatcagacgatggtggcatgacaaagcggac

SEQ ID NO: 930 - DNA, 5849 bp, Heterodera glycines
  unsure (1)..(5849): unsure at all n locations
cggctaacgccgtaacacactacggatgacgacttttctgtgcttgcgcagttggtccatccggttgccgaaagggaagtgggttaacattcccacgccaggctagggaaatgacggttcgcaagagctgttttgcgcggtaacgcaaatgaactcgcagacgtcgtgtggagtccgagccagagttctcttttctggtttagggtgtgcgtgcctggaagtggctcagcctgagatagggatgttgcgcccgtaaagcaccgcggttcctgtggtgtctcgtgcgctccacacggcccttgaaaatgcgagggaagctatttgaatctcctgcctgatcgtaccgatatccgcagcaggtctccaaggtgaacagcctctagtcgatagaataatgtaggtaagggaagtcggcaaattagattcgtaacttcgggaaaagaattggctctaaaggtcgggtcagccgggctgttgcgtgaaacaggcggcttttgcccgtggctgcgtgctgttctttcggggatggtgcgtggactagtggtgagagctgcttgtggagcgcttcagctgcgtgtatgctcgtcagggtatgcacttcggttggcgctgaacgaccagtttagaactggcacgaactcggggaatccgactgtctaattaaaacagaggagacggatggtccttgtggacgttgaccgtgtctgatttctgcccagtgctctgaatgttaagccaaggaaacttgattaagcgcgggtaaacggcgggagtaactatgactctcttaaggtagccaaatgcctcgtcggctaactaccgacgcgcacgagtgtggcgatactcggaacctccggggagcctgttaggagttggcctacaggtcgcgaaagtccctaggtgctgcacgggttgcgctaatccgagggcgctgggttaccttcccatcggccaaaaacgtctgggccttcttagccgcgggtccagtatttctgttgagcctgacagttcttcccggatatggcgaaagattacagggcggtatttcgtgaaacctaaaaaaggtcgggccgaatggcacggacagactcacttcggagtgagctcgggggcatccgtgtgttaccccgctgcaccacgccgaagctgtcatagcgagcccgaaggggaatggccatggagactccagcctcaccctgtaactcgaacctaagtccaggcccctttctggtgttggctcgcactggttagggaacacgacagtctcgtataatcccacacgcaccgaaagccctagccctcgtaggcaaaggctgcgttgttggtttcagaactgtgagcaagtggggttcggatggccgagtgtaccaacctgcttgctaacaggtagcatagagtaatatgctagtaagcagggcacgagaaagggccgtaaaggctccggctatgaaggaccttgcgaccatgcgtgtgtctcccacgtgtggattcttgaagccagagtcttgcactgcgcgcaggatggagcctgtgcaactcctccctcgctgatcgcaggagtggaggatcaccactctttttaccttgctagcttggggtaccaccttgagctggggccggccttgctagcttggggtacgaccctttgagctggggctggccttactagcttggcgcgccacccttggagctggggtggcgcaaaatcacttgtatacggtctaaccaatacatttgaaaagcgatcaaaagcgaaatgatatcctgtgatttggaaagagaaaccttaacccaaatggctctctttagagcccgcagtgacaagacgccgacccacgccgggataccagcccctgatgaggtccgagagggagggtgcggccaaaaccgaaccaatcccgcggccccccgtggtaaggcggcagcgattcaaaggcaaaacggcataactattcctataaaagcctgcgctcaatccggcctagtccggacccagagggttcagcagtggtcagccgtggaggagtccgccttaaaagatgtggtggtgcgaaacacagacgaccgggggctcattaattgggccaaaggtgtgctccctgaatggcaaagattgtgccagctcaacccgaccatgtacatggctcgatcgtctccatcgctgtccaataagtgggcatctctgcggcggacccatgttggtcctggatgcccttcgaaagaaggctccgggccctcacaagacctttcagatgtaaaaatccaaccagccaggttggcccatgatacggtagccgagctacctcaacgtactgtcccttgcggcacagacggtcatggtgtaatcgattccgatgagatcgagattgccttagcagaggtatcccggtcgagtccctttgaagaacgcgagccgttcgacttaggggcgacagagaggatcacgcgtaagcggctgcgcaacgccgttcgcgatgtggttccacctcggaaacgcagggttccatccaccccttcacgtaaggaacaagatttggttccagaggtggacgggcctgcacctacggatgtgttgacacacccacccacagaatccgaaccagaaccgatgcttgacccactctcacttgtccaactggtaaggccgcaattaggccgggcaatgggatgggcagccgaggagatggaactcgggaatgtcgtgatggacgtggagctgaagagggagttcaaccgggaggtgaggcgtgtcggaagaacgcctcccgaccaaatgtataagcgtggcgcaggtccaccactcccacagaaacgagagcccgaacgagtagccctacttgagcaactcattgcggcgcgcgtggaacgtggcatcaacaggggacttgattggttccttgaactgaatgtcgcggtctttgcagccactagggttctgagccgccgggagagagtggaaactcttgctgatcggctgcacatcaacgattctgccactctgtccgaagtatccagacggcgagctaaagctgaaaggaaactccggtgtgcacgggaacaaccatggatgagcaggcggatcaggaaacttggtgtgagggtcgagagactcaaacaactagctgacctggtccggcaaagaatagctgggagaggtaatagatcgtcttacgaaggccctaggcggagattccgactaagaccctctttacgttctgttactgaagcacctgtcaatccaccccttaacgggaatgaagtttacacgttctggcacagcctttgggcgcagagcctccgtgctaacacggatgactgtcaattgaggaaattcaaaaaccagctttctgctgcgcgacacacggatctgacgagcgtcggaaccagctcattggttcagatgttcagcgcggcccttcggaaaatgaagaagggcaaagctcccggtcctgatggtatccgtgccgcgtggtggggagtgttccggcgaattgcaccgtatgtggctacgtgggtggtccgagtaatacgtggggcagaaccagtagctaactggatttgcaacgggctcactgtcctactgcccaagagtagtgacaatgccgaccctagtaattaccggccaattacatgcctaaatacctgctacaaactcttcactgccgttatcgcacaaataaccgcaagttacgttgatgttcttggtggcctacctagacaacaagtagcactgcgaaaaggcgtttggggcacctctgtgtccctgatgatcgatgcgctaacggtggctgacgcgagaaaagctaaacgcccacttggagtctgctggttcgacttcaagaaagcgtttgactcagtaccgcacaacttaattcgctggatcctgagagtcatcggactccccccggtcatcttgtctgtcattgtctctgtgatggatcaatgggcaacgaggctcaagataggtggaaaggtcatgcccaagaccatcccggtgcgaaccggcgtattccaaggggacaccctatcgcccctgctgttctgcctatcggtgtggccaatatcgttcgccctagaccaatttcctcagtatcagtttcgttgtgcaaaccatcttcagcagggctttagtgtcggacacgtgttttacatggacgacctgaaatgctattgcccagacagggaagtgttgacagcagttattcagcaggtgcagaagagcgcttctgccctcggtctgacgatccactacaagaaatctgcgtggctcgaccaggacggcgggaaaagtggcaaagccgtcttgggtgtaccagtacttgtcggcacttacaagtacctgggaatgcacgagagattcatgattgtaagcaaagacagtcttgagtcagtcaggggaaagttcatggggcggcttaaaaccctgtggacctcgaaactgacattcggacaggcaatgcttggcacaaagagcatctgcatgccagtcgtgcgctacgtgctgcagaatctattcctaccaaaatcggaattcaaccagacccgtctggtcctgagagagtgggatcgtcagatcagagacctactggatgaatgtaatatccggcaggttttccgaagcaagacggagttatatgtcagccgcgaagagggtggctggggtcttcctagcatggaagacgccctcgaggaagaggtagtcacaaaacttgccatacttgttgcaagacaagaaactgagccgttgttccgggtgtgtgaagctcttgaaaggaaaaggtgccccacccccctgtccctaggattgcaaatactgaaggactggggagttggggtagagttacagggccgcacattgctgctgaacgggaacacagtgggcccatctcaggcaaccagaaaactcactggagaactggtcctgaggagggaagcggaacggctcagtagatggagaagtaaagtgaaacctggctgtggcatgactggaggggcatggcgggatgtgcccggaatcgatgtccatcttagcaataggtggctcgtcaaaggtgcactgtctccgaccgttgtctcaaacagccttgccatacgagcaaacacggtgattctgagagggagtggcgggggctacaccaaaggtaccctcctccggtgcagaggatgtggtaacacgggagaaacacgcagacacattgtgtcagcatgctccctgggaaggcagaagggggctgcctcccgcaggcacgacaacgtctgcaggatattggtgcgagccatctgccacaaactcaacattgaaccgcccaactcagccaacttcccccatgtcgttgtgctggaaggcagtggtgctaagatgtggatagactttcccttcgtggtgccacataagatccgccacacacgacctgacatcgtcgtcttgtttgagtggaacggggtcagacgtcttagtgtcatcgaagtggctgttagcgatgtggcaaatatgcaaacacaacacatccgcaaatcccacagatatggcaccaactcgactgaacccttcgtcgcgggggtcacgcctacgtataggaatgactgcctggcagcgcagttgcgagcgaaatttaaagcccagcaagttgatgtgatcccgatcattgtcgggaccactggtgaaacattggatggcgagtttgggcggatccgaaagggtttgcctatgctcactaaactgcagatgccaaggctgtggtcagaaatccagcgggcggtgatcctcggatcatatcgaattttggttgaacatcttgcgctaccaaaggggggcgcttgaggactcanaattgacaatacacctcaga

SEQ ID NO: 931 - DNA, 1046 bp, Heterodera glycines
ttgagtggacggggtcagacggcttagtatcatagaagtggctgttagcgatgtggcaaatttgcagacacaacacatccgcaagctccacagatatggtaccaactcgactgaacccttcgtcgcgggagtcacacctacgtataggagtgactgcctagcagcgcagttgcgagcgaaattcagagcccaacaggtggatgtgatcccgatcacggtcgggaccactggtgaaacaatggagggagagtttgggcggatccgaaagggtttgcctatgctcactaaactgcagatgccaaggctgtggtcagaaatccagcgggcggtgatcctcggatcatatcgaattttggttgaacatcttgcgctacccgaaagggcgcttgaggactccaattgacatacacctcagaccaaattctggaatcgattcagaccccctcccctaaagggcctggtcagctcaacccaagtaactaaattgtgaaaaggtgcgtcctggggagggaaaggctacaggctttgggattcattggtgccaacctccggatggcggcttttcagtcggtccgaaggggaagcgccctcgtgatctgatatccaatgctgaaccagtgagggcccgcaatcactgggtagatactgtcggcagggccgataggtcttgcgcaacaaccgacgcgcacgaatggatcaacgagattcccactgtccctatctactatctagcgaaaccacagccaagggaacgggcttggcaaatttagcggggaaagaagaccctgttgagcttgactctagtctgactttgtgaagaatcatgagaggtgtagcataagtgggagccgcaaggcgccagtgaaataccactactttcatcgattccttacttaatcggtaaaacgggagtgcgcccgaaagggtgtccattttggtgttaagtcgggccacccggtggcccggcgacccgcgccgatgacagtgtcaggcggggagtttgactggggcggtacatctgtcaaagcgtaacgcaggtgtcctaa

SEQ ID NO: 932 - DNA, 6224 bp, Heterodera glycines
  unsure (1)..(6224): unsure at all n locations
cccccccccccctcccaatgttcaaaaaagtttttttcgaaaaaaccagcgccacaaaanaacagtgatttaaaagcaaaaaatttataagattgttaatttatttaaaaaaacccagagttttagacagaaatttcaagatccccccgtgaaatgaaatttttaaacattttactcgaattcgtcccccaaaacgaaaatacaaaaatttatgggtacatttttgaatattggctattttcgtaacaaagtgtactcaattttcaaattaaaaaaaaaatttctcttgggaaaagggaaaaattttaaaattttagtgcattttgttaatagatttagtccaaaaacacaatattttacgattttaattgttaaaatgtgattgaattcccatcggaaaaaagaatatttttgaaaaatgagaagaaaaaataactacttggaggggaactgatccaacctccctctggaccacacatatgttaacaaaattgaataggacctaaaatttataaaaatataagtttaccaaaagccaatcattaggggtgtaaaacagtctcggtctcgagtctcgaaaatcgagtccgagattaaaaacccgagaccgaggctaaaaacccgagacttttctcgattcgggactcgagaccgagactctcggacatcactacccctgtggccaatgtccgttttttctactcatacaatttgcacctaatttaaaaatagccaacttttctgaaatttccttcttttccccttcaccggcaaccccctccccctcccccctcgtttagacatcgatttttgttgccctgatttcatggcagacaatgtcaaataaagcaataacaaaagtttggaaaaaaacaacaaatttttgtggaacagccgcggtattcagaccaaagttggcacaagggccgtgaaaatgttgctaagttggcagaaaaaagttcaggttggtttcagaaaaatgatcagcaacagatgtgacagcagcacagagagcgaatcgctggccaaaagcggcggatggatttattcggaatctctctgattgtatatataatttgtgagtcgctgtataaatgtcgaatgaatttgagaaaaactcggaatttttgctttgtgtttttaattgaagccattcagtcgaacatcactagattttggaaaatttgaatttttgtaatagtaaatggagaaaaaacagcggcaaaaagtgatcagaagcagaaaaaggttgctatggtgctactgcgagttgtgcggaagggaaacggtgggcatttgaatttggcacttaccgtatcgaccgattaaatactgtcggcatcctttgatggaaagaatttcagtcaaattgattttcaaatttatttttatttaaacgccctattatgcaaaatatttaaaaaccaagaaatttgatctcaccgcaacacaactggtaatttgcacattaattaacactattacgaatcgaatttgtttgttgagtgttctcattttagcatatttccccggaattcatccatggattttaaaatctaatgtaataattaacaaacacatttacgaacaattaaattttcaaattgcattcgcttttctgagtgaattcaccgactgagtaccgtccgtaaactgaaaaaaggtggtggaaatccgaggcttttttgctttttggacaaaattttttagattttaggcgtaacgggtgaaaaaagcattttttgggggaaatgatcaaattttggatttttgattcttaaaacggtaatagttaagatgatggtagcccctatttttggggtaaattttaaaactttaaaaagtcgttcaaagcaagtttctaggggttttcggggtttctgatcacgattctggcatccatttcgcccaatttcgacctcgaacccgaattcgaacaaaaagtagaaacttcaaatttcgtttttttcgtctgaaaaggatttaatgatcttttatttcaatatttgtggttttcagatgttccgtttatttaaatcatttttaggcgaaaaaagcaaaatttgaagtttcgactttttgttcgaataaaagtgatcagaagcagcagaagtgtgatcagaagcagaaaaaggttgctgtggtgcctccgcgagtcgtgcggaagggaaacggtgggaatttgaatttggcatttatttattatttatttggcattttatatatatcaatttatattttatgggacaagaaaaagaagaatatttcatgactgagtacagatctaaaacttttaatttctcagcgtaatcataaaaatcccaatttttgaggcgctttttcaaccaatttttatttaaaaagaaagaaaaaacttttaaaatgatcattttcaaattttcaaaaatgaatcaaataaaaaattgcggcaatttttgatttaaaattttaatgtttaaaactttccccattagtctccctcaattgacccctttttgtcccccattccccccactccctcctcacccattaacacgctctttctgttaaagatatctcccctctccccaagcacaagtgcactcacaatgcacccaaaataatcgaatccataattcccccccccccccccccccccattaattgtcaattggatgaccaaaaattatttagcaaaatttactaattgtaaaagtggaaattcttgcaggtatgaacggctctaaatctgacgaaactcgtgcgaaaattactgccgatgtggttgagcaaaaaataaaggtggtggacaaggaaaaacaacaaataaatgaaaacttatattttgcaggaatttcaacaaaaaaaacggcggaagaaaatgtaaattgtattcgaatttaattgattatttataaattgaaggccgagctgaaacgtcaaccatttgccacagaacagcgagtgctcaaactggacgtgaggaaattgttcataaatttaaaaggagcgaaaaaaagaataatttcgacaattatgaagaatgggggttggtcccatcttctcttttcttattttgggacaaaaacatgactcttgggcttttcggggtcactgatcacaaagcgggcacccatttcgacccattccgaacccctgatacgaactcgcacaagaagtcgaaaactcaacttcgaatttcatatttggtctaaaaatagttaaaatggttttttgaagcaacgataactttcgctttcgtttctatatgggaccgacccccattcttcattgttcgtgattgcgcaccacaatttcgtctcccttttacagaaagaactctggacgaaattgaaagagttgagaaaggacaccaaattggccatggaacaacaaaagttggcaaacgaattgcgcatttccaagttggaagcagaattggaacgacaaaaattcgaattcaaggaacgactcatgaagatggaaatcgaacgcgtaagttttattttaatttatttaaataattatgagaaaattgaatctaacaattgttttaacatttaaaatgatgtgaattaagttgaatgaacgactcatgaagaccggtggtacggtagcctatccccccttttccaactattacactttgttttttaggtgaaaaaaatgatgattgggtgattgaatgaaaatttgtgggagtatttttttaaattaattaattttttcatcgttttttccttttattaataaacagggctcagatttctggactagaaagacacgaaatattaaaaattatttcaacacgaaaaaccaatttttaatttctaataatttaaatttaaaatttgactaaattttctattttaataacagcatattttgatgaatgtttaagccaaaatatgagtcaaacgctccaaaaaattgttttaatgggcaaaaaatagaaattgggctctgtttatgtttttttaacttttcatcataattattaatttattttgttattttaattaattgtatggccgtaattctatttgtttttttaaatttcttatcttattattaattttttattttctttttaattgtttttttacgtttcaatttttttcattatttttctcgtattttttcgttaattaattttaatagtttatcacttttatcttatgttgttattaaaccgcttctaataaaaaacaagatcaatgaataaattttatcctttaatatagcatcaaattttttatttttcatctcccattattgattttaacaatgttggagagtaaattagcaaatcctatatttcaatgtaaatcgtaattgaaaaatcagatttttgacatttttttgcggcgcatttttccaaaatcattgacctatcaaaaaactacaaaatgaggctaaagcctcacatcagatctgggagccctgcttataaaggtatatgaatatgaaccaaatttaaggattttgctcgccaatgtttgcgctatatttgtcaaaatgcgtgccaattgttcggatcggacgaatttttgcagattgatcaaaacgtactttgtgaaattctcgacagagaccaattgttaatcagtgaagaactggaaatttggaaagtagtaattttaattaaaatataattaatatataaatgaatttgtttgatttaattaaggcactccgttgggccgacgaaaaatgccgtgaaaatgccattgaatgttctgctgaaaatcgtcgttctgcgcttggccgggcactgttcaaaattcgtttcccactcatcgtattagagacatttgggaaggaaattggtaggatctaatttatatgcgttgatttttagattaactttattatttattttagccatttttgccaaaataaaaggaaaaataaataaataaataaaataaacttttaattataaactagagcccggtgggagcgggagtttacgggagtcccgatcccgactcccgtacttttatgcccaacgggatttttacgggataaatatatagccaaaatttaaaaaaatttctcggcggcgcctatcggcaccacaggacccttaaaatccttaatttttttaaaaatttggctcaaatttgcaaaagttggtaatttttgggcaaaatctgacatgtattgtattcaaatattcaattttttcccgtcggcgcctatcggcacctccggcctccctcctccctggtcctgaaaaagttttttcaaaaaatacgccgcaaaaagttaattaaaattaataaagggagtagaaatataaagtttaaataaattatgaaaacaatttatttgaagcaatttgaaaaaattttctgattttcgacccaaaaatatgatttttttaatttcaaattctgcttattaaattttccgtatattttttctttagtaaaaggattatccttcaaattttatgcatttaaaatatttttgtgagtttttaattaccaattcaattaaataataaaattaaattaaaaaatcataattaaggaattgatggacccgaacaaaggcttttactaccaaagcgaggacaaagtgacattggccattgatgtcattgtgaaataagcaaaaactgaggacaaatgataaaaaatgtgcacttttccgattgtttggccatttttcggggttaatctcgaccccgaagctttcaaccccgacccttaccccccccccccccccctccaatgttccaaaaaagtttttttcgaaaaaacagcgccacaaaaacagtgatttaaaagcaaaaaatttataagattgttaatttatttaaaaaaacccagagttttagacagaaaatttcaagatccccccgtgaaatgaaaatttttaaacattttactcgaattcgtcccccaaaacgaaaatacaaaaatttatgggtacatttttgaatattggctattttcgtaacaaagtgtactcaattttcaaattaaaaaaaaaatttctcttgggaaaagggaaaaattttaaaattttagtgcattttgttaatagatttagtccaaaaacacaatattttacgattttaattgttaaaatgtgattgaattcccatcggtaaaaaaaatatttttgaaaaatgagaagaaaaaataactacttggaggggaactgatccaacctccctctggaccacacatatgttaacaaaagtgaataggacctaaaatttataaaaatat

SEQ ID NO: 933 - DNA, 3800 bp, Heterodera glycines
  unsure (1)..(3800): unsure at all n locations
tgtatccgcccattacgcgcgtgtcaccgcccccccccccattattttgcccattttttcattgattgattttcaatcccaaaaaatcccatttttcaatggaattttattggaaaaaataaaaataaaaaacaaaaactaaaaaaataattattttttttttattttgggcaatatttgccatgcacatcattcttttttcgcgcacaaattgttctttttatggtccgttaatccacttgaaaatttataatgaaaatgaaggattaacacaaacaatgatttttttttattatttaatcattttattatttttatttttaataaacaaaataatttatattttaataaattaatttgttttaagttgttttatgaaaagaaaagaaaaataaaataaaattttcccttttttaatttttatttattgtaaatgaaattaatagtttctctttttttataatttgaatattattttttaaaacaaaatatttttgaaattttttattaaaattcccccttttttttaaattaaaaaaattataaaaaaatttttaaattcctttttgatttggaagaaaggaaattaaaaaaaaattccaaacctttttaaaataaaatttataaatttcttggaaaattttaattccgttataaaaaaaaggggaaaaaaaaaaaaaaaaaaaaaaaagattttttgaattttaaggggggttttaaaacttaaaaaaaaattttattcacttttttttaaatttttcaaaaaaaaaacccgggggggggaaattttaaaaaaaaaaatttttaaatatattttttcaaaaaataaaaactttttttaaaaagaaaaaaattttttggcgccccctttttttctcttttttttttttggcccaaaggtttggagagggggaaaattttttttttttttagggaaaaaaaaaaaaaaaccccctttttttttttttttttttcttttttttttttttaaaaaaaaaaaaaaaaatttaaaaaaaaacacaccaaaaaaggtgtgattcaaaaaaaaaaaaaaaagggtttgcttgtgtgcccccccccgggggttggtgggggaagaggggaaaacgggggggggaatatttttttttgggttcaaatatttttttcaaaaatttttaaaaaaaaattttattaaaaattttgggctcaaaaatcaaaataaaaaaaaaaaatttgtttttttttcttttttaaaacccaattttttcaaaattaaaaaaattttggaaaaatttttccctccccgtcactcgtttcccccccaaatgggtcaccttttcccctggaaaaatggctttttccctattcatatattctcttttaattattatatttttagggtaggaaatgggctttgtttttattctcggaaatttgtgttaaaagattaatgtgacaatttttatatttaaattaattatttattttggtagtcattcttttttgttgtgccattttaatttttgggtcctcaaatgtcgaccctaaaaagtttccgganccggaattagaatttttaaaattttcctttcaatttggaagcgtaatttttataattttttgcattactcgacctttacctcctaatcattttgtctnttagagaatatgcgagcaaaaataattttatttattttaatattttttaatttggccaaaattttcgtttgtttgccatacgaatgggaaatgaccaacagctcactgaaaaatgtgctcacatttgctaattttatggacgatctttttttggactacaaaaagaacgacaaaatgggttagttgagttcaaaagttaaccaagaaaattttgacgaagaaactttagtttatttttttaaaattgaaaataatttgctcaatttttataaaattcttcgtggattaatcaatctgaaatttagcaggctgaaatcccttacgttgacatattttcctgcaaaatttcaagcattctgaaaccaaaaaaagaatatttaaaaattaacgtgccaaaatccttgatttttagtgccaaaaaaccacagccctactgataaaataacagaaaattttctatttcgcagattgctcatattttgtagatatttactccttctttaatggttgtaaaaagaattttaaatcgatttaatttgatcttttgttccagcattgaatacggtaataaatttgacacaatttttcagattccgtcacaaatgaggcaccgtatcccagggacggatactgtgagaagcaaaagcggacagtgtttaatgtcacatttgttaaatgggccgccgaacttgcncatttccatggcaaaagcagtgaagaagaatatccgaattttaaattggtctctaaggaattattccgctatgaattcgttggatttgatggctttttctattttgaccaattgcttggccagcaaatcgccaacaaattcaaaaacgaatttttttctccccaaaatccgatggcaaacgttgtgaagaaccaaattttgcaacttaccttatcattggctgcgcgaattctcctctgtgtgatgttagtggtgaattataaatttatgaaaatgaatgaaataaaataatttttctgtataaatacgtaaattttgggaaaatatcaaatcgaaaaaattattgaaacatttatttgatttaaaatttgctattttctattaaatgattcggaaaataaatttatctttcgaattattataagcttaatttttagaatttttccatttcaaattattcaaattggagatggccagcatttgtggactcaatttttaagtccaactcaaaattgggtagaatacgatacggaacaacagcaatatattggtaaacttttgaatttttatcgaaaaattatatagcaaaatttgagtttttcaagagatggattcacagataaaaatgcataaattgaatttaacgaggattttgcaaaaatttaggcaattaactccacccccacaataaaaatgcataattatttttagacaattttaaatttatcctcaaactttctgagtttaaattgacatattatgaaatgtttaacgtggtcgacacaataatgaacagagaaaatgaaaaaaatggtcgaagtcagacatcaccagcaagagcactttacacatttataaagctgcattttgcttcattactaccgccaccatcattagcattatcattagcaaacggagcgctgcggaccaatcagccagggtcgggggcttttaggtttatgatttttaatgaaaacatcagaattaattaaggggattttaaaacattacaattaattagggggattttaagaccccgttttcaaaaagattattgccaaaaattcggatttaatattaattttctgataaagaatatccatgagctattgagtaatacgatgagatatttgacaagttatgaattttttatgtcacactttttgtttttataccccttggtggatttacgaaaggacctagcaccaaaaaaatccttaacaaaaaagcaacgaaaaatacacccctaagaaatgagccgaaaaatttccaaaacacacccataaaaattgagaaaattttccaaaaaatttctccataaaatataatttttaattcttcataaaaagtccttagtcaaaaaaaagctttaaaatatttaagaacccaaaatttagttttcaatttgattattacttgaattttttcaaaaaccccgtgcccgtgtacggaccccgtgtcatcg

SEQ ID NO: 934 - DNA, 1018 bp, Heterodera glycines
atatatatatatatattttatgtaaaattcagtgtgagtaatcgttgataaaaatggcttatgaataaaagcgagttgaagcattctttcctttttgatgatctcaagcattgtgcaaaaatactacatagtcctggtcaaaattttagaatccagaagtctggaaaaagtgatttgttaatcctgaaaaccggaccttggtcaaaattctcttattttttccggaattttttcaaaagtccgaactctacctctctctcattcgttaactgcaaaataatcgaatttttaatttaaagaatttttaaaaagaaagcaagcataaataaattcctgtttcaattagcaaatccaaaaaaggatcggttgatcatttctcaaataataatccattcattcattccgctgatcactgcttggccccgcggcactcgagcacacattttcgtggtgctaagtcgtttcgtaaaatccgccattttagcgaatttttcgagaaaacacggcataactttgcctaaaggcaaccaattttacattcttagtactattggatattctcgcattttctctatacatctgcaaagataatctttacatgatcaaaattaatataagactggaaaacaagcagacgatgttgcctcctacgtagttttatcaaatattttttgtttacgaaccttctaaaataccaattagaaacattgcataaattgatgagaataattatgaacactcacaatggtcccagtgaaagcaaaacgaacaggagtatatgacaaacatctaagcgacgaggacagtgagcgtacgcattgatacgaaccagtttttggagttgttaacgcgctcaaacgaatcaaatgcctcctgaagagcactgaaagcgaattaacagaattatcataactttcatcaatttaatatttcaatggaagaatttgaaagcctcgcgtgaatgttctgctccaatttttgtgcgaattgctccgccaactcgggaccgcccattttc

SEQ ID NO: 935 - DNA, 1396 bp, Heterodera glycines
tattaacgctttttagttaaatctaaaaacttaagaacatttaattttggttatttttaatataaatgaagttattaatcattttaaagggtttttgaaaaaagttaaattttaaaccaaaaatttttatcaagaaaaataattaaattttggggatcaatttgtgaaagtttttttgattcttaggggtgtattttctgaaaatttttcgggtcgtttcttagggatgtatttttcgcttttattgcattcttgttaaggtttttttttgaaaatcctaaaataggcacattaggcataaaaaccccgaaataggcaaagctttgatgcttctacgttgacttttatatatatgtgtccgaatactgatttggcttcattttgttgatttatgggtaaaattttacgcttttagcctctaaattttaggtttacatcgcccgctgaaaaaaagaaaaaattttcctccgccgaccattgcctaatttcatctgccaaaattggtgaaaatcagcaacaatcgttgggttcatcatttgagacaacatttggagaagaacagaaaaagaaaatgaatgatcgaattttgaagaggaaaatgtgagacaaatttaaataattaattaataaaaaattttatggttagggttaatcccttcggactcaatcctaaaaggctcccccaccggtgtactcaaagccaaaaaaacgtaatgagggtacctttttggattttcattcaaaaattatttcccaaccatgaaaaaatgggttaattaatggccgtacatacaagattaatttcttagcatttctgttctgctacaggccaaaactatggaaaacccgaaacatatgctttgtatgtaatcgcgcagggaggggggtaaaaaggccataattacgtacccataaactaattaacaaaatttcattctttcagttggatttgcagcgatgttttgatggacattctgcccttttttgaccactttaaactcggcctcaaattggcactgatttctgaccgtttcgacattttagtggacacacattttgatggcaaatcagaattgacaatttggaggccaatcacaattcgcaagggccctgagccagacttatttgactgtggttccaactctgtgccgtttccgtcgcctgatgacagtccgctgcaactttttgtgaagggcaaatctgagggatttccattgccgcaccgtccgctgcccagcaaaatgcactttaaatgccttcaaattaagtaaattatcaatgaacatttcattagcttagctgataaaaagcggaagcacccccaaaaacgttgccggaaaactttttggaccataattttgttcaatgtgaatcaaattaagaattgttggtgttg

SEQ ID NO: 936 - DNA, 1953 bp, Heterodera glycines
  unsure (1)..(1953): unsure at all n locations
tccgagcaaagatgccaacccaagcgatgtgtccccaaacagacgacgaaaacttcgagtggatcaacatttcnaaggaggtgtcgccatgttttttgagattttattcttgattctacattatcttattagcatgcactgatgtgattttggttaagacatggaaattcgttgaaaaaaaaatctcgcgatttatcgcattgcgagtttgcttcacctggaaacaagacaaaatttcgcccgtcaaaattttgccgggaaaacattttaaaaatataatatttaaaaattttttaagcgatttttttttgtttgaaatttatgatgaattagtaagtttttttgaaaattttttctaaaattttttcctcggaatttcatataaaaaactcaccttttcttaggttttcggggttgctgatcacgagtacggcggtatccatttcgaccaattccgaataccggatccgaaatcgaacaaaaaaaaatagaaaatttaacttttagaattttatatctttagtctaaaaatggtcctggattcggaattagtcgaaatggatgccggatccgtggtctgtgacctcaaaacccttagaaatatgtttccatgacttttgtaaatataaaaaaattttcgaaaaatttatgggggacaacctataatagagccaaatttctaagattattttcttaaagtttttaaatttgaaaattaaaaaaaaagtctcggccggctaaatttcgttcgtctcactgttcaggcatttctccgtgccaccactttggccgcttacactgttcaattttcattggctgatacaacgccaattgtgccatttgaattggtgaacgaacggacccaagaaaagctgacattgatgtacatcataattgaacatgcggattataatggctggcagctgaagcgatgcccaattagtgaaaaggcggcggatcaatgggaagacgaaattttggacgatttgaatggtgtgagcattgatttgcatgagcactttgacattgggtgagcaacgacggcattttttgcaacttttgtcaaatccaattcaaaaattatggcactcattttaggcaattgtctcctccaccagcaacagcaacagaagaagaagaagaagcggaccaaagcaattgaaaggtcggcgggagacaatgaccaacccgaaagatatcccttagaattttttatctggtagctgaaaaattttaaaaactttaattattaaatttatgtccaaaaatattcgtaaaaagcaagccgcttaaactgggaaatgccagtccatttttgacattggagccctctttgtccgggatgcgcaattattccgatttcgggtgttccaggcccggcccaacaaatttcggaattcctttacatcattgggccgggttcagtttccgatttcctgctcctgaatttttgaattttccaaaattcccttaggtcgtctgatgaattgagggccgccctttgatcaacggaaaagaagtgaattatttgaaaaaatgtccgatcattttgaatcacactattaatggatgggaattgatttgttgctctttttctcgctgaaatgattacttttatttatttaaatgaatattttttcctttgatttgatggattttcattcgaaattcaccataaatttctaaaaattttctaatatgaataatcgaattttgcttaatttatacatttttaagcgaatttaattgaattttcaatggcatcgcccgtcgaaaaaaagaaaaaattttcctccgccgaccattgcttaaattcatctgccaaaattggtgaaaatcagcagcaatcgttgggttcatcatttgagacagcatttggagaaaagaaaatggaaaatcgaaatttgaagaggaaaatgtgagacaaatgataattaattaatgtgaatttta

SEQ ID NO: 937 - DNA, 2020 bp, Heterodera glycines
attatttttttttttgagattttcagcagttttttttgaaattttatgataactttcataaacttttcacgaaacaacttaacatattttttccttgaaaaatttctgtttggaattttttttttttaattattgctaccagattccggagtttgacattattgggaatgcaatatgtaccatttatcacatacattgatcactccgcgctcactatttcaccgctccaatcactactatttgcgacaggacaggcatgaggttaccctggttgtctgcgcctgctgcctcatttgaagctaatgtccagccaatttgggatgtttttgcccgcgaaatttggcccatttttgcgccaaacattcgccacttgctcttgaccgttcgcgatcatttggacaatttgcgtcgctgcacttcgccaacaattctcaccgatctcatcaatttgaattcaatctgttctttttgtctgcgccctgatggaattgccgattttgatgggccaaatttaaatgctggccaagcgttggccaaatggttgcacattccgcgcactgatggccaaccgaagcgattgcgtttttgcaaagatttggaggaacaacataatttcgattgggtcaacagtttcaaagaggtggccataataattatttttgcgaaaatttgccatttgatttgatcaatttggctttttgtttaggcatttctccgtgccaccactttggccgccgcttacattgttcaatttccattggctcctacaacgccaattgtgccattcgaattggtgaatgaacggacccaagaaaagctgacactgatgaacgtgatcagaattggaagtgttaatggttggcagctgaagcgatgcccaattagtgaaaaggcggcgcttcaatgggaattccatattttggacgatttgaataatttgagcatttatttgcataatcacaatcaaattgggtgagcgacgacggcacttttgctgcttatcgaatattttgaatctctgctgatggatggatttgataattaatgttcttttttttctttaaaatgattaaacttttgtcgattttttctttcgatttgacggatttttattcgaaaattcaccttaaatttatttaaaaaaaaatattatttggtcggattaaacagtaatttgcatctgttgtatatttttacatgcacaatttgacttagttttttttgattatctacagcaaatttcattgggttcttttgtgacatcatttgatgaacagcaaagaagaaaatgattaatcgaattttgataaaaattcataataattttatttgttaagcgaatttaactgaattttcaatggcatcgcccgccaaaaaaaagaaaaaattttcttccgccgaccatttcttaatttcttcaattagtgaaaatcagcagcaatcattgtcgggttcatcatttgagacagcatttggagaagaacagaagcagaaaatggaaaagcgaattttgaagaggaaaatgtgagaaaaaatattattaaatttaaagttaatttaacacagtgttatggccataacatacatcacaacatgggaaaagcggataaaattctaacgtattaaaaaacatgggttttccaaaggcaggccaagatcccggcgcaggattttgttgggttccaccagtccgttttttaaaagaaaatgatggaaaagcgaattttgaggaggaaaatgtgagacaaatgataattaattaatgtgaattttatgattaaggttaaatgattttcggactcaaatctaaaaaaagatcccaccggtgtactgtatttggggggggggggataccctcttgagattgaacttggaaaacatcattacatcaaccgttgaaaaaaaataaaataatttattaaactcattgaaaatttttttaacaaattttcagttggatttgtaacgatgtttggatggacattttccccctttttcgccgtccccaactcggcctcaa

SEQ ID NO: 938 - DNA, 4991 bp, Heterodera glycines
tttggcccatttttgcgccaaacattcgccatttcactttcaaagatggcgatcatttggacaatttgcgtcgtctcatctcaccgacaattctcactgattgccatcaactgaattcaatcaactccaattaccttttgcccgatttgaacgctaatgatgggccaaatttaaatgctggccaagctttgtccaaatggttgcacactccgcgcactgatggccaaccgaagcgattgcgttgttacgaagagttgaacggaccgtcaaacatcgattgggtcaacagtttcaaagaggtgtgtggccacataatcggggcaaattttttaaaattcacacaaataaaaaaatttaaaacttttttaaggttaaattaaatttttgaaaatttcctatccatatgccctgcggcatttgtcgtttgatttgatcaatttggctttttgtttaggtcagggctcccatccgtccttgaatggcaaggacgtccttgaaattgggccctctttcttgaaaataaaaaatgtccttggatgccaaggacgtccttgaaaatgaacatttagaaaagttttaaaaaaattcaaagaaatttgagaaatctttgtaattttcaacgatattttgattatattatggcattatgtaaataaaatgcaaattttcaaattttctcatgcttgtgaatgaatttgttacgcaatttttcgcgtttgcgacataatttatattttagaatgttcccaaataagcgcaaatgttctttcaatcccgattgggaaaagcaatatacttttgtcaaaagaagccgaaaagggaatggatttttttattgtgctttttgccaaaaagacatcaatgtcgagtcgatgggagtttcggccataaagtcgcacacggaaaacaaagaacataagcaaattaaagaggaacggcgtaaaagcacaacaattgagaattttgttcgatccaaatcgacgcttaattcaattgaccttcaagttgcaacggctgagggtcatttttaatcttttttaagtgtaaaaatttgtttttaggcacttttgcttaccatgtgtgtaattttaaccatttttcattgcatataataaaaattttaaatgtccttggatttcatgaattttccccactatgtccttgaaaatcggcatacccgtccttggaaacggaggatggacgatgggagccctgctctatttcatcattactttctatatctctcgaattcataaaatgttaagacataaattatttatttatgcattttatataggatatgaatatgctcaatgataaaatgaaagttgaaattaattgcttgaactttatgggtttaattaataagattaatttggttatttttatgtgcgatgccactttaaaagtgtgctttttgaatacatcaaaaataaaacaatagggggaaccttttggtctgcaaaattttttgtatatagttgtaaattattccctgggcgtttttgggtccctgatcacgaatcttgcaattattttgaccaattccgatttcctaatataaattaaaacaagaattcgaaaaattcaaaagtttgatttttcaaaattcaaaaaagacccgccaaataaatttgaactttctaaacttttgtccacatgtggacaaatgaaacgaacggaacggaggggagaaaagaagagatagagagagacagagagagagagagagagagagagagcaccgaagacagagaaggaaagagcaaagagggagcagaggaagagaaaaagagcgcaagagaatgtggagacagagaaaacagacaaatcttttgcgactgaaacgcaaattttgaaaaatttggataaaaaagaggcgggcggggaaatgtacgattggggaagagataatggaaaaagcacaaagcaatgggaaaaaataaggacattgaataaaagaattcatttaaaaatgtgtaaaaaatttaataaaaatgggctggttaattattttaatgtatatttttctatttttatgcatattttgtgcattttccattgttgtgcacttgcattcggttgccaaaatcatacgggcacagattgaaagagacaacgcaccttaaaaaatggtaaaaaagcgaaagggaaaaaggaaatgaggaaaaggcattttgagattcagattttagaattttgtgattaggtaaactcaaatttcatttacaaaaagtgtaaaaaactccttttatgggcatgtccgttcaatcgtttcctttctaaattttctttggctcgttcattaattaccatttcccggcgttttgtctttgtcgttttcatcctttccattcttaaatgtctccccccccccctttatgcattgtttccttctccaggccacggcaacgtgacaaaatcaatgccatcctcgccagctgtcaattaagcgcacgtcaattcatcacaccaatgaacacaccattttttcatcaataaatggttgaatatgcaagggcagtcactcaaaaattcgtgaactttctgttcaatcccttgtgattttgctttcattttgtgccttttttggaaaagaataaaaaaggctttttccgccgctttccctttgtctaatgtcagggccattcaaaggagccgggaggggggggaactgcccactcggcgccgggaggcaatgcaagggtgatcagatcatttactgatcactgctgatcggcggattatttccatttccagtttagtttttctttctttgcactttctcttttcttttttgtccttttctttttctccattttttccgttgctttacttaattttttcaccttaaacattttaatactttcccaataattaacaataacttattttattcattgtttcctttatttttattgtacgttcaactgagtaaaatggtttttcgtttcttgttttgcttgttttgaccgtgactgtaatgaaaaatttagagagagagagagtgagagagagagagagaagagttgggatggcgagggagaaacgtagaaaaatagcgaaaaatagggataaagaaaggcattcatcagcagacgtaaataaattgttcttctttctgtctgtgggcagcatagcatttctgttatgtgaattggaagttttttttctaatttatattttttttatataatttattcattaataatttcgcccattttgaaggctatgtgaacgagggtgacacgcagaagaactaattaagaattgccaatcggccggtgacaacgtgttctctatcctttaagctaatattttctatatattttttaattgtttgattttacctgatttgcttcaactccaaatgagttgtccacactgaatttgctttgaataacagaaaaatattataaaaaaaagaaacaagaaaaatcttttttaaattaaaggtgaagggcgtctagcagccgttggttgccattcttgacgtgactatgtacggtgtggaagtgcctggccgagatggacggcgggaatgatcgtactaacattggtggagggcaatatttattagatagattattataaaaacaatttttgtttttttttaattctaacgttatgccaggcactcattgaccaactgtccgcccgtctcaatgaccatttggcattgtacgctgtgccggtgttcatgcgcatctgtgatcaggtggaccggaccggcacgtttaagctgaagaaaaccgttctacaacaagaatgtgctttggccgattaagaaaaaagaaatgcttgacaaattatttatttaaaataactttaaattaaaaaaaatattattgaaagtattaaagaattttttgatttccataaagcacaaaaaaagtattgcgcatattcattaaaacttaaattccaaatgaactccaaacttttaattgaataaatttaatttaggcgggccgcaaaaagtacgtacgagccgctgactggagaaatgcagtcgcgcatcgataatggcacgtacttcaatttgatgccgattattggctggcattttccgatcagtggtggcggtgtttgatgatttaaaaactctgatcagtgttaattacactgatcaaaataacatttttatgtttaattgaaaatgacattttcacttaacaatttaattttaaaacctaaccttccattttttcttttccctcgcaaattttttacgctgctcaatgaattttgtgtggacaacagagagcaaaaccaatttgccataattgtatgcctaattcattcatatacaatataaataaattatgaattgtttttaatgctagaaattttgatggatttactagggttataaatttaaaaaagtgaataatttattattgatgagagaaagaataaaaaaggctttttccgccgctttccctttgtctaatgtcagggccattcaaaggagccgggaaaggggggaactgcccactcggcgccgggaggcaatgcaagggtgatcagatcatttactgatcactgctgatcggcggattatttccatttccagtttagtttttctttctttgcactttctcttttcttttttgtccttttctttttctccattttttccgttgctttacttaattttttcaccttaaacctagatttcacatatcaatatatcgcagtaaattatattagtacttctttgcgctgatcgtgcatgcaaatcggtgaaatatcacgctaattaatttatttttttttgatatttttttaagatgtttcccaccatctcaagattcacttacggagaaggaatgtcaattgcctttggggttgttgtcataatcatatgattatattggatttataggtatcccatggaacgcaagtccgcacagggatagtattcgctcatagtgatgtgagaagtcatccatagcaatcagcagtaaaatgttataaattatcaataa

SEQ ID NO: 939 - DNA, 2003 bp, Heterodera glycines
gatcaaaataacatttttatgtttaattgaaaatgacattttcacttaacaatttaattttaaaacctaaccttccattttttcttttccctcgcaaattttttacgctgctcaatgaattttgtgtggacaacagagagcaaaaccaatttgccataattgtatgcctaattcattcatatacaatataaataaattatgaattgtttttaatgctagaaattttgatggatttactagggttataaatttaaaaaagtgaataatttattattgatgagagaattttgcgtacattaaatttatttagtcaggtaaaaaatttattttatgaaaatgcaaggaaaaaactttgaaataagattaatgaactttttctgctcacttattttcaaatttacaattagcacgatacaaatgcataaagggggggggggagagacatttaagaatggaaaggatgaaaacgacaaagacaaaacgccgggaaatggtaattaatgaacgagccaaagaaaatttagaaaggaaacgattgaacggacatgcccataaaaggagttttttacactttttgtaaatgaaatttgagtttacctaatcacaaaattctaaaatctgaatctcaaaatgccttttcctcatttcctttttccctttcgcttttttaccatttttaaaaatttatgctcaaattatgaaaataattcaaaaaatccatcattcgccgtcgccaagggcggcaaatgtttctgcactgccgcactgtgtaagaacagctcatgcggcgcaatcaatgccaccttcttgacaaaaaaataaaacaaattttttttagataaattgctacttaccttctccctggaatactattagattcatttcgtccatctggggtttttgcttagtgccaatgattttgatcacaaaaactacagacatggctacaattaggatgaccattaatttgagcataaatatgacgttgttgttgttgttgttgttgttgttgttgttgttgttgttgttgttgttgttgtttttaatgttgtcctgaagattatttttgactaataattcattaattaaatctagcattttaatgtgataactttgattcattttaatttatgaagttagggtacggaatggcagttttgtaaatgcgatagtactaaggaattaattataaataaataataaatgagcaattaattctgtgctcgatcttttgtaaaaactgtcaaatgggagttttttaataatattctgcgtctgtaatcaaaagtcgattaatcacacatagcagacaaaaagctatataggcataaatgattaaagagatgagaaaatcaaattaaatattttatttttttaaagtaaattaaaattaaacaaattaaaattattcaaaaccaagaaaaaacaaaaatttctttttggcattaatattgattctaccagtataattagctttatcccacctttatctgaatgtttataatttaatttaaatatatatttataaatacataaatttaatgatgtgaaaatcattttaggcattgatttatattgtatagaaaaagatttgaaaatttaaagaatctgaccaagaccaaggattgtcctttcatctaaaacctgtcatttgtcttgtttcgatgaccaaaataacttattttagacatttacatttttggaaaaggttggaaaaggcaaatttcaattagcaaaatagaatgtgatcaatattatgaatagaaattgtttattaaatttaaatgacttttttttactgattctaaattgcggtctgacattttacggacagctattctggtttgaattaaagtgccattatatttttatacgttccgagacaagcagttaagtgcgaatgtaaatctgaaaagtatatataaaactttcctaaaaatttcgtttcacgtccgcttgggctacgaaaaaccggttagttaggggtgagtgatctaataaat

SEQ ID NO: 940 - DNA, 3283 bp, Heterodera glycines
ttcctgaaggattaaatggttaattagataattcctttatttttgacgaccttcttgcaaccattaattatctaattaaccatttaattccttcaggaatggcacggcccaattaggtaaaattgtcagaatgtttagctgaaaataacccattgttcttagatgcgatcttttatcaaaatgggaaaatgaagcaattgatgatgccacaaaagaatggatccaaaagaacaccgtgccctcgttgcaaagtttcgaaatacaaaaatttgaaatttttagttaatgtagatcgaaattgagattaactatggctgcccccaaatgaagtgtcaacattgtgggtaccagttctgctgggtctgctcaaaaacctggtcgccacatggtaattaaaaaatacgtgcattgtccttttttccccaaaccggtggcctttgtgatggaccagagccaaaaaagcaggggttggagcagaaatcggcggaggaatttaagcgctatgaaaaacaccacgattcctacacacagcaaaaaaacaaaattacagcagaagaggaagtaaaaaaacgcataattatgaaaaacaaaaacttttcttttgcaggttggcaaaagaatatacgactatatcaaaaaacttggtgggtttctttttgaaaaatatttaccaaaattacctaaatttaaagatagtaaatcgaaagaagcagcattggttttgcaggaggcactcgaaaagctgctcgaaggccggaaaacactgaaatatacgtaagcggaacaaattgcttattttgatgagtggttccaaagacggtcctttttggaattgatttgtcaagtttttaaattgtttcgaaaggccccaaattgcaaaaatttggatttgggattttgggtcaagatttatttaaattaccgagttaaaatttaaaagttgcccattttttgggaaattttgtttcaatttcgggggcagtgccccaccctccttcccctgggtagagcatgcccctgtttgcattgtctaaatccttttcttaaaatttgttttagtgtcggtgaatttttccataatcacataaacacttttagttacgtattttcattttgtcacattgacgaaaaaaatgatgaattccacaacgcccaatcagttcttgaaaagtcggtaaaagcggtatgcctatgatgtttgaaattttcgttagttttattcatatgtatagttgagtgagcgcttgacgaacatggattttgcaaaagtcggcaacgccatttcggacgtactcttttttttttaatttctagttttattattttagctcaaagaattgtgccagaaatttgaggcagagaaaagagcattgattgatttatgtgacgaaaaaacagttaaagagatgatcgctgaaaaagggccgacggaaaatgaaacgggcacatctgctggcttatgaaaaagcaaagtgaggaaaaagaaacgaggtggagaagcggtgaaagttacaatatttattccataaaacagcacccagtgccttcatttatttattttattgttttggctatacaatcttcaattcatgcgggcttttccatttacaaaacattccataatattcgacacacacccatttcatttgttttcttttattttaaactactttatttgaatcaaaattgttctttttttccatttggttagaagtcctgaaaatacgtatccgggggttctcgaggtcgtcatttcgaccaatttgggatcccagaccagaattataacaaaaagtcaaaaattctcaatatttctctaaatttatttttaaaaaaccaaaagtagtcaaattctcttttttttttttttgcttttcaaaaccgctttttttgcggcgcgctttttccaaaaaacttttggagaactgggggttccggcggtgccgataggcgccgccagaaaaatttttgaaaattggagtgcaatttgttaaaaatcatataagaaaaatgaagtcctatttgataaaaaaaaatacgaaatattactcaatttcgtaaaatttttcaattttttatataaaaatggctaaatttaagagtattttgttaaattatttaaattctcttcgtctttacgaagtcgcctctctcttttcccttcgtctccgacccttccccagattttttcactagccccccccttttttcggcccctcatacgaacgaagtcagagggggtcgactcccccccccccatttaaggtatgccgttgggtttcggaatcaaattttgtaggtgggtagagcacccagggtttttaagaaaagtggtttcaatttctgcgaaatgattcccatgccgagttattaaatgccaatttttttaatgaataaacaaataaaataaatatatgaacactttaacactgtccattagtgtagaggtagtgtgctggtctcggttttctttttttttaatcgaacaaaccacaaggtgctatgcactctaacagttgcgtaaaacaaaataaatgaaacgaaaataaaatataaatggtagtcaaaaatcacaaaaataagtgtcaaatcacaaaataggtgtcaaattaaacaaacaatagacataaatgaaacaaatcacacctttcaatagcgaaaatatgcattattgcttaattattccttttgcaatttctctgaattttttggggtcatttatttccataatatttttcggtaataaattccattaattaataaccctattaaaaaaaattattttttgtttttgtaatatatatcctattttgtaataaaaagggtttgcgaatagcccgttagcaacagcaaaaaagttagatggtttaagatgtgtatgtttttttaggattttaaaagtagttgtaatatcattgattttacgtctaatttccaatgtcttaattccgcaaagatttaatctttcttcatacggcatgggaacaagcccacattttttgaaggcttttcttgtaaaaaattttttgaactgcttcaattttgcggatatttttttttaatggattccaaatttctgtggcgtattctaactgtggtctgatatagcttttatatgctgaaattaatgtttcgagcttccgagtttttaacgctctgagaagctgaaaaaaagaaaaatatgaattttttaaaatttttttaatatggttagaagaaggataatttttgatcgattaagatacccaaatcccttacacattttgtttctggcaatgtttcg

SEQ ID NO: 941 - DNA, 6019 bp, Heterodera glycines
aatccattaattaattaattaattgttcgcctctcacatcgatttccaccatggcgcccctggccacatggtattccgccaaatgcttctccatcacttccatttgggtggtcaaacaatatttgtacgcatcttcggcaacgtcctaaacaataaaaattaaataaaacggagtccgaaaattcaatttttactatgaaacaaatacttaaaaccgaccaatttgcccattcgcgtgtaaacgtcggccaaacgcaacgaattttcgataacttccggggaaaggccggacgaacggtgcaaagtgaggtatctggagagggaaggaccaattaatttactgttcaaatcgtataattcatttcgtcagttaaaaataaaaatttttttttgataaaaattttaaattttcgataggaatgtttctcttctttcaccttccgtgcagcagtttcagtaaatgctccgcgttctccaattggcccgactcccaaaaggtggtggccaattcgtaatacatccgtgacacgaaaatttcattgcccaactcgaccgcctcgttcaacgcctcgttgagcacctaaaagctttttaaaattaaatttaaaaaaactgtttgctttaatgaatgtttctgtcggttggcggacgacgccttggaattttgttttgaaataaagtaaaaataaaaaattgaattttaaaattcaaaaaagtaaccaggtagaggttgctctttgaaaattatgaagcatttagattattttacgtcatgcaacaaacctgaaatcccacttttcatttaaaaagtttagaagatggatgacatgaagggagcagctcgtttccccctgccggttccccccccccccctccattgcccgtctcccccggaaatttaaaaaaaatttaaatttattgttaaaaatttttcaaagagaattcgtagggcccccgaaatgaaactcgtccctccccctttccatcgggaccctccctggatttagtagatttttacccataaatttatacatccctttcctcccattcccttttaatttatacgtcccctttcctcctcccccttttttggccacctgaacagccgccgcccattcgccgtactttcggtgcagcatcgcccgcttcactttgtccttcagcgggtcgtcgtccagcacgtcggttcggttgaagctgaacaactgtttgatgctgaacgccatcagaacgacggcaccgccacggccaaagggaaacaaacggcgcaaaaaggcggagaagcgggccgagaaagtgccatggtggtggtggtaattgtgctgtttttgacgagaacggacgtcaaagaggcggaggggcaactgtcaaaaggagggagaagagaatgaaatgggaaaaaagtcaaaaattgaacctaataaaaggcatttgatcattgaatttaaatgcaaaatttggaccgcattttaaggtaaaaaaactgccaaaatatagttatgacctataagaaaaagccatcgccaaagatcactaatgggaaaataggacaattcccaattcgatgtatatttgatttcgtttttgcattttttcaccgattgtccggcgacggccgcgcgttggcacaaaaatgcggcgacgggagacggaaaagaaacgagcgaaggatgggcgaacagaggaacagaacaaacggaagaagaagagacggagcagcagcaaaaggggggccaaaggcggggcaaaagaaacgatttcaagggagacaaaggcaaacggacaacgaaattcatcggaaaaagcgaagaaaaaggcaaattaatggacgaatccaaagaaaaatgatcaaaaaaatagggggaaaaaaccgttcaaaacgaaaaaagaaaacaggaacattaaatccgaattttattccctacaaatacaccggcagtgaaatgcacacaaaaacattgaaacaaataaaataataataaaagtaaaaaagcaatgaccataaaaacgaagccccgtttccgtcctttgcttattcgatttgatttttcggtgcaaaacttgcaccacatgagcagcccaaagtggccaggggattgtcctgaaatggatgacaaaaattaataatttttgttatagtgaagtaaaattgctaggaaatgcctggaaggccaaaaaaaaattggaaatgagtcaggcctcaattcttagaaaataaaccagaaaattttgaggatttttaagtcaaatccagtgataccaattaattttcggcctaaaatcccttttttaacctccctctttggttattttaagggatggaataatgctttttcggcccccatggtttgtaatcgccacttcctcaactgaccgttattctgaacgcggaccgcatcaaatcctcagcaaaatcaagctttgagccccgcaaaaattgaagcgataactaagcggataaaaattttaaaaataattcgtcaaaagacggtttttcaaaacttgcacgaaaccttgtccacaacaacgatggctccctccgacgctttaatcacttcgtcctccgcctcgtccaatcgcttgtcgagcgtcaatttgtactcgaaaccggaacagccgcccgagtcgacacaaatgcgcaaatgctcacccggggcggcgatgcgacggagctaaaatgaaaataaaaatgaaatgggttatgaaatagaaactttttggtttctttttttaatgtttggtaaggcactgtctctttcaaaaagaattttcaaatctgatggcctgagtaaatttgttcaaaatttaaaggccgttaaatttccgagcaaagtatcaaccaggacacacaaagaaagcaagaaaatctcatcccaattcgtcaaaaaaaagtcacgattatttaagcaatggattttcaacttggtccgctgccctttgtgtgataatgagcagaggggtggaagaaacgcttgatgaagcggtggaaggggacgatgaaaatggggaggaaaatggcgagtaggaggaagggaaaagtcggaggaaacgcgattttgatgaaagacggacgacaaaattcataattctaaaagcaaaaaagcgcaataattgtaattttaagtttttaagcttttaacacaccgcaaggaaaaaatttcttttcttctctttgttggcgtttttttcatgtcttttacatatgaaaaaaaatgaaatttgcaaatgcaaataggtacctaattttggtcgtaatggtacaaaatcaaatttgaaagctcataattttctaattatgcgtctttttgcttagcattttctttaaaaattcttacttttaaaaagttttaaatgaaatacatatataatgatttatttagttgtgataaaagtaagatatggctaatcagtgatcaaaataaacaacacaaaaaaacggaacccgtcagttgggcgccggcacgtttgggcgccagcatttttttggttacaacttttttctttgtcaaccaaatccaatattgttggtatcattcgaaagccctaagtgtcttctattagcatgccaaattttgaaaaatttcattaaggttcaaaaaagttatggtcagaagaatttaaaaagccaaattttccaacttttttggcttgaactttttttaaacataacgaaaatttttagatttttgcaggttaatagagcatgcgaagggctctcgaataataccaagattgttgaatttggttgacaaagaaaaaagttatagttttattatcattcgatagctcttgagattctctattagcctgcaaaatttcaaaaaatttcatccgtttacaaaaaagttatggccaaaaaacctcaaaaattgactttttcttggctttttcggcgccgcgtgccataacttttttattgttgaatcattaatttctattttggcatgtaaatatagagcacacatagagctttcaaatgatgccagaatggctaaagttgactgacaaataaaaaagttatagcatttcaaaatttgcggcgccgaaatggtccgcgccgaagtgaccccgacccaaaaaaactaatcagggattttttgaattagcgctcatataaaaatggcgttaaaacaatttccttaacattgaaatgcgacgcaaaagaatacatataaaagagaggtttttattcagtccttaattcattcgcattattaaaaattttttgtccaattacaattaaaatgacaacatttattctatttaaatttttgtcaaattatattagctctaccgaacacatatatacatattatacaataatccatctctgcaaacacattgtttcaatggcccgcagatcgaatgccaccggcacgaggaagccgcaccgttaccgtccaggtacagtaacactgcactcatcatctgctgaccccaaatgctcactaatcccatctctccccatatttaggcaccgttgcccgtcgcgagattcgccgttaccagagcaccactgaacttctgctgcgcaagttgccgttccagcgtttggtgcgcgaaattgcacaggacaacaacttggagatgcgctttcaggcggtggcctttgcagctctgcaggcaagcaaaagcttgttgtttaatcattttactaatttggcatccatttcaggaggcttccgaagcttatttggttcgacttttggagaacaccaatttggctgccgcgaacgcaaaccgtgtgaccatcatgccgtccgacattcaaatgtcccgtcacatccgcggagagaccctctgaagagccgaagcgagaaaacggagatgcgcaagaactattgggaaatcgaatgtgatcatgatcatatcctataattattgaatgtttgtaaatatacatataatcattcgtatgtgaatttattgtatgattaaagaatgtgctattattttgagtctatggcaattcaaacaaagtttacagacccgggattttgttattccttggttttactggattcctacaaaagaaaaaaaggcaagaagggggttgagcggttttttggagtttttgagggcgctgatcacgaatatatgacactaattcaatcaatttcgagcccctaattcgaacaattaacattgactgttgctggagggtgttggccatttgaatgctacatcatcgacccaatcacccacagaagattctgaccacccgatctccattttttaaattagctttttttcaattcgcggtcactgaccagcgcctccgaaagcacaaagatcacaaaccctccccttttttgcctcttttgtcggactaaaatcgatgattaccaatttttgactttcacaggggagtgagtagccttccgattagcaaaaagtggtccatccccaatttctttccctggtggaatgaccatgtacagcagcagaagtgaactgcctccagcagacatttattaatcgcgagcatcagaatggacaattacaatacaataacataggccaacaataaatacaataatttcgcaatgagtgcacacacttacaaacaaatcgcaacagaatagaattggagatcaaattgagttcactccatcgcgtcagtcattctttgccattagtctcttccgtataatacagcaaacggtgttccctcgactatgcttggctcgattgcggcgacaatgaagaaaatggcgaccaaaatgatgacgaccgcagcaaaaacggacgcagcgattgccgctcgatgagtgctggtcgtttgtctgatgctgctaataaagccgtaagcgtccgacattgtggattatttgttgaaaaaatatcgctaaacttttataatattatggttgtttatatattatagggtatttttctaatttaggggacagatttcacacattttttcaatattcatttacattcatattcatttttgtattgaaacactttgtctggttgttttcagggtcgctggttatgattctggtatccattt

SEQ ID NO: 942 - DNA, 1453 bp, Heterodera glycines
tttttcggtttatttcgattttttttgaatctgtttattttttttcaaaaaagcaataaactattctattaatagaaaaagcaaaaatttcctctgagtaaaattgtagagctattgaaactctatattgcgagctcaagccataactttagggccggcggtgctgataagagccgccggaggaaaattttaagaatttttaatgattttgttaaaaaaatggccaactgatttgtcaaaaaagtcggtcgattgtttcggttttttaattatttcgtcgaacggtttcggttaaaaaaccgaaaaaaaccgaaaccgaaaaaaaccgaaaaacaaaaatttctcgttcggtttttttcggttaaaaaccgaaaatcgaaaaataccgaaaaaaaaccgaccggtccgatctctaaagtgtatgaatgaatgaatgaattgcgaaaaaatgtgtgaaatctgtcccctaaactagaaaagtactgaataatggcgctatttgccttttctaattcgtaaaaatacataggtacgtacatatgttctgaagcactttgaacaaagtctcaaaaaagccacttgggcaaataacgccaatttaaatgaacaaacaaaaacacaaaatacataccatcaattattaattattattaaacaaaaaatgaaccgcaacaaagaaatgggaaaattaacacagagatgtaaaaaaaaggtccaaaaatccagaaaaggagaaataattgaaaagtcagttaataaaaaattttttttgaagtcggaaataaaaaaataaaataaaagcttatgggcagatattgaggaagaattgaaaaattttgccaaatcaagtccatgaatatttatttttaattttcaattttttgaattcagttgagggccaaaaaaatgtgtcggtcgatgatgagtatttggatgatcaaaatgccgccttttctggcttagttcacaatgataacgtcgatttaagtgctttggacgaaggtggaagcagcgatgagtgttcgatgttcgaaattttagctattttttgattttattgcatttaaggcaaattcgcttagaaatcggttcaaacatttttgtgtcttaataaaaaaaaaattcattttaaggctttctggtgaaatggctcaaaacttgttgatcattaaagcaaacatgaacaaattgtttttgggaccatctaatgatatcgatgacgaggaaaaggatgatgaaaataatgataacgaggccaaatagttatgagaacacatcattcataaaaaaattttttttgtgagattttttggagtttattcaaatgaaacccccgcccccgtccccgggggcgagaaatttctcacccccgcccccgcccccgtgactctgacccccgcaatcccccgcccccgcgaaaagacgcccccgcccacggggtccgaaccctaat

SEQ ID NO: 943 - DNA, 5508 bp, Heterodera glycines
  unsure (1)..(5508): unsure at all n locations
catcagttgttcaaaagacgtcaatggttttgcgtcagtgtcgtccagttgtcggatgatcgctcttttaatgagctgataatcatgacggtttgcgtccacagctgaatanaagctctctcagcctttccaaaacatttggagcgtagcgctcgcaatcgtttatcttcgggccactcttctgtagcaacatcaaattgctgaagaaagcattcaccgaatcagaacctctgtgccgtccaggttcggaattgcgttgagtgtcatcgtgtatgaaaaaccgtcgaggcttcgaatggcctgtgccatcatgccatcgaataccagcccagggtgggggaccggttgctgattgcactcaggacgattttgttgattggctcttataggtaggttttttttgaaatttgggtgttgctgtccttggtgaaactcaaatccttcgtcctgggaccgacggtgtccttgtgtataggcatgtggcggaggaattcgccgaacgtgtgattgttggtcctcaacaaccggttgctgtgtgagccttatctgctgttctctctgccgctcaaaattaaccgcagcattttcgtacaactgaccattgggtcggcaagcaatcggattgactgcttgtgggtgattcaatgcagggaaattatgcgcgactgggtttggcatttgattttgcatgaaattcataaccctaatttggttttggatgacgctcaaattttccggaagttgcattcttaggtctcgctgcagagcgcttagattttgctcgttaagcggcgttgaaaacgctcgcaacccatgtgcgtccaatgcatcgtttccaaaactccctctatccccagcttcaactccattttcgaaattttgttgcaccataccgttgacattttgttcgtcgccgttttccatttcgtcgtactccaattgttcctcaggtgcgctttgttccattcctccgtaaagcaggcgacgacgaatctcagtctctgctaaaacattttcatgattgtcgtccagtcgctgattttcgttgttcgctaagggcgagatcggcctgccccccgaaactccaaaattttcagccctaaatgcgtttccatcgcggtcaacaatgattccctggttgagtgccctcgtccgggttagtggtggcgttcggagaacaggcattttgtttgagctaccgcagaggtactactcaacaaaacaaaaacaaagttaaacggcgatcctcgaaaaacggcccgatttgtcggtgatttgtcgatgtccacacttatcgcaacaatgcgttatttgtgggacacaaattcaactcgaagaaaagcgcaacaatgcgttatttattcagaatcgcagctatgcgtttttctgaaatgtcccttgctcctcgtcctcactttgttgctttattgcccctggcagacaggcaagcaataaccggcgagataacgaaccccggcaaacgggctattcgctttgatgaacaactaagtaaagctccgacagacggactacttcacttttgttgaattcccgtgaaccacaaatttctcccttccaattttgttcccgagctcgcccttttccgaaaaaccaaaaattcccggcaccgcttactcagttgaccaggagcgccacgtgcaaaaattggagtccaatttgtcggaggggctcgtctcttttgctttgcttcgttcggcttttcctcttctcgggccaaataattaattagcacagaaaggacaaacggggccaatgcttattaattaaggacggcgaaatagtcggggacagttcaatttatttaatttaaattcaatgcgaagacgacgaaaattaagagtccacacacaaaatatttagaggagaaaagtctgaggtccaaattttgtgaacaccaaatagaatgaataaaggaaagcacaagggagaagaaaagcaaaggaatatcgattgagaaaaataggaataaattagagagaaaaacaaaaggaaaataacatataattagagaattgaattaaaagaataaaaggcagtcagaggcaagggaaacggcacataattagagaagaaaaatattatagaaaagccaaattatttcccatttaacacatcacaaccccccaaagaaaaggcgtccctgccgataagttgattcggcatccgatcggtggtggtctgagcaagctagtgccggcggtcgcgtgtcacatcatctcggcggtgtcctcctcgaacgaatggttgcgattggcggttgtcgcggcgtctaaacggcgatcgagaacgagaattcgggcggcggtcgcatagacccaaccccccacgagccgaagaagaagccgcagtctccgggcggtcgcatagacccaacccatagactctcctagtgaccgaaacactggagcggaccgttcgaatcccaagttgtctgttgtttggccatttcggaatttgtgtgctgatccacgccgacaatgctttaatgccattttcagtcatccatccatctgcattgacacgactccgatcaaaggaatcgccataacgccagatttcaatcaaactcctaccaaacggagtcacgaaaacaaaccaatcgccgagcagttcggaaagacggccgatcatttcgtgataggccaaatcgtactgacgaacatacggtggaggcagccaaatgaacgaaacggacggaaaacgggaacacagttgttggatccgttggcactgttccatgatctgatcaacggtctcgtctttgaccagcgaatcacgaccgaggatgatcattgcggcgcgcactttgcttgagaagacgcattcgctaagtggacggatcacttcagttaacagccctcgttccgtgccaacaaattgcgtttgtgcccgcatttcgggaaagagttggaaagccgttgagtcaccgatcagaactcgtggagtctcaactagtgtgcggctacgatgaatggcgatggaacggactttttccagaatccacccggtctgttcgaacaatgtgctccaaccgtcacgctctgattcgggcaatttgggcaccgcttccggcatttcgacctgaatagtttcgggcttttctttgggctctccgtcggaattttgcactcgaatcttctcaaatcctgacgattggagaagctttttggtcaccgcgcacttttcacaccacattgaccaaattttctcgacgtcttcttctcgtggaagggcaccggcacgaatgttgtcttttcggactccctcgtaaacgaccaactccatcccggattcagagccaagtataagatgaacaaggctttttgccgccgcggaagagactgtggcaacggaacggaggatgaaaaggcacaaaatggcctgcagaggagtgccaatttccacgtttccgggctccgtttttgcgtccaaaaccgggtctaactccgcgcacagaagttttccacagaattcgtggctttcgccttcgcacttcatggtccaaataagcccggcagtttcgtcttgttgcatcttccgcccacctaaaatgtcagttgtccctaactgattttggtcgaaattttctgctgagttttttgtgattccctttttttgccattcctcactcgacaccggagtttcgtctgtttgttctcttttttgaactattatttctaaatttgcaagcaaaatagtagccaaaatgttccggtatgggttttttccgtgtgggagcgttgatatgtcgggaactccgactggtacacggacgagacgttctattgggacggtaatcggttcagctgaacttttatcaactgggacaacgtctgcggacgattcgaacattttaacaattttgtacggcccgaactgattccaatgcagttttttgtgctgtattcgggatttcgatccgggataaatgaccatgcatttgtcgccaatcgcaaatttgtttgcggtcacatttgggcgagaatcgtaccgattttttgtttctgcccgtgaaatttcggcatttttacgcgcatattcgagaattaactgcaaattttctttaaatgcttgtaaatatgtttcctcgtccacggtgtagaacgggtttccatactttttaaagtctatttcccctggaaaatttgcaatttttccgaacatcagttgaaatggcgaaaatccagtgacttcagacggtgtagtgttgtacgagaacacaacgaaaggaagtcgttcatcccaactccagtgcgaggacgtagactttttaagcatattaagcaaagtttgatttgcccgttccgcagctccatttgcttgtgggtcgtacccagcagttgtggtcttttcgacgcctagaatggcggaaatttcttttagagtttcgttgacgaattcctttccttggtcactatggaatctttttggtgccccgaacagcaacacaaactcttttacaaatgcttttgagactgtgtctttgcttttgtccgggattggggttgcgacgatgtattttgtgaagtgatcgattgagacaagcacataccgattaccgttttcggacattccgatcgataaaatatcgacacagacaagttccaacggttcggacgtctggattatccggagtggcggttcatttgaccggggttttctgctgtgtgcacaaattctacaacttagacaggttttaacgcagtcgccgaacatatttggccaaaagtacttttccgacaattgacgaaaaagtttttttccactgaaatggcccgaacaaattcctgaatgacgctgatcaataaaagtttgcctgaatttgctggggacgaaaagttttggtccttcaggtttcgatggtataaaatacagcaatccatccattatggaaaatttatgaaaagtatccaaaattttttgtttcttccggatttcgtctggcaaaattcgtttttgcaagaagttgtatatttcgctgaattcgctgacctttgtcgcttcgacccaatcgattctctctttttccccgatctcatccacttccagattcttttcgccttcattctcttttaatttacagacaaaagctgaatccgtgtcaaaattctcagtgacttcacttattaaagcaccggaccgtgataaaacatcagcaacaatgttggatttcccaggactgtactcgacagtgagagtgaatcgtgcgttcaattccattaaccagcggtcaactcgagagtttcctgtttgtttcttactccgaaacattggcggaagcgctttatgatcggtgattattttggtcggaattccggtaataaattgtgcgaatttccaggcaccaaatcgaactgcaagagcttccagctccgttgggcaataattactttcgtgtttactgcattgacgtgatgcgaagaaatttggacggactcgtttgttctcgtcagcttggcacaaaactgcggaaatcccaattttact

SEQ ID NO: 944 - DNA, 4969 bp, Heterodera glycines
ttttactcgcgtcggtgaggatgatgaaacatcgttcagcatcattcattgcgcttttgaagtccgggaaatagagaaccgcatcttcaagaagtttttctttcaatttctcgactaccaatatttccttctctcccaaaacaaatggtgtgttcttttttaggaggtgaaacagaggtgcagcaatctctccaaagccatagatgaatttccgataatacgtcatgaacccaagaaatgaatgtaattgctttttggtcgacggcaaaggcagttcaatgacaggccttactttatcggcattcattttcaaaccacggcgagttaacacatgtcccagaaatggcaattcggaggcagaaaaacgacatttttcaattttcaatttcagctcggaatcttttatccgctcgaacacaatttctaaatgctccaaatgctgttcaaacgattctgatgcaaccaaaatatcatcaatgtagacgaaaacaaagtcattaatcagatcctcaaaaagccgagacatgaaccgttggtacgtcgcaacggcattacaaagcccgaatggaagaacggtaaactcgtgcaacccgaattcagtaacaaacgcagtcttttcaacggacttttcgtccattctgatttgccagtagcccgaaaggaagtcgagagtcgagaagtatttcttttctcctagtgcgagaaggatgtaatcaatgttcggcagtgggtatgcgtctttcactgtgaccgaattaatccctcgataatcaacacaaaatcttaagcttccatcacgtttcggcacaaggacaatgggacttgcccatggcgattttgatggtcgaattaatcctctgcttaaatagtcctggagcattgacgaaacttttttacgatgtgcaaatggcagtggacgcatccggcctcgaattggtgaggcatcgccggtgttaatgaaatgctgagttatttcagtttgtgtcagttcgctgtcatcgagtgcaaaaatttgttcgaaaccaattattaaacgttccaatttgtccgcttcgtgttgctgagacatgccaatacgagttcgtaagatttctttgatttgttcagtgcgtatgttttcattttcgtgtgtgacgctgctgacgaagaacggagggaaaaacgaatgttccaattcgtgccattcatcgacatgctcgaccaatgcgacactttcattcgcttccagtgtaattggaattgacgaaaagtttgtgatcggcacagcgatttgtccgtttttgcaagatgttaaagtaggctcaattcttagttgctcatccaaatcatttcttcctattacagtgacttctttgtcttcttgtccattggccattgacaattcgacaagtgtggatgattgaggcagaagtgtgactcgatagattatatgtgccgaatttgcatgtgtttccatcggggagaattcaacaacattcatgttgactttgtcgatcagtttaaatcccaattgattcaaagcattggttccgaagagaaggtcgtaaccaaatgaggattgagcaacaaacatgcgaactcgcgccgtctgtgttcctctcgtgattggcagacaaacgattccgaaacatttcacttctttaccatttatgtcaacaatgcgtcgttccaaatgggaaataatatcatttttgtccactttgtccatgatttgtgcaaaaaattcggctgaaatcagtgaaatttgcgcacccccgtccaacattgcatccgactgtcgttcgaaaacagagacttttgcaacgattatctttccaacaagagggcttccatcagaaccatcgacatcacttgtcttgttcactgcattttgaaagaaactttcaatttgcggcccgtattcggcattcacggcaccagccagtaaatcattccgttttggtggctcgttgttttgctcaacgaggtaattatgacggaggaaattccttgacgccgggaattgttgtccatttttgttaggggcttgcctattccaatttaaaggcgcagcgttagcccctgaaccttggtgttttgcgatttgatttcggttctcttgaaaggaacaaaattttggtggagtcgtacaattccgagagacgtggccattttggccgcagttatagcatgtaacccgatatgacggatttgagccaagctccggtttgggccaattatttgagcgattatttggtgcataattattggctggacccgttgagtttgtcattgggcgttgatactgttgattaggtcgcagtgcacttctagcagctaactgagttgcttcagctcgtgcggcttgcgcgataaactcatcaaatgttgcgcctggtctacgcgtcatttcaagagtgatcgctaactcagggttagacatggcccttataaagtgcatgattgaatactcgtcgtattgttgttcggttagacccggataagcacggcgaaccaatcccgagattctgtttcccagctcatcgatactctcgttcggtcgacgccgaattcctcgcatcagttggtcaaaagacgtcaattgttttgcgtcagtgtcgtccagttgtcggatgatcgctcttttaatgagctgataatcatgacggtttgcgtccacagctgaattgaaagctctctcagcctttccaaaacatttggagcgtagcgctcgcaatcgtttatcttcgggccactcttctgtagcaacatcaaattgcttgaagaaagcattcaccgaatcagaacctctgttgccgtccaggttcggaattgcgttgagtgtcatcgtgtatgaaaaaccgtcgaggcttcgaatggcctgtgccatcatgccatcgaataccagcccagggtgggggaccggttgctgattgcactcaagacgattttgttgattggctcttataggtaggttttttttgaaatttgggtgttgctgtccttggtgaaactcaaatctttcgtcctgggaccggcggtgtccttgtgtataggcatgtggcggaggaattcgccgaacgtgtgattgttggtcctcaacaaccggttgctgtgtgagccttatctgctgttctctctgtcgctcaaaattaaccgcagcgttttcgtacaactggccattgggtcggcaagcaatcggattcaatgcagggaaattatgcgcgactgggtttggcatttgattttgcatgaaattcataaccctaatttggttttgtatgacgctcaaattttccggaagttgcattcttaggtctcgctgcagagcgcttagattttgctcgttaagcggcgttgaaaacgctcgcaacccatgtgcgtccaatgcatcgtttccaaaactccctctatccccagcttcaactccattttcgaaattttgttgcaccataccgttgacattttgttcgtcgccgttttccatttcgtcgtactccaattgttcctcaggtgcgctttgttccattcctccgtaaagcaggcgacgacgaatctcagtctctgctaaaacattttcatgattgtcgtccagtcgctgattttcgttgttcgctaagggcgagatcggcctgccccccgaaactccaaaattttcagccctaattgcgtttccatcgcggtcaacaatgattccctggttgagtgccctcgtccgggttagtggtggcgttcggagaacaggcattttgtttgagctaccgcagaggtactactcaacaaaacaaaaacaaagttaaacggcgatcctcgaaaacggcccgatttgtcggtgatttgtcgatgtccacacttatcgcaacaatgcgttatttgtgggacacaaattcaactcgaagaaaagcgcaacaatgcgttatttattcagaatcgcagctatgcgtttttctgaaatgtcccttgctcctcgtcctcactttgttgctttattgcccctggcagacaggcaagcaataaacggcgtgataacgaaccccggcaaacgggctattcgctttgatgaacaactaagtaaagctccgacagacggactacttcacttttgttgaattcccgtgaaccacaaatttctccctccaattttgttcccgagctcgccctttttcgaaaaaccaaaaattcccggcaccgcttactcagttgaccaggagcgccacgtgcaaaaattggagaccaatttgtcggaggggctcgtctcttttgctttgcttcgttcggcttttcctcttctcgggccaaataattaattagcacagaaaggacaaacggggccaatgcttattaattaaggacggcgaaatagtcggggacagttcaatttatttaatttaaattcaatgcgaagacgacgaaaattaagagtccacacacaaaatatttagaggagaaaagtctgaggtccaaatttgtgaacaccaaatagaatgaataaaggaaagcacaagggagaagaaaagcaaaggaatatcgattgagaaaaataggaataaattagagagaaaaacaaaaggaaaaataacatataattagagaattgaattaaaagaataaaaggcagtcagaggcaaggcaaatggcacataattatagaaaaatattatagaaaagccgaattatttcccatttaacacatcacaaccccccaaagaaaaggcgtccctgccgataagttgattcggcatccgatcggtggtggtctgagcaagctagtgccggcggtcgcgcgtcacatcatctcggcggtgtcctcctcgaacgaatggttgcgattggcggttgtcgcggcgtctaaacggcgatcgagaacgagaattcgggcggcggtcgcatagacccaaccccccacgagccgaagaagaagccgcagtctccgggcggtcgcatagacccaacccatggactctcctagtgaccgaaacgctggagcgga

SEQ ID NO: 945 - DNA, 1045 bp, Heterodera glycines
tagaaaaatattatagaaaagccgaattatttcccatcttacacagctgttattgttgtttttgctccccttttttgttgcgatgtttcggcatcgccccccgcggcggtgtttcctttgctccatctgcaaaaaaaggtgtaaaagtgcgcgcgatcactgctgctgcagcagttgctgaactgatctgtcatggccagggtggtattaaatgatggatttggggagggatttggcaaccgatttttccaaaagttttaatcggcctaaaaaatgtgcactgtggtggctttttcgtttggccataacacaacaaagagcggcaatggcgctctggcgggggggggggaaatttcagatgatcatccgaccgcatggccacaaaggcatttatgggccacacaaaaacatatgcgcccctgtgatacattggtaatgcgattggattgccgacagcaaatgttgacgaatggcaccgccgcacacccgcgcggctttctcccgctttgcccccatcagcggtgcttattttttggttagtcactgatgccgaattaaaattcattttcaattcttatgcagctcattaaacccgaaatttccaaagccaatgtttcgcgaacagagctgcaactcctacacattaacctcatttgtcagcacgctttagtggtccattttacagataatttgtgggcaaaaaatttattccatttgctgggagggcagcaaaattgacggatcaattcgaactcatcaaaataaattcaaaaaaggcattcgtggtggtaagtaacccttatcctccgcgattcccaccaacatcctgcttaataataactagggttcgaagttgtatgcgctaaaaaatgccaaatatgcgcataaaatatgcactaaaaatgcttcaaatatgccctaaaacacaaaaaatgcccaaatatgcactaaaatatgccttaaaaactgccaaaatggcttttaattctcaaaaaatgccaaaattttgtgaaatttcataattaacttaaaaacatcaaaacaa

SEQ ID NO: 946 - DNA, 1135 bp, Heterodera glycines
tggtgccagtcttggtaatgatgcgtatttttgcggttagcacgcaacaaatcgagcgcattgttctggcacgacccctccccctcccatccccccaggggagcacggggaaaagagcagcacaataaaaacaacaagttgttgtgtgtgtgattgttctgattggtggtggtgctgaccaaattctgcatctgttgctgctgctgtttttgttgcttgacaaagaaaattggaagcggcgacaaaatgagcccccgtggggagaattttcccgtttttgttatgctgtttagggccgggccgcccgcgcttcgctccgcgccctccctcctctatgttcaacaactattttagagggaaagagagagagagagttagaatagtcagagagtggaaatacaaaatgtaaaacatcatacttttaaaaaacttgatttttggaaatttttgcgctttccctgcccaggggggggcggcggggggccaaggccatcctcacattttcacccctccgtcgtcgagagtgggtagaaaggcgcgcaacaactgatgaagaatgatgatgatgatgatgatgtgggctgggcggagtcgggcgagggcacaaattttgtcctatttaaagtctgacaccccggaggggccatttttaaacggtggcacccgtcgctcaaacaaccgaaactgaggacggaacgccactagcaccgaccgcactttttctgttgttgcgcgctgctgctgttcacgccattgccccaagggatggacaaaaatggaccgaccgatcatcaattattttaattttttaaattttgattttaattccttttgggaacatttttatcacaaaaaacaaccacaggcaggagaaatttcacttttatgcactgttgaaatttttctttttagaggcttttcatttaacacacttttatgccaatgttttctttggccaagattccggcatcgtatgaaatttttactgttccttagactcagccaatagattaaacgacgaatttcgagccaaaattggccagggatgatcaaattaaagcagatttctgcttctgatcaaggtgaaaataaactcatattatgtgaatataagccacatcaattgagtctttgc

SEQ ID NO: 947 - DNA, 954 bp, Heterodera glycines
aaattttcgttgttttgtccctatccctgaatttttacttcatgtgatattatacttatgaatttttttaaagaatttcatgcaactctgttttgaaatgaacgacctctccaactgtcaagcggtggtccgttccattgagaagctgtacaatttgcgtatgatttttttccatttattttttaaatgtaatttccctcacaatgaaattaattgatgaaattaataaattttataaagactccatagtttttaaaaagaattttattttttctttgaaaaatttaaagatttttattttaaaaaaatttcaaaataaaaaatccgaaaattttttttgcattttttgaataaatttggggtttttaagcccattgggtattttttttgcaaaaaaatgcattttggttacttttttgtggttaatttttctaaatcattttacgcccaatatgacaaaaaatttaattagcaaacaaatcacgatttttctgaattttttaatgaaaattcaaatgttttttgggaataaccagggattcgataaatgtacattttatgcatttaaataataaatttacttgatacaccctgaggtcacctgcaaatatccgggaaccctggtcttgtcccatttcttttactgaaatgaaataaaaaattcaaagattttcagtcgctttgcaatttcccgagggcctcacaatgttcgcctgcgtaatcgtcgacattcgcagcaagcacacctgcgctgagttcatcattcgggacgacattcacaaattttttgggttccagctcgaggagaatgtgagtatgttacttacaacctaagtattaagtgttttgtctatgccgaaagtgttaatcgtacaattaaatgttcaccttgataagtgcgaggaacccagtaacgcggaaagtgccgcaccccctcccctgcccccccccccc

SEQ ID NO: 948 - DNA, 9959 bp, Heterodera glycines
ataggatatcgttgaatgaaggatcgccctgacgaatctatactgatctcatgactattagctgcacatggagatggcagttagacccgtcagagaaactcttccattaagtaggcggaatgcacgcgacttccttgtgtggagtagcccatttaagcaagaaaaaggttaccagcggaactgcctctcgctcccaaaactccacataagcaattacgttggaacgttgcgtctccgtgtccgtactctgtgggaggagtctggtgtctcggaagtgtgacagcactccttcctggcccccccccccgctgtgcgaggagcccggtaacgcggaagtgccgcaccccctccgccgccccccccccccgctgtgcgaggagcccggtaacgcggaagtgctgcacccctccctgccccccccccgctgtgcgaggagcccggtaacgcggaagtgccgcacccctccctgccccccccccgctgtgcgaggagcccggtaacgcggaagtgccgcacccctcaccgcccccccccccgctgtgcgaggagcccggtaacgcggaagtgccgcacccctccccgctcccccccgctgtgtgaggagcccggtaacgcggaagtgccgcacattatttttcaggaattccgacaacgtggacagtactacgcacacatgcatgcgagaaccgtgaatgtgagagtgcttgatgaccactgtgccaactgacatgtgtaacagcttccattctcttacccactatttacaggagctgtgcggaaagtgccgtacacccccccccccccgctgtgcgaggagcccggtaacgcggaagtgccgcacatctatcaaaatatttgcttttcatcaaaatctcgtgacataaatgcattaaataagaagtttttattaatatttcttttgtgcgagtacttatgttgtttcacatctaactttttagagtgggtgactctgatttatcttcctaaaaacgattaaattaaaacgcttcactttgaagtaaatttgtttgctgtataattattctatatttataataaacattttcttttgtctttcttttattggttcatttccacatatctttgaaagacgaaattacttttctatttaatcgtgtttagcgattaaaatgccttcaaaagaacagaaagcgagacaacgccggaggtcgcgaactgcggaggatgatgatccctcattggggttaccattacttcaaagtgaagcgttgaccggttcaaattcaaaaaaacagggtcgccctattaaaagacaaagtgatattttggaaagttcggtatcgtgtgaaactccaaaaagttctcgcacaaagggcaagtcacaaggaaatatttcgcccgttcaaaaacgagcaaagacttatgatttatcgatagtttataatgcaattatgtcacctggtcatgattttaaaaatatcgtttttgcgaccgagaaaaatcatagttgccagatctggcgtaaagctagccttaatctttaccaaaatgactctgacaactctggctttaggcaaattgaaaaaaattggaataatttatcagaatggctcaatgattcgtttatttattcatttctctgctatattagcacgctatcgacgaaaaatgttgttgttgttgaccccttgtatactgatacccagcaaatgccaaaaattcttttatctaatatgaaaaatatagtctttattattgaccagcagtctcctccagagatattacttatgccactcaatttcccagggcattggactttacttattcatgacataaattacggcacttttttaatggattcattgcaaataagcgagttaaattttgatcgggtattgcgtgtcaaagatataatttgtaaattgtgtcaaatcaattctgatgatatattaatacaaaattttcctgcttcaaaaatgactctgcaaaatgacggttgcagttgtggtttttttgtttgcttatatgctgaggcatggctgattaataatcaatcgcttattttaccaaaccttgatataaatttggaaaaaagaagaattctttggcatataaacggtctttataatcgtgataatgtagtatatcacccgtgctcattgtttgttggcagcgaaaatgaaaatttgggttctttgcatgattcgcgtgattcatctatgtccattgattcaaacataaatcaaactccagtcaaaagaagaggacgcccagctaagaatcgttctgggtcaggacggccaaaaaaaacagagaataatcaaatattaatgccagttttttcgcacaattcttcccttgcaactgatttaaattattcggactgctctgattatgttagtgtctcttcaaattgtagtagtaacagaggaggtcgtccaaaaaaaaggagtggtggtccaggaagacgacccaaaaagactgttcataccaatttaaaagaaaatattaatccggcccaagaaaatcacacatcgaatactcaacctgtaatttctaatgaattattgagcttattgaattctgattctattgatgtccctgactcgcaacctgtagccccaggacgtgtttgtattcaatcaataaataaagatctcattaaagagacgtggtcttctcctactgatatgttcagtgatgatttaatctactgttttcaacgttatcttgcatcaaaaatagctaacaaaattgttgcagtagtcaacccacaatacacagacttacaaagttttcatgttggtcctattgctttcccatacaatgtgattgataactgctttaattattcagcgaactatgacattttgttgatgactattttctttaatggtcattttgctttaatcatttttgaccgatctgaccgagataatttgatttgtctatttattgattccttgcctcattatgatcggctttttgatcctcaataccctggctatgatgtgagaaggattgaaataattaaaaacggaatttgtgaattgacacctggtctgactcatgatgatgtggtaattagggctttaagttcatcagaatttacaccccaacatgacggaattaactgtggcgtatttgttctgctttattcggaggcctatttaaataattgttctctgaaattcccaaatttaaacattaactttgagaggcggagaattttgtggcatttggcccagctgataaataatgataatgtagagtatattggaagaaatgctaatccacatcctcaatcccttcctttatataatgtggagtctaatattgaacaatcatgcccaagggatggagatggagcgtttatttgcgtagaacctgatatagatagaacccctgatgttattttgaggccaccttccacggtttcttcgattacggcaacccgccgatctatccgacttcaaagaagtgttagtactgaaaaatcttctgataacaatgtgaatactcttccaaaaattgagcgaaatgacattacacagcgttgttatgtgaaacaccaaggaaacccatgcgcagatgtgcgtgcaaagcacactactgagtattatgattcaggaaatattggtgacaaaatatgcgaatattgtaacgcacttttattgaacagcgaggcagaaaaaaggaatgggaaattttcttcgagtttttgttgtaatcacggttcagttgttttgccctcctataaagagcatccaccaacacttcaacgatttttgtcagggcaagattcagagtcaaaagaatttttatcccatcaaaatgtatacaattcattgctggcctttgcatcaatttctgttggctattacgaatcgtctcttgatggtgacaaatgttatttattgaatggagaatttacacgaaaaattgggttattacctggacaatttgctccgtcttttgcgcaattgtatatacttgaccctatggcggcatttatgcaaagaacaaaaaatatcgaatatggtggggatagagtaaatgaaaaaacaataagaaagcttgattttataattcgcaaataccatccgcttgccaaagagctattgaatttccatgcacaataccaaaagactttagacgaacacggtccagaatctgttctcaatttccgtttgacattggttgaagctcgtgaagcaccattaaatataaaggaccctttcctccatccaagacaagccaatttacccgacgaggggaattctttattttccatctgggctgaaagcgatcagccaccattattaaaaggtatttggatcactacagatgaaggaaagcttcaaaaattccgtccacatcacccacaaaccgattctctttgctatcccttaatatttccaaatggcgatgacggtttccatccaaaaattccttacaatatcacaaataaaaaatgcgaggatgaagctatggaacttgatgtcgaatctgatgaaaacacttctgattctgacgaaaaagcatccgatgataatttatctgttgcaagttcagttgattcggttgaaaagtgcggaaaacgtcaattcttatcagttaggtcttatatccgatatcgtattgcgctgcgaaatgacaagaagcttcaccatatttggagtgctggtgggggcctgagtcaaaaatttattttggattattcagctcgtatcgatacaaatgttgcaaattatttgcggaagcctgaattaaatttacgcagtactttacctgaaaatgcgcttcgctggctttctcgtaatgcggggcttaactcaaccgaagaattaggtagcgttgttatgttccggagatctgcgcctggaacacgggcatactttcaacataaattttacgatgctaccactattatgtcaaggtttaagaggccagggtttgcatcattttttttaacttttacgacaaatcccagatggccagagatttctcgaaattttcttcaccaaggtcagaggactgttgatagacccgatttaatttgtcgtgtttatgaggacaaactaagacacttgcattttttgctggatagtaaaaatattttggggaaaatgattggccaggaatgcagggaatttcaaaagaaatacggcggtccacatgcccaccgcgtttatcataccgatctgctcgcaattcctgaaaatattgacggattgatatgggcacatattcccgccgagccaaataaaaatgacagatctgattgggctatttttattcgtaaagtgcgtgaattattgccaaagtatcagtttcatgactgtgggcgtcattgcttaaatcgtaaagggaaatgtaaaaaaggttttcccaaaccgtttagcaaatttacaattttacatgatgaccggccagcaatatatttacgcccaagccctgaagatggtgggcaaacattgactgttaaaagaaaaaaaactcaaataacatatgataattcgcgagtgtccgcgtacaatccttatattttggttcactttgaaacccaccataatttggaatatgcatatgggcaaagcacaaatttgaaatatttatacaaatacccgttcaagggtcccagtttctcatacgtaaagactaacgaagtaaatggaaaaattggtattgacgagccggcatattacgccaaaatgttatatcgttcatctcctgaggcctattgtaggatcatgtcgctaaagtatgctaaattatctcataccgttattgctttgtcaattcatttgcctggtcagcagaaaatttattataagaaaaatgaaaaagagtcagtcgctcaacaagtacagtcaggcattttgcccgaaactcctttaacagcgtattggaaaatgtgtgaaacggatcctgatgttaggaaaattctttttgaacatatgcccgagcaattttcattcaacagatctggaaaatattggaagaaacgaattttttcaacgaatccaaaacggcaaaagaaccacgcgaggaagccaatcattggacgaatttacccggtttcaccacgaaatcctgagttatttgcattatatttattgacaaaacattttcccggaaacccggagcaattaaaaatgttaaaccccacgcatatctgtaaaacatttctggaaacagcccgactcaggggacttattgatgacagcgatgtgtgggttcggaccatggaggagggtgctgcctcgcttaccccagcacaaatgcgtcagttgctggctaatattttaatttttggttcaactgaaaattgtctcattgatggagcactactctgggaaaaatttgtttcacacatgtttgacacacgctgcacagatgctgagcgtcctgctcgtattgaccatgctcttgctcttttagaaaaattattagttaaactaggaaaacagtgtaaagattatggactgccaaccccaacaatttcaattataaatgatccacagcgggggcttatcgagtttttcttcccccagcacttaaatgatgatgatgttgatgacatagttgacacaacagcatttgagcgtggaaaattgaacgctgaacaacagaaattttttgaaatgataaaaactgcttttttgaacccatcgagttctcgactattttatttatgcggcgatggcggaactgggaagacatttttgctgaattacattttatatcaattgcgaaagatcggtgctaaaattattcctaccgcatcgaccggcatggcatccacgcgcttttatgttggtggtactactgttcattcagcgtttaaatttggaataaatgttgaggccggaatattgccttcaattccctttgatagtttctttggtcgacgcataatagaaagtgatatcataataattgacgaaatgacaatgttggagcggacagtttttgaaaatattgatttagtctgccgtcaattgtgcactcaaaaacagcatttacctttcggtggaaaatgtgttataatttctggtgattggaaacagtcacttccagttgtaatcggttcttatgggagtgcagcgcaggttgcagcatgcatacagtcctcaccgctttacccaatattctcaaaatataaactgacccaaagcatgcgagttaatccaaacgaaatagagtttcttaaatggcttgatgatgttggaagaggagtaaatggagacacggttgcaatcccaaaagatatggttgtcgattcacgagaagaacttattggttgggtgtttgatcaaggatttaatatgccaagtagcgaaatgcttaaacgccttcttttggctactacaaatagaattgttgacataaataattcccaaatttctcagtccatgtatggaaattttcttgaatatttctcggttgacaaggcaacagatgaaaacccgctttcggtaaatgcagctgactttgatgtagcccagctaaaccagctgaatccaatgggaatgcctacccatttgttacgccttaaaattggatcaattatcgtcttactcgtaaatttaaatacttcaaaagggctttgtaatggcacacgtcttcttattaaaaaattaactgacaatctaattgaatgtgaaaccattggtaccggatcttctggaaatggtataattattggaattccccgaaaccggcatacatataaagacaaacgtccggacggtgtaagttttgaaagatttcaattccccattcgccttgcttttgccatgacggttgtgaaggcgcaaggccaaacggcagttcgcttgggaattgattttacagaagaaccttttgcccacggtcagttgtacacggcgctttcaaggtgtacaagtcgtgataatataaaaatttttgctcccaacaagccaaaagacgataatggaaaccctttgattagaaatgttattgcccctggtcttaatttggattaaaccttttaaatttaatatcaatacattttaaaaattttctcatcaatgtgcgaagagccccggtaatgcgggaggtgccgccacccttaaagtgcaaggagccccggtaacgcgggaggaaccgccacccttaaagtgcgaggagccccggtaatgcgggaggtgccgccacccttaaaatgcgaggagccccggtaacgcgggaggtaccgccacccttaaagtgcgaggagccccggtaacgcgggaggtaccgccacccttaaagtgcgaggagccccggtaatgcgggaggtgccgccacccttaaaatgcgaggagccccggtaacgcgggaggtaccgccacccttaaagtgtgaggagccccggtaacgcgggaggtaccaccacccttaaagtgcgaggagccccggtaacgcgggaggtaccgccacccttaaagtgcgaggagccccggtaatgcgggaggtgccgccacccttaacatgcgaggagccctggtaacgcgggaagtgccgccaaatcttcagagcttagctcctcgccgggggcactaaaaattaaaaataaattaacaaattacagtaaaaaataacacacccccggcgagtggggtccatggtttttgccagtttcccaccgtgctcctccgcgtggtggaccctgggggttggacaatttaaatttacaaaaaaaattgtccaaccgctaatgacggttaataaactggcctcatgtccgcgcatgaactagcaacgaagtcctttgcgcgaagcgcttatgtcaataccgattatattggggttccagaagtattttttctactttaaagccaactgtgcaccctagttaatatatacgttatattgacaaggagtttcgtttgcaaaaacaaaatctcccggccgaaggccgggagcgccctgaaagtagtggaagggtcttacaactttttgaggcgcatccgggaaaactatagaaaaaaattcagcgcggatgactgagtcccggggaccgatttctcactttttcttgcagtttttcttctacgaaattttttctttggaccgggatcgcttagctcttgctggtaggattttaagtcagactatccccgacaactttgccagcaaaacctaagccctacgttgggcgcccaaggctgtagccttggctaattttttttacccaaaagtgtacacttcagtaccaggcgaataactcgccaggggttgctttgaacgaaaaattgtttctgagcaaaaatgtatagtatttgaaaggctatccaaccaagttttaaaatttcgaaatttttgaaaaattttcaagctaggcctaaaaaacgattttttggtttttgaattttatgattttttaacgaattttcccagaaaaacggagaccactttcaagcaaccgtttttcgagctctatcgattggtgacatttttagaaaattttcgatttttttccggaaatagaaaaaatttttggcctgagcgggacatttgagtcccgggcccataactcgtcaggggttggttttagccaaaaatggccttagagcaaaattgtagagctttttaagctctatcgaacggtgtacttcattttcgaaaattttcaaaaattttcgagctaggccccctagaaattttcaaaatttttttttgggttgaaaaagaggttgaaaaaattttttctggggtaaattagggtcctgagcacaaatatgatgtttattttaagtttcagattttttggaattttttaaaaattcgaaaatatttttaatttttttggtccttggaaatttgggttaaaatttgaaaattcataactcaatggaggactggtcaatttaagtgaattaaagctttaaaaatagcaaaaaatcgggagaattttatgagatttatttgaaatatgtatcacaaaaacaaaaaaagttattccagaa

SEQ ID NO: 949 - DNA, 6543 bp, Heterodera glycines
cctaaagggaaagcttccgtaatcaaaactttatcaagatgtaaaagtacaagaatgcataccagctttcttcggtttctatcattgtgacatccgcttggcagattatctgtttctgtcggtacgctgttctggccaatttgcgcgtcatcactttctcgaggctcccatatttgtccccaagatcgcagtcgttgtacacataggggcatatgcggtccaagtagggattacgcgatccctaatttattcaaatgatgcataattaattggaaaatcaattcgcatattagtattaatggtggggccaagtatacgtgcgtatactgtcgaccattttcattagtcatttcacggtcagccatttgttcaacagtcactgatcggaaatcgcatttgccactttgagaggtcgataattcctacatatttcatttcaaaaataggtatgtgcacttccgaattttgcgtagtgtaaaatgcagcactattttcttatcttatacagtgctttttataggcaccgaaataaaagtcgatctatctcagcgggcctaaatcgtagacccactattccaaaggcaattcggtagcaaattttgtgctctataaaatgggcctactcaaaatttccagaaaaattttcccaaccccctagaaattttttttgaaatttacccctcgttcccagccaaaatgggctgatcagatcaccatgaaggagtgatctgatcaacttggtgttgctaccttttttgatcagcatccaaagttatgcttacctgaatttttttagatttttttaatgctgatccagagaagcaatattttaaaaatgaaatgggacaacacttttgaccacctatattttgatcaaattgtgaatatggtaaaataaatcaaataaatgtttatgtcacaaatgcaaatatggtatcattggaaagcccataaaaaatgctatccaatggtatgctacttatctgttgaaattggaaaatgacaattttatacgcaattatttttttcaaagcatgatgggacaacacttatgaccatgactgtacatgaatattgcgaaaaagtcgaaattttcaagtttttttcattaaaaattttttcaggcttgaaaaactttttgctttttgctaaggctaatagagcattttaagagctttcgaatgataccaagattgatggatttggatgccaaagaaaaaagcttaagtggaaaaacatgctggcacccaaccgtgcgcgcccaaccgtgagcgcccaaccgtgcgcgcccaaccgtgcgcgcccaaccgtgcgcgcccaaacgtgatcgcccaaccgtgcgcgcccaaccgtgcgcgcccaaccgtgcgcgcccaaacgtgatcgcccaaccgtgcgcgcccaaccgtgcgcgcccaaccgtgcgcgcccaaacgtgatcgcccaaccgtgcgcgcccaaccgtgcgcgcccaaccgtgcgcgcccaaacgtgatcgcccaaccgtgagcgcccaaccgtgcgcgcccaactgagcggttccgggcaaaaaccattgaaacatcgaaaaataattttctgtacagatatgaatgtaaaagtgaattaaattattaccaaatttggctcaaagtcgaaaaaattgattatttttttgtgaaaccagttaacaaattgcattctaattctctaattttcaaaaatttttcgcggcggcgcttaccgacactgtcggacccttgttcccgaaaggttttttgtttttcaaatcatcttttttcgcgtcgctctttttctaaagacttttaggagaagggggtccggcggtgccgataggcgccgccgggaaaaattttgaaaatttggatagatctctaacagattttgtcaaaaaattataaattttttcgattttgagcaatatttttaggtttttggggtgccggagatgccgatatgcagcgccgggcgaattttaaaatttaaactttattttctaagagattttcaccaaaaaattgatgaatttccgtgaaatttttatttatttttttatattttgtcaaaaatattttgaaaaatatttacttatctgatttagtcaagaaaaattaaattttttaattccaatgaaaggaaaattgtttttaaattttgccaataatggccaatttttatgggtatttttgtttaaaaaaaccctattaatcacaaaaaaaaaataaattaaaaaagcagtcaaccaggatagaactcttgacaaaagtagtgtcaatgttaacgcaccaaccactacaccactactacatatgaatgaacaaaagcaaattactttatttaataaaaatttggcaaaatggttaaaaaaaattcaaatttgtataatttttttgccttttctctcacgaaaatgccattcttaggggtgtatatttaaccccgacccgagtcggggttagggtcggggttcggggtcgtcggggttggaagcgtccgggttcgggtcggggtaaacctgaaaaatggccaaaaatgtcggggttcggggtcggggcggggtcggggatgcaaccctagtttttggctaacgtcatagcaccgctcctactaactcgccagcagagtgctacagtacgaacaaccgtagcttccctaccatgtggtggtacagatgtgccaaacggctagagaccggccacctacactcggcctgcatgcccgcagaagccgtctagttgttagtatataaaaaaaaatttccttccatttctatttgattttattttcgagagccaaatttcaaagtggcacccgaaaatgattattttcgagaccatcctcgatttaattaatttttataaatattaaaacgtgcacaaaatggacaattttgtgaatttaatacattatttatttcatttattttattctaaatttcataaaaataccttaatttaattatagtaatgaaatgttggacctattgattaaatttacaatacatatacatcatgtaaataatttctttttacattgattaaaaaagaaaattatccaacacttttacatttcttaatcataaaaatatttttattttattaaagataatttgaattataaaatacattacaaaattcatgaattgtaaaatgattttccgctatttttttgtgtcgattatttttcccatggaaattaaatgcatcgtaatggaaaatcaaaatggtattattattgttaaatataaatatttaccattttaatttattagatataattgagacgggaaataatgatctggttaacaaacttccaaatacctttcttgttgctgatttccagtcttttgaacagcaaaaatttattaatgaatttttatgccgtgaggaaaacgaaatcggaaaaaatttttcaaaattgggaaaaaaatattttatatgaaaaatcagaaaaaatgcgaaaagatttttgtgaggaattgaagaagggaaaaagcattgaaaaagcaacgcaaaaagtgggaaaaacggcaaaattctcctattatatttcattgcctttgtgttatttggcaatgaattcatcaaagaatgcaccggctgccttcgcaacaataataaccaaattcactcaatcgaattggcagagaatggtcccgctgctgctggtgctaatgggcaataaattggtgtcaattagggaaagaaaactgacgatgtgtgatactgtgttccttatatatcatagctctgtggtgaagtcaatattagtgatatttttttcaaaccttttcttattctattaaatgtttgttgactttttgtttgtttgggaattaattattattccatcaaatttaaaatgcgaaattttaagttttactcaatgtatttttttattctattaaatgttacttgacctttttttgttcggaagttattattatttcaacaatattaaaatacgaaactaaacaatatcaattaccgaatcccgacaataaaggaaatcgagttcctaatgctgctggagaacattcactgagtcaccaacatcattaatacgggcgtacgccgattaaagtgttcaattgatgtatgtgttttttgcatcaatcaattatattttaattacgaagctaacaagagaacatatctaactgtcagtatccaaatcttatggatatttctctcttacatgttagcccattgtcatgagttcggatccgcctgacagatggtgaattattttgatttttttctaagtatcattccacctagcatttttccccattatacaattttattttttgatactattggatagaggaattcttgttgaatattataaaagaaaattatggctcttgcacaaaaattttctatgaattttggaaaattggccgaaaatttacaatcgcaaatcgactatgctttacacgatagaagtggttttaaaagtgatttggacactgacagttcgctgtattcccctgtaagagtaatgcttggtttttctataccgcgtctggttggctcgataagagttcggctttttggtcgaattctttgggttttggtctcgatttgcgagaaacgagacagaactttttacataataataaatatttttgttaaattaaaaaaaaattgttttaaataaaagtgtaaaattttaacaagtttttgcatttttggggatagttaagtggtttgattttaggtttatgtcaaaatttttaaaaatttccattccaaaatctttcgttggcgtgagacggaatgatgtacatttcacttaattattgaataaatctcattccaaaaactttaaaaatctcaatttaatgtttaaaaaaaagcccgtgtgaaaaaggtgaaaagtgaaattgcccaaaaaattactaaagggttcacagcacttattcaaattcaaaaattttgaatttgaaaaattaataaaataaaaaatttttgcgtttttgtaaatatatgataataattagggttgtaaattatatggactaaaaaacgcgaaatatggacattaaatatggactaaaaaagcccgaaatatggactaaaaaggccaaaaatggccaaatatggaccaaaatatggataaaaaatgccaaaatatatgttgtaaacccccaaaaatcccaaaaaaggtgtgcatatttaatatttgcttaaataaacctaaaaagtacaataaacaaccaaaaaatggggtttaaaacttaaaaatgcatattttttattgttgttcgttgtatcaaaaacacctccaagtttgccaaatttcgaaaaaattctcattaaaaaaaaagaaatgttcgcaaaaaaatgacgaaaatatttattgaaaatgccaaaatgacgacgaaaactcaaatttttcgtgttttgtggggtgtaatttttaaaaatttccaaaaagttgatctttaggggtgtatttttcgtttttttttcatttttcttgtgaaaatttccaaaaaatggccaaaatatggactaaaaacccaaaaatggcgaaatatggatttattcccgaaaacccccaaaatatggatttatatggactaaaaaccttcaccaaatcaaaaaattttaacgcagaaatgctatttttaagcccctttcttcatagcatatgcgcagaaaaaatatgttaatccatataatttacaaccctaatgataaagcataaatattagcccggcaatagtattgttaaaattcgaaatctctgacaacttaacggacgggcacgactgggccccgccaactgggccccaaccaactgggccccggattaactgggccccaccaactgggccccaagagacagtaatttttccaccattattgtataatattatttatatatttttcattacatacacatatgtatgtgtgtttcgtttacaataatctaatttgtgtttatatttttttcgttcagtgcctaactacaataactttccttcagctattttttaaatttaactatcatttcatggcaaataatatattatcgcagaataaccacaaaaaaattgagcatgaaggtcatctttatgttttcgccaaactcagtgcggatggttttatcaaatttttgaggtgtgagaacaaaaacaataaggacatgaagtgccgagggcgtctgcacaccaatttgaatgacgtagtgttgaaacaagtcaatgagcatgtctgtggagcaaaccctgcgcgagtggaagcacagcgcgtcgttacaggttaggttatatcaaatgctgaagattttgaatgcatatttgacaattttaggaataaaatgtagagccattgaaaccgccgagccgccatctacacttcgctcaattgcactccaaaatgtgggaacccctgtgttgtctgaagtcccaacaaaaaatgcaacaaaacaagttgtgttaatttctctgcgatgattgtattgccttttttagctaatcaaaagggcccgcggtgggggaattactcccgccaatgccgcttaatctaaacc

SEQ ID NO: 950 - DNA, 2532 bp, Heterodera glycines
aaatggtaaaaattgaaatttttttataaaatattaaaaagtttttcacataaaatgggcaatcttgtatattcatttatttaatttgtcagaaataacattaataacaatttattagcgaatgttgagacctaactgattaaatttttagacattagacaaattacatcatgtaagcaggatttccttttttacattgattaaaaaagaaaatttatccaacacttttacatttcttaatcataaaaatattttttattttattaaagataaattacattataaaaaaagcattacaaaattcatgaattataaaatgattttccgctatttttttgtgtcgtttatattaattatgagaatgaaaagcaacgaagttcaacatcaaaatggtaattattattgttaaatataaatatttaccattttaatttattagatataattgagacgggaaataatgatctggttaacaaacttccaaatacctttcttgttgctgatttccagtcttttgatcagcaaaaatttattaatgaatttttatgccgtgaggaaaatgaaatcggaaaaaatttttcaaaattaggaaaaaatattttttatgaaaaatcagaaaaaatgcgaaaagatttttgtgaggaattgaagaagggaaaaagcattgaaaaagcaacgcaaaaagtgggaaaaacggcaaaaaaattggcaacagaattggaaaatgatgaaaatattaaagaaaacattcaaaaagcattgaaaaataaaaacgaaaaaataaaattggatgacacaaaattaattgaattgaaagaagaattagccaaaaattattcggaagaaaatttgaataaactaaagacccttttttacttgaaactccatgaattttttgcatcaattaaaggtaattaataattaattatccattgaataatgggaagagatgtttaaaagtttattgtacttttttcaattggttctttccaagcgattactgtatgagtgtttaaattttatcttttttttcttttcagattcaaaaaatgaattcttcgaaccccataaaattggccgaagacaaaagcgggtcaatgtccgtgaaatatttcaagacgcatttcaacgaattcggcagcatggcacccaaatcgcatgcgttttttatgtgtttgtcgcgcttatggcactttttggagtgatttgtacgattgcccgcttggctttatttaatccggcagattatttggcatggcttctgatgctctggcttttttatgtctttgggcactacatcaacgcattcatcaaagaatgcaccggctgccttcgcaacaataataaccaaattcactcaatagaattggcagagaatggtcccgctgctgctggtgctaatgagcaatgaattaatgcccattagggaaaggaaacggacaattgtttgatactgtattcaacttaaattgtagttatctgattcataacgttgtattttcatagggaaaacataccaattgtcctccaagtatttatagttaacaaaatatattggacaaatttcagggaataatatagtcttacactgtatgggtaataaaatgtaaattcgaaattttaacttgataaacatgaacataaaatttctctcaccgatttcatgccgaatttattcgaacgtctttcaaaaatgaatttgcattcattcgtcagtttcattaaaaactcgagactgaaaaggccagaaatatataaaataattaattaaatttaaaggtccatcggtggaggttggaggggcgatgctcacattgtggcaaatcttttcagcaaaagatgttcagagaaaaggcatgacattttcttattttttcgaattacattattttccattttgtcatttttggtcgtccttattaattaattaattaattatttgcctaaatgtttttattttttaaaccgtttgctgcaggaagtgatcgcgatcacctgctcctggtgcaagcgctcctaccacaacaagcggcactgcttctcgctggcacgcttcgacgaccgctgcgaccggggcgtgctgcgcgagctgatccttcccccgggatggctgcttcggctggccgctccgcggcggcggagtgccaacccatcgaccggctcaagaagtaattggcatataaaattcaattttataaaatcaatgcctttttcagtgttggcatacgctgacgcggcggcacagaaacggtcccgacggcgcagcaaataccgtgcgtttgtggttaagccgccgcccgcctcgcgctgttcgtccgcgcaggcgcacggcgtcgccaacgggtacagccgctgggcaaccgcggcccaactgcagccgctgcccatccaaccgctgctggtgttcgtcaacccgaaaagtggcggcaacaaaggagccaaggcgttgaacacgctgtgctggttgttgaacccgcggcaggtgattgattgctaaggccaccttttttgcccttggctggctgtcaattt

SEQ ID NO: 951 - DNA, 1435 bp, Heterodera glycines
tcgtcgtcctcatcgttgctttggatgagcaggcgctgctcaccgcttgtgaaatgggggggggggacggttgatcaccattttatgtgattgggcttccggtcaacttaccaacgctcgtgttcacttggtccgagcgattggtaagttgtgccgacagtgcgtcattgatgacgctatcattgttgttgttggggttgttcaaatcgtttccgccccggtcgccgccgccaatgattgtgccgttgctgctgtgttggtgctgatcatttgcttcaacaatgatgggcgtgttgaaattcggagaacacactggaaaagggacagaaaattggattttttgagtcaaaaaaccctccccaaaaaaatagcaacccttttactcacccgcatttgtcactgccgcaggcgcctgtccgagcacacggtggcgcgactcgccgttgtacagcaacgtgaaggggaaactccccttcacgtttccatttcgcccttgttcgcgcactttcagccgcgtgaattcgacgatttggcccgggcaaatgttgttcatccgcgcaacgcactcttgccatccgtgcattgccaattcatggtccatgctctgctggtcaaaaatcagccgcacgtcgaagccgctgatgttatattccaattataaatgaagttattaattattttaaaggtttttggataagaaaaaattttaaaccaaaaatttttatcaagaaaaaaaaattatattttcgtaatcaatttttggaaaaaaattttttcaattcttaagggtgtatttttctgaaaattttttgggtcgattcttagggggtgtatttttcgtttttttttgaatttttgttaagaatttttccgaaaatcttgaaaaaggcgccaaaaatggcgaaataggcacaaaaataggcatttaggcatcaagcacaaaaagtccaaaataggcaaagttaggcattataaaaagtcatcgtgacacccaccccaaaccaagcggaaaacacgtttttgtgcttatatgagcgtatcaagtgcgcattttaggcatttgcctaaaaaaagaatccctaattctaatatatgaaagtgcaaacatcacatggaaacaatcataaagaatgaagaaaaagaaaggatagcacaaaaagaaaaagagtattttaaataagcgaaatataatggggaaaagaaaaagagcatttttatttaagaaatagcataagaaaaagaaaaaatgcattattattataagcattcaaaaattgtattcattcattcacacgtttgcctggttgggcttcaatttttatcaatcattatcattataatccacgtggatataatggcaaacaatgacagaaggactgcgtaaaacaagggcatgacgggagcagaagccaccattttaaaattaatagaccaa

SEQ ID NO: 952 - DNA, 2105 bp, Heterodera glycines
  unsure (1)..(2105): unsure at all n locations
taaaggaataattgttgataataatgaaattcatcttcaagaaagnncaanaaaanaaaaaaggaagagagaaagccttaaaaagagnaaaananaaaaaaggaacaannggaggangaaaagaacaangnaaaaanaaaagagncaaaaagnngaaaggacaaantaaacgaagaaccatttgaaaaagagtgntaatgaacaagtggatcagaatatttcgtatgctgaacaaagcaattctgccaatgaagaagctaccaataatacggtaatatgaccgataaaagaatatcatacctagaaaataagtatttcgaaaatcgataaattctaagatcgtaattaaaaataaatgatttttagaatcgagaaacaagaaacaaaatggagattttaaacgaatttaatttgatgaaaaaggaattgcgaaaagaaagtgtttataaaaatttgtcccattctcaattggaatgtgaaattgcaaaaaagttgggaattagtcgaaagaaaatttataaatggaagaacgaatttggtaagaaaacaatggcatatttgaattttactaattgtctcattttaaggtttattaagggaattttcaaatcagcaaaaaatagtaaaagttaaacaatttgaaaaagtgaaaaaagaatttacaaaaaaattcaattcaaaaacgaattggaaaattaatgggaaaatagctgaaaaaattggtgttaaatttaatacaattcgtgtttggaagagaaacttaaacttgacaactcgtaaatttgtttaattttatacttttatttaattataaataatgaaaattaatttaaaaatttgattttttgataaggaaagaccaaaatttacacggatgctgataaattggaatatgtgaaaagaattgaagaaatgacagaaagaaacccaatgatgaagaagaagaaaattgccgaaaaattaggcattccaattggcaacttaagccgatggacgaagaaattcggcaccaaggcagaaggtttagccactagaccacatttgaatttgaataactgctttaaattaaataaataatttacagacccccattcttaccagtgcttatttagtcccgccgggaccgggctttctttttttcaaaaaccgggaccgggcctgaaaaaaccgggaattcccgtctcggtcccgctcagctcaaatttttctgttatttaaatttaaacaaaatttaaaaagacatcaagctttcgtttcataaacatataattcttttaaatggtaattggggatgtcaattttatgtaaaatacatattttttcttggcttctccatgctctaaatagtaggaaaaacactttattttctgtgtttgcaacaaaaatcgggacttttatttacatattttggggttttatacatatttcgagattttatacatatttggtacatattttggtttttttttacatatttatatacatattttgactactttttgtacatatttttgacatccctactggtgggtgagctatttctaaaaatcagtaaagtcgatccatggcccttttagtacaggataattgagcttcggtacaagtgcgctggtttatagcttaatttgctaaattcattgtttttttgaaattttgaaaaatttcaaaaatctcattttaacaattaatttggtcccatttaagcgaaaaggacattttacacagctgctgagaaattggaatatgtgaaaagaagtgaggaaatgacagaaagaaacccaatgatgaagaagaagaaaattgccgaaaaattaggcattccaattcgcaacataagacgatggacgaagaaattcggcaccaaatcgattcattagcattggtgaaagataattttatcctctggacacttggctcaacttcactatgtagagaaaagcatatactatttatttataatgcctttttctaccaaaaaatattaatttttaatgaaaaatttcatttcttgagccttggagctttttatcagaacaaaatgagcaataaatgataaataaaattttgttagcactcatgtaaatcagtttttttgtttattatga

SEQ ID NO: 953 - DNA, 6270 bp, Heterodera glycines
cgcatttattatttggtgtgttttgggtggagaaatgctttttgcttttacttcccataaattggtttcaggacattggacttaaacatcgaggcttattcgcttctgctttacgccgaggggttgtacaaagcacagagatacgggttggaagggatcggcacagcttgggttgggttaggggggaaatgaagtgcacccatcgatggcacaagtttcgttgaccggagagtgccattgtaaatcgtcgtcttttcacaaatgcgatgccattagcttccagattttgttgtttagtgaatctggcgaattggatggctttccgctcctttttgtgccgggtaatgccggttcggggcgacaagtgcgttcattgggctcactgctgcagaacaaaacggagaggctgggaacgcacttccatttcgacacatttgcactcgacttcaacggagtaacagcaaatgagcgggcaattaattgaggcaattagttaattgcaatattttggttgaaggaaatgaccgcgctgaacttcgattacatcgaaagtcaagcgcagtttctggccgattccgttgggcacattttgtcgctgtattcgccgcacaaacagcccaaaattgtgctcattggccattctatgggcggaattgtcatccaaaaaatgttggcggacaatgccaacagatggagcaaacatattgcatttgtactcacttttgccactcccttctcacagccgcgtaagaacaaaatgagtggggggtgggcgagagaatggcatcagacaaatgccactgattgaggggcgggagagaaatgccactgattgaggggcgggagagaaatgccactgattgaggggcgggagagaaatgccactgattgaggggcgggagagaaatgccactgattgaggggcgggagagaaatgccactgattgaggggcgggagagaaatgccactgattgaggggcgggagagaaatgccactgattgagaggcgggagagaaatgccaatgattggttcgaatgccaatgttgattttgaagccgtgcttatcgagaagcgatttttgcgtttttgggactcaatgaacggcgatcggcggttgccaatgagtgccaaaaacgggggaagtgccgccgctgcgctccctccgcctgcaattgtctcagtgagcgggggccttttggacgaattcattgacgagggatggactctttcgcgtgcggtgagtgtccacgcgcacagcgcggcgatcgaccgaatttgggcggaggcagaccatttgtgcattgtttggtgcaatgaaattgtacggtcagttggccaacgcaacgcacaaacattgcgggatagagaaggggcggggggggggggggcttttaggttggaatccaaaagggggggggggtaacatttctttaaaatctatttaaaaagcttcccaacggctttttcgctcatttttcagagcctataatttagaaaaattaaacaaaaaatatttttaatggcgatgtggaaaaatatcttcgaattcctccgtccgaatttttttgttcctaaaatatgaaattttttgttgtaaaaattgctcaatatgtgccattcactggtgccatccctccaacgaagccccccttcaggcaaacttctcgctttcttttcgattacgccgcctctccgactgattttctggagaagttccacgacttcgcccatttgcattaccattcgcttgggctccgactccgtccgatcacttcggaatcggtcgctttgactgatttaaatgtcagcctttgtaccccaaaggtcattttgcgattcgtccgatcactgatcagtcggctgatcacttccatttcccctgtctctttcagtgtccttcgcaatctgtgcatcaaaaattcgatcttttggccaattccatcggaaaacgccgcctccttttgttggccattgccaatttgactgatcgggacaattcggtcccaaaatttgaccttttaacggcgtccaaatgcggacaaaatccacaaagtgttggtggcactcgctttttggacaccgatcatctctttgccgttgccaatttatcaaattgcgagggacggggaaacgttttggtcgcaccgaacactaatttatgggtgctaattgacccccattaaatataattaacaaatcatttttcctaaaaggtttttgacgactccgccgtttttctgccggaaattcacttgtctttcggtgattttatatggcacaacaacactcgcaatcagatgcatttctcaatggaaatgaatccgttggccatcgtcccaattcattttccacgcaatgaaaaagaatttggcattttccgtgtcgaaatttggcgaacaaattgccgtgaaagtgagcagcaaattagcccatctaattgcattttccatcgctttccaatgttcagcggcggaaggtgccgtccatcgacggattgtcttttccgtcgacggagtgaggcgacggtttgacaaattcggcggcgccgattcgaattcgcccgcttctctgcttatttacccaataataaatcgtcataacccggccgaaatgggcggtatacattaccaactgatgctaattgacactgcgcaatgtgccgaatgtttcctccgtttttcggtagaccttcgcttctctctgattagggtcatttttgcatattatttttatttttaaagggaattttgctaatttaagcttttccgtcaatcccaactccttttgcctgcttcgtgcgtctttgcttctgtttttgtccatttttatgttagcttagcggtgggaagtcgtcgctttgtgaatctgtttgtgctcccgcttttactgtcggccgcaattgccttttgcgggtaattaaattggccacctaattaggcctttaattaggcttttccctccctctaagcactgatgtccttctgctgcttctcctcttcgatgccgtcgctcttttcttcttccatttgctccttttcacccttcttcccttcttttctgctgttcatcgtcctttttgctctttcacttcgtctctttctctcagtgttcttttcttctttctgtttgcgctgtccacgacgttcaccaacaacactttccctctggcggtgtttggcctttttttgaacattgccgtaaggaacaaatttttgtatttaattggcacttgtctgagcgtggaggatcgtagtggctgaactaaaataaatacaacaaaatttctaagcctgaaagccgagacctaaacacaaaaactgaatccaaataggaggatataatcacccatgagctaatgatttttaaatccgatcacttttgcatttataaatgggttcgttctatggtcccaaatctgtcggatcagttccctttttgacaggctttgcaccggcgtttcgtctccacgggcaatgccatcgctttttcctccgcttctcttctgctgcttctgcccgtctttgttttccaatttcctcacattttcacttgcgtatggaatttggccaaatatggccaattttggtccctttccgacccctttttcgtctccaattttgcgttgtctctcttttcctttttctccctcttcccttttcccctcttaaatttgtccgttcttttccctcatctctttttcaaattccttacactttttttgttccttttttctttgattgttttttccactttttctgcctttatcactccgatgagctttcttctctttgacgatctctcccttttgtctgtttttgcatttgaaattactttcgttttaaatcattttttgtcttttaggtaattgctaataattaaatttgatttcttcactctgtctttatcacaattttattagcaattttctttttttgtcttccttttatcaaatataattaaatatatttaattatcagtaattttaaatgaaaatctggtccgattgactgacttcgcatatttaatacaaaaatacaaactgaacgccctttggtagcccaaaacgcacaaacgtgggaataaattatgatcacaaattcagcaataaaaagaaagaaaaatccgaaaattaaaggctataagaaaaataatttgagcaaaaacataaaagcggcagagaaaatgccgcttacggggaaagtgaccacccaagcgaggaacacattgcgaaagaggggccaattgacgggcacggaaccgcgcacggcgcccactgcgacgacactgcccacctgaaattgcggggattggggggagtgatcagatcgataggaattggattggaattatccggttatcgaccaattattggcaattaagccataattgtctttgatcattgatcctttcaatttgtgattttaatcactcgatcgctttgttttttggtcattattccccgatcattcttctgtttctctgctcgctattcccctccttacaatgcacagtgtcatcgagatgggaatgcccaatttgctggcgatcaccacggtgattgcggagccgagttcgatgcaaaacccgcagaagggatttatctcagtcagctcttggccaaccgttctgatcacacgatggccaagcatccaaaagccaatgcacgtgcccatggagccgtagaacagaatccacaggggtgtctcctgcggttgtggcacgtgcacattgttgtagacgaacagcagcgtggcctgacaacgagaagcattggtggaggaaaagcaaagcatcggcggatcagaccaaaggggcgattgtgttcggaatgtccttggacccgtgcgagaagccggtgaagcagccggtgaacacttggaccgcactgaacagctgcagcgtgtcccggtcgtccttgcgcttcgggtcgggcaaaatgcgtttcaaaatgcccgggggatgcaattcgatttgtttctgtttgctttgctgctgatgctcaacgtcatttctgtccgtctcttcatccgccgttgttgataaattcggctgttcagctccgatcgttgccatcgcttcgccatttgcaatttctgcggagaaaagcaaatttaaaaagccatttcgaaatgccaaccgtcgttgagcttggcatttctctttgctgaattttttatccatttgagcagaaaaggacggacggccaattggaaaaagagggcactgaataaaccgacgcaaacactgagcaaaagggcgaaccaaaagggcgttttgtcgaagccaatccctgaaaattggacaaataaacagggcacattttaaaatgaaaagcaaaagtgtgcacattttgagccgcgaaagacgaccataaaagtgataaagctgagcacagcgaaatagaaaatgggcatcgcaataaacgcacttcgaattgggtctttctgaaccgaaagtgccaaaatacaaaaaagggaaaagggagggacccttcggaggacggcaatatcaaagaacacatagagaagggcggagattaaaccggcgagcaccttaagaaggaaggcacaaatttgctttagcattgacaggtaatcaccggagaaacaatccatgaaatgatgattttgaccacgttgtccatgtgaaggccggcggtgccgcgcattaccatggaaaagccgatgatgccaccgatgtgactgtgcgtggaggagacgggcagacggaagcaattggaggtgagcatccaaagggcggcaccttcaaagagaaagagaaagtgccgggggcaaatgccaaaggcacggacccgcaacaatggcaacttggcccagcaaaagttcgttgggagtgttctcgtacatttccaattcgatcactttgaaacggagagtctccaacactttgtaaccttaagggggattaaattgaatatttaattttaaacattcatttttaaattctaacccagcagaattccgcccgcactttcgacgaccgtcgctaaaacataggcaacgcgcaaactaatggcaccggaacaaacggaagttgcaaatgcttagcaaaagaaatcgaattaattgaaattttgatggtttataatgttttgagatttaccgttggacacttcgttggcacccatcgcaaaagcaaaagcaaaggacaaatgaaaagcgacgacgagggcccaaagatgagaagcctaaggggaggggggggggagaaagggacactttggcacacaaagttaaaagcctaagg

SEQ ID NO: 954 - DNA, 6383 bp, Heterodera glycines
  unsure (1)..(6383): unsure at all n locations
ttaaaaaaaatgatttaattgcctgtgaaaaaatcgtggtataatttaaatatttatcgctgcatttatagtgagtgattaacgtcattgatccaaactctgtgcacaaaatgggaaaatggaagtgaatcgacggcggaggggggggggggcattattaggttattagggacactaatgaataatataataataataaaattggaaatcatttcgaattttggaatccattttcatttgtcactgtttttcccttaacaatctaaatcttaccgagtttttttgtgttattttcgcgtaaatgaaaaacggacgtgcggagagcggcggcgcactccgccgccattcgatcgccgatttttacgaaaatattggcaaaattaatgtacaaaataacttcaatttacaacttttctgtccatcgaatctatttctcgataaaaacagcttcgagcaaccaaaaatgggcaaattgcgcactttcgccccctctttccccccccccccttttgcggtgaatttcgccaaattgttgttttcaattaattcgcctgttttgcgcccccccccccctaatttcccttttcccattagtctctcaaattgccctttcgtttcccttttttggtaaaatcaaaacccattcccaaataaaaaataataataatttggttttattattttagttctttttcggttttcgcagaattaataaagtcaacgaatgaatgcatttggccattaattgccttaacattcgctgcaattggccgttctttctcttatcagcagaaggaactgtccttattaattaattaattggtgtatccggaattttattgaagcaaaagagcgatgggatgaaagggaatttggaaaaggagcaatttaattaattaattaattaattaatggggagaggaaggaaagtgatcagcggaagagaccaattagcaaaaggggagagcaaagaaaaagagagcggacgaattaatcgaaggaagcgatcgctttaattgttgcaaaaaaagataaaattaattgatgaattaattgctttattaaacatatttgctaaagaaagacatttcgtccacaaaacattcacagctgaccctaagaaaagaaaggcattttaagaatgaaattcaacgctttttgtcctcttacctcacatttaagttaaatttttcccaaatttggcaaagtctaaaatcatttattaattatttaaatgattaattgtttcttttattttcacttacggcgtaccgacattcttcaacacgacgaaattcatgtgcttttgtttgcatttcccatgggcttaaattcgcttttaattttccatggtttacggtattcccccggcttacggtagtcgtaaaagtacagacacgctttgtcctcgtcacacgcgacttcgttgatgaaaggcgggaaaaactcatcgggcaatttgcgaatggtctgacaagcaccgcacaagcgcaaatagccatcctaagaaggaaaagcacaatccgaaaatgatattatggacaaaaagcatcgaaaaaaggtttttggttcttctggccataacttttttgaaagttaacgaattttttgaaattttgcaagaaaattgagaaaacttttagcattattgaatgatatcaagaaataaaattataagattattttagataaaagtatgaataattttttggcaaaaattaaaaatttccatttgtattttttgagtttttgccaaaaagcaccgctcacttccgaatcgccgcgtttgtcgcagccgaatggcacggcatggacatcgcctgaagggaggcggggtaattaattggccacgccttttctgttggtcatttatttaacttttgccattctttttcctggctaacttttgcttggacttttctttttttggcatttccctttccttctcccaccgatcattttctgcttttgcttttgctttctctgctgctttctcccgcccttttgctccgttttgtcctcctttttcgtcgcccttcgcttccgccgtttttcgtcgtttttccccaccaaatgtgccaatacggagttgcgtttgtggcgcatcagctgaaactgatcctaaatgctgggtttttcgctatttatgccaaaaatggcgcgccttttgctgccgcaacgacggcgaaatgatcgaccgcttcgattcgttcctaaagcaaaagcaccaaaattcattgaagctgtcgcaaagcttctcatttcgtcttgcattgtcaaattgccgagtcgcgacaacacttcgggggaacgcacgtccttaaaataaattatcctttagacaattaatcaaacccagtaattaagcctctaattgattaataagttagttagttagttagtcaattggctttttttgcgttaatttgtgactttcccttccttacacatcgcaagttcagctcactcagcagtcgttccaatgcttcaacatttctcttcactgcttggtcacttgactttggggcttttgattggcgcttaatgcaattatgttaattcattgtcccctattaaattttaattgcccaatttcccattttaattgccccccccctccgatcacttcgtattggtcagtgatggttttgtcgaggaaacggaacactccgctgacatcctaaactcaaaatgactttttcggcactttttcgcttttccgatcgcttgcccatgccatcagttcggggttgtaagtgcccttctgcttcaactcatgcacgaggtcatcctgtgccaaatgtttgcagtgatccacggcactgatatttcgctaagaaattttaaaaataaaaattaaacattttaaaataaataaataataccgaccaaaggaatcaatgagaaatatttggacgagaagtgttcggccctgaaaaagcccgtcttcttcggactgttcgaatgtggccgttcgtcggagtcggattccgaactgaggggaccggcgatgggttcaagcgaatcggagggatgtgctatttaggtaatattcacatttttgtctttttctctctttaccaacatgtctctgtcccttttgccattgtctttcttgtctctgtctctctcgtctctatcccttttgccattgcctttcttgtctctgtctcctcttttgccactgtctttcttgtctctgtctctctcgtctctgttgtctttcttgcctctgtctctcttgccactgtctctcctatctttgtctcttttgccattgtctctcttgcctctttctctcctgtctttgtctcttttgccattctctctttttcagttgtctcttcttccgtttctttcttttcctcaactgtattccctccttttttgcccactatctcctctgtatttgtctcttcctctattgtttttgtcttttggcccattgtctcttttccgtctgtctctttctctcggtctattttttcctttttcgtcttttccgtcgtcgttaaaattggcattttttccatttggactgttatggcctccgttgtgcccattttcaccggacttttgcgaatctcttcaaaattggaagacaccgaaaccgaaatggcatttttacgggcgatgaacaaatcggaattgcgatttggcatcgatgccgaaatggaaataaaactgaaattgggaaagggaaaaggggaagttggaaggggacggaggagaggaagaggaaaaacaaaagcaaaaaggaaaaggaaaagggtaccgtcgggatttgggaaagtcggaaaagtgggcgagttggccgggccatttggacaacaccgattcgacgtccgacagaatttgccgcaaatgctgccgatactcgctcagctcaacaactgaaaacagaacgaaatcaaatgggattcttctctctcttcctctctctccctttctctttgtctctcttctctctctctctcttcctctctctctcctccccttctccctaatcaccttcattacttaatttacttctccccacccctttccctcctccttctgctcacattctgcgtcatcaattcgcatttttccttccaccttccgcttcaactcttccaatgctcctccctttatgccttctcctgccgatgtgccattcgcttccttcccttcctctgtccgattgctcatttcttcaacaaaggtatcggtgccattcgcttcgtaatttatcattggcaattccgtgggaggcattggcgaaagtaatggcaaagaaagttccgactccaatgggtaaagaattttcaattctgttgttgattgtgaggtattagttgtcagattgcttttggcattttccgactgatttttggctaatatttccgtttcattttcatttttaatgcttttaaaatttgacggtgccatttcagtgccaaccaatggcattgtaatgtttgtgaattcaatgctcggttctgtcgatttatttagtttattttcgctgtaggtaatcgttgaaggtgatgccgtgccaatgcctaaagcttcttccaaaatgccgactgatggcatggcaatttgaagggaagggaccgttggggcggaagaaaagggcgaaaccggaagaaccgaaccgactgaaagagaaaagcaccaatcaaaagcaaaaaagttgagatgctcccattaatgcccaatcactgacccttctctgttcggttggctttgttctccgtctcgtccgttggcatttccttttcgtgcccgttttcttccatttttggcactttttcttccccttccgatgaattgccttttcgctctccgtcgtttgccactttttcccattttcgttgtgccatttccgttccgttcacttccctctccaaatcggcttttgctattgaatgattgcgttgtgaatatgccgttgtttcgcttgcattttccgttgccattgtcatttccgcttgttctggcgtcgtttttgtgactattgtctccacttttgtggggccattagatgctaattggtcgtattccgctaattgctgctgctctttcgcgggtcccttttccatttgaatttcgcccgttttttcgccacttttcgtcgtccattcattggtcgaattcgctgaacatttaacattttggcattgaataaaaaacattcacctgctgatgggtccatgctgaactgcagctgttccgtctccaattttgtggcttttgcccaattaactgaaaaaggccaaaccaattcaattcgttcgttcgttgtgccaattctccctccccccccccaccgtttgagccattcgaatggtcgcccctttgtgtgtcaattgtccgattttgtgccttgtcccatttgtcctcataatcaaacaatgccaaaatctcccgcgttaattcgtcgtcctcattcattgaaaaggcttttatgtcgctattgcttctgctcacatttattttttgcatttcggttgaattctgaaattaaatttggatttttaagattttctttggcattttgccactctctttctccgtttttccttcgtctgtgccattctgtcgttccccaaatggcaccactccgtcgagcaaattcagagagaccagcacacaaaagaggatggacgacgagcagtgaaagtgccacaaaaggcggcgatgtttcgtcggactcggccaaaaaaagtctctccagcgaagcccccggtgatttttgtgctttggcatttcgcaaaacgccaaaggattttttggcatttttcaaacggcgagattaaaaacaaagaaacaaaatttaattttaatttatcatatttttatcagtgaaaacaaaaatatggtaaaataaaataaaattaatgacggaaagcgaagaaataaatcgacgaaaagggagcaaatgaaatgaaacgaattgggcgccgaaggggcgacaaagcggcgccatcgccgcgtctcaggaagagctgaacagtgaaaagatcgcaatgaccggaaggaatgggaaggcgacggacaatgacaaaacaaatcggcgggggcaatcggcggaaagggtaattaggaggggaagggttaattanggagggggatattaattagtgatattaagaataacctaaggggggataattgtaaaagcgaatgcatttggtgggggaagggaatttacttattaaaattgagatagagaagaagaagaagaagaagaagaagcttccccgagaggaaaattaatggatcaattgatgagtcattttattgatggtcttttcataattatttgaaactctaaaaaagtaagcccaatttataaaaaagtaaaagcacaaaaaagaaagagaaaaaagtaccga

SEQ ID NO: 955 - DNA, 1478 bp, Heterodera glycines
tcccccctcccccgggagttgtgcccttttcgctaccccgttcattggcattggcaccgtccgtccccccccccccccggcaatacacttaattaattcattttatcgaaaatgattaataaagctcgaatttactgtttaatcacgaattctaattaatctcagattataatacataaaattgcttttcaaatggattttaattttgtgctcctttccctggaaaattggctgatcaaagatgcgattctcgtggaaaaggccgcgttggaattggcagtgatcaaagaacaacggcaaaaagtgaacggaacggcgactgatcggactgagtgcgcttctgctgacaatggcattggcatatgttggagaaaaacaaaaaccgcggaattgaaagaaggagaaaattttacgacacgtttcggaatttcgtggaaatttctgacaaaaatgcccaagggtgaatttgaaaaactgaggcggactcaccaggtgagcaaaacgccaccaaaaataaatttgaacatggatacagtattccctcatttaggtgtcaaaaaaccgaggcgtcggctacggggtacggtacgcgtgcacacgaaatgccaaggcacgagacaattgcccctttttgatgctgagcagagaaagtgcgttgtggcaaattaaaatcaaaatcgaacatatatactgaatttagccgaggacgggtcgctgagtgtctattaccgtaacgcgcacatacataccgtaagacaaatccgcggcagagaaaagagagcagtgggcatggcgtcgtcttcctcctcttctgctcggcccccgtgttcctcctgctgttcgtccgcttcttctccctgtcattccctctcttcatcttcctcctttttttccacttcttcttccttttcctccctttcctcttccttttcttccttccccctttctttttcctcgtcttccttttcctccccttcctcttccttttcttccttccccctttctttttcctcgtcttccttttcctcttccttttcttccttccccctttcttttcctttttcgtcattgtccgcctaatttcgctttcctttttcattcatttttcatcgaaaagcataaaatacatatcacagattttacagtttttgctaaatcaatcaatggatggttaacgtaaaaaatataaaacattaagggaggaggaggggggattttctgattttgaatatttatttggctttggcattcacccaatcatctccaaatttgccaaaataaatgcaattcatttggcacggcatcataaatttacgtttcgtccccacgcgacggagggacggaccaatgaataaatgcagaaaatgcatgtaaaataatttgttgacaattgccatgatttgctggcatcaaatgccatcagaagagtgtgccctttccttccttttccctcggtcgtttctttttggcactgcgct

SEQ ID NO: 956 - DNA, 2018 bp, Heterodera glycines
  unsure (1)..(2018): unsure at all n locations
gctcggcccccgtgtttcctcctgctgctcgtccgcttcttctncctgtcattccctctcttcatcttcctcctttttttccacttcttcttccttttccttcccttcctcttcctttctttccttccncctttcttttttcctcgtcttccttttcctccctttcctcttccttttcttccttccccctttctttttcctcgtcttccttttcctccctttcctcttccttttcttccttccccctttcttttcctttttcgtcattgtccgcctaatttcactttcctttttcattcatttttcatcgaaaagcataaaatacatatcacagattttacagtttttgctaaatcaatcaatggatggttaacgtaaaaaatataaaacattaagggaggagggggggggggattttctgattttgaatatttatttggctttggcattcacccaatcatctccaaatttgccaaaataaatgcaattcatttggcacggcatcataaatttacgtttcgtccccacgcgacggagggacggaccaatgaataaatgcagaaaatgcatataaaataattgttgacaaattgccatgatttgctggcatcaaatgccatcagaagagtgtgccctttcctttcctttccctccgtccgtttctttttggcactgcgctttcttttcacttcgccaattgtgccgttcgttctctgttagccctttgctgagctcatttggaaatttagacaaattgaggaaataaaacttaataaagtaaaaataaaaaagaaaatgataaattaagtgatcattcgttttttaattccttccgtaaaagaataacaaaaactgtgtgaatcccccctcttccccgggggtaatccccgcgtgaatgttttccttttcaatgtgcgggggtggtcttttcgcttggattatcgccgattggattttgtgcatatttttgttggtcttttaaatgtttcgcgcatttgccaattttcacgcaataaaatcgaataacactacttataataataattattattaccacaataattacaattgttccttgtgcccaaatgcaatttttttcgttggcatttcttttccttccgttgtccgactttggcatttccgtcatggcatatcaaaaccgaaatgtccaaagacattccgtgtttaaacgtcaggtaaaagctaaacaatccaattaatcattcgagactcattctcggacaagtgcttttctcagagtaatgcctgtcttttcggcatggttcctcctttgggcgcttccgtgcagtattcccagggaggcggcatcggcaccaatgccgtcaatgccgtgggtgctttgcctctgtcgtcctcttcggccggaccctttccctccggcacaaccgccacaatgttttgcattcagggcggtatcccagcgggtagcaaaatgtttgcttaactatctcttttttgattatcgcgttatacaatgcttctccgccttttgctaattgctcttaattgcccttgattaccattaattagcctcttttcccattaggccaatcaacggctgtttgtttgaatggcatttggcaacctccgttcttctccgccggctgttccctttcctccgccttcggcggtgtttccccctcagttggcctttcgccttccctcgggggcttttcctccactggccaatgtctgacgtcgatttcgcccctttcgcttggtttgggtctgttattttaaaataccatatgccaattccgcaaattccttaaggcaatgtttattactcaaacggcgagaatcaattctcggggccgtatccctccggcacaatcgcaactttgcaatgtcccgcggggcaaattccgagtggggcgacaacggccacatgtttaaacggtttttggcagccgaatgtgctggggagttgttcgcagactttgaacggttataacgcaaagagggcgcaggaattcggaccgacggggcgggaggga

SEQ ID NO: 957 - DNA, 4324 bp, Heterodera glycines
  unsure (1)..(4324): unsure at all n locations
aaaattaaatggacaaatttaattaattaattataaattgtcacttattcaaaaggtctcttctgctgttttcgacatttgttggaatttttgcagatgcagaaagaaaaagggaaaaaatcaacaaaaaagagaggacaattaatggagagaaaggacgagcgcggaacagcaaagacatttttgattaagaagagaaaatggcaaggaaattaagggggtggccaaacatttaaggggcaattagggggggggggcaaaggtaattaaacaaaataaatatttaatagaccaaacccaacgcatcagcagcagagggcgaaaattaacactttacaaaaccaatgggcataagagaaaagcaaaaaacgaataagtgacagacaaaaagggacgaagtaaggggcaaaaggaatttgaatttaattgatgggcaattaacggaaaatgcgaagcatttgcaaaaacgcggggagagagtgccaacaaacccattttaaagggttttataattcaggtaaataatcggataatatgcaaatgcaccgcttcaaaatcagaagacacgaccaactgtattgtgaattcaaagcacaaaactaattaaaagaagcagatcggagatgccaaaattaagtttgagaagatgtgaaaaaatggaaaataataaaataagaataatccgaattatctttggttcattttgttttcccatttgctgaggaaccgtttgagaaagagcaaaaactgacaaataaactgaactcagagaggcagaggagttgaaacaaagccggcattttattttagtttttcttctcgttttgttgggaagaaactgcgcaattctcatgaaggattggcatcgaaatatttatcacgtcaatttaaacaaaagtgtggctcctcaaatactacaataaataatacctattgaagaaacgattgaataattcatccaatttattaaaaatgtgcttgggagggaactcccaatcccttcgtattgtttggtggccgttcaatccctgtaaattgaacccagcgaaagaatgaattggatgagtgccatttgaatgcgcaaatcgctcgcgtcgtccgaacttttgaacagaggcaaaccggcacagatcaaagtgctttgttgctcgtgcgcaatctgacaaatggaaatatagtaacaataaatcgctttcaaataaaaccccaattttcagaagtttcttggaaaaaagcgcaaaaaactgttgcgatgtaaaaaactgtctgttctttgatacttttttacctggtcaatccgctccaaaatcgctttgtcctcatttgtctggcgttccttctcatcagaaattccatcgcaatttaattgtgagggtttttcttcacgttgtgcccacaaatgtctgaaattgtgaaagaaatgagcctaacaaaaagaactttaattggaattttatcttttgttttttaacattccgacgaaaagggaaaccgaaatgaatgtcttaaaaaatgtgaaattactaacaaaacttcttcacctccattgggttgttaagctaatcttacagattttgtccattttaattcacttactgttcttggattgtttgcaaatcttttagcgagtctacgattgaatggacagtgccgtcgagaagcgactgggccaattgggcacgcattttttcttcttttaagcggtccaaagtggcggagtcaattggaaaagggacgggggacgctaaaggagtaaaagggaaaataaaggcaaaatgaaagaaatgccaacgtccaaaagggacagccaaaaagtgactcattttcagtcaatttatgcgtttaatttttgaaattggcagtcttttttgttttactccaaaccataataaattatcattttcaaacccaatttgccaaatttggttcccttttgggtcactaactttccgtttgatttgactcttccgttgcaattgtcgtcaggaaaagatcccatcgctgaagaataaattgtcgccgtaaatccatcggtcactgaataaaccaattccattgttaagcaatccgtcgttttgtctttgtttgtggtaattcttctatttttttttcaccgcgtgtcggtgttcgaaacagaaattgggcggtctttggtcctgccaacggctttcgtctgcctccaacaaatagttgagttccgagtcttggtccgggatctctttgggtgggatgggaatgtcgtccttaagcaaaagatgaccatcgaaatgaaaaaagcatgaatacagttggcaatttatgtcgaaaccactcgcgattaatgcctttgaccacaaattcgtatccaatccgcgtagaaaatgatgaaaaattggatgtcataaactaaatttctgatgagctttacaaagagcacaaactcacaaatggcggaacaagagaaaagtgtcaataaatcattggcgtaataaataaaatgccaataaattcaaatataaatcaaagtgtcttaacttaaaccgtagtcattgatcactgatcattaatcaaatgttctttataaatcacaaagtaaattatccttattaacggtagataaatatttaattacatattaaatatgtaaagagaaatacaaaaaataacagcaaaatcaagcaaaacagtcaaaaagttacaacggagtgatcaatcattgatcagagttcattggcatcgaaaatggcgttcaaaggtcgattttctagcaatagaacatcaaaatatcctgcagatcgttttgtttgccttgcacacgaaattatcatttaataatgcgtgaaatttctctaccatttgttcattaattaagacaccaaaagccatgtaatttagcgaatttaggtgaatgattgatgggactttgttgttgaacagtggcggcgaaagtgctgcagccaatgacacggaattggtcagaaattgttcggaaatcagcgttttagtcagccgaaacaaatcggcaatggcaaacgattggagttttgacaagagagtttaagagtcattaaaatgttgtcgcaacaaattccgaaccgactgtgcctcttgccttctttagtaatatggctgggatttttagggtaaaaaccccgaaataggtagaaaaatattttagggactcaattttagggaaaattttttcaattcttaggggtatattttttaaaaaatttcgacttattttgaggttcgtcttttttctttttattgaatttttgtttgtacagattttgtgatttttccaagcataatttttgtaaaaaataataccaaagtccatagttcactggacagaatggaccgtgtgaatattcaaacgcagcgaaagatgtctccaccaaaccgaagattgggaaattgataatggagaatggactaagtaaggtgcttatctcatcagcagcagagacaagtttaagtgcatccgaactcattttacccccataatcgagggaaagtgatctgtccatttgtccatttgtccttggcacactttgcgaaccgataagtcattcctttccatccatcggcccatttcatttcccctcttctgctgcttcacttcctcgtccgtttgctgcggggggggggggggagaacctccgccgatcacttcttttgttttgctttgttttgacgtcgaccattatgaagctgcggccaaaatgatgtgtgagcacctgttaaactctatattggcagcatattttatcataatatttaaaggacaagtgcaacaatccgcacgtgttttcatagcccagaacaaccattattttccctacgcttcattgtatacactgttctctcagacaaccgacgcaaacattgaccgtgctcctactcactgccgcgatgttgacggacgaagaccagacccagcgctcaatattgtaatgactaatatgctcaagatacagtaaatgaattagtccaaaacatgtgagaacatgggtgttggagagatgccaatcccattcccatctgcactatgttgggtgcgaaaatggtgagaagcttggatccgggacatggaccggtccgccctctttagggcctacaggtgaattgccatttagcgctcaacccaataacgtgccaacgcctggactaagggagggaggagggccatgatgtgcaacgttagggcacttccggtttccattgcattatgcgatgtgtcaactccaattattggaggaaaccaagtgcatgtcggctgacgcaaagaccctaacagactanaaccgcgcctaggtagcgaagctcaaaaagcgcgcag

SEQ ID NO: 958 - DNA, 6183 bp, Heterodera glycines
ttttgtaaataataataccaaagtccatagttccctggacagaatggaccgtgtgaatattcaatcgcagcgaaagatgtctccgccaaaccgaagattgggaaattgataatggagaatggactaagtaaggtgcttatctcatcagcagcagagacaagtttaagtgcatccgaactcattttacccccataatcgagggaaagtgatctgtccatttgtccatttgtccttggcacactttgcgaaccgataagtcattcctttccatccatcggcccatttcatttcccctcttctgctgcttcacttcctcgtccgtttgctgcgggggggggggggggggagaacctccgccgatcacttcttttgttttgctttgttttgtcgtcgtcctttttgttgttgtgtccaaaatgttgtgtgtgtaccttttaaactttaatttgggagtttatttgcccttattatttaaaggaaaaatgagagaaaaaacaaggcattttcgaccctaaacaccaccatttcattcattaccttcggcgtcgtcactgctcacaaagaccgccaaaccaacgctttacactccgccgatggaatgtgccgctgctctccgatggaatgcgcacccatccatcatccatttgatgggggcggggagtaaattgtgacggataatttggcgaataaatgaaagagagggggcgggggggcgttgggtttgggagggtacgccacgggttgagcggctggggcggaggtgcacctcccccagggaaaggggtgcgccactcgcccgtcctccgatcgctctgcccaggatggacccgcgatggtcgccgcggggtgcaatgggttcgaatgcacccaaaatcgccctgctgagataagccttctcatccgatgagtcattcattctccatctttgggcgtgtcacttccttcatcaacggcaccatttattaagcgacgaccaattaacttttatttgtccaatcggtctcccatttgccctttcgccagtgatcagattattttatttgcattttcgcactttgatcatttctctttcataattttcccatagcacattattagagcattctcttgaattccctctcaaatgattaactctgatcccttctcgggaatgtttatttttaaatataaatatttttatttttattttcatttattaatttatttattatttgtattttttattagtaagccctaaatattattgtttttagaaaataaatatgttagaatcagttcttttatcatcagcccactctcttctgctgaatgttttttaaaggcggcccatcggcggaggaacggcggacggaggaagaagaggaggaggaagagaagaggaggggagggaactcgtttttgggtttttcttcctcgcccccttttaatttgcccaattcgacgactgataatcgcgcaatcacttttttaaaatatttcatttattctgatgctaaattttgctgataaactcagtaattagtaattgtaagccgaagaggtaattagtaactaataatgctattatgatgtgctcgtgattgttttatgaaattccctttttattgcccattttgtacttttcatttattcattccatccgacagatttcgttaatttatttctgtcactttccgtttcttattctctcgaattgaaaatggttctgttgggtgccattgaccaggggacttccagcagtcgttttctcgtcttcgattccgaaaatggcaatttggtcgccggccaccaagtaaaaaatattttaaccttcgacttttgccaaaacactaaattgacaccttccaacagttggaagtgcagcagcaattcccgaatcccggctttgtggagatgtgtcccgagcaaatatttaagacgaccgtccgatgcatcaaaagcacttgcgaggaactgaacagacgcggcattgacccgaagaaagaaatcaaagccatcggcataaccaatcaaaggggtgaggcgagaaatatgccgatggcaaaaagagtgaaaaacttatcaaaaccaatggcatggccaaatgcatgaaagaatgtgatcaaatggaccaaagctaaaggaatagccaaattggtgatcgtttccgtcttcagaaacaacaatcgtttgggaccgagagacggggtgccatctgagtaatgccatcgtttggttggactgccgaacgcatgagctttgtgacgaatacattcagaggacgtcgacacggtgaatcagtgaaaataactgaaataaattcggaaattttagggacaaaaaccatttcaaagcgaagaccggcctgccaattcacccgtacttttgtgccctcaaacttcgttggcttctcaacaatgtgccagaagtaaagaaatcgctacaaaatggtagaactttggatcattttgctgatgcatttaaattatttgaaaatttagggactttgatgttcggtacggtcgactcgtggcttatgtggaaattaattggggtaattaatggctaatctcccaaaatgcttctctccatccttctcaaacagatccatgccaccgacgtgaccaacgcgagtcgcactttgttgatggatttgcagaaccgcaaatggtctacagaaatgtgcaccttttttgacattccgatcaatgttctgccggaaattcgaagttccgcagagatttacgggcaccttcagaaaggtcgtgttggaatatttggtcgaattagccaatttgcatctttaggacctttggaaggcattcctttggccggctgtctcggagatcagcaaagttttaagcttttgttggctttaaaccatttctgacccccaaggtgctctgcttggtcacggctgtttgcaggcgggcgaagcgaaaaacacttacggcaccggcacttttatgctttgcaacacaggacaaagggcgtacatctccaagaacggacttttgaccacaatctcttaccaagtggacaaagtcgcccattagaaggtctcattttccccaattcgttcagttcggccaagcgtcgcccgtttgctacgccctcgaagggtcggggtccatcgggggaaacgtcgtccgatttttgagggacaatttaaaattcttcgaagtaatcaaaggaacatggctcttcatctcaatctctaacgccctaatttcgttcagaaaaccgcggacattgagggattggccgcgagtgttcccaacactgaggacgtttatttcggtaagtcttggcatttgccaattgtttcggtttatcggatatttgccatttcctctccatttctggtaatgcttcttcgtccgttcagtcccctgcttcaccggcctttacacgccccattgggactcgacggcacggggaatcatttgcggactcacccaaagtgccacccgagcgcacattgccctcgccgcattaaaggcattccaaaaataattcgggatgttcaagaccgacttgttcactttttcaggcagtcgcatttcaaacggtggaaatggtggaggcggtcgaggcggatatgtccgatttgggcgcgactgtcctttcgcttcgggtttttgttcaaatcgtttcacgaatgaattcaatgattaaaggctgacgggggaatgacccaaaatgcgctgttcaaccaaatccaagctgatctgcttgggctcctcttggaatgctccaaaatgactgaaatcaccggatggggcgccgctttggctgctgcaattggggcgggacagataaagtgagaaaagggcaaagcgaaatgccaaagatgaaaaacgaccccatttaagtgcgaatacaatgatcgaattgcaacaacgcattcgaccgcaaagcacaatattttaccagccaaaaacggacgaggaacagagaaagaaggaaaacggacggtggaaagaagcaattcggaaagcattcagatgggcataaatgataatcaccaaataacagcagaatgattgatcattaattaatgaaattataaatatgtacaaatctaattcgggaaatgcgccacaaaaataattgcccaaagggaattcattcaaatttaaacagtggaacaattcgagtcgctttggcataatgtgaattgtgcgaatttcgccgcttctgtgcccaatcgacccaagaatatctaatcattttgttataaatgaccacaaaatgatcgatttattaattgatagagaaaacgatacaattcgccgctgtcagtccattcatttccggattcagcggcagaagagaaaggggaagggactgctcattgtcagaagattgacagccgcagattaaattgagccgaaactctgtgaaataatccgcgggggaggggaaaatcggtggtcattttggcgtagtgaacaataaataaccaatcacttcttccccttgccattgcttcttcttccctatgcttttcctccttttgtgccgtttcgctttgctcggcttcgccagtgagtgcccccgccccttttacggcatttgacatttgcatttggcacttccgaagtcagtcagcgtaattgtggcctggactacaaatggagttgcggggccaccgagtcgcaaatgagactttcgctaagtgagcaaatgtcgtgcgccgtcgcagtgcctttgtgcccgcggacactcagtcagtgaggctaacttttggcactttggccaatgctttttgtgccaattttgccaattggtcagatgcgataaacaactgctgtgtgcgccacgacgcgtgctattcccagaaaatgggtcaacaattctgcgacgatttgttctgccaatgtcttgtacattgaattagtcaatttcaataattaatttacattagtaccgtaaacattttccttaattgttgaaattgggtgattaattttcactaattttgccatgccaaaagtgcgtctcccaattggacggtccgttgtgcgcgtcgcaagtcggcgctgccttttgtgtgttggtccgcgtttttggcgttttcatttacaacaaaccggtgaactcttcaatttataaaaaataaatgacattaaaaatgagttaaaattgctttagcaatgaatgaatggtaaagcatcggcggacgaatgaattctctccgccccctccattttttaccattgcgaaaataattgctgtgataatttgaatttaattctattcttttaaattttgtctataaaattgaatttcttaggttaatcttttcttttttcttttctttcccccaattttgttccttttcatttcattttttcaattagttttgcgttttttttcttcgaaatttgcccaatcaaagtcaaattttctttctttgctatggcaacggatgttttgaacggatttttggagcgaatgaatgacaaacggacgaaaggacgacactcaaaaggaaagcagcgacagaaaacaatcagtgccaattgaatgtcaatttatgtcaaaacgaaatgtcatccgccgtttttgtttcattcgttgacatttaaaaaaaaatttttttttttaatttttacaattttttaaatggaaccgaatgaattgtccgaaaaatatgtgctcaaagcgtacgcggacatcaaaagacgtgccgaagaagaaaaggccaaaagcggtgacaattggccttcgtcgtccgccgtttcggcccgaaaatttccctttgttctcgctcaactgcggtcgattaggccaaattcactcattttggacatcggttagtctaactgaatttgcatgttattactttgtcaaaattggccaattatccattaattacaaaagtcaaaaataattatgaatttattttggggtgcggtgacaatttgcacacgaacgaacattccttcacaattggaatggatgtgaacgaaccgcggaatggcaaagaacaaaacagtgcctttgtgttggccgatgcgaatcattccccgtttcggttgaaacatttaaatgtttttcaataattctttaaaattaaatccatttttgacttttatcgaataattaattaattttgaattattaaataaacttatcaaatattcaaatcagaaaaaattcattattaaatattaagtaatacaatcaaaaaatgac

SEQ ID NO: 959 - DNA, 2814 bp, Heterodera glycines
ggtgctccatcacataccaagcgaagtccatcaaattaattgctaatttccctcgctaatttgacttttttaaggaaatgcgcttaaaatgccttcgaaattgcctttggctcgcctcgcctcgaaacgggcgaattgtcaccgccgtatgggccaaagaacaaaaagcggcaaagtttccctcaaacgatgtaatttgttgctttattgtgtgcggtgagcatgccaaacactttagaagttcaggtgctgatcccttacaatttggaagatgcgcacaaattgggcgagtttttgggaatattcgattaattaagaaaccccaaaattgagggtgggggataaggcaaattaaaaacaaattaataatttaatgggatggttgaaaagcattggtcaagcaaatgcaaaatgtgcaggacacaccgtggatataccattcaacagggacacgacgcgagaacaacgcataatgatggtaattagaaaacggtaattaacaggctaatcagtgagttgggctaagaatgcggtgccaattcgagtgaaagtgccattgaatgttcgatgtccgaatatttgccgaagagcgttcggcagagagtgttggaagtggtgagccgagctggatggcgttatccgatgatctccgtggagttttacgagcagaaattgcaatttatggccaattttatcatcgaccgattgactgaactgaggcggatcagaggtaaaaaagctaaaggctggaatactaacggcacacgccaaattcagcagatttttcgcttaaaaatggtcccgcgcgtaccaatccgcatttttccctcggccaattcgccctcaaagtgtccgcgtcggcgtttgacgatgcttttgtccatttgcgcaccatttaccgggacgtgttgaagtacttcgcattttgatgcttttctttttcttccccccccccatagatatcgctattaccatttatttgttgccgatgaattggacgatttgttgttaaaaatttggacaatcgatagaaatctggccgatttccaccgattatcagcgaatacgaaatgggcaattggtgcgcggtcatcgggaaaatcggcgacatcaaagagacgggaaggggggagggataaagcgaatcccacggaatgagtgattggcggaaagccaaaaaaggcggaaaagagcaattgtgaacaataatttgattttcctattaaataattggccattaatgagtttttttggtgttttgctttttttgtccttccgtttgcttccttttccttctcctcctcattcttttcccattttccctccgtttgtcataacattcatttaattttcgatggcaaaagaacagtttttcttcctttaataaataagcgcttttttcatcgcatttcactcgcttactctgctctcattagcgattgttaattgctttttctgcttctgattgggaaaggattaattaattatctgcttaagggggggggggtccaaaagttattttagggaggggagagaaaacagcggtgttttgccaaagagtgttggccgggggggcggggaatgaaaagcgatcggtcggtgttttctccgatttctttccgtccgtccgttgtattcttttcctttttattaaattgttttgttccaataaaaagtttattcattttcatgcggaaactaaaatttgcgggcgatgagtaattttaatgagcgaattgaaattgacgaaatcggatgccatcggcaaagaatgcaaaagtaagcgaagggagggaggaaaagcagaaaaaggaacaaaacagacaaagaaaaagcatttaaaggagcaaagggacaggcaaaaaataattaagtaattaggtaattaattggaaataattattcagcaaaatggaaagtggcgaattgttcaccttcgcttttggcgcctttgccatcgctttgattgccctcgtcattatttattacaaatgcatcgaccgacgtttgtgacaaaacatttgaaaaaaaaataaaataaatttaattatttaagcgccaaaaaaacgattttattaaatgggcacaaaaaagagaaaattgaagaaaaagccgacgaacagaaaaaaggaaaagcgacgagcaaagaaagaaagaaaaagcaaagtgaaattggaaatcaaaagaatcaaatgccatttttgttaaaatattttgaatatgttattaaatactatttaattaatgattctttgaactccatttttaaattttttcagaatgattaaaattcagtttgtacagaaaaggtcgtttatgtggcaatgaattggactgatgggttggcaattggcaatctgtgcaaatctcaaaagcatttggcactttccactctctcccaatttgcggccgctttcaaaacgaattttgtctccaatctgtccaaatttcacagcttttcaaactttaacactttcatataaaagtgacagacgaaagcgaaaaatgaaattcattaaaagtcggaacgatgaaaagcctcacgacttttgtgttctttttgataattgccgcacttccgccgattgtttctccaggtaaaattattataattatttaataattggcaactaatatttacttgtagttaatctgattttgtttagcccaatctccgccttatggccaacttcaaattaagggaagcaaattaaatgagtcgagcgggaaagaatcgtactgagaggtgagcgaaacgtttctcgaaaaattgaaaagctttttaggaatgtcactttttttggagcccatggg

SEQ ID NO: 960 - DNA, 1485 bp, Heterodera glycines
  unsure (1)..(1485): unsure at all n locations
taaatttaaatatttaagcgccaaaaaaacgattttattaatgggcacaaaaaagagannaatgaagaaaaagccgacgaacagaaaaaaggaaaagcgacgagcaaagaaagaaagaaaaagcaaagtgaaattggaaatcaaaagaatcaaatgccatttttgttaatagaaataatattttgaatatgttattaaataatatttaattaatgattctttgaactccattttttaaattttttcagaatgattaaaattcaaaatttgtagtttgtacagaaaaggtcgtttatgtggcaatgaattggactgatgggttggcaattggcaatctgtgcaaatctcaaaagcatttggcactttccactctctcccaatttgcggccgctttcaaaacgaattttgtttccaatctgtccaaatttcacagcttttcaaactttaacactttcatataaagtgacagacgaaagcaaaaaatgaaattcattaaaagtcggaacgatgaaaagcctcacgacttttgtgttctttttgataattgccgcacttccgccgattgtttctccaggtaaaattattataattatttaataattggcaactaatatttacttgtagttaatctgattttgttcagcccaatctccgccttatggccaacttcaaattaagggaagcaaattaatgagttcgagcgggaaagaaatcgtactgagaggtgagcgaaacgtttctcgaaaaattgaaagcctttttaggaatgtcacttttttggagccaatgggacccaaagtattggaacgcggaaacagtgaaacaattaaagtgcaactggggcataaacatcgtatggacaaccaaatgaaaatatttcaaaatatttcaattaattaagctccgcgctccgatgggcgtcgagggaagcgacggatatttgcaaagtgcggcggcgagtgctgcgaacactcaaaaactgatgacaattgtggacgcgtgcataaacttgggcatttatgtgataataggcgagttaaacaccatttaattggacgggggaaagtgttccattaagattggcattatacgagtgggaaagcgtacacggcacaagcggtggactttttcaagaaaatggcacaaaaatatggcaaaaacccgcatgttttgtacgaaatttggaatgaacctgttggggtggactggaacaaagtgctgaagccgtaccaccaaacagtgatttcggtaagacaaaacggaagggaagagcaaatgccaaagcacatttggcaacaatcaaaggcaatccgtgccattgaccccgacaatgtgatccttctcggcacgccaacctattcgatggatttgaacccagtgatcagcagcccaatgggcggcctaaagaacattatgtacgttacgccagtattcatttagacaataacccaataaattagtgacaaaaattatgccgaaaaaatc

SEQ ID NO: 961 - DNA, 4028 bp, Heterodera glycines
tttgttaaaggtattcgtttcacttttacgcggccgatacttctcagagtgggtacccaaatgtgcaaaatatgctcaaaaaggcaatcaaaagcggattgccggtgtttgtcactgagagcggcgccggctcaggcggaagcaatgcgcccgttaatttgccagtaatgaaccaatggtaattagcagtaatgggcaaagagttggcatctttcccattgtacaggtggtcccttttggagcagctcaaaatatcccaaatcatttgggcagtgcgcggagagggaaatttacaaaatccgctgaataaaaacacggcacccgcaaacattggacagaattgggcactaacggaatacggaaaagtggtgaagaatgtgttcacgaagaacgcaaagccgattgggtgttaaggggagagaatgaaaggaaaggaaacgaattacgaaaaagggacgaaaggaaaagccaaaggtacgatggaaattaacagaaatgagctaattacaataacaaatgtcacattaacgcatcaagaaataaaaatagccaattgaaaataacaaacactcaaaattaccaaaaatgggtcattccgaagtttatacccctaattggtcaatgtgtttgggtttttcccatttgaaactgtccgcacattttcttgtcaatttcccaggcaaattataaatccaaaaaacttattaacacgataaattaattgtacaaattaattgcatttgaacgtttgaattcgttgtttctttctctccgctggtgcccttccaaaggtcaacgggggtcactcaaagccaacggaaagtggcggaaggcgacgcaattgtttaggaagtgaatggatgaagcaaaatgtattgtctgtggtttcaaaaacgtttctttatggcgcttggatgagatgtccccccctttatccacatttatccccctcccttttgtccatattttttcccctctttttccccctcccctttcccccccccatttcattgccttccccacgtcatttctttctgtttctttctgtttgcttgcgatggcattctcagccgcccatttcctccttttcctccgtccaattttttagagttgaataaattccgttgtctgacggtagtcgaaagaaaagcgaatttgtcggaagagcacagaaagtcattggcattaaacgccattcacgattcagttaaagtcataaggagggctgggatttatatttacaaaaaatcccaaaataattaaataaattgaattaataatgtttttcgtgtattttctcagcaaaacaaagctgcaggaagaatatttaattacaaattaaatcccagccttagtcataatatttactgtaaagttcgctggcaaatgccaaattatgagtacaaatgattgatggatggatggccttttaatgcgtttactatctgagaaaacgcccccccccctcccctcacaaatttctcttttaatttttcatttaattaaatttatttttgcattccaaatcaaatgatcagaaaaataaataatcatagcaaaaagcaatcattcatctcaaaatgtacaataactgtggtcagcaaaattccaattcagctacagacgaattcattcaaacagcgaaccaacgacagttccaaacgcacttttgcggggcgcaaaatgagggagacagagcgatcggacaacgacccccaatcggcgggggaaatgtgagtgatcggagcggaaaatacaaagggatggaagctgatcagaaaggagcggcgggagttagcaaaaggactgagagaaaagcatggaagtgagagaaaagggataggagtgatcagaaaagggacggaagtaatgaaacaatgaacggaagtgaacataaaaggggtaaaagcgatcagaaagggtgatagtgatcaggaaaggatgggagagatcagaaaaggatagaactgataaaaaggggacgaaagtgatcagaaaaaggggaaagaagtgatcagaaaaaaggacagaagtgatcagaaagtaaataggagtgaatcaaaaagagacgaaagttatcataatggatagatgtgagagaaaagaaaatgaagtgatcagggagtgatcagaaatggacatggaattatcgacgctttaatgcttaagaatgcattggtgccattggacaaccgacagacaaacttttaccagcagacaatgggcggagttggaccaatgaaaagggcgtttagtgaacacgaaaatgttgatgggagaagggaagggacagacgaaaaagtgccgaaaaggagggggggggggagggaatgaaacgaacgaaatttaggagaatcagcagccaatggccaaacgtatgcatttgtcagtcacagaaagtgccgaaacaaaacggcacaacgacgggaaatttggagagcacggggaaaaggaggaagaagaggaggaaaaggaagaggaggaggaggagggagagggagaagagggagaaaacagccgaacgacaaagtgagggaggggcgaaagatagtgccacatgcgcttttgcaggtcgagcagttcggcagaaaacgaagagccgctgggctgctattcgtcctcagcggggcacccgcagcagtcgcacctttcggcccatttgatggccacgccgctccaacggactcagcacacatcggcttcgattgtataccccgaatttggccagctaaacacgccaaatggccaccgtttgcagggaaatcctttggctcactcgactccctatttgggcgccctttcgctcaattccttcccgcaacagccgctggactattggggcaattgcttcggttgttcgctgccattgaactcattgacctcctttagcaggaggtgtcgcgctgcatcagcagatgaactcccatttttcgttgatggcttccaacaaaaacatcgccgcggggggtgcctttatgccgggccacgcccccctgggccaattgacgccgtcgtcgtccgcttattacagtaacccatacggaccacaacagcacaatgtacgaagggatcaatttgagatgttgctgaagatggatgctcattcgaatttttcagcttatggcaccatttggggaaatgacggcaaatggcggcggaggcgttttttcacagcgaaatgtaaaaatattaagcattcacaggatattaacctaaggccggtccaccatttccagcagagtttccatcccattttgcaaaacaattcgtccgccaattcgccgtttcaaagccggcaattccatcgattaaaattgaaaaatgattgagcaatttcagtgacagtggcgtaggaagtgttagggcggagttaaaaggtgggtttttgaacacggagagtacacaatgggaagaatcgcagaagaagggcgaaatgagacgaggagcagcacgtcgggagggtcggacgaaagcggaagcagcggaagtgccgtgggactcaattggctgcgcgttgggggtgagtctcggcatgacacccgcaattaatgccaaaacattcattcggcagagatcagattcccaccttttttccacgcgtttggcaacggccagcaaattgacctcgaagggattaaattcgaagaagtaaaaaagcgatggaatgatttgctaatttctccgttgaggtgccgcctcgtcttgccctgttaaattgcaacaaaaaatacccaatcactttggccgaaatttaccgtcgtttgggatggccggaacatttgaacacttcctatttgagtggcattctcagaaagtggcattccatatacgtgtgtaaaattaaatttcgtttcgcacagagcaaaaaatacaaacgccgggaaggatctaagagacaaattgaacagtttgggctacggcattgacctgaggacgggccgccgcaaacagtcgtccatcacaacattcaccacactttgcgaacgtaaccaattggaaatattcggccattttcaaatttaatttag

SEQ ID NO: 962 - DNA, 946 bp, Heterodera glycines
tgatccctgcccgtattttcattatttccggaacgtctgtgttaattgagactattcattacgttttgtttattcacaaaacctattgacctatggggtgcgctaggtcgaacctaaaaaagtattagaaatattaaatttaattattatttaaaacttatttgctgaataagaattagtcaaatgaatcaaacttgatattgagaaatagctctacttatccactgctataccgtatatgctctaattatagcccatgggggattatttttcaacctcttcagaaaaggggggataattagagactgggggattatgatagagggattatttttcaaaacacctcgtagactgggggataattggagactgcgggattaatagagactgggctataattagagcatatacggtattatgtattttaaaaaaatttagcaaaaatttaaaaaaagttgtaacgaaaaaaagttcgtcatctctcctctcagtctctctctttctctgtgttttcgctcccttgtgcccccatctctctcttctctctgtctctctctctccatctctctctctttctgtctgcccctgtccccctcttcactcttgtaaacttacttcattaccttttcccatttttgttttctctcatccaagtcttttcatcagcctaaaatattttatgtcaacaaacgaactatacaacaacaacatcaacctgcaacacaccattaataaatacgccgcctttcccccacttcttcctcaaatacactctctccactttccgaagacgacaagcggcggcgtcgccttgtcctttggccagttcccacaggggcgaacttcagaaacctaaatttatttcttttagcaaattttatttttgttttcttttgctcaaatattaacaaatttttcttttttgcgagcagtttattttcatttc

SEQ ID NO: 963 - DNA, 3722 bp, Heterodera glycines
aaaacagagtcatgggtcattatttaagaaatacgcattgatattatgctgcagattatgtgttaatgttttgtttctagaattatatgtatatttttgctttaaaatgcgacaaaaataaaacgcagaaattagtaatggtcgatttgacattctttctgctttatctcataatgcaaatgatttattggaacactgagacaggtgcccttttcattagatttttttgattatttattattttttttaagttgagaccaaagcattcttctgttcgacgtaaagggatgtgagaatgaatatgtcgtgtcactttacggtgccatcggggggcctttcctttgttggggtaagctttcactttatttgtccatcatttgcagtttgtgggtgttgtgttgtcaaggatttttgttccattcccttttccgaatgattcggtttcgattggtaaattaaaatggataatccccccgctccccatcggttcggttcgatctaatcgtcgtctcattttttacatacatttgtttactgaccgaaaagggttctctttcctctcattggtcattcccgatcagatcagccggaaaaaacttcatttttcaaacggtttattagctagggtccgtccgggtccgtttttacaaaaaaaaaaaatataaaattatctgcaaaattaactaggtcgttctagagaattagacagttttcattcatcagcaaaatcggcatttaagaaatggcaacgccttttaacaaccgcattttcaaagtgccatccaacagaataaattttctgttttcgagaagctatttctttctttctttttttgctaaatttgctagacagttttcggaacattttgatcgcaaacaaaaaagaattagtattttttaagccttactaatgtaacttcataatattggatagagaaaggcatttagactaaattaaaacaatattcattaaatcaaattaggggatacacaaggcaaagtgccaccaaatgtcttaaaataatttacaatttgctttgtcaaaaagtacataaaaacaatttgtttttcgtgtctttttattgtaaaatataatttccggacattttaactgattggcacattacgtcaaagtgtttcatggtgaaatttttgtactttaaattgttttcaacacaattaataatttaaaaaataaatttaattttcttttctttttcattataaatgaagtcttacattttcacactcagaagacaaatattttttaaatactctgaataaactttttcaatttttttaattgtaaaattgccaagaaaatatttattctgctttgttatttcgtaattttttttaatattttcaaattaattaagctaaatgttgtccatcctttcttttgtgtgttattccatttatgaactcgtctccatcccgttgtatctgcgctctgatcactaaaaaataattttcttcaccgttcttccaatttttgagcatcattggcattttggtaataatttcaatttatgggtcagataatttatttttttataaatttaattgtttttttaaataaatgtaaggaaattgcccattttgtggtcgatgttgtgttctatcggttgcccatttttgctcccacttgcccatggttcggcacgtcgcccttggcactttacaccattggcacatttttggtgtattttttcgaatatccaatttatgtgcttcatattgccatcacccttaatcgctgctcgtgcgtttgggccccaatccggcacaaagaagtaaaacaaacacataaacaatttacaccattacattttctcagttttggtgccgtgcttgtgagccgacaattgcgtttgcttttgctctttctttggcattttctgcccaccgtttggtcactattgcccagttggtccaactcgacaaaacggacccgtccaagggctcaattccgctcattgtcacctaccaactttattttgtatgttcaaatttttgcgaattcatttgaaatttttgtggcacttcgtatcgctctttgattttcttgggattttcagaaattgaacctaacttttttttaatcaaaaacaggaaaatcgcgttttctaatattttattgtaaaaaaataaaaataaatacaaagaaatagaatatgatacaaaaatttatttaatattttttgaagcctattatttaaaaaaagagttcttgaatttttttttgtcctgtctgtgccacattattatttaaaaaatattcactaaattaaatattatcaaaatgcatagcattggaaagtcgaaaaataattttaaatttacattgtcaatataatgcaaattgattaatgaattaagttattatttctattttaatattttaaatttatctttaattattataattttgaagctattattccgattgattccaatttgctgaccgcttcgttcatcatttttgtgttcatctccacttcgttcattaacggcttcactttgttcaaaattgtgcagatgaaacgggcggggaagctgaaaattgcgtctcagcaagtccagttgaaactgttcatcatttcaatttggttgtcaatgacttcgacccttttgatcattttccagctaccgtaaacttatgaattaattggaaaaaaataataatttagattaattaaatgataaagtaatcatttttattatttaaaagaaaaaatattctttccataaatgttttgtatatcttttcatatctttttaaaatatttttgtgcttttattcgcctttttcatatttttatgtaaaaatcccaactaattattgcttaatcttcacaaatttggtgacatgatacactttttctttcaattacaattctttggaattcttagtcagaagattgtcaaatcaatgtgtttctaaaataaggtcgaattagcaaatcattgctaagtggtccgtgttattggaatattttcaatctcacataaattttcattttataaatttgttcattatttttgattataaaaaagcttgaaaaacggtttgtataaatatttatgttttggcctcagcttgcactttggcctgctggacaatgtttttgatgttggccagctcaactactttctgttcatgcagcagcccctggtggaaatcattggcaccgaaagtcacccgtgggtgttgttggccatgtgccgtgcactccgtgccaaaacattgccatggacaacgcaaatctcttcctgatgatttttacacattttttgttaatatattcttatatattttgtcgaaataagaacattaagctgctttttaggagttgctggataaatatcgaaattgtttttcatttgttcgtttattttaggctgaaaattgactacattgaaaatatttgttttttatttgttattttttagaacaaatttcataaaatttccaaaacttttcgagtgttttctgtttttaagaaatttgactcaaaatcgtacgatttgatcttcgggcattggtttatttgatggaactttttgctttatgaaatacgaaaaacaaattaatgaattgtcatttttaaatgggcaggcaattcatttagggatgagtaaaacttaacaactttttttttattcttttcatttaatcattttcgttgaaacaatttccaaaattcatttagttttat

SEQ ID NO: 964 - DNA, 2732 bp, Heterodera glycines
tggcctgctggacaatgtttttgatgttggccagctcaactactttctgttcatgcagcagcccctggtgaaaatcattggcaccgaaagtcacccgtgggtgttgttggccatgtgccgtgcactccgtgccaaaacattgccatggacaacgcaaatctcttcctgatgacttttacaaattttttgttaatatattcttatatattttgtcgaaataagaaccattaagctgccttttaggagttgctggataaatatcgaaattgtttttcatttgttcgtttattttaggctgaaaattgactacattgaaaatgtttgttttttatttgttattttttaaacaaatttcataaaatttccaaaacttttcgagtgttttctaatgttaccgccaggccaaaaattctgttttttaagaaatttgactcaaaaatcgtaagatttgatcttcgggcattggtttatttgattgaacttttgctttatgaaatacgaaaaaaacaaattaatgaattggcatttttaaatgggcaggcaattcatttagggatgagtaaaacttaacaactgagaacccttttttattcttttcatttaatcatttttgttgaaataatttccaaaatcatttagttttatttttttcaaagtcaatgcatattccttgctggtcgttctgtcgccggattcagttcgtaaaaaggctgaaaatgaatatttataacaaaaacaaatacgagtgattcaaaatgagaccaaagttgacaagggggttaagccatgtcaaatcgatgtctaatcttttgtcaaatcgatgtcccatatctttggttttcacatcattttttgagacgccctttttttaaattttttggggaacgtgaggggttcagtggttccgatggatattgccgggcgaaagttttgaatttttatagaatttgtagacacttcctccccctttttatcgacccccccccccccggtgcgaagggtcctctattttgtggctttgcgagcttagggagggggagccgactctcttattttttgaatgtctctaattacccaatgtctttttcgtaaaaaccggcagccatcgaattctcgcagactttggtcagctccttttcatccaattcgttcgtgaatacttcgtcaccaattggggctctgatgagccaacacttttctttgatgattcggtccatcatgcgttcctgcgtgttgttgttcaccaaattcaacgagtctgaagccatttttggcagaatgaaaaagtatttggcagcagaggaagcggacgtgaacagctgaaggtacaaatgtgttaaggtaggctacggttttctcatatctctatttttgaaagaaaaggttctaagaaaaaccaaaaaatttctgtattaaaatcctttttggagggaaaaaaacccctgctcctccaagaccaacctcacccaaacttttcaaaaaaaaaatttgttaaatttttgctaaaaaacttgtcgcccgggggtattcccccgcccaagtcgaaaccaaaggaccatctctggaatgactccctgaaccccttgcacaaaagtttggacagcaaacaaaaggacaaccattttctttctatgaatccaacccacaaaaaggaataatcttagaaacaaggacattaaaatcgttttattgctccacctctttgagcagacgacgcaaatcctggactttgtacacctcataagcaaagtcggtcatgagcactttcggctgaccatttgaaagcggcgtttgaagccactcggcgactctttggctagcggtcatttcgttttcgccaacggaggtgaagccgagacgctcatcttcagtcataatgctgagacttatcttttgaaggttgacaaagtcgccaagtccaaatccggtgagatggcgcaagcacaaaattccgttgtaactgattttgataaatgcgaagattttgtcttttccaatgagtggcaacaatcgttcggaatacagctgccaaacgaccattccggccagtccgacgtccaaaagttccaacgaaactccgccagaaaaaaacgactgccaatccttcaacaaagtgatcaccgtcttgtcaaaacatctgaaatgtgattgatggatgtatatatttaatattggattacccatacacccatctttttcaactgacattaagaaaaactacaacgagaaaaacgaaacgcagctttttcgagtatattcaagaaaattaattttggtttaaaaaaattctatagcctttaacgtttggtaccaacaatacttaagcattgaccgtaaaaatcccctcttttcagatttatgcttttaatggatcatttttctgtccaatgaacgtccgaccccgtttcttaagcaatatgatacacagactttagtttagctatgcaaaaaaattatatgaacactaatatggttaaaaaggaattttcactcaccgcaattcgatgtggttgaaaccaatgaatttgtatcgcggtcagactggacatacgaattgcgttgtcacgccttcatcaattggacccacaatcgccgagtattctgccttttcggtccagcgaatgacaatttttttgcaaacaattttcagacatttgtttacaaatgatcgggagaattggcaattttgacaaaaccctgaaacggacaagcaagccaagataacggataca

SEQ ID NO: 965 - DNA, 6049 bp, Heterodera glycines
ttttgtcctttccgatgagtggcaacaatcgttcggaatacagctgccaaacgaccattccggccagtccgacgtccaaaagttccaacgaaactccgccagaaaaaaacgactgccaatccttcaacaaattgatcaccgtcttgtcaaaacatctgaaatgtgattgatggatgtatatatttaatattggattgattacccatacacccatcctttttcaactgacattaagaaaaactacaacgagaaaaacgaaacgcagctttttcgagtatattcaagaaaattaattttggtttaaaaaaattctatagcctttaacgtttggtaccaacaatacttaagcattgaccgtaaaaatcccctcttttcagatttatgcttttaatggatcatttttctgtccaatgaacgtccgaccccgtttcttaagcaatatgatacacagactttagtttagctatgcaaaaaaattatatgaacactaatatggttaaaaaggaattttcactcaccgcaattcgatgtggttgaaaccaatgaatttgtatcgcggccagactggacatacgaattgcgttgtcacgccttcatcaattgtagccacaatcgccgagtattcttccttttcggtccagcgaatgacaatttttttgcaaacaatttcagtcatttctttacaaatgatcggagtaattgtcaattttgagaaaacactgaaatggacaagcaagcaaagattagggatacacattttgttgaaaagcggactatgatttattaatctcgtgaatgacccaaaaagcccaaaagagaaaaacggcacatttaattcacttaattattgcatttgtcctcaggctatatgtagtaatagtttagcttttcaattttgctttttgaattgttcagtaaagaaaacccactcaaaataaacaaaagttgtttgaaaagctttgtttcttttctcaattacatattgcataaaatgaaatggaaagagcattacataataatttaatttttacaaaaataaaattggtcaattgagggaaacaaaaagaaaaaagtgaatggcgaagagggggggggggggcgaatagctgaagctgacgaactttgtgccggtgctgttatggtgcgttaacaaccacaggacccttttaaccggcaccattaatgagaggagccaatgaggaggagcattaaaatctgtaaaagtgataacacatacagagaaagaaagagatggacaccacgaaagagagagacggagagaaagagagagagagagacagatagacatactgacagagatagaaaaagagcgaacaagagaaaggaaaaagagacagacagacaaagagggagaaagaaaaagagagacatacagaaagacagagatggcgaaaattggtagaagggatgagagacgaacagagaggcaccagtgaaaaaagataccgtagattttttatttttgtagttatttttctcaaaaatttttggagagagagagagagggtggcggtgctgatagccgacgcaatataaaaatttgacccagaaattggcaatttccttataattccttaaaattggctcaaatcgcaaattctggtaatttctttgaataaaacctattaataattcaatttcagcttcaccgagcttccttccacaaaattcttcttgaaaaagagttccgcaaaaaagagatgtgaaaataaaaaagtgaattcttatgtgataccgagtttttattaatttggttgcgtttaagcaaactttatacgaattttctcggaaaacctttgaaaattggcatttctacgaacgccaatagtggcatttttatgaaatgacccagcacgggccaatgtacgtcgtacgggggggggggcacttggttgctctcaatgaatacccgggatacgacccgattggtccggatccaaaaatacactgcaaaaataagcaaggtaaaaagatgaaaagatcaaatatatttttgaaatagctaattgtctattctaaccgtttttggttcaaaatttgttaaataaccttattacttcgattaggaatttttattggatttttaatataattttcagggaatttaataatttttcaatgggacccatctgatgagttatcagaatttcgctagaattttactatagcacaaaacgactcacttatcacttggtggcacagttggcatcgattctctgtgaaattgaatttaaatttcttatttttgtggcatttacccaatgtccgtctcccgaaagctaaagaagacggcattcttatcaaaacagatctgatcattatcttcttcagttttccgtaagttttcacgacgaattcgagagtgcatttcgaaatggcagcagccccaaatgcaattagttagagtgttattcgacggcacattgtgcagctcggaatgtttaaatgaaccatgcatttgggagaatgaactgttgaaggagttgatgggaacgaatttctcaccgaaatgctggaaaagttttaacatggacaaaaaaagtagaatataaaagaaaaatatggacaaaacactaaaacaaagaaaatctttcccaaattctgagaaaatttgctcagatttcttctaatttcataagaatgtctgatcaaaagtaccactgtttcattacgaaggccagaaagatttaaatatttttttcagatttacgtaaatgtttcttagttttttcaattcgttaattttgcagcacgttttcggattaggatccagcaaaatcccacgcgggaccacgtgccgctcttggctcactcgcaggtgccccacatttcttaaatcattcctattcagagctctttttcggctgtttcacacttttctgcctacgagtgcacaattttcattgcgccatttttgtgccaaattccaaaatgccccccttttacttccgtgagttttgtcaacatcggttccatcgacgaaatatgcaaaaatttgcataactcctgccagaaagtgttcttgtcgttaccgtccaaacactaaaatgattacggtacaatcagagaccaataaaacaatctgataactaagaaagtatgaaaggccaaaattatgttcaaaaaccatttaaatattttgaaaaagcttgaagcaattgcgcagcaatgcgcgatcaaatccttcccccctatgaacaaatgtttttcattttattttttattggtagtgtataatatattttttaagtaaattataaaactttttttattgaacttaatttattactacgtcacagttttttaccttcacttcaaaatattttcaatttttaaaattattttaattccaaaaaactaacattttaaatctgtctgttaataattttaaaaaaaattaactaaaataagtaccaaaattgattgaatccaatgagacaaattgattttttaaaaattttttaactaaattatagcaaattataaatttttattatttcgcaaaaatccattaattatttaaagggcttctggtttagtcagctgacgaacaactcagctaatgggacaattcgactgatggacaactccgccgtacaataaattttacaaaataaagcctaagcttaagcctaaagctccggcctagcttagctacgcccttgctagccccgcgcaccgcccagcggcgccagtcggcatcgctggcagtaacgactctttaattcaaaaaaaatcgactcaaaacctcccaaacttggctatttctgaaaatcaaattgaaacttcagattcttttctccggcggtgtgtctgccagcactgccggcccccctcccatacataggatttttcaaaaattgccaataaattttctgaagttaaaagcctttgtgttcaaaaccagatttatcctctaatcgtttaattcaattatttaaatttacaataaatttagttctatttcgatttcttctagtcccttacgaaatacgcattgtatttggtcatttctttggaagggattggatgaattaaaataaattttaaaacattttttgagtttaatttagtctaattgtttttttcacatgaaaaataaatgaaatgaaaaaaatattttttacattttaatatttttgtttgggaaaaataataaaaatttctaattctttaaatcccggttcccgacaagtcccgtccgttttaaattcccattcccgtccttactccaattaaaattacacattttgttaattgatgataattacgacgcacccattgacactgtattggtgcccattcctttcgagcataatccgtacagcacatggccatcgaatgcgacaccaatcgcttttcgcactcgcagcgtcccgccgcgggattggtattgcgcagcaccacgaaacgcttcccgctatacaagcaaattgccttgatgttctcgttgctgatcattggccacaccgtttcggccatgacctcccaacattgtccttcaagcagacaaatgctcaaaatgatgtccaatttgaaaaggtgccgattttggcgcagaaattcgatgacactgccgtcgatgtaactgcgcaaaaagttatgtactttttttaagtttcttcgcattatggttaccgaatagtaagctgcttaaagccgaccacattcttcggcagtggttgcgaaattggcactttggactgtgtgccgtcggcattccgtttgacaatttgcgcaccgacggtgccattctccgaccgtcgaatgtcgaaggagccaattgtccattttcttgttccgaggtgaaattccactatagcatcaaatcgagcggagaccagcgcaattttgagcccaagaacggcgtgcccaacaaagggaaacgcatcgagcaaaaggtcatcgcaaacacggctaaagcaataaaaaaactctgatcaattaagcatttaaacacggatcaaattaattagtaaggtcaaattaatcaagcatttattcattgtttagccccacttacatttttttatgaaaattttgctgtacacgggggtgatcagacatttgtgatagaaatagcaaaaataaaaaatttctgaataatttgaaaatatttattcgagatgtggaattaatttgccaaatcacttccaaatacatggaaaattgaatcctttttatatacaataatttttttatacgcatgattaaaccgtggaattgttgcacaaaatagcgacggaaatcacaattctagataaataaataaaaagtacccataatttatcaaaaaatatattaaaaaagacacctttaataattgcctttaactaaaaaaaatcggctaaaaacctaatttttaagatcaattaaaatcctaaacataaaaaactatcactcgaaaccaaaaaaatattcaaatcaaaacaaaaaaaccactgatcaaacttattgtttattaaattaattttgaaatatttgaaacaaattcattaatgttctaaattagagttttttttacagtttttcattttttgcgtgccccgaacggcttctgacaaaatcggacattttcggtctgatatttcggggccggaaattgcgactaaaatttgggtaaattttggtaccagaaaaagcggatacatattaaaacttaatcatttttgcattctgatttcaggtatttcgcatttctgagaatttttaagaaattttagaaatccctaaaaaatacgaaatttcgcaattttttcgtacatattttcattttttgaatatattttaaggttttgagtatttatagaaacttcttatgaaaaattgaaaaagaatttttttttaccgaaattttgtacactttttgtaatatttcttacatattcgggattttttttaatgtaaatattgtgatttttcttgtaaaatctaaaacaaagaattttttatcaatgagtttgtttaaggctcccagaaaaataaatggcttaggaagtaagcagcccaaattattggagtttgtcaa

SEQ ID NO: 966 - DNA, 3971 bp, Heterodera glycines
ggaaatcatccggaacatcctctgcatccacaatgaacacattcgatcacacggcccttaaatattctaagatattaggaaataattatttgttaaaaaaattttaatttaaaaaagtgataacaactttctggggttttcctgttgagaaagggggaggaaggcgacggcaataacaggaagggggccaagccatcgaattgataacttttaactttttgcagtactttttaaagaaaataaattttggtggggctggtggtaatgaaaggtgtcgccagaaaaggaaaatgccgactaatgttttacccaccgcctcgagtttcgacttgggcacacgacaaatgcaattagttccaaagtttgtgtccctcgtctgaatacaacgcaaacaacacaaattttcaaaacccggcttcttccatttggccaccaattgggcgtcgattagtctcgcatcgatgcaaaattggtataattcgcgagaaattttctcttccttatagaaaaggtcgtaaatgtatcgggaacgctggtgatggatctaaaagaaatgaaaggccatttaatagaagaaaaatcacccggaacaacggccaaacggtctcagtcctccgtttcccctgaattttgtccaatttaacaatggttgatcgacccactcattgccagcccacctcatgcggttcagtctcggcctctcgcattttcgcctcgaactcctccaatgtcggttcaattaagtcccatccctccgggggtttcttccgcaatcttcgcaattttgtagtgagagacattggattactgtgtaaaagtgtgatgaaaaaccgtaaaattaacaaaaataaaatgaaacaaatattaggcgagttaaccaaaaaaatgtcaatttgccaaaagattttaccattaatttatgatagtctttaatatagcaaataaaataaaagtttagttttataactccgaaacccctttggctatggttggttgtcctcccctttctcattgcgcttcttcattttttcctccttcgtcgattgcttcagcaaattgctccaccgtttccaatgtctttgttgtttctgcttcactttcattctgttcaattcgttcccatcctcctcctcccttttccctcccctcgccctcctcattttgccatttctgttggtcatcgctttcgttcgtttgcacatcactcaatatttcattgaagacactttcatgtttacacaatacaaaaagggttttgcttcggaatttgaatgcattgcgctgaaaaggaaatgatgtgtaagttattagttatcataaatgaaaaatgatgggggtcacaacgtttcctcccaaaaagtaaattgcactcaattttattttataaatcggcggcgcgtctaccgacactacctgacccaaaaattccaattgcgaaagcacctccccttttcctgtatgtttgttattccgtctgtccatctcagagcggttcatttccaacatggttaatgggccattccgaaaaggccctttcatgattagcatgaccatttgtcatcatcgatggacggcagacccgtatatttttcattcccccaccctttggatacggactcgatgatggataaaatagaagaaactcaaaaaagacactcacataatcctccacaggacaatgtgaagatcggaaaaagtgaacgcatttctcatggggaaaacaatggaagaagcatcggttgaagaacggaacgaaatatttgagcagaagagaaatggccctcttggcagaaacaatttcagcagaaaccgaaagaaaagaatcgacccatttgaaaacgttttgcaggcaaaaaagaaaaatgccaaaaacttgacgtacctaaaagaagaaacatcagaataaagaagagaaatcattaagtaaatacaagaataatcgaaaatgaatgacgcaaatcattcaaaatgtcgatgagcaaattgccaaacacgcaaatatcatcccaaatgcaaagttcaagcggtgccgaaagaacgctcaaatcaatggacgggtgaccactgtcctcaaagtcttggcgagtattttcaaaaatgtccccatcaataaggtcaagtctttttaactctgttaaactataacaaccaagtcgttaagttttataaatattttcgtaccaattggtcgctgtttcgacccttctcctgcatatttccagaaccatttgagcaaattcgttgacaaccagcggcctgaagtccaaccccatccgcccaaatgaaaaggcgaaactcatgagctgaagaagatacaactccattccgttgcatattttggcaaagtaacgattccctttccctataccttcgtatgcatcacttccatgtccaaataattcttgttctccgatccacgcaaaagactggagagtctctcaatgtttctctgggcccacgaatgaaggaggaaattctgagaactgccagtccatctctcccaacgcgggtcctcactagaagctgccttaactgtgataattcttatccaaacaattcaaatttccatggacgaacgaattttttatgttgcacgtcacagtcgggaaaaacagccaagtaaaggacgattgtgtcgtacatacattccctgtaaacatcaatcgcacgcaaaaagaagtcgggttcggactgaaaaggactgttttcgtaaaagccgaaggttgacgtatttaccatgacacgctgaatatttttgtccatgtaaatgtctctgtactggagaatggactctctgagttggatatttgagatgaaggggatctttctgatgttattgacaatctgagtcaattaggaaagagtaaatattaaaagggcacaaaagaatcaaaaattcaaatgcgaaaccgtcatgtaaacatcacaattcagtttgaagattaatattccaaagaatttcaatttaaacctgaatgctccgagataagtcaatcggacccgcaaatttgctaaacaattcattaaggagattatggcgtgcttcgattaacacatcgacaactttcttaatgcgaaaataaatggttagtgccgtatttttccgcctaaacaacttcttaccgcaagcatagcattcttttgggtgagtttgctttgctttaaagaaattgcaaaatttgttagagaatacgcttgctcataacgacccgtgcgaatgtatttgtccattaactaatgaccaaaatatttgtccaaatgacatcaaataaaaaaacctttggaagacgcaacaccttccaaatgatattgctgaccgactcgacttcatgcagcaatttgtactcctcggtgaacttttctgagtccgaattggccagattaatacacccaattaggtctgggaattccgctttcagctttaccaaaaagctattcatttcagcaaacttaaaaatagaacaaacataagaataaagttaccacggataactgaccatttctttacaatgttcggccgttcgtccgacgtccacataagtgcggtagttgtgaaaggccaaatcactcaattcattctgcaaatgctgaatccgaccaacgacccggtctttctcagaacctaaaaacaagaaaaaaattatttgagtttatttccgaaaattaatactgatttcgccaaaattaagcgatgcaaattctttttcaacggccattttctcttcgatatccatcgcaatttgatgtaaagtcaatcgaataaaatattcaataactaaaaagtagagtagagcgggaattcccggtcatccgaggtcccggtccggattttgaaaagctcaggtcccggtggcaaccgggaaaaacaagcactggtaagaatgggggtctgagtgaaaaattagtgatgaaaattggagttaaagggaaaaaattaaataatcataaatatattctttcaaagaaccaat

SEQ ID NO: 967 - DNA, 2158 bp, Heterodera glycines
ggcgagagacgagaggcgagagtaccaaaaatggcgagagttggcgagaggcgagagacgagaggcgagagttgtcccacccctgctatgtatgtttgtatatagaaatgttcgaattactcaatctgaaggtccttaaagcgaattttatagggcagcggacggtccggcatcggatgcacttcgtcacacatggtccaaaatttttcggaaatcggaattccgaccccaaaaacgtcggaaatcggaattcggaaatcggaaatcggaaatttttcaaaaaacataaaaaataataaaaattttctaaatattttaataggctaaattttaaattcttaaccaagtaaaagatgactcaaaaattttttgatctatttaaaaacatatttgctttaaaaaattattcaatgattttcatcaaaaattttacctttttttgcggcgcgttttttcaaaatttttcgaaacatggcgggggaggtccgacggtgccgataggcgccgccggggaaaatttttataattttaatgcaaattctggcactttttgtccaaaaaatgacaaatttagcgatttgagcaaaaatttctcaagaaaaataagattttagggtccggcggtgccgataggcgtgcgccgccgggaaatttttgaaaatttcagtgcaatttattaacaaaatttgtaaacaattgttaattttttgaaaaaaaattaaaaaaaatttccgaaaatttccgactttttatcaaaaatttcggaaatcggaagtcggaattccgacgtccaaaattttttcggaaatcggaattccgactccaaaaatatcggaaatcggaattccgtgccatccctgcactacaccacataagattatggaaaaatattttaaatgaaataaaatttatttttttttctcaaaaatttctcattcctcaccaattcccttctcttttctcaccagaccctcattcttaccagtgcttatttagtcccgctggaaccggaactagcaaaaccgggaccgggatttctgtttttccaaaaaccgggaccgggacctaaaaaaccgggaattcccgtacaagtcccgtgcaactctaatggaaactgatggaaagatgagagggatgggtaggataatcgaaatagacgagaccaaagtgtacagggctaaaaataatagaggatggatttaaatcatacatggatgtttgaaaacgactagaacccgccgttgataagtatcacattattgccagttgaaccagtaagtggaggacgacgtcgacaacagaacagcgagcggaacgttcatcacagcagcagtggtgtttgcgttctttctcgcctctaattgagccgtttttgccgtcgttgtaacagcggtttccggtgacatctcaccatcttccatcaccgctgacggtgtgtttaaattttctcagcttttggtcctgttcagagtcttttactacatctaatcgacttccttttcacttttttagacttaattcatcaaaagatttcatttgtaccgtttaaaaatccactaagtcagttcctatgacatacatactacttcaaaaaggagtgcatactacaatattaacttatttgtgctattttcgacatgttggataaacaataatttatcatatggcttagccagggagtgtacgcccactaattcgaatttctaaaacacacccttaaaaatcgaatttttgagctcagccccccccccccccgaagcttagagtaaacgcacccaagaaaacacaatttattttcatttaacaaaaaaacaacattttcatcactcaaaaaaacgttgtcatcgcctcaaaatttaattaacgtcgcctttcttcgctttgatcggatctccaatcgatttcgtttcgctcgaagacgcattcggcgcattgtcaagcacaagagacgagtccgatgccacggtggtcggaggcggcgaattcggcgcgtggtccagcacaagtgacgagtccgatgccacggtggtcggaggcggcgaattcggcgcgtggtccagcacaagtgacgagtccgatgccacggtggtcggaggcggcgaattcggcgcgtggtccagaacaagtgacgagtccgatgccagggtgtcggaggcgg

SEQ ID NO: 968 - DNA, 4440 bp, Heterodera glycines
ttttcttaataacttctttacagctcaaattttttttttggtttttcgtaggtgtaatagggcttctgaagggctttagaatgatatcaagactattagatttggttgtcaaagaaaaaagttatagtccaaaaacaagggctggcgccgaaacggcggcgccgaaacgacctagtccccatttcgttctcacattctatattctctcgtctccccttctctatgcgctcacataggtacatattttttgaatttctgacttttgcgtttcctcttcattggctccaccggactaaagcgtttctttcctaattctttctttatcttctcaaatttgaacagcaaaatgcctgtttaaaattttggatttatttatttgaaaatattttgtcagacttgataagttaaatttcaattttaaatggaataatgtaacccgtctttccaggtgttattttttcaaaaaatgggggggggcaaagcaaaaaacgccgatttacaggttgatataattgtaagctaacatataaaattatagaaaatttttcgaatttttaatcaaaaattttgaaaaaaatcccgggtcccggcgggatcccgtcccggtccattttccaagtcccggtcccggccatttcaaaattccggtctctaaaaatcagcatctcctcaaaaaaaatcagcattaaataaataccctgtttacttgttctttatttttcattttaaggtttgtcaacgcgacgaaagcctcgcgattggcccattacaacaagcggtccacgatctcatcgcgcgaaattcagacggctgtccgactgattctacccggcgagttggccaaaaatgccgtgtccgaggggaccaaggcggtgacgaagtacacctcgtcaaaatgagcaggagatgatgaaagcggtggtgatcggacggaaaaacaaaatatcccaaacggccctctttagggccacaatcactcaaatggacgcgaatgacattcttttcctgttttgtatttgcacgcaaataaattgaattacgctttagtagattgggagattttggctaattattaaatgatgtgctaaatggtcatacctaattgtttgcttttggtacaattggtggtaaaattaaagaatatgtgtacctcgccgaattcgacgagtgatatttaattcgacgtttctcggtctgtaatgcacgaatccgaaagaattttttggcggaaaccactttgggccgagttatgggcccgtgactaagcagcgcccgccttggtgagcatgcgaagacggagggtggaggaagcagtctgacgagcgccacaggtggttgactgcgggggcccccgccaatcagtcaaccgcctgtggatcacgcgcggacttcttccctagcccgtagtctcgccccacctattggccgccgtattcgagtgtgcggtgttttggccaaaatacactcaccaatttctattcttttgatccccgagcccataactttttacactatgttcccgagaggaaccgattgttatatattttcttggagattagacgttggacggttcagtccctaagtcattttgccaattcagtcccgggtaaaaattctttcggattcgttagcaacagaccaagaggaatcaaatgatataccattcaacaagaaaatcggagttgtcagtattcttcgctttttcttaaaagagagattcaatttgttattgtggtcaaccaagtcttctataaaatttgagtttagttcttgcctttccttccataagatcctcaaattcgacacatttaatttcgattagccgcttgtactcatggtcgagtaattcgatgtttggagtcttgttaacttctgcctctgccttagcaatatcctcctctgcattatattgcagtttattctaaaaggcaaatttttattcaataaagttgaaaaaccatactctggagaatcccaaattggacaaatttgcttggatatatgcattcctaaaaaataattctgtaattaattcatcaatttactagcttacgtgccagaaccacgagcagttggtagtcctacgttgttgtacattgtaaaagtgtttgtcaaaaaatcttaaaatttgttttaaaattttgcataggcccatattttgaccccctctatcgaatccctgtttattttttcgaagttatgtttttaactcgagatcggctcttctaattttacaagggaaaatcccaaaaaaattttaagttttgcaaagttttggcgttctgattcctaaataaataataaacttatttgcactgggagcccaaaagtcaagcacactgtgcagagaaaagcctagtactatctcgtcgtttctctttttctttgtaatttctctcactttggcgtactatctcttcattttaattatgtaaaaaacaacatttacttttctatgtgtaactttttttctttatgttaaatccgtaccaaattttgcatagcgatagagaaaaaaattctgcatcgattaataaggaaatttaatacaaaaataaggctcactcaaaagttatttggtgaaaaattttgtgaatttctttttctctctttttggcgtactattttcacatctctaacacacaaaaaacatcaaattcgtaaatgctaataattttggttgtaaaggaacaaaatcactttgagcatttagaatcaatagaaaaaagaataaatttagcattttggttagaaagagctgcctaggacttgagttataacatgataaaagtttgaaattccgacaacttttttctgagatgacaaattgttcgggtgatgaccccgagagagacatttaatttattttatttatgtaattccctctctctgtctcccgcactatttctctcatttaattgtgtctgcactccctttgtaaaggtcagacacatcatccctcccccatattgtgacccccgctcatttccaatattcattctgttttcttgttgtattcccacattttcctccgattgtcctccgccccaaatatttatttatttgtttccaataaataattgattatttattggactgtttaagctcggttaggtaagaccgaacaattggcgacgcctctcttcgactcaagccgggttggctgagcatcatcatcaaaagccgagtcggcaatcaacaattttgaaattctaaagccgggttggctatcatcgaatttcttaagccgagtcggccatcatccaatttgaaattctaaagccgggttggctatcatcgaatttcacaaagcctggctggcattcgtcgaaaagcagaaaaccaaaactgcaaaattcttcaaagccgagttggcattcgtcataaattgctgaaagcgaacacaactcaaaatggctgcgaacttcgaccaattagtgagattgatgacgcagcaacagcaacaatttgaggaccaacaaaaattggtgcagcagcagtcgcaacaaattgcgcagttgctagcaaaccaaaatgctgcaaacatcgcagctggtcaacaaaatccgccaaatgcagttgccattccttcgctgccggacatttcgctgttcgaagtgtgtgatgagaagagtcgtgtgagcgaatggctcgaccgattcaaattcgccctcgactgcgccgcgccaacagcaagtgatcaaattaaggtgaaatcgctgatgaacaagctgagcgagatggctttcagcgagtatagccgatctgttctgccagcttcagtcacagatttcgatttttcgacgacagtgcagaaactggagaagcttttcgccaaaccccagtcaatcttcatcgataggtatgaatgccttaaagcggtgaggggagagggcgaggagtttcggcacttcataaatcggcacaaaaagctgatcaacgacttcaagttcgacgatttgaagaaagagcaattttatgcattaatgctcttaacggcacttaaatcgccgagcgacgcagcactgaggcagcgaatattggctaaattggcaacggatggacaaaacgtgtcgtatgatggaattgtggaagacctcatcaacttccaatcaacgattgcggaggctcgagcgatcgaaacgccgatcagctctcgaaatgttaatgctgtccaccaaaagggcaagaaaaacttcctgccgaagaacaaattccccaaaagtggacaaaccacaacggcgaacaaaagttgttggcgatgcggagaatgtgaccatcagccaatcaactgccgattcaaagtgacaaagtgtcacaaatgtggtgccatgggtcacttgggaaagaaatgtgaaagtgttcaggcatggaagaaacaacaaagtgcaaagatgatgagaaacaagaaaatcggacatttgaggatcggaatgacct

SEQ ID NO: 969 - DNA, 4856 bp, Heterodera glycines
tctgttctgccagcttcagtcaccgattttgacttctccctcacagtgcagaaactggagaagcttttcgccaaacccctgtcaatcttcatcgataggtatgaatgccttaaagcggtgaggggagagggcgaggagtttcggcacttcataaatcggcacaaaaagctgatcaacgacttcaagttcgacgatttgaagaaagagcaattttatgcattaatgctcttaacggcacttaaatcgccgagcgacgcagcactgaggcagcgaatattggctaaattggcaacggatggacaaaacgtgacgtatgatggaatagtggaagatttaatcaacttccaatcaacaattgcggaggctcgagcgatcgaaacgccgatcagctctcggaatgtaaatgctgtccatcaaaagggcaagcagagtttcctgccgaagaacaaattccccaaaagtggacaaaccacaacggcgaacaaaagttgttggcgatgcggagaatgtgaccatcagccaatcaactgccgattcaaagtgacaaagtgtcacaaatgtggtgccatgggtcacttgggaaagaaatgtgaaagtgttcaggcatggaagaaacaacaaagtgcaaagatgatgggaaacaagaaaatcggacatttgaggatcggaatgacctcctgttcgatcaatgcactttcgttgatgcagatcaaaattctgctgaaccaacaaaaagtccaattcttcctcgacaccggatcggacatcgacgtgattgatgagtttacttatgccgacattggcaagccaccgatcgaagcgtgcgacgaaattgggaagacctttgatggaaaagaagttccattcattggaaaaggtattggcatattcaaattcggcgagattgaagtgaaacgaccattttacgtggcaaagaaaggctcacttaatctgctgagttgccaaaccatggacaaatttggtttgttggacgaaatgaagctgaagatcagcaacgtggcagtaaacttgtgcaacgccggccgcccaaagggagagaaaattatccccagtggcacaaaacaaatggccggcacagaagccaaaattgaggcattgaaaagggcctttcccgaagtcgttaaagacgggttaggactctgcacaaaggagaaggcacggctgtcgttaaagaagacgccgcaccaatttttcgaaaggcacgtcctgtgccatacaactctttggaagttgtcgaaaaagaattgggccgattggaaaagatggacgtcatcagcaaagtcgatcatttgaactgggcagcgccgattctaattgtgaaaaaggccgacggctcagcacgactttgcatcgactattcgacaggtctaaatgatgctcttctcgactgccagcacccgctcccagttccagaggatatttttgccaccctgaatggaggtaaaattttttcccaaatcgatctgagggacgcgtatttgcaaatcgaattggacgaagaatccaaagatttgtgcggattggccacacataaagggaattaccgaatggaacggttgcccttcggtgtaaagtcggcaccaagcatattccaatcaattatggataaaatgctggccggactaaattttgccaccgcttaccttgacgacatcattgttgtcagcgggacaaccgaacaacacgttcgacatttggaagaagtattttcccgaatccaagcctacggattccgagtaaaattggaaaagtcatccttcttccgagaccaaatcaaatatttgggtcaaataatcgatcggaacggacgccgaccggacccagcaaaaactcatgcaatcgctcaaatgccggctccaaaggacatttcgtcactccgatcattcctcggcatggtaaaccattaccaacagtttgtcaagaacatgcgcttcactcggaagcctttggacgacatgctgaaggatgacgttgaatggaagtggacggaagaacgacaaaaagcattccaaaaattgaaggaagtgcttacatcggaactgctcctcacccattatgatcctaaattggacataattgtggcagccgatgcgtcggaactcggaattggggccgtcatttcccacaaattctcgaacggacaaatgaaagcaattgcacatgcctcaaggtcgctcactccagcagagaaaaactactctcaaattgaaaaagagggcctggcattgatttttgcagtgcaaaagttccacaaaatgatctacggcagacacttcacattacaaactgatcacaaaccgctgatcagtattttcggaagcaaaaaaggcataaggcagtgcagcgcaaatcggctgcttcgctggtcacttactttgctggcctacgacttcgacattgaatatgtcaacaccaaagattttggtcaagccgacgcgctttctcgcctgattgccaaagaatttgagtgtgatgatgaacgagtgatcgccgcgtgtaacatcgacgaagatcttggaatgattttggatatggcaaaacaaattctgccaatcaaatttgaaaatttggtctcagagtccaaaaaggacaaaacaatgcaaattgttatgaaattcgtcagagacggttggcctgatgaacgcaaattggcgccacaatcagaagaaattgagcttttcggcagaagaaaagccgatctgacaattctgaaagactgtctgatgtatggcgaacgaattgtgatccctgaaattttccggaccaaaatcttgacactgctacacaagggccatcctggaattaaaaggatgaaacaactcgcccggcagtatgtcttctggccaaaattggatcaacaaattgaggaattcgtcaagaattgtgcaccgtgtcaattggccgctaaggcaccgacgaaaacggatttgcactcatggccaaaatcaacgcggccatggcaacgaattcatgccgattatgcgggccctttcttcggaaaagaatttctgattgttgtggactcatattcgaagtacccggaggtattcgaaatggccactaaatcagcggccgcaacaatcgaacgactgcgttatctcttcacacgtcacggtataccggaaacattggtaaccgacaacggaacgcagttcgccgctagtgaattcgcaaaattcacagaagcaaatgtaattgcacatctcttttccgctccgtacaacccaatgtccaatggacaagcggaacggttcgtggacacatttaaaagggcttttcgaaaaataaaaggggagggagtgccaaataaggaaatcatcaacactttcctggtcacttaccgcacgacaccgaacgattcgctgccggatgcaaaaacccctgccgaaatgctccttggccgaaaaccgcgcacaacgattgatctcctaatgccgcctcttccacagccaacggagagagacacaaaaatggagcacatttcaatcgccggtttggcgcccgaccacagaaatttgtgtcaaataagccagtttgggctcgacaccgactctcgcagaattggagagctgggacaatttgtgattgctccggagtcatctacacggtcaaattccccgacggttcgacaaatcgctttcatgcgaatcaattgagaaaccgggaaaacaccgaaaatggccatgaaccattggcaattttaaatgaggcattccatctgccgatcaccgcaccgaacgttggaattgtagggcaggaccttgagccaaggcctgacccgatcaacgatgagcaccaggacgagatcgaaccggagcaggcccgtcgaagcccgacaccgcagcaacaacaagtgccgcgccggagtggacgaaaccgccgagcccctgatcggtactcgcccggatgagcccaatcaaaaggggaggtgttcgggtgatgaccccgagagagacatttaatttattttatttatgtaattccctctctctgtctcccgcactatttctctcatttaattgtgtctgcactccctttgtaaaggtcagacacatcatccctcccccatattgtgacccccgctcatttccaatattcattctgttttcttgttgtattcccacatttttcctccgattgtcctccgccccaaatatttatttatttgtttccaataaataattgattatttattggactgtttaagctcggttaggtaagaccgaacattattattattagcttattattcaattttaaattatattattaattaatttaattaattaataatataattattttaatctattaattatttttctgaccataattataatttaaatatattatttaatatttcccaaacaagttacagttttacgagagaaatacagtgccccaaaaaagtcttgactcaaacctgaaaaactatcttatagttcatttaaatacttgaaataatttatgcttgcacaacttttggtgctgatcaaaaaagtctcttacatcaacttgatcagatcactcctttgtagtgaacgggacacccaaaatacactgaaaatcggggaaattttcaaaatccctagggggttgggaaattttttctagagaaaatgggcaagcccactggcaagagcacaaaatttgctaccgaattgttattggaatagtggttctacgatttgtatatagaaagttatacttggttgaaaattgatcaccataaaaatgatcaatttttgatcaacgccataactttttccagaagcatccaaattgagcatacttggtatcatttgatagcaacgaagtgtcctctatttgccttt

SEQ ID NO: 970 - DNA, 1085 bp, Heterodera glycines
  unsure (1)..(1085): unsure at all n locations
catatcagacaagacaatgatgaccagaatgattatttaataaaaataaataaatcgagaccggcatgaaccattaattttaagcgatcttttcagttaatttttttcttttctaatatatttctaaaattaaataattaataagttaaaaactccagaagctttgtgaatggtaacaaatttggttgtcagaaacgcccaaaaattatttcaaaatcgcatttttaaatcagcacttgctgttatatgaaatttttatgctcatccgatgcaaaaattacggtaattttggcattttaccatataatttggatttcaaacatttaattacagtacccaacagacgaacacacgccggttacggtcaattatcattattttaccaattagcactgacagctagctatttgatcaatttggccatgtatcaattgctgtatatgctttagctcccgtttggggtaattgtttttcgctgattttccattttaataatctttataacttttgttgctaaaaattattattttagaatttcataattgtatcagtttcaagaatttaatcggtaaaaatcaattcactaatgtcattttatggcaattatttttgggatttttagcaattaaaaattcggtctttttttgttaatgaggtttaaatataactgttattcatcacattcaaggtcgccatttcatggaaagtggctttatttaagcactgaatatcgccgcgtatctgcactttaattgaacacttgttggacaaaaatggtaataatttaattcagaaaaattaaaaattttaaatagacaattaaattcattttttgcatctttactataatttaatgttaattcaactgaatcgcttctgatactcattatcaaaacacggatttgttttgtcctttaatatatacaattttgttttacaaatttgcaagaacaaaatgattggtaattcgccaaattaccataaggagaaccaattaaaaatttaattcgctcaacaataaccagctgaacaaaaatgtaccaaaattcgaaattttaaggttttagtcttcagaantagttatt

SEQ ID NO: 971 - DNA, 1877 bp, Heterodera glycines
gaggatttgagtatttttctggctttttgataaattttgaggatttttgacgctttttgggaaaattcttagaatctgttaaattttatgaataattttgataaatttttctaatgtttgataattatttaatttgggttttaatagaacatcaaaaaaaaaatctcatccaaatttttcaaaaaaatttgctaaatttttcataaaaaccagaaaataaccaatttttccgaaaatctacaaaattaggaattcttttatgaaaatctgctaataatgtggtcccaaggcggcgcctatcggcaccacttggaccctagaaatccttaattttcttaaatcggttcaaatcgcaaaaggtttgttatttttgtagacaaatgttttaacaagtcgcattaaaaattatcggcaccgccggccacccttgttctccaatgatggaccttaaaaatataacatttgattttaagcatgtttagaataaatttattaaaaataaggcttttttgcctgccaaatgatgcttttgaaaattgtaatctgggagccatgtttatgagctctgacttttgaagttgtttaatattaaattgaattctgtgtttgatttcgttttttcattttctattaatttaaagttttatcattttttataatatatttaagcaacttgcttcacactcatttcataacagtgaaaaatatttctatgatttgtttctatttattagtgttaagaatgatataaaaaatttttttttaattcgttaacaattattcaaaaaagaaacaaagaaaaatttaggcgcgccaacgaacaaaaaatgtcgtcaagacactgacatatttagttgtatttctaccgcttttttaaaataaaaaaatattatttgatctacatggttttggtattatatttcattattattggtaaaattcataaattaggatttcatttggaatttctttaatcaatggtaaaaatattataccataaattctggaaaaattcgaattttcagaaaaaattcagaactcagttctgaatgggtgttttggaaaatattcaaaaacaacaattgaaaaagttgcaggtcctcaaaaaacggaaagacaaataattaattaagtcaagaaaatttaatttaattaattatttaaattgtttatttattccatcaaaaatagaatataaattatacctgctttagtatacataatagtttttatgctattttttacaaaatgtttgattaaataaaattttgaatttaattcaaaatgattttaaccattttgttttctgcaaacatttatcaaatttagtgatacatttcttgttggttttacggtgttagactcgtattcttgtgtgcaaagaaatgccgaaattcgtgtgaggcgattaatgcatccgttgttctcgttttttggctttaaagttgaataatttattctgttattaaaaaatcttcatctatttaaaataatttacagtaaaataaaataataaatcaataaatgatcaccattaaaactcataattatttatttgagagaaaacagaaaaatcatctaagaatcataataaaaagaattttattgcataaataacaaataaagcgtatggattattaaaaaaataattaaagagatttatattcaaaaaaggctgaaagaaacgaaacattaaaattaatttttctaataaaaagaaatcaaaaattattttaattattcaaaaataaatatagtgcatatcattttttcaaaattaacataatttcgtaaagaaaaatgttcaaatcacatttttaatcaaaattgagtcaacaaaattgtaacgaaatttaacgatacaacaatttaatttg

SEQ ID NO: 972 - DNA, 11989 bp, Heterodera glycines
aatttgtggttttaggatgtttaaaaatgaaagaaaaataaaaatgggaatatttaatttattaattaaatttcaattgaaataatgtaaagaaaatatgaacatagcaataaatgaaataaataatttaattattttctcaaaaatttctccttctttattaatttccttctcttttcttacccatacccctattcttaacagtgcttaatttagtcccgccgggaccgggacctgaaaaagcgggatttctcgccccattcccggtcccgaccagctctagtctcaagtgtagaaaagtctaatttggcataccttttattgttttttattttcttgaaaggaagaaatacactcaattagattaaaattttatatttttcgtgtttcaccagctaaccgagtttaaatttctatcaacaagcatacctcacaattatcattagggatgatatttataggcactaaaaaccgtcaaaataggtaggccttaggctctaaaaaacccccaaaataggccctaaaaatggaaaataggcactaaaaacctcgtttttaggggtgtaaaatgacaaaatgtattcaaaaaagtaaaaaaattaggccaaatcagtactgagatatataatttttaaagcacaaattattgtcaagaaaataaataaataaatttttgatatgaattttcaaaaagtttttcatttcttataagtgtatttttgaaaaaatttcgggtcgattcttaagggtgtatttttttttttaattttagtcgattcttaggggtgcatttttcgtttttattgcatttttgttaatacttttgggcaaaatgccaaaataggcaaaaataggctctttcaaaattttttaggctttttaggcgctaaaaataaaagcctagaaaataggcactaataactcgaaaagtagcttaacaacagcccaaaaaaacatgttttttgtgcgtttcaggccacggagagctcaggaaaaaaataggcttttgcctaaaaatttcatccctagttgtcactttctttggttttgttcagctccgcccgaccccgcctatgctgacgatgctttggtggccttccaacgcattgtcttctccaagccatatttgttgcttaatgtcgaatacaaaacgacgggcgcctcttcgcccaccgttgacgcggtctctctctattgggatgaagcggcggcgagcagtgccaaaagttgtggggccgaaaaaacgcgggatgtggggcgccaactcgtcgcggatggacacgctttggtcgagaaacgacgggaggcgcgactacagccgctggtgtgtcggtggtgggaaggcatggatattatacagggcgcatttgccaggaatattaaagcacaaatgttggcattattccttggattaagctgaaagactacgctgaggcagagcagcaggcgcgcaaggcccacctgaacatgtggcgctacggcgacttcactggcagcgaactgtgaatgttgacggtgctctgaaagttcggacagactgtgcagtgagcggcggagtgtgggaattgttgcctttgttattattcaacggatgggttaccaagcgaattctttcctttttacgtttattttcacattttcatatttatttagcgtagagaaaaatgttgaattttgttgtttctcaccacttcccatctttggactcacttctaagtttcaatcggtaaacaaaaagcattcatttcaaactatgccaatgttctgtgattgttattgttattctttctaacataattccatttcggggataaattggaagttgaatttgacgaattcatttttatggcctttaaacagccgaagggatatcatctttttaatggagaatattggatttctattaaaagttgaaaatggatgattcggctcgtcagggccaagcccaccgagctggtcttttcaaaacagcgcccaaaaaacactcaattgggcgtcaccgaagcaaacgcgcaatcgctcgacttcaaaagggttcgtttctgttacatattacagttctttattgtgttcaatttaatttgttaaggcaaaattagtgccaattctctgaatgtccagaagcgtcacgccctcagcaaaacggaacgacggcagagattgtctcagattcgagcgaataaaagtgccaaattaacggaaaagcgaaggcttgaaggtgatgccccgtttttggtggtgagttgttttcagtagattttaactttttggttcgatcattgctttgttagacagtcgtttcgctggacaattctcgcccggcacaacaaattgtccaatttttttctaaagctgacgctgaatcgaaggcattcgaaggtggccaaagcgtcgtttgccatttgaagtgcgcatgttccgttggcactttcatgttgttccgttcgttcagtgttcctcgttttcgtgctcgtttctccttcctttgcccttccactttccagtccgtgttagattctgtccgtgcttctgatctgcttctgctcatttggccgcttggcgtcgaatgtttactgtcaacgcaagagcgattgcttgccgcgctacttgcccagggattgccgaccacaattaatgccgttagtggaatgccaaaatcgggaaaacagcgcgagacggcacgtaaacagttggacacagtgatgagaaactggtaaagcgaagcatttgcgaagaaaaaaaaacatttaccaaaaccaatctaaaattatttcttgttttgttagataattaaaattgcttttggggcaggcatacggaacacaaaagcaatgtttacgacttggacactgccggcgatgcactcaaaattctgaggcaaatatcaaccgggaaaaagtcgacgactaatttgcaaggacaacggtcctatgtggtggttgagaatgtgcaatctgatgaagaacacgaggtaccttctaaaatacggcaaaatcaaaatttttttttgtgctaatttttaggcgaattcactaaagtgcactttaaaagtgagcggctttttacggggagcaccattgagcgtcaacaaattggtcagtctaaccaatgagcgtaagaaaaacaaacaatgtcttgttttttgagcgttttattattatttttttaaaattttaacccgttatttacttttcccgtttgctaaggttcatttgcccggttggggcgatttccaattggcacgcattgaccgcactttggagccatgtccaatgaagacgccgaatgacaaggtaaacccacccatattatgttttttgtactgctgcacattgccattttatttttgaaccctccgaccggtgatgtcaaattcgctgtgttagcaaaagcagaccccgccaagcgaactccattggattcggaaattgtgccggatccgatggaagccgaacaaacatggccaaatgaaaacgaaatcgaagaaaacaaatgtaaaaacagaacaatgcttccaactcttagtgaaattaagtcgtcgtgccaaaggtcagcagaaaagtgcccaagggaacctcagaataccaagcgagttggctaattgattctgatggaacggacgaaaatgacgaggacgaaagcgaagaagccgaggtaaaagcagcgaatgaaatgggcgagggagaagggtcattcattcgctgtaaaattaggaggaggagagagaggacgaacaaatgggagaaagtgaagatggcaaagccgacgacgaacagagcattttgagcgcaggggaggaatcggaaatggacgcggggaacgatgacgacgacggcacggacgaagcggcacgcgaacgcttccgtcagcaacgagaaaatttgcaatggccggacgaggtggagacaccgcgggatatctccgcgagggagcgattccaacgctaccgaggcctgaaaagttttaggcaagttacaacaccaacagcaaaaaggaactaattgtaggatttttcaaccatcaggacgagtccttgggaccccaaggaaaatttgccgcatgactatgctcgcatttacaaatttgtcgatttcaaacggacccgaaaattagcttttgccgaggctcaagaagcatttaaaacaaacacaacgggtgaatttgcacatcctggcacatacgttacgctgcacattgcaaatatgccgcgacgaattctcggtgaactttcaattgattcttgttggttttaagccttttctgcagattttatgggtccctcgtcgcctccgctggtcatctacggtttgctcaggcatgagcatcgcatgaccgttctaaacgtcgtcctccaaaagcaccaattcggctcaaacgcggtcatcaaaagcaaagaccgactcattttccaagtcggctgtcgtcgctttgccgcctcacctttattttcacagaacacaaacggccaaaaattcaaggttctcgttttaagaagcgattggcacttgcaaattaacatttccattctttttcagttggaacgctttatgccttcccagggcgctttttgtgccactctttttgcccccgtcacttacccaccgacgaatgtcaccgttttccttgctcacaattcacaacccgcggaactcgtggcgtatggaattttactcaatgtcaaccccgaccgcatagttctgaaacggactgttttgtctgggcacccgtacaaagtgaacaagaggacagctgtggtacggtatatgttctacaacagaggtcggtgatggtcatttatccctttaaatgctttccttttcagaagacatcgaatggttcaaaccagtggagctttacacgcacgaaggcaggcgaggccgaatcaaacaggcaaattggacgacatgccaaccattggtttaatttgtatttgtgtttagccactcggcactcacggactggtgaaatgtgtgtttgaccaaccgctgagtgtccaggactccgtgctgatgaatctgtacaagcgtgtgtttccaaaatgggactacgacgaccgattggaagggacaaatgcgacgaattcggacggaaggaattccaattttgaggaggaggaagaaaaagggggaaaaagagggggaaagacggtgactttcctggagaaaatgataatcgaataagccattcgattgattgccaccatttttaaacatttatttttgttatttgttgaagaaaattgaaattgttgacagttttctcctgtatttcgtttttcgatgtcattccgaaccgtttttatgccttattttgttccgttttcccaattgtcggatggattccgcgcgtcaatcgcgcgcacgtgcagttgtggtagctcatttcggcaccgatgtgttggggccgctccgtgggtttgacaacaacattggcacagtcgaacgtcgtcttcgagagtattgcaaaattcgggtctgctcttttattctaccggtgacttttcttggattatcttttgtcttgtcccctcatcaagagtggcactgcggtgggtgccgtctttccggcggcgcttgccaatggcattcatccgtttgttgatgcatgcaccgcgggtgaatctgccaagaattgtcggcactaaactacgtttgttcagtttttgccaatttgcttaactctgctgaccgcttcatcgtcttggcttattcttcccttttcgactttttccttctctacggcgaatttcccctttccgatcaccatcgtttgtctgatcgcaattgcgtcgaaatgatcagcgactttttgccccatttgcgttctttggacacttttgcgtgccaatgcgaacggctcgcctcgtgcattttgcatcagctcttcgcccttttggcggttcagcagccgatcagttcgccccttccgattggctttgtccgcgatttgcccatggaaagggcgtggcgttgtctgggcgatttgctgtcccttttcctcggtctctcctcccgttgctcttccgttctctctttcaccctccttttcagtgtttgacgaactgatcggccaccatccgttccttcgctcccattgggctcagtttgtccgttcagtgcgtctcgctcagcacaatccctcccaatttgcgctgtacggacagtccggccgattggagcaatttaatggagaaattgctcgattggatgccgaattgatgagcgggaatatttttggggtgtgaatccgaaccccattgaaccccctggaggatagaaacataacccttgggctgctcttctgtactttctgccttccttttactgttccttctgaagggcatctgtcgtcgtctcgcttctctcatcttcggccgtccgtcccccccggcgccgtcttccgccgaccaacgcgcctttgtcgaacgattccgtcgcgtcataatgacctcattggcgcgttgggaacgtttgtcggctgcggaagatgccattcctgacaaacaacatcttctctcactgttggcattggcaaaattgttccattttgtgttggcagaaatcaacagaaatgagaatagcaaacggaagagtgtcgtcgaccggaaaatgatacgagcactgtacgcgacacacaaaagagttggtcaaagacaaagggacaatcctgcgaaagcatgggcagtttggctgtgcgcttttaggtcgtttcgttctatttgatcggtgatattctgttcactcccgctgaacacatcgccaaggcattcgacccaatcgatacggacgcaatcgaccgaaaagcgagggcatcctccgaccaagcacaagcagtgctattagaacatcaaattgagcaaatgagaagagacgcacagacggtgccatggcctcatggtcatgtgaattgatttcatcagaattttagttgaaactttgtgtgactgaatggtgtcacaaaatggaccaattcgaatgtttcccaccgaccaatggcgagccaatggaggaaatcgtcgaccggaaatgcaatttgttgttcgatggagcccaaatttcaggcaatcagccattttaaaaggcgttcagtttacactcaaatttcagatagaattgggcgccttctcaagtgcattttgaacggtcatttggctgctaatcggcctttgtccaaacacaatgccaagcttttgtttgaactcatccaacatgtcaaggtgtcggtcaatgcaaactgttctccgaagtttgatcaccgccaattgtttccactccaattttagcgaatttcctcaactttcgatctccgctggccttcggttttagaatgggctcagtttggctgtgccaaggcttcgtctgcactcatccgacttttggatggccaaatcgcagcactgcccccctcttctggcgaatcctttgataaaaatgcatttgccgtggctgcctttcgcaatgcccaaatggcactggcacaaatggtcaccaaagatggcattgtcttttgcggaattgcgctggagatggccaattacagcgtgtgccattgccaaacattgaacttaattcccattatttacttttggcactctctgtagaaacttctccgtcccgcggatgtccagcgggtggacgaccttttggttcgtctcgatttgctctccgatttcgatgcgctgctccgccgtgtcactgattggtcctttctttattggcatcgtcagtttctctgtgaaactttttgcaattttttggtctccgacccaacggcggtcagcgatttgaccggcataaaagtgtgaattgttggaaaggattcccgacctatcgttttattcagtacttttttgatgcactcaacgacagcacccgtcactttctgcaaaacgccgtcctttccgatcaccgcacactttcggacacttttggcaccgaaatgtttgccatcgtcaaagagatcagtcaattagagtcgtcaattttaattacctttccttttttgttttagaaatttttggatttgttatgcatgcaaattgaaaatgatttgcgcctttcgtaccattcgcagcaaaatgtttctttggattcgatggaacgctcactttttgctgaaacatccgatggcaatattgggaacggtggcggcaccgccccacggcaccaccagcaggaggagggccaactttggcatgggcactcggaaagcgcaacttcgccaatggttgcaagcgtttcggcaaagctgctgcacttgccgcccttccatttgggcaacaaactgatcagtgtcaaaggtgggctcagttggccgtcctttcgctgatcgttcgatttggttttcgtcagcgttcgtccgatgccatttggagtccaccttctacaatttgtctgtgctcgctttgcacgattgcgacagttatcgccgcatggctttgttggccctccatcgttaccatttgcggttggccgactcggggctgcccaatatgagtgttgaccagggtcagtcagtcagtcggtgcttcggttgtgaagtccctcccagggttggaccttctcgcggtgatggccgatgtggacacttttgtggccgattactgttacgatttgaacgaacaagtcggagtttgccgaaaaggccttttttagcgattcggatggcgcttttcctggacatcaattttagtttttcatcgaacgcaacgaacacggaaagacacagctgaacattttgcgggtccatcaggtgatcaattcggtgaaaacccacggactcggcattctccactctttggcatgttttgttttgtccattttcaaattggtcgttcattatcgtaaagatcaattcggcttacaaatttctgcgtgtgcaattccaacgcctttcgcgctgtctttttgacgaacgcatcaaaaagcttttgatgcaagagattctgttttatcgtgacgcaatggacgaattggaccaaatggtgctgggaatgtgcccattttgattgacttttcagggaatgccttttcagtacccaatgggccgagctgagaaattggccaatgctttacttcgttttgactgtgctgcgcttccaaatgctatggccacaagtgatgactgtctgaacaaacttcgggtaattcgttgatcgctaaacacgaccattttccatcgccatttccctgaaaggtgttggtcactcggatgggcaatttgctcggccttttgcgactgattcggacgggggtcgtcgagttctgttcgccgctcattttccatcgctttttgagtgccattgaagccgaacaaaagtccattgagccacagcaaagtccaaaaggcactcgagttgctgaagaagcacgtcttttatacggccgtgccttccaaaatgccatgtccaatttgacggagtcgcgcgactgcgtcgaggcattcaatggaggagagggcacaactcaaaaccattttgaattcagctgctcacttcggtattcgcgcgtgagtttcgctgtaatgggcccaaaaagtacgcccatctccgccactttttcatcgtcgtgcccgcccttacgctgtgccatgttgaacatacgacgagttgcagggcacgccttcagacgagcgcgaggagagaggctacggaaacgaaagacccacgcgcacagcagcagcaacagatggtttttgtggaggacggattcagcatgggcaagtggcgacagagggaagggaagggatggacaaataaatgcgcggggggaaaagacagtccaccaacaaagcaaggcgaactgttgcgcaatacaagcttttcccattagggatggcccttttgcgtaattgctccattttccccttaattggtccctttcctcttaaggcattgcttatgtgctcacacttttcaaccaacgctttttcttcgattctttgaattggagtaactctgtacaaaatcgcttttttcgtgctgagttggcacagtgcgcggcagaactgaaagaggcacaaaaacgaaaagatgagtcattggcacaggttttggcagtgaaagcggtcagttaaacggtttaaaatgagaataacatttgtttgtttaggctcagttggaggaaaggcgagcggaacatcggcttttggagtgcacaataaattcggcacttacacttttccaagcgaacgaacttttgggggaggaggaggaagaagagacatttttagaagacctttgaaaggacacaagaaattcagaattttattttagaaaattactagtaataaattattttactgagtttttcatcccttctttcaattgaatcttcataggataaattgaggaatgtttttttcgtaaaatccaaggtcatcatcgccgaacacgcagaaaatcacagtgtcgagcttaaattgttaatttaacagaaaactaaaactaatgatttactccgtcccctaccttttcattgttttggccttcggtcagccaatctctcacagttttaatcgcaatttcagaggcttccttttttgggaagttgtaaactccggtcgaaatgcatggaaaagcctaaaatacgagtagaaggaaaaccccttgtaagttacgatggatctcaatttgttgtcgcgagccaggcttagcgagttggcgtagcagtcgcgcaactgtcggcactgttcgtccgacacttcagtcccaatttgaggcccgacggtgtgaatgatagctaaacatttggacgatttgtgagcaaatcgtcgttgaattgtcctgcctttgatgtttggcatcaaattatacgcttttgtgatcttcgcttcgccgacttcgcaccctttcagtgttcggcattcctccaacaattgtggacccgccgcccgatggatggccccgtcgacaccgccgcctgcattttgaaagaaaggcctttgtgccattgttttgtttcgtttggacacaaacccccaagcagtgagctgttggccgcgttcacaatgcaatccgtagtcattttggtgatgtctcctttcaaaacggaaaatttgcttcgcaaagaaagtgccatttttcaattctgaactaaaggagaaggaaggcaaaactgcaactaataaatcgaaacaataaagaattgacacaatttgaaatcagaatcactaacattagaagaacatttaaaaaaagtttttttaaaagaaagtaattagcaaatgacaatgaaaaagaatcacttatccttatcatcatacatatgtcaattaaagttcagtaattaaagcttgttgttagagtctatccacactttcatcccttcaaatcaaaagcagaaattggaatgagcggattctctgaaaaacttatgcgcgatcgcctgcagaaactgtccaacacagcccattcagtaattcattcccatttcactgttttctcattgggctgggcgaaaaggaaagtctgagaaatgttaaaaatgattttatggggaagccgtcccttttctcttcggatttgtcaattgtccctcagattcaaacgctctccgcttggcttcttcaccatgcaaaaaaacacgcggattgcattttggactgttggcttaaggttcgttttttatgacttaatttgacaaattcttttattattcgttaaactaatcccttttttcccaggaagtgcgcaataattcggagaacgaacgactgatcagtctgattaatttggcaaacgatgtgatacaaaacagtcgaaagaaagtgccctcctttatggcagccttttttgaagtgttacagccggcatttgtccatgcctccgagtgtttggacgaatcgcaccggaaaatggtggcgcgaatcgttgcggtaatttccaaatggaaaagttttttgaaaatttgaccccgaatggctaaatttagtacttcactacaaaatcctgctttttcgccccagcgctcaaaatttgaaaaaaaccact

SEQ ID NO: 973 - DNA, 4002 bp, Heterodera glycines
ttgatttttgatgcgtttcgagaagaagaagacttacacacacattctcccattgttttgtgtgaagaataaactgataaaaagaagtgatcagttgattatggagacaaaaacaaaacaaccgaaattatgaaagaagatgacaaaaagtgataaagcgaatgatgtttgttatttcggattgagataataataataattgtggtcccttagtgttatggttcacataataaagaactgttgaattcgatttctattaataccagggtcgcgatctgtccttttttaagaaatgttctgaattaggggtagcaaccaagtttttgagcccggttgcactataatgtacaattttgctaattccctcttcaaaattattaaaattgataatggcggcgaaaatattatttattgtaaaataacttattggaataaaaaagttttgagatcctctaaaaccaaatgattatgttcacaagggatgacaaaatagaagaacaaaatcaaataataaatgaaggagtggaggagagagggaggaggggaagaaaacacctcacagagcaaaaagagaaggggaaaaggaaagtaaaaaagtgctctttgtacccaaatagtaattcggatttcaaaaggggagaggagggggaacgatgacctcagtaagaaaataaaacaaatacataatgttaaataagaagggtcaaaagcaataaagatgtataattgagcgcggaatttcgaatcgccaagaccgggactttaaatttgacccggacgggagttcccggactttctaaaagattaatgaacatttgttaaatatgtataataaaaacttcaaaaaacatgacgagtcgttaaaaaagtgcaaaggtttttaaaattcactgatcaccgaccgatttctataattcatagcaaaaagacaataaaattatcaaatatttaattttcttttctaaatatttgaatttgtctgccacgcccaattttcagtcaggtggtcatttgtttataaccaaaatgtttaatcgaccaaaacccaattttaagtatagaaaatattctgaaaaaattcctgctaactataagttaacctttgatgctgacctattaagtcttttacagtaacttggtcagatcacttcttcatggtgctggacactccaaaatacactgaaaatctggtaaattccgaaaaaatccctaggggattgggaaaaatttttcgtaattttgattttggcgacatcggtttaaatggttgtccgcttatattaaaatatctttgatatgcgaatactgtatttttaattattttcttttttgttatattgcatcttttttaacgtcgtagcaccaaaaaagattcttatgtattaaaatcattggatactttccgttatgccgcccaccccaataaaaaaatggatgggaataaaaaccaagaaaatctaattaattgaagtcataaagtgcgatatattttattaatttcatttatacatacaattaaaaataaaattaattaaaaggattcaaatggtttgaccaagtttgacaaacgcaattgttcactcgcatatttattcagcaactgcctgaacttcttctcttcgctcaaatcttacgccatcaccttggctgaaaaacaaactcatcagcgaaaaacccatataaaaaattatctaaataaactcacctgctaaacagaggaaaaaaccatttccatttgacggtgccaaacacttcgtggaagttgcggcgaatgcccaagtcaaaggcacgcttgtcttcgccatatgtgaagaccggcggaccaacgatcatttctgattcaataaagaagaaagggatgatcaaaagatcacataaattcaccaagagatgtacgatttttggatatcaaacaaagatgtcaagttaaaaagaaagtcagagaaaggccaagcaaaaacatcagaacgaagagaaaagtgacgagaatccggcaaacttcatcccaaaatgtgctaaacttagaggaaaatggttttactggtagaaaaattggaaaaaatgaaactaacataaaaagggaaaaatggtggagaaaataaaaacggaaagaagccaagcatagccaacgaactgcacaaagaatttatagttgttgaaacggatgcaggcattaatctgatagaagggaaaaggagtcaatggattgtatccgacggaaatcacaaacgcacccatgggcaatgatggtcgtacttcctgaaaggaacaaccagaaaatgttaaatgctcacagaaagcaacgtccacaggtggaacaatggtggcatctgtcgggcttaatgcaggcgcatcgcatgcaaaagcgaatagcttaacaaaacgacgtgtcaaaatgatgccaattcaattccaaaatgaatgagttccacctccgttttgggccctgcaagcgagctcaattttctgatccattacataacgttcaataattgcgtagaattctttggtgttatatgctctgcttctgatgatgcccttcaattcttcatcaatttgggcgggaatgttgaattgaaaaacaataaagtgatcaaaatgtgcactgtgtgccgcacattgtccggaggtctttcattaggagcgatcattgtttgaaccattgtccaaaggaagagaaaaaacaaaacgtggaaagggaccagcaaggcgagcctaacttcgaacgattcgattattcctgtaagaaacaaaaaaataatttcggctagaataagtgcaaggaatgaacgaacgtaccaaaacataaaactcgcataaacatcccgtcccgcaaagaattttgagttccaatcccgcagcgggatccgcaaatttgactttttgtgcgggattctgcgggattttattgatttttttgaaaaattttatggacaaaatgccaaatatttttgaataaattaaatattaaaatttatcgcaaatttcattcaaaatttgtgaaattttcccggcggcgcctatcggcaccgccggatggccttcaccctattttttcttttaaaaaattaactcaaaattacaaaattggtcaattttagacaaaatctgttaacaaatcgcattaaattttcaaaaatttctccagctgtgcctatcagggctgggacgcgaccgcgatccgcgaatcgcggcgtttttttttgcgcgatccgcgaatcgcggcgtcttttttgcgcgatccgcgaccgcgaaaatttgaatccgcgatgcgtgaccgcgggatttttttatgcgcggcgcgccgcgcatttttggggcagaatttttataaagaaaatttttttgaagcgattttcttttttgaatatccaaagtttaaatgaaaattatttgaaaacttggattatttttctcgaaaattagtttaaaaattccatatttaccccgtcagagctgacaaatccttttcgtttcaaaaattccaatttttccacgtcgaagctgacaaaactttaattttctttaaaaaaaatggctagtaaatcacaaaataggttattctttacaaaatcttttaccaaattgcactaattttcaaaaattttgccggatccaccatgcccccatcagttctcaaaagttttttagaaaaagcgcgccgaaaaaagcggtctgaaaatataacaaatcacaggatttgcgtgtcatttggacactgacgcgcccccccccccaccccttcctccagtcccatcgcaaatcttacacatatgcaccgagatttaattgattttttataaaaaggaaatttttaaaggaagttaaaaaaaagtatgttaaaaaaggagaaaattttgaggttttactccgcccaccgacgtaatttgaatccgcgaccgcggggattttcctgtgcccccccccaccctgggtgcctattggcacaagcagaaccccctcagttttcaattttttgaaaaaaacttcgccgcaaaaaaa

SEQ ID NO: 974 - DNA, 2736 bp, Heterodera glycines
  unsure (1)..(2736): unsure at all n locations
tttgggccctgcaagcgagctccattttctgatccattacataacgttcaataattgggtagaatctttggtggtatatgctctgcttctgatgatggcctcaattcttcatcaatttggcggggaatgtgaatgnaaaaacaataaagtgatcaaaatgtgcactgtgtgccgcacattgtccggaggtctttcattaggagcgatcattgtttgaaccattgtccaaaggaagagaaaaaacaaaacgtggaaagggaccagcaaggcgagcctaacttcgaacgattcgattattcctgtaagaaacaaaaaaataatttcggctagaataagtgcaaggaatgaacgaacgtaccaaaacataaaactcgcataaacatcccgtcccgcaaagaattttgagttccaatcccgcagcgggatccgcaaatttgactttttgtgcgggattctgcgggattttattgatttttttgaaaaattttatggacaaaatgccaaatatttttgaataaattaaatattaaaatttatcgcaaatttcattcaaaatttgtgaaattttcccggcggcgcctatcggcaccgccggatggccttcaccctattttttcttttaaaaaattaactcaaaattacaaaattggtcaattttagacaaaatctgttaacaaatcgcattaaattttcaaaaatttctccagctgtgcctatcagggctgggacgcgaccgcgatccgcgaatcgcggcgtttttttttgcgcgatccgcgaatcgcggcgtcttttttgcgcgatccgcgaccgcgaaaatttgaatccgcgattagtaaatcacaaaataggttattctttacaaaatcttttaccaaattgcactaattttcaaaaattttgccggatccaccatgcccccatcagttctcaaaagttttttagaaaaagcgcgccgaaaaaagcggtctgaaaatataacaaatcacaggatttgcgtgtcatttggacactgacgcgcccccccccccaccccttcctccagtcccatcgcaaatcttacacatatgcaccgagatttaattgattttttataataaggaaatttttaaaaaagtttaaaaaaatgtatgtttaaaaagttgaaaattttgagtttttaaatccgcgaccgcggcaaattgaatccgcgaccgcgggatttttctgtgcgcgccccacccctggtgcctatcggcacagcagaacccctcagttctcagttttttgaaaaaatttcgcgcaaaaaaagcggttttgaaaagcaacaaaataatcaaatttaaggaccattaacaggtttgattttgatctctttttaccgtctgatccattcgaaaaatcttagtcgacccatcagccccttttaatggatcccgccagcccctaaaaattattttttaaaaatttcaggtattttttgatttttggaaattttttgaaatttaatcgaaactttttcgaactttgcaaaatcccacaatcccgcgcgggatcccgcaaattttaaatgcgggattaatcccgcgggatcccgtcccgcaaaaaattttgagttctaatcccgcagcgggatccgcaaatttgaaatttccggtctctaatgtcaacccaccgagtcaattttaacctctcagtcaaaaaaataatctcaaaaaatttaatacgttctttaaaagcatcttttaggaaattttagggggaatctgattcatttaggattcaaagcaaaactcggagatttaaaatttttgaagttttttgtttcaaaaaatgtctcaactacctgtacacatggaaaaaacaaaaccccgagatttcgtagtttttatgcatgttaatattattaaactacaaaaaattgctgtaaacattttcagcactgaaaaataaaatagcatagcgttttttggctaatactatggcatcaattatttttgaactcgactttattaaaatggtcacgcttgaactgctcgagcactttttgcttccgtggctgggcttccattcttcagttaaccgttgtaacaacaccgacgcgcgtcaattgccagcaacgatggtcaaatgcaaagtacagaagagggatgacgaagaggagaaaaggggaacaaagtggaaaagaatgggcgtaattagcaaaggcacgtacagcaaaattgagaaggtgtgcagagtggagaaaccgcaactgatcgccgcgtgcaaggttaaaaaatacaaaatggaaaaacggaggatggaaggcttaaaagtggctttgtcttcccccaaccatttaccccttcaaaatcctaaaaaacggcgctttttgccactccactcccttgctaaacaaaccatgggaaaattaaatatttcgaatggttgcactgtaagttttatattttcaatgttttttggcaactccgattttcttattttttggcaactccgattttcttatttttgatattcattttttattcgttctttcatttactctccaattttcaagatcatttctctgcaagagggcgaaggaatcgacgactttcttgtcgaaattgaaattctcacgcaatgcaaaggccagccgaacatcgtagaactgatctcatactattttcacgagcagaaacttttcgtaagtaaaaaataccattttcttcggaaaacggtcccaggggggggggagggtacgtacgagcaaaaggc

SEQ ID NO: 975 - DNA, 4352 bp, Heterodera glycines
cttatatattttaaaagccaaaaatggaattttcccaaacaactctcgaattagtatcgtttttagcacaaaaaaaattttgaaaatattttactgccctcaaaaacaccaaatttaagcatgaaatagggagtggtggcacaaattagttaatgaaggggccatttgggtacaaaagcgaacacacagaaagaaaaaaaagaaatgctagtgaagaaaacactttgttaaaaaaaacaatcattttaatggttattattaggattataaattatatgattttgcatatttttctgcaccaatttaatgcatcaataataaatgatggaagcagaatttgtaaatattaattaatgtaaaaaagaaaagaaaaatttttctaacccttgttgagcagcagtttttttggttacccgacatttgcggaccgacatttgcggatttttaaagccgacatttgcggacaaacacttttgcggatagaaacattttttttttcagttattaaacaccaaaaattaacaaaattttttatttaatttccctaatatcgattaacaaatcacgaattgtttaacaaataaacaactgtaagtatttcttttggagcgttgcgtacagcagcaaaactgacattccttcgatgtttttctttatgcgacttttgaaccattttcgccttaatcttttttatccaaccataaaggcaaatttcggttaaagatgtttttccggtaacgtcctccagataagcgaaaacagatcaggtttccgatcatttattgtgttgccccatgtgtattcaccgagttgaacggttatggggaagaatttgaaggctctacaataccgacttattaaaaaacagttttgatcgttgggatgattaaattcgaaaggaattaacattgattgagaaaatttttgttgataaaaaataatgaaaaaagctatccgcaaatgtcggtccgcaatataattcagccgaagaaaaaaaagaaattcagccatacagcggagcaaaacaaacaaaaatttcgcttcctaacctttttaaagtaaattagcgcaaaatgtccttaagtttaaaatcaaaatttgtagtgcgaacttatctttttttattttatcgatactatgacgaaaaatcaaaaaattatgggcctcaaaaaattgagatgcttccataaaattatcaaaaattttagttacctagcctaatacgaaaaaatactagaaaaattcaaaaagaaaatttcaaggaaattcaaggaaataaaatcgaccctgctctatccaatggtatataacacatatgcattttccgacttacagttcgggtggttcccttgttagattttcaaaaaagctaaaatacttttttttcttcaaattttttaattttttttgcggcgacgttatgtcccggcgacgttttgtcggcgatgttttgtcctgttccggagcccaccttaaatttttaactaaaaatatcttttttatgacttaaatttgttgaaaaacaggactgtggttacttttaaatagcttaattgaacattaaaaaagtatcacttaattttatagccgattttggcgtatccgccatcatgaagaacaacgagcgacgcgactcgttcatcggcacgccatattggatggcaccggaggtgatcatctgcgagacgttcaaggaccggccgtacgactgcagaggtcatcgtcgtctaatgtccttttttgggccactgttttccctattaaaaagggcacaaaaaactgtgcaaacactccaaattattaattaactttgtttaatagcgacagattttgcgtttgcgcaacgcgtggattgactagtcaatccgtgcacaaatctgaccaattcccacgagtcattggccttaaaccaaaaacatttcttattcttataattagttgccattaattaatgatattattatttggaccggaaacccctcactgattttgacaatatacagcactggttgaagcacacctgcttaattttaaattttttagctgacatttggtccctcggcatcacttgcattgaaatggcacagatggaacctcccaattacaatatgaatccaatgcgcgtggcgttcaaagtgcagaaatcagagcctccaaccctcgaacagccacacaaatggacgaccgaattcagcgactttctgcttaaatgtctcgtcaaaaaagtggacgaacggtggggcgcttcacaattgctaatggtcagtctttggaatgggaaaaggataaacagtttaatattttacctattgtaaacagtcataggaaggaaaatgttgtagcaccatcagatttttccgggtgcactacgttcccccccccccccggccacttatttgactctcgacactcatttctctttcgacttcaccactcatttctctctcgatttcatatgcttgatcagatttcataaacctgatgaaatgtaagcatctttgaattcaaaaccgatttaaaattattttccaaatttaggtgcgttaacattaaacatattttggtggtaatactattgtatatgaaaactgttttcggtcaagtacaaagattaccagttgatcagatttttattgctttaaattttcaaaaattttggttctcaaaaatagaagtgccaattaatatgtagcattgattgacttactttttcatgtcctttggcttgtatgttccctttttgaacagttccaacgccaacttaaaaaatcgataattgcgttgttttctattcattgtatttcttttattgagtctatttacattataataataccagctttttcttatcttgtttaatttttattttgcattttttgtttttacacccccccccccccaataaaaagaaagaaaccgaaaatttcagacatatattaattaacaaagcctgatgcgaggaaataacatgtaaatcagcgactccaacttttttttgttgcttttctcagcatatttgtagtttatctttgccttgttgtttctcacgatcgtctttgccttttttcaaatgcattttcgatctctttttttcgccacttcaaggtgtctaagtgtcaccctatttgcaggacggttccaccacgaatcgctcgagagcacgatctataattttttttttgatattttcaggtcgtagaaaaactggctttacacaccatcccgaaaatgagttatattttaattgaaaattgaccccctttgaattttattaaagccaattccgaatgcttaacctaactttcaaggaccaaaaattaaatttaaaaaagaattttcgattttgggttcgggacaaaattatatcagattcgtggtaagcgaccccgaaaaatccgggaacttttcacgaggtctttaaagcaatttgaatatccaatgaaaaaagaagctaaattctcatcattgactcaaattctaaccttatctgccagtatccatgcatcagctctgtccgaatgatgtccaattgaacgcccacaagacttcttccgttgcccgtcctcccatcgtcataagtaatttgcctttgagttcaggccgggtataccattttgttgtgaagtatgagcaatatccattgttcaaccgacccggcttcttccgaactttgagctaataaataggaaacaaaaattgaaatgatgtcattttttgtggacttgagacattttttgtgaatccaattaattccaaacttaaggaacggggaggggagtgggtccgacggtgcctataggcgccaaatacaatttttcctagtgtcgtcccatttttttaaagcgcaccaaaaaatgtgtaaaaactaaaaatgtcatcgttaaaattccagcctgattttttggggtaagaatttcgttaacaatggttatgaccgtttgtttattttcttccgacctcttaccatttcgaatgtgtcgctacaatcttttgttttccataatatccatccatgagtggcttcgtggacacaggtccttgcgcgggtcgattttcttccccttctcatccgcgcctttcaagactttcgtcaaatttgcgttcttgctgtcgccttttttgctgagcaattattcgtctattcattcattaagttgcttttgataataacctgaaattgcatgagtaaataatgatttttaaaaaatagcagaaggctaaaggttattatttctgacgatggaatgcaggcgccaagtcaggttttagggaataactccttttcgaattaaagttggtttagaggtttttacggttggagaacccgcgtcagatatccatttaggcaccga

SEQ ID NO: 976 - DNA, 2020 bp, Heterodera glycines
ggggggggggacttgttgtgccgacctggccaaccccaacatgttgatggtgcccacgatgttcgtcttcaacgtcttcacggggttgtacatataatgcgggggcgacgccggcgaggccaaatggtaaatttggtcaactgacaaagcattgaaaggaaaatgccaaaatcaaacggtgccttcgctgtagaaagggttgacgatgtcgtggtggaccaactcgaagttcgggtggccaacccatcgctccacgttccctttccttccggtgaagaaattgtccaacgctatcacctgttttggatgttgttgaaatgccaacaaacaattctcaactacagtaacaattgatttggtttttcaccgccaattagtctctgctaattgccctctaattgctcggcagattgtcttttctgctcatttcgtgccacccattcacttcgtgtccgtcggtcatcagccgatccaccaaatgcgagccgacaaagcccgccccgcccgtgatcagaatgcgcttccgttgcgcttcgtttcgctgtcgcacgggcggataattactgacaatttacgcacggttaattaatgaataaaatatattttaattaaattttgaatattattttcaattcctccgttaactcacatttttgtctgcaacactttggcgtcaatgctttgcatttgctcaattttttcctttagtcctttcacttctgtctttagcctttcgatttcactgccaaaaaatttctttccattaattttaaatttaatgaataattattttatattaattttaaagattgactgattaaatttgaaagagactctaaataaacataaagaaaacaaaataattttgtcccgccaccaggctgaaaagcaaaggttccggaaaaagttaataaatattaaattataatattaattaattttatttttaaaaatcggtttatctattttatatttcaatttacaaaaactgcaccttaaagccacggaacggctgccaccattagcagttaattggtcagtgattgaaaaattccgcgaattgagcaaaactaaaaatagcaaaattataggaaaaggagaatgaaaataaacttacaaataaaaattaaaaagacacaagaaaataatgaaaatgaaagaaacaaaaataaattcattcctgccgaaaatttttgtgagaaaataattaaaattcttcgaaataccaaaagtaaataaattctttccttggctaaatgttcatcgaatttctctctcttccaatggatttgaaatgccgtggagaaaagtgaaaattgacaattagtggcggcatttctgcagagacgaggttaaaattgttaacggaatggtattgatttagaaaattaattcattaaggatggttttattaattcggcacaacaaaaaagagaaacaatgccattaattcatggttttcgcctttaaaataatcggctaaatggaaatgacaacaaaaagtgctaaaatgtggtccaaaatcagcggaaattatccaatcggtggcgtcgaattgtgcttttacttcgtcgtttggctttcccattcgcttttggcatttttgctggcgaccaatgcctcgcggagtgtcggccattggctcgaccattggctggagccgagcaggtgccatttgctaatggggaataattggcgagaaatgccatcgcatgctttagctattcgcgcgcactaagaatggacaattcggacattgaactgaaattgttccgtcaatcacttccaaatgtgctgggggcttttgccataaattcgggttaatttggaactaattaattaatttgcaaatgccattcttcggcttatttgacgattttgcttgttgcagtggtctttcgcctcattcttcgccttggaatgtccaaaaatggtcgttcccttttgctcatttcggtttggtttgcgcttaatgcgtacctcgcgaggttcaaatgtttttttaactaattaatttttt

SEQ ID NO: 977 - DNA, 2716 bp, Heterodera glycines
  unsure (1)..(2716): unsure at all n locations
atttgttcgtttggttgganattgaatcgagttatgcgctgataaaataaaaaaatataaaaaggcatttaccagtgtaattttgaaatagggcgcaaaaattacgccaattactatttggcgttttgagcaaatttgtctaaactggagcgtacccgcgggtggaatttcgggattcccggtctcgtccccggaatttttttttaccggtctcaagaaatcaacttcaccaaccatattaactcaattaatgcccattttatgtgtatttcttcccctcatgtatattccatcccctcgattttctgggcccacaacacagtcgcacaatcagttgcattgtcagactgatgttctctctggcgcatccagcggaggcagttcaactttgttggttgaatccacggcacactctcagcaacaccaaaaaagcagtgggtccaattccggcaatgagcagcaacatttgcggaagtaagtggattataaaaatgttgctaaagcagcagtcaaagaatctccttcaatccgtaggatgataatttgcccttttagatttacctctgccgtcggtaaactgggcaaagcgcgcgagacgcgtgaagcgatctcaaaagtgctgagttgtgccaacccttttggttggtcctttttatggggttaatttgctaaaagtggaaccaaatttaccaaatttggcattttcattattttcccccctttcctttaaagcgttccgtgccaattgctgagccgatagattatgaacattttgtgggtgagcacagtgcccagctcgaacatgacaaagaccgcgacatgttgctgtttttgcgcgatgatatttctgtaagtttccgtttgaagttctaaaatcgcttagagttctgtcgatttgtacattcatttcaatggcaaatgtattagttaattttttagggcgtcgaaatttggccacgcgaacgaacggcggtcccttcggttcgccactgtgacatcgatgaggccaattggctgttagccatggactccctccggcattactcatcgccgtacacaatgatcaatttaaactattctcgtttttatggcgacttcaaaaggttttacctaattctctcgaagatgcaatgtttacaataaatattttcgatttgatcctccgcttgggctgaactttctgcgttttgaatccgatttaatcgctgatgaggagaaattggttgttctttttgctatttccatccattatctcattttcagctgttgtccggtcagtccgcttccttcgccactcagccggacattctcaaggagggcaatttgattgttgtgccaggcgatggaattgtggacacttttcgagtaaataagtttttttttgaaacgaattttcattggtaaaacagagcgagaagaaacgctattgcctgctgagaaagtcggcggaggagtcacgcgtgttcattgaagtgtacaaacaagcattggcacaaccacagcaccaacagcaaatgccgaccatggaaatggaagtcaaagcggcggccattaaaagcacgaaaaagggaaagcttcttcaggtgcagtcattggactaacttattcgaaataaaaaatgatttttatagttattctcctcaaccgagtccgataaacgagcattgcttctttcggctgaaagtgagacggaattgcaattttggctcttctcaattgaacgagcattggcatggaataacagaggtggaaaaacgcttttcattgtccattttccaaatatttccaatttaagagatgatgcttgctcctgaagaggataatttgtcgttgaattcgtcgggccgtgacaattcctttccgccgtgcctttcctcactaaacgattcggaaagtctggcgagcgaagacagtggaggcagtgagtgttaatggataacgtttgccttgtttttagttcctacctctttttttaggtcgtgaattttccacggctttctggcgaagtcgaaatgcggcagccaaagctttgcaaccgccaattgtggagcggcgcaatattttttcgcttttttgggacatggaagtgtgatttgataaaaaatctttttattttaaatcatttttgtaaaagaaaaatttagcctttgccagaaggggagggagaaaagagtacgttgggtgaacaactgagtgaaacagaacagtgcaacgtggagcgaatatcaccaattccgagcagttcagcgacgacgactagtttggtgttacggccaaattttggtggcaaaagaacgacgtcccatgagccatcctcttttgatgaggaaacaaagggacaacttgcagtcagagaggacagccaatgcttggagccatcgaaatctgaatttgcgggtgaaaagccggccattctgttcacggctcagcttagacaattggacattcgaattcgtatggccggaaaagaacacgccgaacaggtgaattcaaatgccatcatcactttcatgagcggtagtagatccttgtcattttctttntaagatcgagcctttcttcgcccgtttgtttctcttcgattccagccttggtgtccgtgtatcggaggaattccatgtcgctttttcgtcacttcactacgatatgcttcacaaaatggacatgccaaccttgttaaattcccccaactctgctccctcctcttcttttgcac

SEQ ID NO: 978 - DNA, 4284 bp, Heterodera glycines
cagtgagtgatgatggaaaacatttgccctgtttttagttcctacttcattttttaggtcgcgacttttccacggctttctggcgaagtcgaaatgcggcagccaaagctttgcagccgccaattgtggagcggcgcaatattttttcgctcttttgggacatggaggtgtgttttgagaaattattatttcgtaaaagaaaaatttagcctttaccagaaggggagggagaaaagagtacgttgggtgaacaactgagtgaaacagaacagtgtaacgtggagcgaatatcgccaattccgagcagttcagcgacgacgactaatttggtgtcacggccaaatttttgcggcaaaagaacgacgtctcatgaggcatcctcttttgatgaggaaacgaagggacaacatgcagtcagagaggacagccaatgcttggagccatcgaagtccgaatttgcgggtgaaaagccggccattctgttcacggctcagcttagacaattggacattcgaattcgtatggccggaaaagaacacgccgaacaggtgaattcaaatgccatcatcactttcatgagcggtagtagatccttgtcattttcttttgaagatcgagcctttcttcgcccgtttgtttctcttcgattccagccttggtgtccgtgtatcggaggaattccatgtcgcttttccgtcacttcactacgatatgcttcaacaaaatggacatgccaaccttgttaaattcgccaactctgctccctcctcttcctttgcacttaacggtgttttggccactgagaaagtcaatggagtcagcttggaacagattcggaatgccaataaagtgatattaatttgtaattatttttacattttggcattgaaatgttcagcttatttgctcaatacacaaccctcgtgctgatttgtttttggtcgttttggtggagcgaatattgtcggacgtgtcagccgacatttacatgaaggctaataatgcaactgacaataaatattcgtctaaaattcaaaaatcgctgtccgcatcaattccgaaacttggccatcttcgaacgttgttcgcatggaccgcgaggcaatttattataaattttttgattttcttggttctttctctaattttaggcctgtctttccgtctttgtgctcaggcagtgtctttgcttctcaacagttggcgatgagcagcaccaacaattgtggtagcctttgcgatggctctaagaagtcctcgttggccacgtgttcgctgtacaaatgcgacagcggtcgactcactgacggcgatttacagaaattgttgatagaaatgcaaaaggccgacaaattggccaaattggtggtcttcccaagcgcctctttggttctcgaaacagacgtcacttccgtcctctgcgaatttccaagtcgtcccaacttacaataatttttgttgcttattcaattggtttaagtgcgtatttcgccctcttttttgccacttcgtccctggaaatgcattccgacttcgcctgataaaccgtccgctttgccttcgtctgagctccaatcatttcttgaccaatcgctttgttctgaaccacaccgtggccgtgttaaccttctctatgtaacttttgtcattttcagaataattatttatgtggaacaatcattgcttaaggtgtacccactttcgttgaattattcaacccaaaagacattctcccgcgcccgcaacatttcctgcacagtacattatgtgccttcgtctctcgtcagaacgacgcaatttgctcacggaagggtcccttgccatgctaacattttccaccgtacacatccaaacggaccttttgttgactcatttgtttgtggtgtccaataccatgagcaaagtccgcaatttaacgcggaagtaaaaatggatctgccggtggcgttgggagaggacgaccatattctgttcacatttcatcatgtttcaatttcgaatgccatcaccaacaaaaataaacctttcactgaggtgggtgggtatttttggatatcgtcaagagtatttttcgctgtcattattatatgccgtatttatagcacaacattgagactccggtgggttatgcatggcttccgatggtcaaaacggattctcgtggccttcctcacttcgtcatgtctgacaaaagtcaggagtttgaacttccagtaactgccaacttgtcttcaaaatactacgaatttaagccattgtcctcttctggcacgagagaggtgagtcatttaacaaatatttgtttcaatttataaccgacaggtgtcccccaattttgatctcaaatttgttgaatatggtcgtcctctattccgcgttcgacttcgactcgtttcgtcagtgttcaccaccgatgaacgccttcaaaacttttttcaattgtgtcacctgatttatccgaacataacccagtccaaccggaaccctttgacgcaactacccaattcttcatcgaatcgtaacttcaaacattcatccaatatgaatttctatgccaacaacgcctccaaaaatggatgctctgcttctgatatccaagacgacagtttgtccccaccgcattttgctattgaacgtgatttggttgaatcaattgaggtagcttcatactttcttacaattatatattcggatagaaatatctcctagttttcaatttagagtgatgatacaaaaaagtttctttgtttagaaactgtcatcaattgaccttgaccagctgattcctttcttggcggttatcttcgaccgtctttttaatttacttaccttttcaaaggccgaagacgtaatgcttagttctttgaagtgggccctaataatttgaaattttcatggaaataaataaatttcagtgccattatttatttggctgatcaactgtttatgcatcgaaaatcgaagagagaacttttacgaaattatgtcctattgttcttcaagtgccaaggtccgcaacgcaaatgcgatgccgacggtgaagaatcgacccatggcgcaatttgcaaatgcattcctctgatggtatacactgaaaagcgagtgagaaaataataattgtttgtcaattttcagatccacagagcacaaagcagcaaagatgggacgataagcatcacaaaattgcttcgtcagctgtggtttttgttggattgtgcggccaaatcgatggcacattggctcatcattcataatttgttgaaagtgccgaggcggaaccgatttcccaccgatttgtatttttcgctggaagagctctttcacacaatcacggaacgaatcattttcatgcaaagggagtgcccccgtgaaagtcggatggccaataatgcacttggcaactttttaaaggtgcaagcaaaacagagaaaagggaaaattcctttggcaataaattgcttaccgtttcatttcagcactgtttaagtttgatggacagataccaaataatgaaggaactgtatacagtggtcaagaaaatggacacaatcgaaaccagggtaagccaagttggaaaggattaaccaattttaaaaggttttaagtcgtttcgtgtttacaaattcgaactgcttcaaattttggctggtcatgaacattggctcccgctttgcttgccattgttgactgacaaatttggcattatattgcgtggagatagctttcgggtggaaggttttctaaaaatgacgaatgcgttaggctcatttaatgacaaattaaggctcctcttcgacccaaacgcaacagcaaacgacgaagcacaatggggggaccagtttattggccaaactgttctctcaaatcttttcaccatttcacggaataatttcagaatcgaatgaagtggagaaatgtgagaacaaacataactctgtttaaagtaattgtttaatcatttacagtttcatcatattccgagcatttctacttgagcaaaacctattgctccgtgcactttcccatcggacttcttctccaagaattgtcgacttctctgcgcgactcgagagactatcgtcgtaaagtgattcagttgctacgcaatttgcttgccaaacacagccaggacgaacgctatggcgacacggtattacttacaaataaaaaaaattattcactgaaagaagtttgaaattctcttttttaagtcagcccgaaatcgaattgcgattttgaccatgccattgttgaggatcgcaattgaaaacatcaaagaaattg

SEQ ID NO: 979 - DNA, 2748 bp, Heterodera glycines
agaggttaaaacatatggtggaagcattgaacaaagcgaaagccaatcctttcagcaatggctatgtttggacgaatggcaccattaacgcaaataataccggcaaaagtaacaacgagcaacaacaacgctcttcggacaaattcaatcgggccaaacgggagcactcgttacgagttgtactagcaggagagaatggacaaggtccttcccaaaaagaggaattactttgaattattagttaaattatttggattaaatatcataattttaatcattttaataaaatacatcgaataaacgccaaatctgaatggacaacgccaactatttttgattttaatttttacataatttcttatttcttaagaacgaagttcgcgacttgatgctttgcgtcctttacacgctgaacattcttccgaagaaaatattagcagccttttggaatgtccaagaagccattcagccaaccaaaacaatgccaagttgcgacgattcggtcacggaattgcctaagcaaccccaacaaaatgtccttgtcgactttgtccgtattttggaactttcgcttttgctgtttcgctacagagggcgaacgcaccacttaatgttacaagcaaaaaggtaaatatgacataattcgacagaattttcaaactttatttaaagaaacaaagcgacaaacccgaacaaaacgcccgaacttctgctgaagttcgatgggtcgaattcgtacgtaatgagcagcaaattttccacactgactgatataaattttggaggtaagcacttaaatttaatcatttaattctttgccagtagaaagtttcgactcgagaggagtggtggacgaagaaggcaaaggcggcgaggcgacaagttttttgatggactgtaatttggcgcaagaagtcgcgctgattgtgttggagactatccaaacaatagccaaccaaattgccgtatttttttgccattttcaaatttaccctttcattgttcaattcaggcaaagacgcgttacacctccaccagcagtttggatgtcatttttgttcgtcttcttcacttacagctcgaattgctcaacgaatattggcccgaaactgtccgacttcacactctctctgcgctcgctgtgtttgtcaatttggttggtcctcctaatttattttaataaaaaattaaacataccttttttggttccgtacagttttccgcccatttccttaactctggtccattggattgtctgtccactttgatcaaagcgctgcttctccagttgaatagccgtatcgtccgtattcaacatgcaactgccgctttgttacatttaatccttcggtccggatacgatctcgctttaaattcttccgtttgtatgtttttccttattagtatttttaattaaatatgaatttaatgacaaattattcgttttttagccaaattcccctccgacttctcttccatgtccgctcctgatggatcgaagaattcctcgctcactgaacgactcggccgacccggggctcaaatcgcgccggtgttggctcgtcttctgagcgaaaaggccgttttcttgaatagtttccgtttcgagcgaggtctgtccgctttggaatcgcttattggctgtgggtcggcgacaaaaagcggtgccaaaggtgcggcttcttctgcacttgtgctcacctctctctttgacaaggctgtcttggtactactgcttaatgcctaacgcgaacattacaaacaaatgattatgctaattcttacaattaggaattggtgaaacaacttcgtggtgtgctcgaggcaacgcaggcaatttcggacacgattaatgacccggtcagcggtgatcatctttctttttgttttcatttatttcttcagattcaattggccgaccttcatatccaattggcaaatagtttccgtggttcggctgcacttcgggcagaatttttcgacgcattggctgcacaacacattgccggaggttttattatgcgccgacatttcatatttctcactccgtcgtctcctctctcttttagcttggtactcggaagcagctgtgtgtcaagcccattcgctggtgatcatcggaaaggaactgcaaagtcggggactgtttcgacccgattggacactgttgagtgtgctcagtgagagaattactgctactgagggggtcaacgagagcggtctgatgagcagcactcagcaaggcggattcacattggtacaatacctatttggtactgttttggttgaacggacagagaaactcatttcaggaggaatttacccgaaaagttgaagcgttagtccgcgttttattactttccgaacggtatgaagccgttggaccaatatgtcggttggccattcccatctttgagcagaacaatgattttaaagttcaacgtcatggtatttcgaaaaattaaaagttttttctttcaggcattggtgggaatttacgcagaaattcaacaggcgtgttcaagagcggcggagatcaaaatcagcggaaaaaggcacttgggcacctatttcaaagtgacattctacggcaattcgcactttgggttctcattcataatccattccgattcatacactttgaaatctaatatacagcactgaacatctcaccgaatggagatgtcgtgagaccgaactggcgtctatgagggaagcatgcggccggatggtgcaaaccggacgcga

SEQ ID NO: 980 - DNA, 2287 bp, Heterodera glycines
agtgaagcggacgatcccactacagcatacgtcaaagtggcacatgttgaaccatgccgaagaccgaccgaactgaacaacaacaacaacgccataatgccaacaaagggtggcagagagaaggaacaacgagtcgcttcaatgaacaatggcagagcaagcgagcgaccgatggacgaattgaaagaggacaatgaccctatgggttacaacctgcacaccaacatcagcacgttcattcaagaagagcgactggtggaccatgaagtgcccgaaaatgcgcctgaattggcaaggactgcactccgtcgactgactttgactggtctgactcacagcagccgaaaaacatattcctaacctttttaagtgggaaactctttccctgacacgcgccgacgccaaaggattgtgaagactgaagaagctgtgcttaatccgttggaattggcctgtgaatgtctgctcttcaaaactgctcaaattcggcacattctttcggcagcggaaatcccccgagggttccattgtcacatcggcgctactgtggacaaaaatgcactgaaaagactggacttgaagaagttgcaactgtttttgcagggttcagtcagtccatctgtcagtttgttttagtttttaatacttttaaaatttcattttcccatttttaggtcaatgctggattgttggcttatgccgaaacgtttaccgcctcagcccaaagacatcgctatggaaaagacggcatttgtcgattggcaaccgctctgaagtgattttatttcgccatttaaactatacacaaatgcatcattaggactttgatctatgagttgaacgaagcacttgcggtcaatgaggcggcaatgggcagcgaacggacagagtaccagcaaatgttgagacgatcttttgacgggatgctggagagattgccgacattttttgatggcgaaaaagtgcgtttgaatgaacatgacgtaaatgtgccatttcgaaagctgaagttgcacagattttggcaccgggcatttcttttttgttaattaattcttttcattctttcacttactaaacgaatataggtaaattgtttagtttcttcccgacgtgacaagtcaagacggaaaagccgcacttggaggtgccaattctcagctggtgaacggagtgctcgaccgactcagccaaatcggcggaatggcggcagaaatgcacattttcgactcaatcagcggacttagcgaataaataacggcggagaacacagaaaaatgattagagtatttatcctctgttagtttttgaaagtgattttgtactttctgtttcaccttttgcctcacaatcaacttataatttttgtgctttcatcgatctcaacatcattttttgtgatttattatattttttcctcgtccgttcgtcaacagagttagtcaaattgcttacattatttgtaattgtctactgctttttgtataaattttttgaattttttgaaatggaattgtacggaagtgactgataattgggacatttttgtccaaaaatagtcatttcacaatttgttgtctaaatggtttactgcttaagtgatatgttttcttttaatttgctttattcatttttattttaaattgcttttcaaatgtctctttctccatttgtctttttcttcgtccctttctttacgcttgcgttttcgcctgtctttgtcccattgtctgctgttgttgtgccgtcgtttccgcgtgtttcatgccacgggcggcgcgtgccttcgccgctttcaactgaaggaccatcgactgccccgggtaacttccgccggaggcgccgccgctctcagtggcgccgccaccgctgggtggcacttccgccgcggcactccctccgctcggtcctccgcccggcccgtagccgccgcttgtgcctccgcctcccccgcttactcctccgctttcgcttggaacgccaccgccagacgagccgcggttaggacaagggcaactgacaaataatagtggggatgatgcttttgttcgcctcccctctccccgttttactatttgccatctccgccagaagtgccggcttgtccatctccgccgggctgtccgtcgcctccggggggaccgggcggtccaggaggaccaccggggccaggagggccgggaggaggggctccaccgccctggccgggctgtccaggttgaacgggttggcctgatgggccgctatgacacttctggtcgtgttaaacaaaaacacttttcaacaa

SEQ ID NO: 981 - DNA, 5410 bp, Heterodera glycines
  unsure (1)..(5410): unsure at all n locations
cgacgaagacgacctcctccatatccgacttgacctccacttcctcccgaaactgctccaccgccgcctccggtgcacgtgcccgggttgccgggcggaccgggtggtccggaaccccctgggggtccgggcggtcccgaatctccgggcggacctggtgggcctgcataatttatattttacaattatttaacacaaccatgccatccaattgacctggttgtccaccacctccgccattgccgttctgtcctggttctccgtccgatccgggcggtccagaacctccaggcggacccgctggcccaggcggtccgccagggcaagcaggacatgagccgccggctgggcatggagttcctggtcctccgttctctccaggtcctcctggttgacccggtgacccgggtggtccagcagctccgggctgtccaggcgggccaggtggaccggccgggcatgcggtagcgccccctcccgaagttccagctcgggcgtaccctccaccaccgccgccacctcctccttttttcgctccgccgcctccgcttgcgtatccgctcccgccacctcctcccgagcttcccccgctcgcgtatccgctcccgccgcctccgccgccgccgcttcccccggcagcgtaagagcgtcgttcacggatcatctcggcgaagtcacggccaaatgccgcggcttgtgctttgccaccgaccatttggacttggaccgcctgcatttgggaccaggcgtcgttggcgagcactttgaactcgcccaaatcctcgatgatctcgtcgtacatattgttgatgtcctcaaagagcaaaatattcattttataatgaaatcggctcaaaattcactctgaagagaaggccaatcgttgccagcgaaacgacgaccatcgacgccgtaacggcagacaccaatcggaccatcagctgtttggcttccatcattttgcgactgtgactggagacagtttgttccagttgacgcgcttcagcgcattgctctcccttttatattcttttgatcattagcggaacgacgggcgacgagcgaagaaaagccacgggggggggggggaatttacaacgaatggccaattaatcaatcacacccaatcatttgctgctaattgcaatttaagcatagtatgatagaaaagaaaatgacttattaattaacagcaaaaccgaaaagtaatggaaccgccgctaatgagacattataggacaaaaagggaagagggggaaaatcgaagcaatgcgaattagctggcgaatgattgaaggacaacccatcagatgagcaaagaaagggaaacggagtggaactgataaagggacgaaaagggaagggaacggggacagactgatcaatccgcaaaatgatcagaacaaagggaaagggacaaaacggagggaattcagaagaatttatacaaaaaaaaaatgacagaaaaaggggagggacagcaacagaaagggacaataggacggaatcaatggtttatccttccaaactcttcttcatccttccaaactcttctcttcttcatccttccaaactcttctcttcttcatccttccaaactcttctcttcttcatccttccaaactcttctcttcttcatccttccaaactcttctcttcttcatccttccaaactcttctcttcttcatccttccaaactcttctcttcttcatccttccaaactcttctcttcttcatccttccaaactcttctcttcttcatccttccaaactcttctcttcttcatccttccaaactcttctcttcttcatccttccaaactcctctttttcccctttcattgaccttgcgccgccgacaccaccttttggcgttggtagtgcaaagtgatgtccatcgtcgctttcatccgtccgtccggactcttttcgtagtgaacgcgcgggtccaggcttgaaacttcctaagacaaaagcattttgtagaaagaaacgacctccaataagacaaaggcgagactgaactgtctcgggatcaacaatccatcaacggcatggccatgggcaaccatccgtctccccccccccccccggtctctcccccgcccctaacatttccattcggcatggactgttccaacagcaacacttttgattgttgcttttctttctgctgatctttttgctgttcatcgcctccgaccaaatttccgttttgttttgactcatttggcagctcccatttggctgtgccttcgtcgactttttgtccttcgtcggccatttcgatttcgtcgtcgacaaaatgccgcgtcattaccaagacgtacagaacacagcccgaggcgaaaaacagcagacacgagccaaaaacgacccatttggaagacaatttggaggacattttaatttttgtaaaaagaaaaaaacacttagaaattgagtttaaaataaaggaaaagtaaaaaggaagaaatgagaaaattagagaaataaaatgaaaaaggaaatttggaaggcaaagtgggcgagatgagaagaagcattggtggaattgccaacgcggcaaatgccaataatttgacagccaaaagaatggggcaaagaaaaaagagtgaaaggggagagaaatgaaagtgaatgaagagtgatcgaagatgtcatcaaattacgaataattatttatttattatacataaatcaatttattgtgacaattttttaccgtttattacaatttaggtgattgaataaaatttatttttttctggggatgccgtctttacgaaagcagatcgatcgagtagagaaatttcgcgcattttggcatttctttgtctttggcattggattggcattggtccctctctccgtccttttttcattgacaatcgccccacatttcctctgcttcgtcctcctcgtcttctttgactttttcttttttcgtttcttccgtcgtcggattctcttcatttaaatttccgttcacaaacttttcgatggcatttttgtggaaagtgacatttgtgaattccttaacaatcaaatgaccaccatttgccattttcgcctcttttgcctgcatcagaggcttctctaagccttgttggagctgcaaacagtcgccacccgacgaaagaacgcccaaaataaaccaccgccggcgcccttttccgtcctcaaaattgccgaccaaacccccgccactgtccccctgagaatgggaagcaaaacatttaattcttttttaattaatcccccttcccctgttaattgcccccttcctttaatttatccccttttatctccctttatcccccccccccccgcctttcggctcttgttttgagtccatttgtctcccaccagacacgtgtccctgcttttctcttccaccgtgcacagtttgtcctccgaaaggctcagtccgtcctcctccgacagtttggcccttttccgtgcgcatttttcgtgcctccaaatgttcggcactttcaacatttgcagcttcggataggcctttccgtattggctgggtttctgtttgtccgctgaatatcgttaattgcccttaattgcccaattaaattcccacgtgcgcttccccatcccgtcactcggagtgcctcagtccgattggcacgcatcgattgtctccaataaaagtcgtcttggaaaccgtgcatgaaaggaaggcactgaacaaaggcacagttgggccatgggttggccattgcactctctcacaatgtgattggccaagggggcgggcacggcaccgcccaattcgccgtccaaatccaattcgagaacgatcaaatcgtccgaaatgcacaacaaattttattcgaaattaaattgttttttcatttattaccacttgcgcattttttcttgcaaaatgccgattccatggcactgaatgtttttttgggttttatttatttattcatttttaattttggcactttttgactcggaatttccgctgcgttttcggcgactcacacggcgtttccttttgctccgaaaggcaaatggacccaatgtaaacggaaatctgttctcggatttgctggacgctcaaaaagcccttcggttgcctttcaaaatgccaattttagccaatttaatcggaatgatccgaaaagtgccacccaccggcacaagtcatcggttttagcctcatccgcacttttaaattcttcggaaaaacaaattttgttgacgcttcctccgaacatacaatgcgcggccgttacgacgtgccgtttggaaattaaagtgccggaacaaatgtaagtggctgaaaagcaaggccaaatgatggcatattctggttaaatttaataaatatcgaatacgaaatgtctttttaattcgttaatttatgaaaatttgttttgaaattcatttccatttgcctccctttgtctttcttttgacgaaagattgccgccgtccatggcgaaatgccctcctcaacattctctccccccattattctgaaggaaaactcttcgccgcccgtcggaaagaaacgtttggcattttgcaattgcttttcatccgtttcgactttgaggaaaagcccacaacggagggaatctgcgcaaaagcaaagcgaacgatggaaatgccaaaagaaagagacaaaacaaaactaatgaaaatgccaatgagtatttgcggaaggattttaaatatttggcaaatgctccgactttggcataccgtaaacatttgagtcggtccattccttcggcgcgtgccatccgttgccattggcatggccatttccgacttggaaagggagaacattaaagtaaatttaaagggcaatttaccacttatcaaaagcagaaaaatgtaaaaataaatgcgaaaaacgctgagaaaatcggacgacattcgaaaaaaaggaaaaaaaaagaattattggtaattttgggaaaaactaaataatttaattacttaaaatatttattttgtcaaaagcacttttattaatataattttttaaatatctaatggagaagaagacaaaatgattttgctgtgctttttccaatggaatgattcataaaaatggaaattacccgacaaatcgttgtgttttgttaatttaaatatgaataattaatttatcgatagaaatataaatgcgaacacaaattattttaataatttttaagtatattaaaattgaatttgtttaaggtaaagctttgctaaaaaagagccgactttacaaaattcaaacatttgtcagcaaaagaaagacaaaccaaatcgactctgatggccaagctntgaaagcattgttataatanatttaacttatgttttttanatntaatggtcgtcaaaatctccgtatntttaaaaataattagtcattattt

SEQ ID NO: 982 - DNA, 4099 bp, Heterodera glycines
ctttttttttttttcaaatcattttttttttgcgcggcgctctttttctaaagacttaggagaaaggggcccggcggtgccaataggcgccgccggaaaaatttttgaaaatttggatggttctgttaacagattttgtccaaaaaatgataaattttttcggttttgagccaaatttttttaagaaaaaattggttttttgagggccggcgatgccgataggcagcgccgtggcgaattttgaaatttaaggtctatttctaatagtttttcaccaaaaatttattaatttccgtgaaatttttattttattttttatattttgtaaaaaagattttgaaaaatattaactttttatgatttagtcaaggaaaattaaattttttaatttcaacgaaaggaagattggatttaatttgtcaataaattatgccaatgatgaccaatttttatgggatttttgtttaaaaaaccatattacctaatcacaaaaaaataaattaaaataataacgtcaaccggtttcgaactatgacagaaagtatttaagtgtgatgcacttacccactacacttccccggattagtcgtccccgctctttccccggtttgaccggggctccccccccccccccccccgactgcaatcaaatcgataccagagaaaaaagttttcacattgtttgccacaagtatgaatttatttctattcctatcaaaaattctaaaactcaaaaattccaaaaaaaaaccacaagtactcatttgaaaatttagccattttcagacctaaaagggaataaaatgaggctaaagcatatgctaatcctaaccaataaattttatcatctgctcaaaaaatcttaattaattaagcttcaacattggaacaaatctgcgcaaattttccattgtttttggtgactttcacaatggttcattcacgacgctttcgcccgccgttggtactggattttagcaattatatttttagttttttatttgaaaaattaaaaatttttgaatattaattatttgggataaattttgcgtaaaacaaatctttttccccaatttttgatagaaaagaataagaaagtaaatttaaaaaattatatactggattttatcgtggtgcgacatttgctggcgaatatttgtggattaaactgtctaacaaaggaaggtcctatggtgtcagtgggatttccgaatttgaaacttggtgggtgtgtaaagcacccatggattcttaataaaaaaaaatatccgagaaattatattattccaaaatataaaaagacaaatttgcaattataattttattttttcaggtttttagtacgaatatttgacaagaattctcataactaataccgtatataatttaataaaatagcagaataatattaaactttaaaaaataatttattttattcatttgccaaagttagtattcaaaaaaaaattcattcaaaatggaaatctttatttttgttaagacgttttattaagatacgttaatgtcgacacatggaaaagattttttagtgttaaacacttttctttggagtattgaaattttttgaaaattcattaataaactatcttatttaacaatttaatccgcaaaagtcgatctgcaaatgtagaataataaatgttagtattagggcaaatacggcatgcaaaataaacaaaaccatcacatgccaaaaaaagattaaaactctctataacattaaatcgcaatttaaaaaaaataaattaatataattttaatttattttattcccctacgtttattcatataaataaaccataattcttttggtttagctcaatcgcatctgtcatcggaacagcatcagcttcaaaccgatttcttggaccaccagctccaaaacggcgcatttttggccgattttgccggactttggctactcggtttggacattgtgccaatgattaaggacagcagccagcaacaaaatgtcaagctgtacattcacagcggctgtaattgctccatggtaaggaatttcaatcacttttattaatttggatgtttttacaatgattaatttgtatgacattagttaattagctgtttcgttccattattttttaattggtgcacctttcagttcatcaaatcgcttaatcctcatgggccattcactatggtgattgtggaaaagcaatgcccatcattaccgattgatcaggctttttcggttggccccactgatcgcccatcattaccaattgaccagactttttcgattggccacactgatcgcgtgccaatttccgtctcattcacagcattgactgatgccaacatcaatagcatggcggtggaactgctaattgcctccgatggtggggcacatgaggatttatggaaatagtgattaatttggaatgattttattatttccttagatggaaataatcggcaaataattagatttgacattggcacggacagcgatttgacagttcatttggcatcaggggtaattaaaattgcaaagctaatgctgttaatttgggaatttaattgattttttagatgaaaaatgagtttatcagcaaacacacgcgactggccaagggatcatatgaattgaaagtggaaattgagctccatccgtattattatgtgatcataatgaacggcaccaaaatgggcataaagtattggcccaaacaatggtggaacgaattccaatggctcggtgtcaatcagattaaggtgttgcttatttttaaaatattctatttttatttaactaaattttttgatttgcatttgatgaagaaccactttttttgttttaaatttttttattattttttttcactaatgctaatgcgagaattatttgctgttattaatttgtcaatactttctggtgtatatcagggatggcacggaattccgacttaaaaaagcccggaaatttcggaatttctttttcaggtcggagttccatttgtggaaaaattttgggcctcggaatcccgaaagtttttggggcctcagaatgccataccgaatatgcgtggaaccaaaggcattttccaatccgtgcaaatttcgactgagctttgggcaaaatcactggaacaattctttacattttaaggtacatggcccaatgaagatgacccaggcacccgttgtgaggcaatttgtgaatacaattgaggtaattaaattaatcaattcaaaaatatttgggcattttgaatgaattgtacgggaccgggaattttgacaaaagccgggaccgggacttttcgggttgaaaaagctgggctttatgctgggaaacccgggacttaggtattcagttgtacgtttttttcagtactagtcccggtctggtataactctaattttgaatatcatttggtggggaactactgtatgctcgggccattaaatggataccgcacattccaaaaaattattaatttaatcaaattacgacttttcaacttaaacattattttttacagtcgccagataagcgtccaattattctcgcgtggaataacttttttatttggagcattttcgattttgtcgatttacaattcggcgacaaaaactgttcatacagttgtgtgtacacggaggacataagcttgtaagcagattaaaaataaatgatttttttagaaaatttggaaaaagagaaaatattaaaaaattttgtcttaaaaattaaaaatataaatcaatttttctgcgtcgtctgtcgcatcgaagggcccgttaattccataatttcctaaaaattaactcaaaatcgcagatttgggttttgtagaaatgcttttttaattatttctcaattaaaatacagtgaaaaagaggcctttgttgtggtgtggcacactggcgaccaattgagagatttgcctcaacatcgtcgtgctgagcaggtggaaattaattttttggccataaaaaataatattttgccttcatttagctgtatgttatgatgtcccatgaggtaattaatgtaattataattaaggattttcggataaatggacaatcaatggatcaatggaaaaaa

SEQ ID NO: 983 - DNA, 3331 bp, Heterodera glycines
ccagatcggacgggatggcgtgctttcaacgtggtatggtcgtaagcgatagggctccatttgaaaacaattaaatagtcaattttataatgcattttcttctctttggttaatcttcaaataatctgccaatgctttcacactgttaaagtcgtccaccgcaataaaagtgccgttcggaatgcccacttcttccatcacttttcgactcaacacaattggcaccatcaaatttcgtaatgccttccaaaatttttcagtcacatattccgtgcagacggcattttcgaaagccaaataaaaaaagtgggactctgaaaatggggggagggcaatcgatcaaattttattgtgtgcgtaattaatccttggatacaaggagatagctttaagtttctctagaaaaaaatataattttaaaaattaatgttacaataaaaaattctaaatcgagaatttcagattttaagacaatagctttttataacttaatgaatttaaaatttatgagttaacaaaggaaaccacaaagctatcgaggtactaacaaaggaaggtccccgggtgtccgtggggtttccgaatgaaaatttggtgggtagatacagtacctatggattcataagaaaagtgttttttatttcttctaaataagcatgaatgccgagttatgtgactgacaaagttttgtaaaaacaaataaattaaattatttttttacatggtgacaaaataagtaatgtcccattttaatgtaaaaaaccaattttaatctttttattagagaccgagatttccaattctgccggaccggaccggattggcattttcaaaaacaaccggattcgggatccggtctctcataatccggtcaatccggtaatccggtcaatccctatttttcaaatagccggatccgtaaccggattccgtattggtaaaaatttagatttcaatgttaatttagggaaaaaacccgcaaaatttcatcaattatatgtaaaattcgtgcaccagaaaatgtcgccatggaaaaaacaatgcgccgaaaaaataaaaataaaatttcaagaaaaaatttaaaaaaatttaaagttttttatttttgaaaacctatgtttaatggaaaaataataagaatgtttttttgcggcgcccttatcacaaaaaaaaacttcggtaatggggccggcggtgccgacaggcgccgccgggaaaatttttgaaaatttgatgcaatttgttatctgattttcaccaaaaatgaccattttttgcttttttgggccaattttttaaaaagaaaaaaattttggaggcccgccggcggtgccgataggctccgccgggggaaaaatttgaaaatttgaccatttaaagttaaagacattatggctaaaagatatttttcaaagaaaaatgaacaaaagtgaaggattttgagttgagacagagcaggaccggatccggtcatgaattcgccggaccggaccggattggcattttcaaaaacaaccggattcgggatccggtctctcataatccggtcaatctatgtaatccggtcaatccctatttttacaaaaaattgccggacctgattcctgatccaggaaaatccggtaccggatccggtccggctcggtctctagaaaaaatacccttttttaattttcaaataaaatattatttgctagaaaattgtgtaaaaattcttttcaataaaatttacaaaaattaaactaacaaagatttttcaaattactagcaaaaaatattcgattttttgagcaaaatttccatttttataaaagaaaaaaattgtatgtacgagttgcatttgtacgagttgtcaggatgccaaaccaaaggagagtcgagaaatttttcggttttatttggtcttgattttcgggcaatttttgattaatagcagccaatcgccttttctttggctatgcctttttacgacacattaattaattgcaccaattaattcattaattaactaattttctttcccaaaaaacagagccctctccttggcagtgcgaatttcgaaaaaataccatataatttcttcaacatttctatcacttatcgaagtgatagtgccattcacattccgtacgatgcgttggcaccggtcactgctcaaacgttgccccaatacatttggaccgaagcggaggtggtcaatttccctcaatttaatgtccagcagaaaatgcgtcagcgataccgtattcctagcagaacatacagtaacaaaccggaacattgtttttaagtatttatagaggatcacagacgtattttctgagagaaatcacttttatcttacgctaatatgcatgattgataattttaagtagcagaaaaatagcgggttcagaagaacagagttcgagtctcagtttcaaatgggttcagcaagtaccgggtcgaatcgagaattgaaaaagccaaaatttcacttcaaaataattttttttcatagatttatgcttctttttaccaaaattatttcacaaataaacagtttcaataattcgaatccatatcccccacacttaccagtgagtttttgggtccggacaaaacgcgtcgaatacctggtattggattttccaaatgaaaaagccagctgtccgagtatgggcccggtcgggtacccggacccagtctaggctaatgaaaattaaaaacaaaaagaaacttaaattaataaaattgacagaatttaattatttataattttttgaagttttcttgttataacttttttgaatcataacgaaattctttgaaattttgcagctaaaagatgactctcttagggctttcacaataatgccaagaatctttaatttgggtatagagccaaactgattaatgtcatttatttctcaaaaatcgcagattcaaaagcgtatggcgctgaagaagcgttcggctgtccaatttgtgtccaattgccatgtgccgtcgggacgtgatttgctgacggcccgactccaaaaactgctccaagttgatgtgtatgggaaatgtaacaatagaaaatgtgatgacaaatgcgaccaacgagaacggggcgagtctatttggcattcatttgtcaatgtcaggcgtttttaggcattatttttggtgataaatttcaaaccttttttggtgccaggttcaatcctctgcagcaaatatgttttatagtttttttattgcttttatgcaaattagattgggcgccggacttttcgacagaaatattataaatttcaggaagggacttttcgacagaaaaaagtaataagtttcaaatttaggg

SEQ ID NO: 984 - DNA, 847 bp, Heterodera glycines
tttttgaaaatttgatgcaatttggttatctgattttcaccaaaaatgaccattttttgctttttttgggccaattttttaaaaaagaaaaaaattttggaggcccgccggcggtgccgataggctccgccgggggaaaaatttgaaaatttgaccatttaaagttaaagacattatggctaaaagatatttttcaaagaaaaatgaacaaaagtgaaggattttgagttgagacagagcaggaccggatccggtcatgaattcgccggaccggaccggattggcattttcaaaaacaaccggattcgggatccggtctctcataatccggtcaatctatgtaatccggtcaatccctatttttacaaaaaattgccggacctgattcctgatccaggaaaatccggtaccggatccggtccggctcggtctctactttttatactcatattaaagccaattcaattctctagaaggagaactgaatgaaaaacaaatgttcattctacctgattgtaatggcactatcaaaaattgtgacccatttttgacgccaaaagttaactgtgcttagaaaataaaaaaattctaacaaccgaacaaagtgaagcaaaacaatgaatttacgtggccaatatggcattacatagttcattaaaattagcttgaaaagtggtaattacttttgctaagctcagaaaaaactctaaaacgataatctatcagaaatcgtgggtttcaatgaaaaacattcgctctgagtcaaaatgaaaatggattcatttaaacaaatagcaaaaattaactgatcttattactttattagataagttaagccaattttatt

SEQ ID NO: 985 - DNA, 2638 bp, Heterodera glycines
  unsure (1)..(2638): unsure at all n locations
ttaaaaaaaataaatttagtttttttgttggttatttgcattttgccaaatttataaaacgcgcaaacccattttggcggatttataaaacgggactggcggatttataaaacgcgcctttccattttggcggatttataaaaacgcgactggcggttttataaaacgcgaattgttaggtggcggatttataaaacgcgactggcggatttataaaacgcgcctttccattttggcggatttataaaacgcgactggcggttttataaaacgcgaattgttaggtggcggatttataaaacgcgactggcggatttataaaacgcgactaggtggcggtttttataaaacgcgcaagcaccatccataggtactgtatctacccaccaaattttcattcggaaaccccacggacacccggggaccttcctttgttagtacttatatattcttctggagaaacttaaagctatcgaagcataaccaagaatgttaaatttagttgactttaaaaaatctgtgagtttattttttaattttaaaagacagaatttttgctgttttaagagaccataattttaatgtttgaatttatttatttttttccagaatgtcctttatccaaggattaatttattataacattatttaaaattgtatatttttctagagaaacttaaagctatcaaatcattaccacgaatgttaaatttagttgactttaaaaaacttatgagtttatttttaatttttaaaatgccaccttcacagatcactgaattttgctgttttaagagacctaattttttccttattagataatgctcgaatttatttatttttttccagaatgtccttgtatccaaggattaattacgcacacaatttgatcgattgccctccccccattttcagagtcccactttttttatttggctttcgaaaatgccgtctgcacagaatatgtgactgaaaaattttggaaggcgttacgaaatttgatggtgccaattgtgttgagtcgaaaagtgatggaagaagtgggcattccgaatggcacttttattgcggtggacgactttaacagtgtgaaagcattggcggattatttgaaggaattgcaaagggacacggacaaatacatgaggtaattaggtggaaaattagggaaatgattgccaataagggttaattagagagaaatgattataaatgagtgtaattaattaggatgaggaaagtcgtgtaaatttgtgacattcttagctatttcaaatggacgaaaacgtaccaaaagcttcggagtgggaatggcattcagccgccgttgtgccaattgtgcgaaattgcgcacaaacaacgacacaaggacacattcaaaacatacgccgtacaattggacaaattttggcctaaaacacaatgcgaaccaaattttgtgcaaaaaagattcaaggatctctgacaaataggcgaaagagacgaagaagaagaagaagaagcggataaacagatgaaattggataacaattaattaaccaaaatttaaatatttttttctttgataattacaatttttcttaatgctttttgttatcatataatttttgagctttttaaatgcaacattgctgtttaatcccgtcattaattatttatatattaaaatccagtaaaacagataaattttatatttgaaagttttttacgcaaatcgcaaaaacttggattttaaatcccaatctcctgggttttcatccccgatccaagtcttacgaatcccaatttccagttttgtcatcccgctttccctgctaatcacaaattctatttctgacttatattgttcgtgataaaatttgatactaataatttattagtaataaaaatgggctgccgagtgagtctctttcagtcagcaggctatacaaagcttggtttagcactcggagtcgaagctcgaactttttcgcatatttttttaaataaatttaaattatgcctttcaaaaaagtaacgaaaatattttaaattattattataaaattctataaaataaatgaaattttttaagcaaatgaattaattgtaagtttaggaaaattgataaatatagggtgtgcaaccagcagcagaagaggagccgtgatagaataagcacgcggtgtgaaattgtttagaagattagcaaaaattacctttttctcaaaataatttaattacttatttattttttctcacattttgagacaacaaataaatgttaacaaatgaagaaaaatagatttttatacagtaaaaaaatttataaaaacatcagaaaattcaacaaaaaaattaattatttttctttacaataaaaatttaaaaaaacttacaacatcttcgattcccaggacgaaaggcccaacgttgcttaacttgacagatcggacgggatggcatgctttcaacgtgatatgtcgtaagcgaaagtgctccatttgaaagcaattaaatagtcaattttataatgcattttcttctctttggttaacctaatgattaatctaaacatggatagttaaagaatttaaattcacttanataaggtaaaaataaaaagaaaattncgatagttttttttcaaattgaaaaa

SEQ ID NO: 986 - DNA, 1127 bp, Heterodera glycines
tttctttttttttattttttattaatttttcaactgcaaatcggctaaattgaaaatgagttatataaattttgcgattcatcacaatctctttaaaaagcacatataaagtcttttcctaggcacaatttaattttttttttaattcgaaaaaacctcgaaaatcaaaatttcttaagaaaaattggttttggtagtggtgattgaaatgtgggaaaattttcaaaatcagaaattattttaaaaacaaaattacagcgaaaataatatgcttatgactagagaccgcaaaaaaaaggcatcaaaaatcgcgaaaaaggcactataataggcaccaaaaaattgaaaaaggcatgtaaagcagggctacccttgaaaatttcccaaaataagtatttcgctggtcaaaaataagttttaagggtcaaaaataagtacattttttcaaatatgcttccaaactttaaatcacatttttattcaacaaaatcaagcattaacaacatatttctcgccgccaactatttttctgagcaattccggcttagacatgagaaatttatacattttcgaaaatgaatttaataattttgtttaaaacataagcaatttgtaaataattatagttcattcgggatcaaaaaatcagatttttaacaattttttgcggtgtgctttttccaaaaaattttgaggaatgggcgatgggatggggtccggcagtgccggtaggcgccgccggaaaaaattttgtaatttagcgcgactggtaacaaattttcaccaaaaaggccaatttttgcatggaaaattttaggtcaatttttgaaatctcagcggaaatttgcggcactgcggcgccgataggcgccgacgggaaaaattttttttgggctttttcatgaattttgttaaaaaaatatattcaaaaatccccctttttgctcctttttatgccttgaaattcacgctcataatcagcgtgaaatttatatttgcggtttggtggagccattaacgtaaataattaataatttaactctaaaaaatgtgatcataaaactttctttcgaaatttagaatatttagcgaatcttgttacgattttgtatttaacattcgcttca

SEQ ID NO: 987 - DNA, 780 bp, Heterodera glycines
ttgttacgccgctatgtccaaagtgaataaaccaaaagtttattcaaacaaaataaaaaggggacaaggcgaacaataaattaaatattgattggaaaatggggtcacagaggaaagaggagaaaatgacaaagtgaacagaagaagtgaatgaaggagggaagaggaggggtatttatgcaaaaatatatggggggtcaaacagtgtatgtgtggagggggaaaaagataaaacataatgccagacatatttaaatggtgtctaccgaacacctccccttttaaaagagtcatccttccatctgatcggcatgcacaggtcctcagatcacttcggtgagtagcgatcgggcggacgacggttccgttgagggtactgtcgtcgaggacgaattggcgaaaatggctgttgttcgacaggtggtggatcatttgctggctcagcattgtccacaatatttagttgaagcacggccacgtttgggcgctggtttggttgttgtgccacgtttggcaaaccaaattcttcattaaacacgtccagtggatcagtgtccatttgatcggtttccctcttgatcagctggttggcgtggaaacgggatgttgatccgttcacgaactccacgtcgtacatcactcctttgcaagtcgtgacatgtccagctctccattgttgggacagccggtgacgagcataaaccttttctccgactgagaaaaatctcggttttgctccgaagcgtcggttgaatggcttttccatggcttcgtcccgga

SEQ ID NO: 988 - DNA, 2977 bp, Heterodera glycines
taatgctgttttgagtgacgaattgcttgaattcgtcgtacgaaaattgggtgccgttgtcggtgaccaatgtctccggcaagccataagttgtgcaaaggccacgcaacttttcaattgttgccgctgttcctgacgagcgcatctcgacaacttctggccacttcgagaaggagtccacaatgatgaggaacatctttccgaagaatggtccggcatagtccatgtgaattcgtttccatgggctgtccgtttttggccaagagtgaagttcggtcttcactggtgcttttgcttcggcagcgcacggttggcaagactttaccatgttttcgatgtgcttgtccattccaggccaataaacgtattggcgcgcgaggcttttcatccgctttattccggggtgccctttgtcaagagttgcaacacctcattttgcagcgaggcagggaccacaactcgatcggaaaataacaaacaaccattttcgattgtcaatgcctcgcgcctgcggtggaacggcagaagttcgtccgaaattgcctttttgttgggccattgagttttgacgaactttttgaccttctgaattgtctgatcctgatcagcggctctgatcagatcctcattgacaatcgggagccctttttcgatggcgttcagcacaaaacttccagcagtgctaatacttgccacaattcgttcatcgtccggaagtggcgtttttgcgatcagtcggtacaaaacatcggcatgtccaaattctgacgtgcttttgtattcgatgttgaagtcgtagcctaaaagtatgatggcccagcgctgcaatcgatttgtggtgcaagcttttatcccctttttgttgccaaaaatggccaacaaaggtttgtgatccgtttgcagtgtaaaatggcgtccaaacagatatttgtggaacttttttactgcatagatcagagctaaaccctccttttcaatttgggaatagttcttttcagcgggcgtaagcgagcatgatgcgtgcgcgatggccttcaaattgccttccggaaaacaatgacagatgacggctccaatgccgtgctcagaagcatcggcagaaacgacgattttgcgggccgtgtcgtaatgcgtcagcagtttgtctgactgcaggatttcgatgaccttatcgaaggcctgctggcattcattcgaccaattccatgccacgtcctgcttcaacaactcatccattggttgtcgaatgaatctcatgtttcggacgaattgctgctagtgattgatcattccaaggaacgaacgcaattccgaaacatttgttggcactggcatttcagcaatggcttggattttcgctgggtccggccttcttccgtctttgtcgacaataaagcccaaatacttgatttggctttggaagaaggagcacttttctggcttgatccgaaatccgaagttttccattcgttggaaaacatttgccaaatgctgttggtgttcatcggcggatctgctcaccacgatgacatcgtccaaatatgcgattgcgcaattacagccagccaacatcgaatccataatggattgaaaaattccaggggcggacttaaccccaaaaggaagtcgttggtactcaaagttaccacgatgcgttgcgatggtgcacaattctattgaattgtcgtccaattcaatctgcaaatacgcatctttgagatcgatttgtgagaacacttgtcctccgttcagtgtcgcgaatatgtcctcgggcactggtaaggggtgctgatgcaacagaagtgcactgttcaacccagttgaaaagtcggcccaaacgcgcgtggaaccgttggcctttttgaccacaacaatgggtgcggcccaacgagtgtgttccaccggacgaatgactccgagttccgttagccggtccaattcggcctcaaccaccaatttggtgttgtatggcacaggacgaggtcggcaatatgagaaaatttttctttaaaaatttccaaagtcgaatcctgttccgaaaattggacattgttgagcttcaaaacatctgtcagattcgtccgaaatgagtccatgagacccaaagcatccagcatatcgatccccaaaaggtttaatgatccttcgtcggatacataaaatgttccttttgtcatacgccctccgatcgaaaaagttgctgttcccttgccaaacaaacggcattgggatccgtcgtgatagaatgcctgctcactgcaggagctcagccgagtgccaactaatcgatgcgattccttgttcagcacggtgatttcggcacccgggtccatcacgaattcgattgcgttcccatcgacgttgacgggcgcttcgatcaggcgtttgggttgattaactaagttaatcttcaaccctccaagcctaacataattgacttgtttccgttggttggcattctttgccaaatatttcttgacccaggcctggtgcttctcgcacatcttctccaaatgtcctgatttgatgcaatttttgcagacaacactgctgtgcggatacgatttgggagaatgggtcttaccgcaacgccaacatgatcgatcagtcgaatttttctgttgatcatggcatttttccggcggtttgctgcgttcatgccactttctgactgcgaagacattcttcgtgccggttggctgttcgatgacttttgcctaggcgatggtggaaagataaacctgcaaatcttccacaatgttgtcatatttgacattgtccccgtctgcagtaagcttggccaaaatgcgctggcgcaaggcagaatcgttgtgggacttcagtgctgtcagcagcatgaggcagtggaattgttccttgttcaaaatgtcgaatttgaactcttggagcaatttccgatgtctgttcacaaaatgtcgaaagtcttcagcattccctctttcggctttcaaacact

SEQ ID NO: 989 - DNA, 8370 bp, Heterodera glycines
  unsure (1)..(8370): unsure at all n locations
tacagcattcctaaagaagcttgcctccaccagatcagaacaaaaagaagaacgaattaatcgaaaaacgctacagctggccaaattttggcaatcgttgaaaatttgtgcaaaatatattgagttttagtttttaaactaacgaacaaacaaaaaagaaggttggcacaatacgccgatttttatagagaaattgccaaatctcgttcagagaaaacggcaagaaaaaggatacaacagaggagtggtatagccctgggagctgtcttgatacctgtcctgagtgttttagcccaacatttattagaaaaaataacatcatgaaatttgcaaagaaaatgttaatgattcccgaggcggaatatttggctctacggagtgcgatgaatagtggtgattatctccaaaatgaaaaatcgagtttagacgcaaaaatttctcagaatttacaagaccccggcataagcgaggacctcaaggcgaagagacacgattggctctataaagaaaggcgtacggtaaaggggatacttgaaaatagaccacagaaggtagtgattgagaatcatgtacccggtccgaatgttgcaccatatctaggcctcaacactcaatccaaacgggcgccggacttttcgacagcggacctttcgacagaaggacttttcgacagcggacttttcgacagtaaaggacttttcgacagaaaaaatttttgtttaaggggaggacttttcgacagtggacttttcgacagtaaatggtagttttaaaaaagacaatgctatttcatttagtaagcaaaataattatttttgtttcgaaattatttccgtttttatggaaaagttaaattgggtccggcattcgataggccacagctcttaaatattggtagggatggcgctgttcacgtgtgttgtaaagcgcgagcaaattttcgtcttgttcaacataaatttcttttcttttcatgcctttaccacgaattccattcacaggcgtgtcatcccagtctcgaacaacatttgcccaatgcaaatcttcagattcgattcccctaacaatttcactaactttcgggtgaccacttctaaatcgaaaaagtaaaattcgaaaaaaataaaatagaaaaaaaattttttacttaaatttgctgttccaaactctatgccatgactccaaggagttattggtacggcataaattcgcattcaaattcaaacacatattccataatgaaattggaaaagtggcattacggttttggtaatttttttggacaatccagtttcgcataaacaaatcgacatgttgataatggcccacagccggatcatcatttacaggatcggattgccaaatttgacggcatccaagccaattttttgcaaaatatttggccagttctcaaatgggatttaatttttttaaaattcaattgttattattagggattagatttttaggcatactaaatagacacttaaaaaggcataaaaagtccgaaataggcaaaaataggcattataaaattgatcgtagaagtttcaaaccaagataaaaaatcgtttttgtgcctatttcagcatattacgagcgcaaaaattttaggaagctgcataaaatctaatccctagttattattactctgaacttcctcattttccatatcaaattgtgacatgatcaaacagaaatggagataagcagaaccgcttggaacgaatgcgagcgaaattaaacatttgacattggtttttgtttgatgcggttcttggttttgggccaaaaaaagtgaatttaaatgtggcaattttcgaaggcgccggaaaacagattgggacatatgaaacaaacaacctttttgccgagagagtggaaaaacctataattttgatttcaaccaatacttgcctccctttttcacctgattcacggcctgaattgaactattttcaaaatccgaaataaaagtctgtggattccaagctgggacagcgtttcgaacaacttgaaaaagtctttgatagacaaccatttcttttgatggtagcaaagcataaacagcgggaatggcaacatgatcaacgattgggttaattgtgtaaacttgttgaaaacttgccggacaagtctaagattccagggatatgaccaaatgcaaattttccaacatatttattttggtttcgagggggggggcaactcaaaaagtcgatttttaggggaatatttttcgttttttaaaaagccgatttctatgggatttcttttaaaattgataatattatttaacaaattttacaaaatatttattttaattttttaaaattttggtttcggggggggggggcctcggccccctggctacgcccatgatcagtacctatttgcattcttaccttaaaggtaccatcaatggctacatttgctccaaagcgtgccaaaattcctctgccaaaattcgaacaaaaaaccaacaattttctgctatttactaaaccatcaaaagcaaccgaagcaagcactctttcaggcaaaacaatttccgctgcatttggcacatccataagatcgtcaccagccaaggcacgcgcttgagattggtaacgtcggtactcacgggacaaagaagcacggcttgttccttcattcattttattttatttaccccgtttaaattttgtcataaccacatttcaccttgtccggctcggacatctgcaggcatttgtgctcgtgcctgagtcacagcatcccttgcgggaattggattatcggcctctgcgttttcctttagaattttttgggcatctctgacagattcgtgcttagctggatgattgtgatctcttccaacaattcgccccaatttgtaagcacgcccctgatcatcgtggtgccaagctgaactgacatgcactctcccagggcaatacggggggcgattgatacagcgccaaaattcgatccctaatttggggtttggacaaaaaattccaagttttgcaccttcttgaagtccgctgtccgcttcaaaggcatattcaaaaccgccgcttctgattaactctcggccacgcttgctttctgcttgaaaaaattggacaagaccagctggttcctctgcttcttcaaaggcttcatttgcaaagagttcggccccaatttcaccttcttcgggaccactagaaccagaagacatttttcacagcaattcaaaaatattttcagtaatagttatgaatggcatggtcactcttttttgggccggtcgagaaacggaggtcaaacaaataaattatttattattgataagaaaaccattcatgagaactccaaaaatgcagtgcaataaactaaaatgccttcttaaaccccgctaaattaagatattttataaaccagtaatttataaaaatatattttttaattaaaaattcttatttcacaaataataaaataaaaaaacaagattaattattagaaattatttgtttttaatgaaaaatttgatttgttagtgtactgtcgaaaagtccttcactgtcgaaaagtcctttactgtcgaaaagtccgctgtcgaaaagtccttctgtcgaaaggtccgctgtcgaaaagtcctagcgccatgagggggtggatggaatttaaattttgtggacccgtgacccctgtgaccacttggattttatgatggattggccgttcatccttggtcggcggtgatggtcctcggatccgttcacgagtcgaacttacctcatccgaaggaattgtaacaacgaattcggtggggatgtttgtcggagaagttggtctcgtgttgggagggcatgaagaatagatagtgtccggagttcgggggttcaattcaatgtcggcaatttcaggggggagggatgactcaagggtgggtacaacggacaatagtgaattctgggtaatgtcgatttgggatggatcggtttcagtcggcatattggcgtcagataaattgggagggttaaaaggactaagcttcaagtgtttatggatattttggatcgaaattggggacaattttggcgtcttccgtgcttccatcaaaaattatttagcggagcgggggattagttcgcagaaccaactcttgaatggcatgtcggacttctccgagttcgatggattcgggggtggaaatggaatttggggaattggcaatatttccaaaaagacgattgcgcaaaataaaaaagattttaatcaaaataagaaggaggattcctgccaaacaggaaaaaatagccaacacaagcgaaatgggaaattggggtttattttcaggttcagaggctagggaatcaaggccaagatacagggcggatgaagcaaggattgggagggtatttttagcaattccttttggggataatttaattttcggatgcgcttgaatggggggaagcaacacaaaaattacaaaaaggaacacgaccgtcggaataattgagggggatatggacgatgggagcggatgagtagtcggaagttcagttggttggagcggtggcggtgagatttgccgatttacatgtgccgaatttgagcggaggccaaaacggacaaggaatgagttgtaaaatcggacgcagacaaatgaaattaccgctgcaaaaatcaaaaaaatagggattaggatggcgaaaagtgggattggattggattgggattgctgtggggctgggttgtgatggaacgcaaactcaagcgagagaatatttcccattagtgagaaacagtgaagaagaatgtgaattgttgttaatcggagtccattttataaggaatcggagtgccgagattcaatgaatttttaatttacaatacgggatgggaagggaaaacgtgtgaaaaggcgaaaacccattcgctggcccgccggatgttagcggcagaaaggaaaaaagggggggggcaaaagttaataaacatggaaaagtgtaagttttaatatgtgatcgtaaggagcgggctgtgggaaaattcattgaacgcgatcagcgcgctcccgagcacggaaatgtgattatgttgttatgtggggtactgtcggtggctgaagggcccaagtccattttttaccgacaaacgcctttggaacggaagtgtgagggatgatggttttagaattcactttataatttggggggtatggtgcccatttaattttttggattgggggcttttgtggttcacatgttcgattacaaaattcattttccgtttcaagtgggtataaatgggcgactgaacgggtggtaatgtgacccgttattgtttttatttttgccgtattgggcaagtttgtttctgttttgaatatgtccaatataattgcgaggtgccataatgagcggggagtattttcattatgtaccagaacgagttctccaatttttggtacacaatttgaatggcatcccaattttttgtggcgctcccttagcgaaagaagataatctcttgtccattttgatttaaaggcttctgataatttggtaattgtatgccataagtcttttagagatgaattagtactgtcaaaattttctatatggtattttttggtattctcaacaatggaagaaaatagaggctcattaaagcccaatggccgtataaaatcaatgggacgaaggggtctggggtcaccaggattagcggaatcgaatgttattgggcgagtatttacagtagtttcaacttcacaaagcaatgtagtgatttggtcattatcaaaaacacgtggacggggaccaattaaaactcttcggatatggaatttaacgagggctacaaaacgttcataatggccacccttccagggggctgcgggtgtacgaaatttccaaattgttgctgagagggatttagaaaaatgataaaatttaataaaggaaggggcattatcacagtatacagtagttgggataccgtattttgctgaaatgcgtcggaaagcaagggaaaaagaaagggtcgattggtacggcaccaaatccagggaaatattacgggttgaaagacaaacccaaagaaccacccacattttataagagtgagttttgtttgatgaagtaaaaattggctttacatataggggaccaaaaaagtctaatccgacagcaaaaaatggagggtttaagagcacacgatcagttggcaattgtggaaatggtggtgggttaaacggctgtgttttaaatcggcgacatattagacaaaatttgtaaataatacgttcgacgattttcctacctttcggtatccaaaatttgaaacgaataattgataaagtatgaagagggctcgagtgttggtagtttaagtgtgtttcaaaaataattaagtgtgttaaatgagatttagtaggcagcagaaatgggtttgccgtgaattgcgtcaaatcactcttatctatacggcctttagttcgaaggatgttttggtcatcgacgaaaagtccaagcgtttctctgtcattttcagagggtgggtaacatctctgctcttgttttaggagaaaaataaatgctgtacgtaattcggatacagtaatttggagggattccgctttgcatggagtttttgttattttcgatttaagatgtaaaataaaacgaagaaaataagcaacacttcgaagtaacttgggcaaacgtgaaaatcggttaatatcaattaaagcatttggggtttcctgttgcgttgtaaaagtaaaaattggaagaggcgacgggcattttgttgtatcaattgaggtggtatttgagttaaaagcctttatttctttgttagaaggccaaaacattgggaccttggatagccactcggggcctgaccaccaatgggttaatttgattagtttgttaagtgaatttacgcctcttgagccaatgtcggcagggttttggtaaccgggtaagtgtcggacaattaaattgggtaaagaccgaattactttaagccggttatttacaaatatttcgcgcgttgactgttcattatttaaccaagaaagtacaatggcagaatcgcaccacaaatttaaggatggatttagtgaaatatttgttaaaagcgaattagtaaatttaagcattttggagcccatttctgcagcaatgagttccattttgggaatagtcaaatttgttcctttatgtttgggtttaacttttgttttggagaaaattaaaaaacaatcagaaaactcggaattgggattggaaacacgtaggaaaacagcggcacacatggcgagatttgaagcatcggaaaaacaatgtaattcatatgatcgattttgaagggggagagtgaggggatttcgggggatttcaattttttcagcgggtacccaatttttaaaaagatgattccattcattttgtgaatttagtgtaattggttggtcccattcgacagattccacgcaaagagtttgcataaaaatttttaggggaagaattacgggggaaatgagtccaagggggtcaaaattagaagcaataaaagacaaaattgaccttttagtacataaattttcagggggtggtgatacggttaacaacaaattgtcatttagggtgttccatgatacaccaagaaatttatgtatcgtaccattgagcatacggtcattagggagatcagaaattgcttcggacgaattgctggcaaattcccttattggtaatgacacagtttcaaaaagggaaataacattcgaaatcttatttttaccaatcaatgggtcatcacaacataacaaaaggttatcaacgtaaatatttgacaatatttcttgggataaatgggacggattagtggttagatgatagcgaattgtggctgctaataaaaaaggggagcaagtcaaaccaaaggacactctcgtaaagcgataaatttgcaaattggagtttgaaattgacaagtcaggattttttaaccataaaaagcgggtacaatcgcggtgagaggggtgtacacttacttgaagaaaagctttctcaatgtcacaaattatggcaattttgggggtacgaaaacgaagaaggaggccaattaaatcagacaaaataatgggaccggggtgtagacaatcattcagtgaaagttctttccctaattttgcggatccgtcataaacaattcgaattttacccttttcctggctaatgactgggtgctgggcgacataatgaagtggaggggagaattcggaggagttgtccacaaactcaataattcccaatttcttttgttcttgaattatttcattatatttgtgtaacagnagatttgtcctttgaaagctgt

SEQ ID NO: 990 - DNA, 3245 bp, Heterodera glycines
  unsure (1)..(3245): unsure at all n locations
agaaaaaatttaaaataatgtttgctgatttattggactcgtccgccgacgaagagcccactgaaaaaatcctcgatctttcgaacgagaatgatttggacaatactcgnatcagtcagtaattgatcactntcggtgccacgagaggctattatcagactcgcagaattgatctcgccaaaaatttctcaaatatatgaaaatcgaataactgatattaaccctatacaacaacttcaattagcattgttgttctatgcaacaggtgaatctacttttttgctattagcttaaaaggccgattatttggaggtgatcaccaaaaaacattggcggcagcttgtggtgtccatcaaacgaccatttctcgagccgttagtttagtaacggatgctcttcttgaatttgcgcatcattatgtatgctttccatcggccgaacgaatacaatcagtcaagaccggtttttatttggtgattaaagatcattagtagttcaagaaaaatggcaatttctagaaagccggaatgcctcaagtgattgcttgtgttgacggtacatttttaccaattcaacgtccgacaaaccaattagattatgcctatgtatgtcggaaaggctttactgctctaaatgcaatgggcgtctgtgaccatcaaaagaaatttattgcatttttttgtaactaccctgggtcctgccatgatagttacgttttacggtatttttaagattctgacaaatataaaactttattctttgattagttgctctaaattttattcgagaatggaggaaggcactcttgacggaattgtgctgggcgattcggcatacccgcaaaagaggtggctctttactccattaagaaacccacgcacagaaaaagaagaaaattataatgctgcgcacgctcaaacccgggtggccattgaacaatgttttggcatttttaaaaatcggtggagatgcatgatgtataaatgcagattatcaccgggtattttgttagttaaatggcactgctaaaataacttttaagaaaagttgacaaaaattgctactgtttgtagcatgttgcataacatcgcaattgattgtaatgcaccattaccaagagatttgttggttgctgctgacattgaaggagaacaacaaggaaatcccgatgaaaatgttgctcaaagtgcagaagcaatccgaaatgattatattaatcggaatttttaattataatataattggcagattttttaataaaaaatctatattaaattgatatacatattaataaaattaattattttaaaaatttaattattttatttaaattttttcaaatcaatggaactcttaaccacggtttcgttaaccatggtttacttaaccacggttaaagacgagcataccggttgaggtcggtcgttaaccacggttaacggaaccgtggttaacgcgttaaccgtggtttactaaaccgcgagacgagcataaggccccaggtctatatatgtatgtgtgctagcatcgtcgaggagaccgattcccttaacaaaattggaagggatttccgggttaaaaattgtaacttcgacacattttaaaaggatggggatttgatggcattcttgcaaatttgaaaatgtagtatttgtttgtgatgtcaaaaaggagttttttgtgaggtcagactcagaagtgttaattggaactgagcttgtcaactgactggaagggttaggagttaaattttgattttggttattttggtgcggaaatggttgtaagttagcttgggatgttgaataaaaggcatcattgggagaatatgttatgtctgaattaccaggaaatgtattggggtttggggaaaaggtatgagtacaataagtagaagattgcttagttttggatttgttgggacaaagcactcgtggatgttggcccttgcatgcggagcagtcggttggtgtagtacattgatttgcaaaatggccggatttgagacatttgaaacaacgctttagagtttttaagcgctcaatccgagctgtaacttccaaaaagttaggacagtaagttgaaaaatgggatggatcatcacaaaataagcagggtaattttggtattattttgtgagtggattgagaatagggttttcccttttgagaatgaaatgttagggttgaagcgggggacgaaatttcatggttaaagggtttattagtcccgtggttaaatgtgaagtttggctttgatggagtttgttttagcagtggcaattttggttgtactgaatcgatttgctctcttctccgtaagatgttgcggagacggtccttcagttgatcagtggaccagttggcttcttcgtctttggccttgaaaatttcttccagaacgaagcgagggagacgttgctcgatttccatttgaaaagaagtagtatcataggattggtttagttgattcatttggacacaaatgcattcaatttgatcaaggagggagcgcaaatcggaacaaaacaaatcacctccacgaatacggggcaaattcttaagggaattatgcaatgagcgagctacatcttcgggattatcgtagctttttgtaagtaaagcaagcgcatcattgtatgagttatccgaaattggaagagggctaatgagggtaaggggagtcccggttaaacactgtttcaagtacgtgaatttgatggaatcggagagtggtaaatcatggacacaagatttaaaggaattccaaaaggactgatattcgacacaatttccgttaaatttgggaagttcggtttttggcagatggataacagaggaattgggagaattagtatttgttgggttagtattttgggaaatagaagtctccaatttgcggcgctgacttcggagggtacgttcgtattttttgagggtatttaacccggggaaatggtgttgtagcaacgaattcgtcgtaggcggtgttgtccgatagccgttcgtttccggtcatgcttgttcgcagagccatccatttgtcactcgcatcagacaattgagtaatgtaatcgtttacctcatttgtctcctcatccaggtcttggatgatggattggacttgtcggtaatgattggaatcggattgaccctgggggcgggcggggatcggaaaatctttctggttatcggcaatttcagaagcgtcaggaaacaccaggccaattgttgttcgataatggg

SEQ ID NO: 991 - DNA, 3509 bp, Heterodera glycines
attctctttcttcgtcaaataaaaattaactgattaatctcattttttgatttgaccattccggcccaaataaatcgtcattttaatgtttctcttttgccaatccttctgctgcccttccttccattgtatgcacattcacacaattggaaggccaaaaatagcaatcacagaaaaggaatcactgagagagagagccgagcggaggagcacagagagcgaagagggagggacacacacaaacagagagaaaaagacagaaaaggacgggcgaaagggcctcaaaaggccgtctctcgtgacttggttcccaaaaaatgttaaatttacaccttttgaattgctttaagcaaccaagaacatgaacacttttcgttgaaactaaacgaagaaagggataaagagcctgttgagtccaatggcatggctaccatagtttttcagacaacaacgaaaggctcctccacctctttaaggggaattgaaattaacgaaatgttaattcaaataagtatcagaattatccattcaatattcagaatcagaaaatttgccaaaaaggtggcataccattggcaattttaccaccgacgtctcccttttgcgtgttttgccagcctttgtgtccttccgatttcatttttattgttgtacttatttctgttattaatccccgctctctttcctccttgcgtctgtgtgcaattctcaatttgccttttggcgtctctttaagaatgaaaaatgggcgcactatttagtagagtttattcatccattcgacttttatttatccaatcgatgaacgtgtcaactttttcttactttgtcaatccatgtcattcattattgctcttttcttacatttataatttcttgagacttacatttaaactttcgaattgttctcaattgcctttacattaaattgtcctctctttttgaatgaaaaatggtttggtgattccttcacaaaatcatttttggcttcaaattaaaagatcagaaagcactcaaataaacaaaaagcaattcattagttgtcaaaagagggagcaaatgattgtgctcttcaatctattaaattctgctgctgtttatttgtgtattttttacattttttgtgcaagagcagtgagtgagagaatgtttgatgctgatgagaaggagggggagcggctaatgttcgtcttgatggactggcccactctctctctgttcctctccttcccctcttttcttgggttcttctactctctcattcccttctccgctctctctctctccgtcctttcctctctcttcctctcctttttctctcttctcattgactttcttccccgagcagattgctcctccttttcttccttatcttttccaaggtcagacaccctttctttgtgtctttgtcagtgttttccctccactctcttctctctctccccccaccctctctcttctcctttccattcggtcttcgcttttttctatttctgctccccatctcataatttcattcttttttcctctattggtcggggttgtgctgctggtgatggtggtggtgtattggctgatgattatgtttgctgctgggggtgggggtggtcgacggaggggcgctgatgagtgtcagtgtgcagcacgacttattccgttgaattgtcatcattttttttcgcttaaaatcactaatttccgccccgatttatctcttatttttctttttatccttttatattccactcaatccatttagaattaattgccattcatctgtcccattttttgctgctctttaaacgtaatcatcgccatggagaaccaacagcagcagaacacgccgttgtgtcgtgccaattgtggcttgtaagccctttttttaatttgcatcaaaatgcttaaataaatattccgtggaagaaaggtctgaggtgtttgctatttaactaccgaaaccttttcatccgttgtccttttttaaacgtgaaatttttgccgtatgatttttttacaaagagaatatccccttctgtaaaattcagttatggttcgcccgccacggaggatatgtgctccaagtgcttcaaagacatgatcaagcggaaacaggaaacgggcaacaccgcgccttcgacgacagctgcggctaccaccgcagcgaataaaacgacggaaacaatgccggtcgatgcggtcgtcgccgcattggcggcgagcggtggcggaacgactgagcagcagcggagcacgtcctcaccaggtttaagcgaaacataactgaaaatagtcctttgagctggtgcaatttctatacgagagaaagaggaggtcgaaattataaaaatcaatcaaattgaacgggaaattgaaaattgcttacaatagctatagcaaaaagaagaaagttgaagagagcgaaaaaataataataattatttaaaccgatagttttctgattgttacttttcttacagttaaaataatcgtcaattatttgaattttaacgtgccatacaaaatatgttttcagaaaatgcaatcacgggattgtctgcttcgtctggcaccactgcctccacttctcatccgggaatgctttcctgctcagccgccacaacaacaacggacgcaactaacaacacccatgcggcgccaagtcctgcgccgggacaacagcaggaagatacccagcagaagaagaagccaaaccgatgcggggtgtgcagcaaacgggtgggacttaccggtgagcgaaggggaagggttgggcgaaggagggaagaatgggtgggggatggaaatccaataggaggtacacaaacctaaggtggtaccaaagactaaagcctgtgatttttaggtttcgaatgtcgctgcgggggtctcttttgtggggagcatcgttacgattctgcgcacaattgcactttcgactacaaaacggccggacgcgaagaactgcgtgccaaacatcctcaggtgtgactaaaattaaaaggaaattggggttggtcagtagagggtaattaatgatttatgaacaaaaatttgacggtggaataattaatttgttaaggtgatcactgacaagatcgaacgtatttaaactgtcgcaggacggcgtatggacgacgactgacaccaattgatgactgacagatgatctggaaatgataatccgacaccaccatcacacaccattcacataaatgtccgtacacatacactacacacttgtcttgtgagagcactgagtacactctatcataaagataaaccgtgatcaattcgcatgacatcagctgtatttttctttgaaatcgaaatttcgggaatgcaatttttcttttattcgttacttaaggcctcaaaatttgttcaatttgaatataaagatgggtccggaatactcgttttcttgttcgcttttggacctggcgaaatttcgattttcaggatgcgatgtttttcgttatgagccggacaacactttcgtcccccccccc

SEQ ID NO: 992 - DNA, 1057 bp, Heterodera glycines
ccccccccccccctatccctcacattccatcaaaatacaattgtgacatgaacatttcccccaaattcggcttgctttcccaacaaattttgttgttgctaaaaatttaaaaatatatgtgtatataaaaggttaaagtcaattcattttgttgacaaatttttatctgtgtctggcattttgagctaatattaaaattgaaaatattgctcaacgagtcgacgctgttttcaaaaagaaaccactaaaagatcaaacaagcgaaaaacaacaaaatcaaattcccaacgatcaatgagctgtccaccctcatgaaaaagacggccctccgtctggcgagccaaaactgcccatgcctgccatctgttgggccttggcagcaaaagcagttgaaacaatgctgaagctgaactttggggggatacgcgttattaccatggtttaaaagctgaaacaatgacacgaacaatcgcaagcccgaatttgaacaaaattcgaaatgacctgggcccacattgtcaaattgttcacctgtcaagccatctgtccacgcatcgttgcaaacactaaaatttattggacagatgatatttccaggtgttgtaatactgtcgaattcggacctgtttttcacctccgctcaaagtgttgcccggacttgtgatacaccgttgggaacatttttcagagaaggaggccaacaaagacagcaccgattgggtgtcggattgacgacgaacatcctcgagaagctgaaataacgaaatcagagagggggaggggaggtgaaaatatgaaatgactcttcctgttttgctaaacatattttttttattcaacattaggtccaaaaatctaagtaaattgaataacagtctctctgtaaaaatattaaaccttgttttgctgctcaggactctgaaaataataaaataacaaataaataaacattttggtggaaaataaaccatttttttcaattcatcgatgtccattttaggaagaaaaattaagctaaaataaatctgtaaaagataaaatattaaaataaataatt

SEQ ID NO: 993 - DNA, 1090 bp, Heterodera glycines
ttatcccgttttttgaattcccgcttgttttaaattccccccccggcatcttaaaaaagcatcattttgcttttcacctggttcttaatattttagaatttcagaaatgctgtgtaaaactttagcttgaaaatctccaaattattgacattctaatcttttgatatagtaaatttgtttagttgtctaatccaatattataatttataatcgaaactagcgtcgaactaaacgagaccaattctcatcattttttctgcatctttccttccctcactaatttttcgtgaaagtaatcaaagccaaaaaatattttgaattacatttgtacatgttaaaaatttaaaaacaaaacttaatatcacataaaaaataaaagaactgattttgatagtttgatttgtaatttaagatccttccatttttagctgtcttttgtttgtcacatacaaattccgtccaaaaatgcctgagttacttttcaagaccatcacgcagcaatcgttcacaattgaagttgaggaaactgcaacggtgagatgtttagacatccttttcttgtgcctaaatacctaacgatccattccttttcagatcggcgaagtcaaacgaaagatccaacaggtcaaaggcgcagaatacccagcggagaaccaaaagctgatcttcaacgggagagtgctcgaggatgccatgttggtctctgagctgaactttgcggcgccgaaattcattgtcatcatggtcatgcgagtgcgtttttgcccttcgtccgagtcaaattcggtacctaaattgcgtttgggtccacatttttggtcaaaatttttatcaatattttttttgaattaaaaactcctgaaaacaagtagtatgatataaactctccctttcagatattaaaatcattatttttggtaattttcaaacttaatgagatgcgctttctcccgacgccttcggtacagtcagtataattttttgagtttttaatatcgtaatacttagggattcttttttgacgcacaagaaatcgagaaatacgcacctaaaaagggagaaaaaaatcgcaaaaaaggcatcaaatagg

SEQ ID NO: 994 - DNA, 3448 bp, Heterodera glycines
acgaggtttctgtacactaaaatcaactttacagtcatcagtgtttcaataaaacttgcttatcccatttatagcctaaaaatcaaaaattgacaattttaaagtttcgacttttggttcgaatttggtttcggaatctcgaattggtcgaaatggatgtcgtattcgtgatcagagccccgaaaatcccataatacttgttttcaggagtttttaaaacaaaaaaaaaaattgtccaaaaaaatgggggccaccaacaaaatatatatttactttcccccatcaaagtccattcttttcagaaacccgcgcaagcatcgtcaactgttcggccagcaacatcctccgcatcgccacaaaagaacacatcgacagcggacggacaggcgccgaaggcggagaagtcggcggagaacaaagcgacgggggcgacttccaacacatcggtggcccagccgggagcagcaacgggaggtcgttctgctgattcaataataaatcccttgcaagtccaaaaatttcagtgccggcagagcatgcgcaaaccgtggccaacatcgaagccatgggttaccctcgccaggaagtcgttcgtgcgctgcaagccgcgttcttcgacgccgaccgtgccgtggagtatttgtgcaatggcatccctgagggactttctctacaagagtcaaattgtgagttagagtagttcagcagtattattccccgttttctttaattttagctgatgctgacaatgatgcggtcaatgaagaaggggaacttatggaatcattggagaacccgcaaggactctcttttttggctcaatcgccgcagttccaacagctccgagacatcgtaaggggatgaggatttattttatggattcaattttgattttcttttcaggtacgtactgatccatcgatgctgccgcaaatcatccaacaaattgccgccgccaatccgcagttgatggaggcaatcagaaacaaccaaggcgcgtttttgcaaatgctcaacgagggacaaccattgggcggtgggaccgacgctggagccggtggagaagcggcggccggcgttcagcaggaagcggcgcaaagaagggtcagcattccagtgaatgcccaggacagattggcaatcacccgggtttgtcagcgaatgcaacaaaataaataaataaaaattcccattggctttttcagctcgtttcaatgggatttccggaagcgttggtggttgaaggtggttttgtccgttattttttgttttatttacaactttcttttttagcttatttcgcctgcgacaaaaacgaggtgtcgcttcaattaaaactattaatttttgtaaattaaaatgcttttttaaggatttggctgtcaattacatcttggcgaggatggatgagtctcagaatgaacgggcgggtgccgggcagcagggcggacaataaatagggtaacggaggtgcagtaatgatcgcaaattcctcatatcgtttccctaaattatgatcattttttgctcctaaagtgcatgttctgttctattctcgccctttggctgttcgttgtgttttattatgaccatattaaattgtttgcggactgaaatgaccacatttacatgaaatggctcaaagatattcagaataaacgcatagatttacatatatatgaatttattatttctagaatcagcttagaaattacccattcgttcgtcgggacggaaaacgcattttttgggttttgtgctaactttatgccttttcatgcataaaaatcccatttctattctaaagtgataaccctcccccagcagcagtactgatgttcaagacttaaaatttcacaacatagagaattggttagcagagccaaaaaacccgactttacgagatacgtccgatattcttttcaagaaatcttaattgcacacctaaaatcaaataaagactaaagcgtttacaaccaatattgatgggacttaatcatggatatcgaacgtaaaaatcatcgtcggttttactggtcccataaaaaaagaggtaaaaaagagattttgaggtgctcttagaggttttcgggggcgctgaacacaaatatgacatccattttcgacctatttcgaaacccggacccgaattcgaacaatttttttttatgcatttttcactcggaatttgcgtcaaccttctttattgtatgtaaaattaccaattttataatatgaaaaaataatttctcaaaagattttataagctttagttgattcttattttaaggagttgctaattagtttctccggtttttttatttagacatatgcttaatttttacaaaaaatcacttttaaatgatcactttcggcctcagaaaagcataaatcaaatcaattcattttgcttttcactttttggttgaggattaggttgcttttcccaaagtgccgttgtgcgagcaaagaaaatgccgtccgttcccattcactggcagaggagggcattaagccactcaaattaacccaaggaaaatcaaatggacagattaatggcaattagagaagagaaacaaaatgggaacagcagagatgggcagggaaaccatggcatataaaagcacaaatgaaagatgccaaaaccattcatcaccaaaatccaaattagcactaaattctattttgctcccctatttattttatttatttaataaaatttactagattttaacgatttatttagcattttacatatttattttgtattatttttttgaaatcccttactctggtgcccaaatttcatgtcaccattggagcttcgtcactaaaatagtgaaaattcattattttggcgtgcgttttgtcactatttttttcactatttcgacattttttggaaattttctcaacaaaaatgcaataaaaccaaaaaatacacccctaagaatctacttaaaaaattacagaaaaattagcctcctaaaaatcgtcccaaaaatttaaaaaaatacactcctaagaaattaaaaattttcccagaaattcattttcatggcatttttggccttaaaaatcccagtctactcatttgcaactgcaattagtaaataataaatttttggctcaatttttgttcgattcttaaaagtgtatttttcgcttttattgcatttgtgttgcaaaattttccaaaaaatgtcgaaatagtaaaaaaatattgacaaaacgccaaaatagtaaattttcactattttaagtagagtgccacgggaccgggattttcggtgtcaaggcagttcgtacaatttcaaatgggaaaggccataatttttttgttcgtcatttaatttcttcaaaatttgtttcaacgaaagctcaacgtgtttagaagctatcattaagcagaagctaagcgattaatcatctcaccaaaaagttcatt

SEQ ID NO: 995 - DNA, 3992 bp, Heterodera glycines
gtggtcagtgcgttctccagaactgacagaaaatatatttttacaattctgccaaaaaaaaagggagggagttttttccatcggcagtattactctgttttcttttcccccattattcttgtttcgttatctttccatcctttatttttttgagagtaaacctaagtaataaatagtcaaacttaatcttgctcgtcctcgttgctcaatgcatacaacggcagcaccgccacctcatcagccttctgttgtcatgtcggcaattgatgacaacaattcggcgagtgtccttttctttcccatctttctcttttacttccagccaataaatgtatcaaagaatcccttttttaggtgcgctttccgatcattcaagtggaagtgaaaattcgagtgcctgaccatcttgtcggtcgactgatcggcaaaagtggcatctgtgtgaagaaaataatggaggacacccagtcgcacatttccatcaggcaagcgtcgtcgagaggtttacgggagcattttggatagggggccaaatgaaaaaaaggggaaatgtgtcgggaggtaagggtttgaatgggattcagtacctgaacaacaaaaaagaaggtacatacacttgtgtgcattcacaacccaactatgtccgggcaccggttgggttggtcctattggcaaaaatgagtccgattggccggcttcgattgacatccgaaaactgtttgaccgagaaaaaacatttaagcgaatcacgaagtcaacaggaggtgaatcagtaccaaactccggagctgctcgaccgaatcatcaccattcggggcactgcttttggctctgtgatggcggccgagaagcaggtgcagcagaagttgcgccacattcaggaacaggacatgaacatcagcgggggaggcggtggagtaagcgcagcaagcggacgggtgagaaaaggacggggaaggggggggaattgaaaaatgcaaaacgaaattggattaaaagtcccattaaaaaacgcaacaaatatttcctccccttccgcctttcttcagcagttctgccccacgcctgtgcctgctccgcccggtggcattttgcagtctatggacggcggtggaggcgctgccattggttcgtacattgctccgtcggcggtcactgtgacgggtgcgccaatgctttcccgtggtccgccggacaatgccttccatcaccatcctcccacagccgccgccatgtacagtgcgcaatgcatcccaatgggtaggtatgaagcaacatttacacaatggagagggactgtttcatttaataacccattgagcagcaaaaatccactgattaggagaccatgacctacctttaaaaccccccccccccgattcggctgctaatctttaacatttaattcggtgcgtcgtttaacttccatttttctccccaggtgtcgctccgcaggctttctttgtgcataaccatctcgctacgggtcaattcgctcacaatattgcagtgccaaatttgcctaaccttggtgagtcaattttcgggggcattggccacgcaaaaatatttattttttaagtccatgtcaaaagtcgggtatatgttcccaaccaaatcgtcggaattctcatcggaacgaaggtaaagaaaaaaagcaaaaattatttgtttaaaccaagcatttaagggtcagacaatcaaaagcataagtgccgagtcagggtaagaaatggaataattataagtccaaggagaaatattgacgaaattttatgaacaacaaaatttcctttcttttcccctgggggtgcatcggcgtattactcgcatatgaatgaataaatgggttattgttttcctattataatttcatcttcttccacagggctgtgattagcatcaaagctgagatgacaaaaaaagggggacgagaagaaaagggagacggcgggacagtggcagggaaagaggacaccggcacagtttctgttgcggacgaagccgacggagggacaacgaccaccgccgctggcgcaaacgatggcagaacaaccgcaaccatcgaggacaacaatgccaatgcgaccactgtcgacaacaatagcagcgaaactgttgccgaaaacaatggaggcagcgccgctagcgttaccaataacagtggcagcacaatcgcaaccgtcaccaccgaccacagtggcagcacggccggcaccgataacagtggcagcaacgcgaccacctgcgaacaaagcactgcgacgccagtgcagcaacagcgcacgtatgactcgaacaactcgcttagaccggtgttcatccagggctacgacttccaagtgtccaaggtgtggtgattgatgtgtctgctctttgtttgtttccattgttttgttttgtcccctcccattaggcgcagtattgggtgttccagaaggtggctgacagtcagaacaaaagcgtggacgaaattgagttggcgtgtgaagcgattgtgccttcgcgagtgatcggacgaatcatcggaaaggggggacacaacgttggtgcattcatttgggggatcagtttttggtttcattattcagcttttaggtcaagaagcttcaacagagcagcggggcccgtatcaaagtgaaaactaacaattttgttttgttttaaaaatgtttgaaaggtgccggacgacatcagaggcaacaccaagagcagtggcgactgggctaccgttagcatctatgggaatttctacgcggtgcaggcggtccagcagcactttggcgcgcttatcagcgaagtggaatggcgtgacagtcgcgagtgagtgcattgaacccttttaactccgcttttgtctggcactcaattgtctgtgttttcagacaggacgagagacgctcgcgtcattggaacggcggaaacagtcgctgatgagccgaaaaacaatttgtgtcaggaaattaaatatgtaacgatttgtgtggagaataactttgcggattgtttgtttgtttttatggccgtcagattaacaattgattatgtttattattcattgtctgttgtgcattttcgggtaatccttcgggattggtgtcccgacggaaaagagataaaattttcttcaaattttttctagggaaaaaaaaactctgatcacgaatccgagaacgcacgttctgaatggtgtagattcgtagagttttagaatgagttatcaaatgtatggaaaactttgttttcactgcggcttttggctcctgacagggagggaggatttataaaacggtcgaatcctgacaaatttaatatcattgtcctaaacatgcggatgaaatcgattcaatgcagtttgagagatcttcgaaccggtttaggattctaaaatgggtaatccttcggaattggtgtcccgacgggaaaaagagagaagaaatttcctttacacggctagtcaattttgggctccaagtacaaataagtttattatttatttagtaatcagaacgccaaaactttgcaaaactttaaattttcttgggattttcccttgtaaaaatggaagagccgatctcgagttaaaaacttaagtttcacaaaataaacttggaatcgttaaagggggtcaaaatatgggcctatgcaaaatttgaaaaaatctgaccctaggaaaaattttttgacccaggacaaagttttttctttttctctcatttgggcgtactatttcctataaataacacatgaatcatttatttgccaataaacaatttttttaaacttttgactaacttagaaatattcttcagaattttcccttcaaaatgagcataaaatgattttatttgttctagtactgaccaagttataagctaaaaaatttcaataaaatcagcagtaaaaaatagtgtaactctttgtatttgaattttttttcttttggcgttctgtaattaattatattttatttgtttgctttaaaaattgaa

SEQ ID NO: 996 - DNA, 1428 bp, Heterodera glycines
tttgaattttagtctttttgttcgaattcgggtccggggttctaaattggtcgaaattgatgtcatattcgtgatatgcgaccctcaaaaccccataagacatgttttcatgactttttagaaggaaaaaatttttgttccaaaaaggggggggggcaccagcttcactattacccaaagctctttaagagcgtccgaatgataccatttgtcagggttcgactgtttttaaaaatgccccgttaaaaagagcgtgtaagtaggcagttgtctgatttacgctagaggcaaatgcccaagtcgtaaagtcatgcaaggaaagcaaacctttatgccaaaaaaccagatttttaaatttatataaattagtgtgggaacaattcggagaagaaatgaatgagatttgtgttggccaaattgacaattgatggcaatacatcaggttctggtcgctttttatgcattaaatgaaattttcgtttcaaaaatatcgttttttcaaaagtttggttttcgactttcttgaaaatgatgtcaaaagtatgaatcgaaatttgtttctaaaaagggaatcgaccaaagtattaccaaattgattattcattggaatcggactctcttctttccgtcctcttttctttcgtcgccgtcgtcggcggctgtcgcccctcgggcgccgatcgtttttattgcaattgacgtgcaaatggttgcgctccgttgcgaacgattgttgcccatggacagtggggacgcgggcagttgttggcattgcttttttggcgaaaattcggcggggccgagaacgattggattgggcaaggagaagagactctcgacggaagggatcaaactgaacggaaggagcagaaaataaacggaattggcaaagagccaacgggacaaacagaaacagtgaccgaccgaattgtgtccgacgacgagcgacggatggtcactgtgtgccaactctcctgcatgtacacgtagccggcgattgctgggagaaaaaatgccaaaaatataattaaaaatggaaagggcggcggaaaccgacccaaaaagagaatagcggcaaaggcgagcacgcaagcaacaagccgaatccacatgtcataaatgccgtcctcctcctgcgatgccgtcgactgttcgcccccgtcgtcggtgccgcaaaaagtgcgcgtcacattttcgcactgattgctgtccaaacagcccaacgagccgaaatgggtgtccgccttgcccaacgctttgagccaagcgccgatccactcctgctcacagatgcactcccaattgttgcctgggggcaaaagaagcggcaaattcaaagaccaatgaaaggaacagagcaatgccaaaacagaaagaaatttatgcgcaaaaattggatgaactttgagaggagagcaaatgaaaatt

SEQ ID NO: 997 - DNA, 939 bp, Heterodera glycines
cgaagtgtgaatcatgtccgtatgagtcatcttgggcttttagccaaaaagggagcacaccgaaaacatttgttttctcatagaatagggaggccatttgtccctctcccttggctacgagccgaaatggcacaacttttagcataatcagcaaaagctaaggcaacagcaaccgcttcaatcttagaagaacgcattggaacagcgagaagaatggactcggccgggttggcacgaaaggaacggacaattccatagacattcactttatccacggaagagttattcttaaaccttcgattattgtgattactaaactgaaataagcgaattcgaaattgccaaaaaggatgatggagtcagtctgaacgagtgtttggccacttcaacgcccatttcgaccagagcattaacgatgtaatcgcgaagttcactgggaataggaaaagcctctcttcgaatccaaatggcatttccaaaccatcacctctttttgtcaccaacattcctgcgcaaatccctcagaaaatggtccaatttcgaagtatccttccaattttcctcaacaagtccagccagcagcgcgttttcttgaattttcgctttctccgtaccaaaatgagaaataacaaaaacggcgtatgcgaatgccaaaaaatggagaaacaaagagacggggccgactcgatcgatcagcagccgaatcagtttgggaggcttggccttggaggtcccaataaattgactgcgaatcatcgcactcaatcaaatgtgtgaaaaatagttgaaacgttattagagtaaatttgatttaaaacaaaagacaaatgcaaagaaaaatgttaaaatacaaagttttattattttaatcattataaacaatattttgtatttaaaacagtacaatatgaaaatgagggctttcaaaatggaaaaaaa

SEQ ID NO: 998 - DNA, 5140 bp, Heterodera glycines
  unsure (1)..(5140): unsure at all n locations
atgaagagaagagcatgattaatgttgggacaacgacaataattaccaatgatggtccattcctaaaaatgttcgtttctcttttcttatccccaagcaacccacttctgatgcatcgttggcatacgctgcagtggtgcgcacgttcgggtctcaggcaagaacattttgtacatttgtagagaaccgtcccataattttgctggtcgcgttccaactgcgcaatatattcatccgtaagggtacctttagggaccgctcctaaaacagggcacaaaacaagacaaaatagccgaaattaagcacttaccagggtcggtgaacatcgtctttaagtgtgaggcgcaggaaaggaaaaaaagcaattcgaagagcacaaaattgacgctttggtgaattggattgtcggcgaaagaaccgaacatcatgacagtcaacacgcagaactgacctggggagagggaaaccaaagtcacacggaaaagacatcacttgccatagagaagaagaaaccaagtgaaagcagcgcaagtgatccctaaatgtgtccataaagaaactggacataataaacataattattgttgcaaaaaatcgccgccggagaaaaatttggccgtcgtattaaatttgatctcgagacaccccccccccattgtgggtcaatgacaactcgtaaaagaaaaagcgtacaataaaaatttttacaataaagcctaaagcaagcctaagcctagcctgaatcttagaccttgcggtatactggagaatatgggcttcacccaaacattatttttctaggtaatactgtcgatggtacccccccccccttttttgaaagttttttttttgttttcaaaagacatgaaagcatgtttcctaggggtttaggggccgctgatcacgaatccggcatctatttcgaccaatttcgaaccccggacctgaattcgaacaaaagttcgaaaattcaatttttcgaatttcagatttttgatacaaaatggtttaaataattttttattcaaataataatttactgttttattacgcgtatttacaaaccccaactcaacacaaaaactcgaaaattaagatggcgcactacgttccatacgatttaaagaaaatcgtgtaaggattactcaccacagacatcgaagacacaccaattccgcccaaaacaattctgtttgccatgaattctacgaccaccagccatcgcaatcattggtttagtcaaaaataaaataatttacaaataagaaaataaaataaaaaacgagcgatagcatttgcagttaaaaataaataacacaatttttcccataaattatcggggaaagctaattgtaagacaatggacacaggtaagagaatgaatttgtgtgattctggtgattaaatgatacacttcacatcaatttgcccacgatgagtccaaccataagagcgagaacggcaaacaaaatagcctaaaatggatgcaaatttcataaccaaaaatgttgtgcagacctaggcccaaaacctttttgtgcatttagcattaaaaaagcttcgggcgaaatttccaatttttgttgaagaaaagttttttaaccaggttttactcacaaaaattaacaattttttgctagtttttaggtacttttcggttttgtgcctacacctcaaaattttaaaaaatgtcaacaaagggcgcactgaaggcattttttacaattactattctcatagcataaattaacggagcggtaaaggtcctcccctcccaattcccaaaatagggcgatttcgttaggcgacaccccgccccggtcactgatttatggtaatattttgaaattaatggaatttacatgaagcaattgcacattgtcctgctgaagaacgcctcccgcagcagcattgtgagtcaatttttcgagcttatcctgaaacagaaaatgacgaatggttcagaaaaaggcattcggattacgatgagtgcgtaattctccttttcgaggttttttttctcgtcctgatacatcatccgaagttcaacttccctttgcaaagcaagttgaatatcgccagaatttgcttcctcaaatgggaaaaattaactcaaagacaaagtgcaaagtattacggtcgattttggagtttgcgttggctgttcgtttttcggttcgcccgttttgttgaaattgaaaaacggaccagtcgcattggtttcgtcccgattgttttcatcgccaaatccaaaaggtcgctggaacaccactcggagctttgaatccatgactaatgttgggtcaacagttttccagaattggtccacaggaagctgctcgtcatcaggcgcaaatgcagtctaaaaaaaaattttttttttttgtttgtgcagaggtggcgaaagtacctgaatcataaatttgtgccggctccgctcactctcgagagtctcaggcgattcaaccggctgcagcataacgttgatttgggttttatcattcgccttaatttctgtccatttaattgccacaaaactttgggtatgcttattcaccttgataacaccagagttaggacggacacaataaaacttaggtgcagtcgttttcaccttgaaataaacgtcctttcgcgagggatttgacagtgtgagattggcattcacatactcagtaaacggtccttagacggcaatagcgtagagaataggtaattaagcaaagcagtgtaaaccaacccttgaagctgagttcgttattcggatcaagaacaagaacctgttgcggttttgtcattttcgtattcagctattttgaagatattaaagatctttaaatactgaaactaaaaaatatcaaaatgtaggctattattacaaatgcgacaatctgagtaaactgccgagacaattttattccttttttcaacaaaaatttgactatatttagggctcggaacgggcaacatttttgaatttttctaaaaaaatacctatagtaaactgaattctcagccaaatttatgaagatatattttttagtggtacacacgacttatttttgactctatgttctatgtagaaacaggcgcaggataggatcatgcgcgcaattttgtgggatccaaagccgccgcaatctgcaggattctgcggggttaatccctcgggattccgtctcgaaacaaaaaaagttttttcaattatcagaacgccaaaattaaaagaaatattatttaaccttgtaaaagtgcaagagtcgatctcgaattatttcataaaataaaaagagttcgatcaaggttcaagggagtcaaattatgggcctttgtaaaatttcaagaaaatcggccgatgggaggtaaggtctggagtccccatgacttttattcaactaaagaaagaacagtaaaaaaaaaaatcatttttatacgtcgcaaacaaacaggaaaattcattcaagaaaattgcttagtttaataggaatttttttgtataaaagaaggaaatttagtcgatggcaatcattcacttactttattattctattgcgctattcttcttctgcaacacattaaacaacgacgcatgccggaggaactggtggcgctcagtcccggaacgcgtgtctccggccgctggaccatcatcaagaagcttggggcgggtgcgtttggagccgtctacttgtgtcaagaccgagatggaaggacaatggcagcactgaaaaccgaaccgatcgacgctcagcgaccactgctgtatatggaggtagaagagcaatggcgagtcaacaaagcattcgttttttcatttttccaggcccacgtgttgctcagcctgaacgaacttcgatcaaacagtggacgccatttttgccgttgtctggaccttggacgcgatgaacaaccggatgccgattctggacagacgatggagttcaactacgttgtgtgagtgacaacgcgaaatcgagaattaataacattcccttattttcaagcatgtcgttggttggccgtccaatggacaaactccttcacgaatccggtgaccgcttcagccccggaactgcgatcggcacttcaattcaacttctcanagcgcttaaggcgttgcacagcgttggatacctccatcgtgacattaaccagcaaactcggccatcggcacgcctgagacgaacgaacagcgccttctctacctcctcgactttggaatggcgcgcaaatatgtcagagaggacgtgagctgctcttctttttaattaaaaacatggcaaaaacagtttctgttttcagggcacacaccggcgccaaagggacaccgcccgcttcagagggacgccaatctacgcaccaatctctgcgcacatcaaacgcgactacagccgccgggatgacattgagtcgtggttctacatgctgattaaattctacaaaggcgctgtcccttggaatagccttcgcgacaaaaatgaggtgtttgcgtgtgtggcaaagatttaattatctccgccatcattttcagattggcctgtacaaatgtcgccggatggaggaccagccacccgaggtgcgacgccaggccatcgacgaactgactgctggatgtcctcccgaatttaccgagatcctatcctacattgtgagttttcgtttcaaacaccactttcctgttgaacaatttgaatttttgaggacggactgcagccggaaagccgaccagactacgagatgatcgagaggttgctgcgcggatatctcaccaggaaaaacatccaggagcatccgtacgactgggaggagggacgcaaaaaaacacaaagcgcgcaatgagaggaggaagaagaaccactcgcaagaggaagtgagcagcgccgttctgaccaattgttaatcgtatatattgtgatcagtgcctatgatgatacactattatattactcaacttgtaattttcccgtatctgcccaccattgtaagtaacttgtcaatcattgtctaataaactaactaaggcatgaagacatgggcaatggtagttttgtggtttcttcccaaaaataaaattaaaaattttggaagtgccttttctaggctaaaaaaatacgctaatcacgaatctgagctcggattt

SEQ ID NO: 999 - DNA, 9488 bp, Heterodera glycines
cagcgtattttcttagactagaaaagggacttccgaaatttttaaatttaattttcgaagaaaccacaaaactttaccattgccaagacatgttttctgggtagctgatcgcgaacaaatctggcgcccatgtcgatcaattttgaaccccggacatccggtttcgaacaacgcattttgttttcaatccctgatagtattcatgccatccataggctaattcattaccaaaattatctttcagtttaatcttttaacgccatagccatattgagaaataaaattcaaaaggtcgtttttgttgattgggttctgtatagtgttccacacggattcagcggttgaacaagcattcggatgacttttgtccgttctttcgcgcataaattcccatcttttggtctcccgctcaaatcattattaatgaaatcaaaataaaaaacatttaccgagaatttgcattcaataattttgttgttgtatggtaaaagctgtcttgtcgctttgattgtagcgaaaggtttatccgcgtggagaacatgcaaatttccgacgaattcgggcaattccccggggcgtattacctgaaaaacaaaacaaatagaaacaaaagaaaaagtccaccttttttatgtcaagtcggaagtcaatcgatgataattctggcggtttccatttcaataatttgtcacatctcccagacacataaccctggaatttgttgttcaaggattagttatttgctaattacgaactccgttcactggctgaaaaactaatccgtcaacttcgtgacaactcaaaaagcccggttcgaggagtctccgcgtggactcaatgttccaaaagcctttcctccgcactccgattggctcttcctcccgttttaaaagtccagctttgaaggcctccgttcgtggtcgaatcagctcattttcgatcatctcaaaccgcacattgaaaggcttttgacgtaaatcttctcccttataacaattaattatttttccaatttttgtgagtcgatcttccacttgaaatcggacgaggtcgtaaattaggagacgaggtatctgttggccttcattctggtcgataaccatttcagcatcaacaagcgtgtcgtggacaaaatcatcgtcttctagcggtttttgtcttgggtgtcgaataaaggccatgctccgtatcaagaaggggttgttgtccctgtcaaatgcgtacacttggtatttcccgtcaatcaacaccaaatatctaaatagttcgttcgaaatgctcttctcctcgcaaattcgccacctgacaccgtcggctttccacgagaccatataaggctcttgggccagaaactcaatgttattgttcccctgcggtccttccaatgaaaccggctgacttcccggaaaaactttggagccgtaaccacaaaaaagccttgtctaaaaagcgattgctgttaattaggcaattaccttgttaatcactttgtcctgcacttgtcgtcgcttattcggttcttccacgtaacttacattcacaacttttccgtccataaactttggcgcgccttttcccgacagttttgttacttaatgattggcagattttcccaattgagtcttttccaaactgttttttgccatttgtgtgccgttgttcgaggaagacgaaggcccattcgaagcaatgccaacgtcagaattgttggaagtcgcctccatgacaaatgctccgttgttggtgaattcgtcgtcactgatcggtccgttctcccacaaaggccttccggggaactaaaaggaaatcacagtgttttgccgatctattgtatattcaaactgtcatctcgtcttcgtcctcatcgccgtatctcttgcgaaggtcgtccaagtagtactgcttgtaaatgccattcggacgacactccgcaaattctctgactgccatttcgatactcatgtcgcacttttcgtacagataggccgagatgagaaagccggtccgattgaaaccttcaggaaaaagggacattgagaagtggcgaaaggaacggccgcttggtgttaccatgagtgcaatgcaccacaatcacatcgtccgggttattctgtattcagaaatgactttatattcggattaccgtaccgtgataaaacggtcaatcgcttcaatgaatgccgtcatttgctcaggcgtcggcgtttgtttgtgccccaccattttcatttttagaaatttgcttccattgtttaaaaccttaagtgaaatttcccaaataccgtcggctaatggtccctattattattactgaatcggacactcttccctcacctcttcctcgttgtaaaaattgtcggaatttgtcaaatcaacccaaagtccaatcttcgctccttttgtcgctcccagcaaaggggaacgaaaaacggacgatggatggaaaaaatatttgggagattcgattaaatggtcgtaagaactgtcaagcggagtcttcattggtaagaacctttgtgcaaccaccttagaatttgaattaaattgcaaaaactcagaaaaacacttttcccatgggcggacagtaaagccaccggggcggaagtcttgtcctttggttggcctttaaattttgtccattttcgagtgaaggattgtcattctgctcaaatgctaaaagtgccattaattgttatgcgtaacccccaagggcgtcgacaaaacttacaaagcaatttccgtttcggcatttcaatacgaaatgaacagaaccaatgagtactactaaatcataaaatattagtaataatcaagattccgataacgaaatccaattgtccgtttttaacagaaattaattgaaaaactgccaagaaagtggccgcatttattaagaaatgaacaaaaatgggggggggggggtgttgaaacaagaataggttagttgttcgttatttggctttaacgttcattcttcttttgtagacatcaccgcccaaagacaattgcaggttcgagtcgtcctcctcagaatcggagtcaccgccggccattgtccgttttcgtgggaggttaaacgcattttgttggtcctgggaagccataagcttaaaaagggattttatgaaggggaggtttgagtttcaggaccactagaggatccgttgtagtgtttagcaattggtaaaactctttcttaacatctgacgcgcgatagccgtcgaaattggcagtcggatccaacgattctttggggtttgccttcggggcttaataaacaaacaatcagctataaatggcagatgcaaaagcaatacgttctcggttaaagctagcaaggcttttcagcagttcttccacgtcaacaaacggaccggaaaaactcctcggcggaggcaaaagttgaagcaattgggagacaataggcggtggaggaaaaacacctttactaagagaaataaaggagagaaagaaagccggacaaacccccgggcaccgggtgataggaagccgggggaagcttcggtttgaatggaagcatttgcgaagtgtcgggccgagcgtaccccccgagctcaatgttcaatgcagctgcagatgtgaggaactgctgggaacgtccaatttgaagcacgtttggctgaacagaggccgaagaaactgggaaagccccattttgaaaagggacagaagccgacggtctggcaaatttctgctgaatttcaaacgaataaaattgaacggataggacaaaatgtactggtgaataacccatcaacttcagctgatcagtggtacacggagccaaatttagaaatttatagcgatcgatcagccaaagggcttgtcggtcctccccctcgagacaagcagttttccttcgctggtccaccttcaaaacacttgtcaagtcgccaacctgtcagagattaaatgcattttttacagcttccacccattctctcacctgcgattcaaattccaaatatttgtcccaaatttctctaaaatgaaaagtgaaagaataaataaatcacgattacaaagatttttccgggggcagtgcattctccgaatttagcaagcgttcgaacacaacgcgagtgttgttgtcctctgattttgaaatggatgatgagctgtaaaaagggcaaacaatcaactgaccatttaaatgcgacaaaaactccacgtaagccaaagcatagtccgggtcactgccgtggctttttaatcccaaatcaaaaattctctttgccacatctggcctctaaattccggactgaaatggattgtagaatttaatcgctgttactttgctgcagtaatactcgagaagcgcggccgcgacgaaaacgtgaaaattgctccttctgtcttcgcgcgcccttttgaataccaaacgggcgaatttgacgccctcagttctccgcacaaatttcattgattggatatatgcctgaggcaacaaatgtgtaaaaagagcaatgtgttgaatgtaccaattgaaaaacgcaccaatgtcggatcgacactttcgcatgccaacaaacggtcgtagattttctttgcgttttcgtaccttcggttttcctcttcaaagtcagcataagcaaagtgaagcatttgattctccttcattagtccggttattgctctttcgtatagttctgatattttttaatcaattaaatggataattttgcattctactcactgataacgtcggaaagcattgcggtggacagcttaacgtcccctttgtcggctaatttgttcgctgcttgttgctggaaaaaagcagcttcgtaccaaaagtcgggcatataaccaatgcacagcagagactgctcataggcataaattactgaacccaaaatgaattgcttttcaaatgctctttggtgtcgctttatttacctctcttggccaattggccgtactcttccgtccccattgggttgctcttctcccattggatgtacttccgccacaattcggcctgtttcatttccgcactcagcccgcgaggcggcactgaaactgcttggcgattaattccacgggtcacttgctcgtactgcttggtcattttacgtgccgacttaacaaagagtgaaagagaaccattggagcaatagaaaaaggcaacactcacttggtaatctttgtttgcttctgctatcattttttcagcaagtgtcgaattgattccctttaaagaatcgaaaattcgggatttatcggaaaaactgaggggaggggaaaatagcataaaaaatgtttccgtatttgttttctgttaatgaacaaaacaaaccctctcaaaagcacagtaatcgttccataattgctcgatgtttgccattggagttgacagtccacgccggtagattttccggatcgccgtgattttttgattctcagcgtattgacctaccgcatttcttaaaaaacaaattttttcttggcatgggtgtcatcggacttacacagatttcaaaaacgtaacataatccacatacagcgaataactatttttaaaatttcactttgaacaagaaaatgctcaaccaacctctgaaaatctaaaccaactttttcaagagcaaaatcgtaagtttgggctaattgttcacgaaatgaagccaaatgtccttttgtttccctgacaaacaaataacactgtcaaaaaaacgtttgtttgtgattacttcacataaaacacatagctcttccacaagtcaatgtttaaaactcgaacgagacaacgctcaaagatcttaacaattaaaataaattgaaaaagtaacaaagcctcaccgcttcaacattgtcgaaattttttgctctcaacttaaaggaagacggggttaaaacatccgtcaaaacctttagtcacttcatgctcaatgtaagccttccaatatcgaccggcgttgttgaattgggtcaccaaccgctcatagaaacttcgcacctggtcgataggcctcgccttaacaaaatttattttgcttaacaaaattcacccactaaacaacgaacatgcaaaaattcattttgtttttatttgttatttttcttcggcttttttcacctgggactcacgcatcagcaaattccacgcgtcaacatcgaacgggttgagctctatgcgtctttccgggcttagaacggaatggtgagccataactttgtatgaattatatgaatttgtgctattaaaaacaaaatatgtatttcaatactgaaagaaaagtaaagttccataacaaattatatgtgttaataacaaaagtataacaaaaaaacaacaaatgaagtgcattaaagaaaaagcatcagtttttcccaaaaaatcttagatgacaggggattctcgtcgaaacattctcttccacatgctttacaagaacaaatctggagtttaaacaatttgtcgatagatcggatcggtcctcgagccaaaaaggttcaattcgggaatcactgctcttagcgatttcatgctcattggattctgcagattcatcaacaaatagacgtattttgctcttaaaatggattggtttagacacatgttcttcattctttcttacctcttctatgctcaaaagtctcaaccgcgctttgtttgttgttgcaacgacagtccccctcatattcacatgcaaataagcgacccattcatttgaaaccaaacccaactcggcattgccaatagtaaacaaaatcgaatttgaatttaaatcatagattatgacgtgcttattcaagtcagccataataatgacgattttgcacttgtcgtaaaagacacagtcatacggatgcgctttctgtggcaattccaatgaaattaatccgtcctctcccatttgaccattttcatgcgttaatttggtcaggtcgaaacaaaaagttcccgcgactgttaaagccacaagtcgagtgtcagctgaatcgacgcatattttggtgacatgaccaccattcacttgaaaagggattgggtgtaaccagctcaaaaacaaacattcacaaccttttgatgcaaaagtacgaagccttttgttttgtaaatccaaacgaaccaaattaaattctccgcgtgcaaaatacaaaaatttgttcgtgcaatgaattgctaaattttaaattcgctgttgcgttttcattttgccgcttcgacctgacactgtcctcccccccgtgtgtcctgttcgtttgctgccattttcttcatcgcccttatcattgctccaaattagtttgatcaatttgcttgattgtgcgtcctctatatgttcgggggcacatgtcgcaaggaaagtagtaatttggtcacagtgaagtcggaaaacacggatagcacctgcaacagcaccagcaaaggcaaggaatttcccatcggaagagacacaaaactgaaactcaagaggagcaatgacccaaggcaaatttcattcgaaagcttacttgtttgataaaccctaatttgccactggtaattcgaagaaatagtttcaaacgctttctaaaattgaatgaaaattaggacaaaagttaagctttaaccattaaaagtgcatttaagttcattcgctaattttcgttttataattgtcttggttttattaatcgaacctttggtccataagagatcctccgattgttttataccataagtcaagatgagacaaatggtggctcacaatcacatagcaattggactttgagacgaagaaagcgcattctgactgaagataaagcaggggaacagataaccgaatcatttaaagtgcttacttttatctgggggttcgcatgagtgaatttatcagaaatgaaaagctcagagtcggaccctccagaaacaagcaatcgtttgtccaacacacaaatagccctcacgtcgttggcatggaaaaggcgctggccactttgttgccactcgaaacggacctaacaaaagtcaatttaaataaaaacgtcataaatcgactgtacattgtcatgcgatattctttttacgatttgtatccgataatctgcccccgcagcaaaaacctctttaccgttcgtggcaatggtgagaactgccgcttggtgcgtttttagtgtctaaaaacaaatcagtgtcgaaaaatacaccaaaaatcgactttcaaaagtgttccattcaatgcgtcgtaaatactcaattggccacgcgaatcgcccgtgaaaagaaaagtttccctgagagaaagaaacgcatttaaaaattgtcgttttgaaagcgcaactcacacaaaaataagtgaccacacaacgttcgcactctctttcgtccgaggaatgtcgatttctttgtgcttcttccattccgattcatataaaaataaggaaagtccattgaccttcccaactgccatcatttgcggtgttagggtcttattgttagaacatccaatggcggtaatgtgctcatcggtggacaatttaatggtttggacagttgaaaaagtggggactttgttggtgcactttccctcctcgtcgaagtcgcggttgtttacaacgagcaattcaccagaagtgttcccagcaacaaactgatggttttctccggcacgagtcatcacaagaatatcagaaacgcacagttgaacacgcttaacagatccgaaaaaatcgacccaacttttaaaaaacccactcacaccaaatttgctggtgaatggtgacagtgcggtcagacggcctcccaaccctccaaacaccgcccaattgtccacccaaacaagcgtttcaaatcggtcattgaccggaatgcttttttccaggaaaatcaatggcaaattgtctgcattgtaaaattcaacaagggacaattgagccgggaactgctggctgaattttcagttgagaaggaaaaactttaaactgacgaacctgacagtcgattcattttgacggattacacacaaacggccaattgagctattgaaggagagtgccttcactgtgagagatggccgcgtgtggacagtgcaatattctccaacaaatttctccgcttggaaatggcacacttcagcagattcatttccaattttaggctttttctgctctttttcacagatgctgttcggcgtgtgaactccacttcttttcttcctcatttataaaaaataataaataaatacaataaaaaagaaattaaaataatttacggggaaaagtaaaccgtttttacgcatttctctatgcaacataaactagaaaaagcaaaaagtaaacacaattttattataaatacggcacatgtgaaattagatgatgaattaagtgaatgagaaatgataattaataatgtgaaacataagaatttggcgagatttgttaaaaatgcgttgtgaaagaaatttttaaaatgaaagcgaaatgtgagaaagtaaaggaagcaattagtgctttagtttgtacagtgagaaaattcg

SEQ ID NO: 1000 - DNA, 9580 bp, Heterodera glycines
atactagaattttccaaaagaatcattgaatagtttttttaaaatttcaaaaaagttttgaaaatttaaatagcaatttttgatgatttctacatattttttcaaaaatttattccaaaaatttttaaactgcgtccgccctccggagttaattcgtatttgaaagaataataaagaattgttgccttgattgctttgcttattttcccacgattgtggccaaaaaatgacgtgtcaaaaaggcgaatcccctcctcgagcgctacctgaattttatacagggctgccagatctgaggctttagcctcattttgtggttttttgataggtcaatgaggctaaattttcaaaatgaggctttttgtggttttttgagaaattttgaggctttttgttaaatatttcataaaaactagaaaataaccaattcttttccgaaaattcacaaaattacgaatttttttaatgaaaatatgctaaaaatatggtcaaaatttttaatttttcccccggcggcgcctatcggcaccgtcggaccgtaaaaatccttaatttacaagcaaaaatttgctcaaaatcgcaaaatttggtcatttttcggacaaaatctgttaacaaatcgtattgaaaattacaaaatttttcccggcggcgcctatcggcaccgccggcccccttgcgccccaaaagtttttttgggaaaagcgccgcaaaaaaatcaaattcgtttttcatgctcataatcccaaaaaatgcttatttctaacaaaagaatgctcaaatcgatcatgacaatcaaaaatataacatttgaacattttaaacgtgtttagaatacattttgtaaaaatgaggcttttttgccgcttttaaaattttcatctggcagccctgattttatatatgttttatttttaaactcaaattttaaatcaatttaccaaaatctattaccaaaatccactgctccgcctccaattcgctccaaagtggcgagcactggagaccaattttgggtataaaagtgccattccaaaatctccatcgtccacctggcacatcgacaaaagtggaaatttctatacaaataaaaataaattaggaaattaaatttgctattcttttctggcaattaaacagaacaaacaattccagaaccatcagaatgactgtaagtttcattgaaacctgtagcagatgcgggacgggattgcgtcccgaacaaaaaacaatttacagacatttaaaattattttaccttcatatttaatgtcaatgatgtcaacggttttgcgataaattgtaaaaaaataaacctaaaaaatttaaatttaaatctattatagatcgtcataacgttcccgcgatcgcatctgcgggctttatggactttttgagttattgttttaaagagttcctatcgtccgagtgcaatttcaaaaatacgggcatgggcaccagggacgggcgaagctcggttgctgcccgtcaaatccagatgtgtcaaaaaagagggcaccaaaattgtggaattaactcgataaaaatcattaaaataaattcatttgattatttaaaatttaaaaatcaaccaaaattaaaaaaaatgaaattagaaactaaaataaattaaaagaaaaaacagagattctaggataacagagaattccaactacctttatttttatgaaacaatcatttccaatttctataatttattaataccggatttgatgaacaagtatgcgtatcatcattactctgcaaaatggggtcaaagtcagtgtatgtttataatttcatattagaataaaagcggttaccggtaatttcactaaatattacctgtaattttggcgatcttaacaatttttctaataatttagcaaatttttttggaaatttgagtgaggaaggatttgaaattggtaccaagtatgaatgttcgaacaaaccctattgtgataaatgcggtcactctctccccttgtgccaagacggcagtgaaggagattaagagagtgattctcctcctaagataggagagagaagagagcaatggagaggatgcctgcgtagctagttggttagagcacagcacggaaagctggggtcgtgggttcgagtcccaccgtgggttgatcttttgctcttccgcatcaaagaaccaaagaacatcacttggcgctcctggcatggaatcacattcggtgtggagtttgtgtcaagccgacagctccccctccccactctgagagaagttatccaaagactggagctttctcatcaaagagaccggggaccggtcttctcaaaggccggggatgtgataaatgcggtcactctctccccttgtgccaagacggcagtgaaggagattaagagagtgattctcctcctaagataggagagagaagagagcaatggagaggatgcctgcgtagctcagttggttagagcacagcacggaaagctggggtcgtgggttcgagtcccaccgtgggttgatcttttgctcttccgcatcaaagaaccaaagaacatcactctatcttattggtagcattcgaaagcactaagtctaacgaagctaaaatttataaatcgcaatgtttaggcaattaacaaaaaatatttgctgatagggtttgttcgaatatgaacaaagttattgtataaaaacccgagattgtcaactgactggaatcataaaatactctcgcagcgaaaaactcgcggccagaggccgagttggcggcggcgaagccgagccctaccagcggaactgggtcgttttggcgcccacgttttggcgccagcgcgagttttttgattataactttttttgttgtaggccaaattaaacaatcttggtatcattcgaaagcccttcacgtgctctattagccttacaaaaagcaaaaagattttttagcctgtaaaaaatgtacctgtaaaaaatgtattaagaaaaaacttccaaaattttggttttttttttgtaatttcatgttataacttttttggtaattgtctaatcacgaaacaatagcttagaaacagcttctaaacacgttaatctttcgaatgataacaagaatgttaaatttggttaacaataaaaaaaagttatagtccgaaaacttgggctggctccaaaacgtcggcgccaaaacgacccgaccacctccagcagcaataatcgaaaaaaattccttcatatcccactaattagacgataatatttaattataaactgacgcgtcgtccgaacatttttgcagcctctttgtcctgtgccttggtcaatttgaacaaaattttaaggcggaatgcctcgcccgaaactcgttgtttggtggcgctaattaccttgacaagacacagcaatggcatttgaagattggttctgtcattattcagtttgtcaacagcaagtgaagaaatttcctaaaaacggtaattcatattgtagtttgtcctcaatggggcgaacctaacaaaggaccaatgataataaacagagaacggatttttaggtgctaaaaatcgaaaaaggggtgtattttaaaaaattaaagtgattttagggggtgcattttgtgtttttttattgcatttttcacaataattttttgttgaaaagaagaaattgtgaaaatagttgaagtcgttctaaatcgaaaagtgatcgaagaaaatgtgtttttgcgcttatctcactcagcatatgctatccgcacaaaaaaataggtgaaaacctaaaatccgttccctgataattaataaattaggtattttaaagcaatattttttttatactattaatgagaaaaattacaaaaagctattttcttcataattttttttcaactttaaattagggttgcaactcctatcccgccccgaccccgacatttttggccatttttcggggttaacctcgacgctacccatgaaaatcaatcatccttggcataatttattgaggtaatgaacccaattttcctttttttgactaaatcatgaaaatttaatatatttcaaaatatttttgacaaaatataataaaaaaaatttctttctcggaaattcataaaatttttgcgaatatttattagaaatagagcttaagtctccggattcctttctcgtaaaaatctttagaaaaagagcggcgccgcaaaaaaaaatgatttgaaaaactaaaaaagataaggtgatcagaaatttttgtgcatttttttgaataaacccacaatttttatttgggggccagtcgccttaggaaaaatttgaaattttgactatttttacagattttctctgaaaattggccattttaaaatgccttatgcgtttttaattaattctatacaaaaatatttatgataaaagaaataaaaaacacataaaatactgaataataaaaaagtttaatctaaaataatataaaattttttgactatatggtataaggcaaaaattgaaaaaccccgaccccgaacgatttggcaaccccgaacccagaattttccaaccccgacgtcagggttgcaaccctaatttaaatttaacaaaaaaaactaattttatttcacattgtctaacagtattacttatatattaatgcgtgaattttttgcttacatggtttatcgatacattcaatttgtgtatttatgcttaattaatgaaattattttgttaaaataaaatacctaattcttttttagttttcccccaatgatacctttttaggttcgacctagaactagtttcatagtccaaaactgcatgcaatttttcatgcctttatttgcctttttcatactttctgggactttgaatgatttagcacaaaaaaaacaaatcacgtgcaataaaatcgaaaaaaaatcaccaacctaaaatcgacttttaaaattattaaaaaccaattcaataaagctattcttttcttctatttttaaaaaatttcattttaaaaataataataaaggtggctggacatttcgacaatgaccgtttcgccaatgaccgtttcgacaataccttttcgacaatgaccatttacgactatatcatatcgccaaaatttaaaatatcaaattaaatataataaaatgaatataaaaaataataaattaatttaaaaaaatattgatgaaatttaaagagaaaaatttaattaggtagttatattttttaaatttaatgaatgcattatctatcgcctattgtgtatgattattaatagttaggagttggatttttaggtttttacctatttctagattttttcaatttttaacacctattttcgcacctattttggccttttttggggtttttagcacctattttgcacttttttagcacctattttagtacctatttagggatttttagcacctaaaaatccgagccctattaatagtgaagaaagaagacaaaatgagacggacctataatataaatccaaaatgaaaccatttatttaacttaatgtagtgtcctctttttacccaggcggcaatcctgaagaatggttgtccctaattttcattttttttttaatttggtgctcaaaaccagtttttaggcgtttttgagggtgctgataacggatcttaactcgggtttgcccaattccgaactccagacccgaattcgaacaaaaaaaaattgtttttttaatcaagaatagttttttcagggtaaaagcttctaattcattatcaactatttaggtgtaaaacaatgtttcaatttttaacaaaaaaaaaataagcaatttgcgccgaaaattgacaaactaaagccattctcataatgctattttgaaaaaaacgaaaaaaaaacttttttatattgatcccaaatccgcaccgtccatataattttgcagaaatttgaattttatttaaaaaaatatatttaattttattgtcgaaacggcattgtcgaaaaggtattgtcgaaacggtcattggcgaaatgtccgggagccataataaacaggtgctcttaagaactcttttcggatacttgcggcccaattaaaattaaaatataaaccttaatttatcccatccagttaaatcgagtcaatataaaattcgcctaaattggatgggaaaaaggccgaaaaagtcgaggttgggacaagaaaaatctagattttatttcaaaaaaattggaaaaactttccgtctttttcaaattttattacttttttcgaattaatatttgcaaaagttatcataaaaaagaaaatcactaaaaagcctgaaatttagggggctgtaaaatgataaatttattcaaaaaattaagccataccagtaaaaaatttttaaaatcaaaaattcttgtcaagaaaataaataaattatggagatgaattttgagacaaatttttcatttagtagcggtacattttcaaaaatcttatggtcgattcttaggggttgtatttttctgaaattttttgagtcgcttcttaggtgtatatttttcgttttatttcattttggttaataaattttgagcattttttattttttagatttttaggcactacaaaataaaaaacttagaaaatatgcaccaatagctcgaaaagtagcttaacaaccactagaaaaaaaaacttgtttttcttgcatttcaggttacaggtagctcaggaaaaaaaacaaagcaaaaacctaaaaaccgtatcccttactctttacatgcacttttttgtcgtgctgacgcgtttcttaaaatccgccatccatgcgcgcttctcaaatcagccaatgggttcgtgaaacaaaaaatgtgtaacccataaaaattaataactttgtttaaatttaaccaaatatatttcttggtagcattcattagctctatgtgttctctattataatattcaaacttataatttttcaaatagtataaaaaaagatcggatataaaaataattttggctcaattgcattttaaagattttaaaattttaaatgtttataaattataattataaatgcatgaccattgcaaaaaatatagcatgttcaatgctttataaatttttttatacttaagcaaaaaaatttttaaaattatattctgaaagaaaacaattaaagctattgaaaataccacgaattattaatttggttaaatttgagccaagctatgaatttatatacatatattacccatttttattttcaaacccattggcggatttaataaacgcaccagcaccctttttgctggtcttttctgccaaaaaacaactgttcagtcagccgtattgtttaccgtaatttttgcacagtcaacgcaacatggaacaatacggttggccacaatttgctggtgaagaagaaaaaattcgtcaagcagttcaatttccaaataagaaacatgtggtggaaagcgtttggcccacgattcctcttcctccttctgccgttccatctcaatcgaagcactcttcattaatagcaatgatatttttaggatctaaaaactgccaaacaaataacatttgggactaaaaaatggactgaaaatgagaacaattggtccaatatgatcgagcaaaatggggagctagagagggcaaggtccgtagttcagctggtagaacaacaatggtaaggaaagccaaagccactgacaccggttaaaagtagagaccggacaagaaggtcggtcggtcggtttcgttataaaaaccgaaaaaaaccgaaaactcaaaaaattttcggtcggtcggtttcggttaaaaaaccgaaaaataccgaaaaaaaccgaaaaaaaaccgaccggtccgatctctagttaaaagccagcccgccccatagtttttccagcaaaagcttccccagctcggaatggggccaactgcgtctcaggcaagtttggaattcgtaacttttttaaaagttgcccaatcgaacaaacttggtatcattcgaaagctcttaacaagctctatcggctctccaaaaatcacaaagattttccggcatataaaaaagttataaagaaatatatgcaaaaattctgacttttttgcggttttcgggttgcagcttttaataatttgttcaatcgattagaataaatagcttatcaataatttctaaacataaagagctttcgattgatgttaaacttttaaaatttgatcaattgagaacaaaggttataacttcttaaagttgcctgagatgcacttggccagacgcatttgcccctaccgtctacagctcatttatatattcataaataaattttttttatgaaaatattgcaaaaaaattgatttttactatgtatttttcaatttttttatatttttcatacggaacgggtcagttccgtcccgccagttttccgtaaataggccctaaaaagtttcagatttaggggtgtttttgggccaaattttttagcttcggagtcgcgttttagaaaaatattatttttttttcattttaaggcacacagtatttttgcctacaaagaacagacaccgtcatatgctttacaacagcgacgctattcacttctgaagaggatggcatccttttacaaaattggaacttccgtgagtaagcagctcccgccaaatgaatttttgtgtcttttgaacaactttatgtgaaaatttatttaaacaattcaggcgcttccttattatttgatttgctttttctttaaatttacacaaaacaaataattagggatgccaatcatatggatggataccatatttttttcctggactgttgagggcctgaagcgcacgaaaaacatgtttttagcttggtttgaagcttgtaggatggatttctatatccatatttttccatatttcgcaatttatgtcaatattttagcattttgatccatattttatgtccatattttggcatttttcaaaaaaacctcaattagaacagcccccagcagctaaattagcctttttgagcccaaaacccgaaaaatttttcaaaaaataattttttcgccaaaatttctcgagaatattgaataaatttaaattttcttaaaaattaataaatttatgtcaaaaataagcaaaaaagcgaaaatttcgcttttgttgcacaaaacaaacaatcacaattggttgattgctttttaccagaggctgaattttgtaaaattaaaaaaaaatgtaacttaagcaaggcttcttggttttctaatagttttgcctgtttttctgaggataacattttatgagtagggctcgtaattataaatcaaatttcgccatttgggtttttagtccatattttggccattttttggaaattttcatatgaaaaatgcgaaaaaagcaaaaatacacccctaaagatagactttttgaaattttaaaaattacacccccaaaaatacgaaaattttgtggttgtcgatcattttggcattcgcatttttcgggcttttagggcatatttgagggatttttaatgcatagcttatgcgcatatttggcattttttagtgcatacaacttataaccctaataattatt

SEQ ID NO: 1001 - DNA, 1477 bp, Heterodera glycines
atttgattgatttatttttattcatttttattacggtattcattttgtttttttatttgaccaactttatttgttgttttctttttggcaccatataagagcactcatgtgcctttggtttgctcgataaattaaattaaattaaatgtcgcggcgcaaaattcgtaacacgttataagtcaagtagagaaattcagtaaaaatcccaattccaccccagtcataaatcatacataaaaatacagagcctagtgagtggagcatatccactttgttgcaaacttaattcatcgaaaaatggtttaaatggaatgacaaatatcggagttagggtcttattgttagcccggtttataaattgaaaatctgagccaataaataatgggtaaatttatttttaataaataaaattttaattgtgaaaaatgaatataagaattttaaagtcatgactcatgacaacatgaaaaaaatttttttgaagttcatttgagaaattgtacaagaataattggggataaagtgaagactcacacaatgtttgcattatttcgtttgcgtaaagaaaaaaaaatccgtaaggaaagagaggaaaatattgtttgttctatagctagcattcccggccccttggggaagaaaagaaattctcggcggcgagtggggtaacgccagggtaggcagaccagggtcggggagcccaaaattgtcgggaaggggactgcaaacaattttttggattgctaatttgtaatcactaaaaaacgttttaatgcatctctcatttttaagaacaaaaaacggttagctaagaagttattctaaagaaataaaattcgaacgcatattttttttctggaaaaaaagggaaaaaattaatacaattttgaattttttttttttaaacaatttagacaatttttatggaataaggtaattttgcttttgttttcaaatatatttgtggattagtggttagtgcttcaacgctaacagtattctttgttatgggttcgatgccttttgacgttttcaatttaattattttttatgattaatagacaaaaacacccataaaaaattgaccattggcataatttgttaacaaagtgaactcaacttttcaaaaagattcagatggcaccgccggatgaaaatttcgttgaaattaaaaaaatcaattttccttgagtaaatcatgaaaatttaaaatattttttacaataccgattgaaaaacaaaaatttatcggaaacatcttaattatttgatgaatatctgttagaaaagagagcttaaatttgaaaattcacccggcggcgcttatcggcaccgccgccccctcctccacaaaaaaacctttttttcttaaaaaattagccgaaaatccctaaatttttagtcatttttagacaaaaccttgcaatttatgcaaaaaggaattgaatcgagggggaacatcgactcaaggaatgtg

SEQ ID NO: 1002 - DNA, 8101 bp, Heterodera glycines
taaataataaagaaaacaaaattaggagagatcaagaaaaccaaaggaatggaagtgcagttgaaaagcttctgtttaaattttattttattcacatggcaaaaacaaaaatgctaatatttgttttttaatcgcttttggcatttttattaaaaatcgacattttttaaattttggatggaaaaacggtagttgactttaatttggactaatgaattcaatggtaagcatcattttgttgatataatcgtcagtttagaaacttcattaaaacttttataaaatgaaaatatctttgttagaatttatagaatttttggtgttttaatatatacaaaatttactgacggattgtcatggagccaaagactgtgcccaattgtccctgtgccaaattgccgctttgccaaattgtccctgtgctaaattgtccctgctgtgcccaattgtccctgtgccaaattgctgctttgctaaattgtccctgctgtgcccaattgtccctgtgcccaattgtcccccggtcgatcccttttcaggtgttggacaacaaaatcggagagggcgaagaagtgccaaatttgaatgtgattagagaagatgacccggtgaacgaattccttggctttttgcactacgaccaaaaattgggccatcacattgccaaagcgtacaacgaaacagtgttttgtgccgccaaaaatcaaattcccaaaagggtggtcgaccaaattttacaactgaccttctcattggccattcggataacgctttgtgtgatgtgagttttgaaattgaaataatcaaaaagaacaattcctattgtatccttattaaattttgggcttttggcacaaattttgttggcactttttccattgcaaataatccttaattaattgaatatcttatcaataatatttggcaatttaaatatatttttttcacattacaaataccatccttagttatgagaattatttctcgcgtttctatgaagtcggtgggtggcaattggaacaacttttgtccgtttttcaaattttatcggcacaaagaggcggcaccaacgaaaatgggtaaaatatttttcttccgtttttaattttgtgatttgctattaattacttttttaaagaatttaatttaatttacagaatatttccttttcaaatcattcgcattgacgcgcaaaccaaaaaacatttttgggatgaaattaaagctaacagcgcgatagaaccacaatttattggtgggtgaacaaagcgattaaataaaatttaattacaattaaattacaaaggattatgaagctgctttcaataatttaatttttatacataaaaagatttttaatagttttaattagtttattaatgttgtatagcaaaatacaactatattaatatcattggaattgtaagctgtctattggtgatttggcaattattaagaaaaagttctagcattaatatgttcagcaatgaggaaaatcatacgtatctggatcattacttacgatttcgacgtacacagggtcaaaaaagtgggaaatagtttcgaacacgaagtcacctttgcagcggctaccgtcatctgcaccaattgtattaataatggagaatggaaaaactcactagagggaaaacaatgtgctatatgtggccccaaccgtacaattacattctcaccatttgattacaaagagacaacagtagatcaaaaaattgtcacccagcaaactctacgggaatttgtccaatggctactatttgaacaaaataaaaaatacccaactgtagcctttgcacactttgggggtcgctacgacatgacaatgatcatcaaggaagttattgcacaaggtacaatttttaatattcatagattatatattttttaaggtgttcacgatccacaaattatcaaacaaggaaatcgtctttatgaactcaaaattaaggataatgagcatgccccactaacaattttccatgacagctacaatttgatgcctatcaaattatcgggtctcatcaaatcatttggactcaaaattcaagtgattaattttcataaaaattatcaattttttttttgttttaggataaacaacactttccacacatgtttaacaaatcatctaattatgaaaatgttcttactaatttaccgccgcgcgaagaatactgtcccaatcaaaagaaaaaaactgatctgcaaaagttcaacgaatggtacaacaccaattatgaccaacactttgatttaaaagaaaaattgcccgaatactgctgcaacgacgtcaaaattctcacccacgccctcgtcgagttgcgccgggaattcaaacaattaacacaaagagaaggaaatcatggaggaattgacattctttggcaagccatgaccatagccagcgcctgcgtcaaaaactttgcccttaatcatttgagatccaactctctagctatcgtcccggagaaaggctacaccccacaacaaaaccaaagtgcactggccaacaaatttcttgactggtactctcacataaacaacgttcatgtacaaacggccagttcccgctacggagaatatatgttcaagcgcgaagggcaggtttatcaagtggacggctacattaaaggcacaaatgggcagcgggacaaaataattgaagtgaatggttgtttatggcatgggtgtgaggagtgttttgatgatatggatgaagagacgaggatgccaaacgggaagacactgggggagcttaggataagggaacagaggaaacatgaaatacttaggcggtacgtcgacttggaggtggtatgggagcacgagatcaataaacaaatgaagaaagacaaagagatgagggagtatttcgaaaactggaaggattgttcacctatcaaaataagagaggcatttcacggaggacggacaggaccaatgaaactaatccacacagcaaaaccggggcagaaaatcagctacaaggacttcaccagcctctacccgtttaccaacttctctacaaaatatcccctagggcatccaaaaattatttctttcacgaccaatgagcaaacggtcaattggcgttctccaactgacaacccctacaaaggattacttaaagttcttctccaaccaccagacaacaacgtcaaaatcactgtaatgccaataaagtttgatgagcgcctgctattccctctctgtgaaaaatgcgccaaagttattagcaacaaatacccaaaaggtctcaaagacgacaactactcctgcccccacttcaacaccaacgaccgcgccttcgtatcaacttgtactcatcttgaattaaatgcatcattggaggctggctataccgtcagaaaactttttcatgtcctacaatacgaccaatggagtgacaatgtcttcaagtcctacgtgagcgaaatgatggccttgaagatacacgctactggctatccatcatggtgtaataatgaagaggagaagagaaaatacattgatgagtgctggagaaaatttggaattaaaatagaggataacaaaatgaaggctgaccccggaaaacgatacattgccaagctttgcctcaactcactctggggccgcttctccatgcgaaatctcctctcaaaagcaataattgacaacgacgaatgcctgatccgccaatactctgacgataaaaagattgaactaattgatgtcgagctaatggacgaagacaacgacgtgtatatgctcacctataaacctaaggaagaatttgtcgacgaaaacaagtactcaaatgtcgtcatttccctcttcactacttcaatggcgcgactatacctctacgaagctctgaaaaaggtcgctgacgctcctggctgtgaaattctttactacgataccgacagtgttatttatgttcatcccgaggacaacgacccacttcccactggaaaaggacaccttggagagcttacggacgaaaaacctgaccacgatattttggaattcatcagtgctggctgcaaaaactacgggctgaagcttcgccgaaaggacaacggagaaattgaatatgatttgaaaattcgtgggtttactctagacgaacagacggtacaaaagatacattatgatagtgtgaaagatcaaattttacgctatggtaccgaagatcccgctgatcctatcattgttacttatccccattttatccgtcccaatcttatcaaaggcaaagtgtacactcattccttcacaaaacagtaccagcctattttcaccaaaggtattattaataattcattccaagttctagaatttggtcatcgcaaatgaattgtataattttctctcagctattttctttttagaatcaaatctccggatttttattgtctctatttatacctcactcgcattagggacgggatgatccctggttgatcctctccaacactccaggccatccatctgagatgaaggtggatgagctgctcattattgcaatgagcagcctggtgcgtgagtgtttggattggggaccgaaggctaaacccgatttccttggtgcgtttgagcttatatttaattgaatttaaatcccggagaattttgattttatttatttcatttgcatttattcaatttttaactgtacaatttgtctttgtaattaaaatttttaataaaaatattctttgagctcaaccaaatgagtatttaaggactgactgatttgaattagtaatcccaagattaaaaatgtcttcagtgtcctctaagaaagcccttcaatcagtagtcgctaaggatcccgaaatacatagtagtgaaaaaaccgcgcatgagaaggaagcggaaaaaactgtccgaaaatcaaaatatgagtataatttgcttgatcatcaacgcttcttctggaaattggcccgcccaaaatttgctgtaatgaatttcctatgcccaacgtgtcgtcgaattaattacaaacataaggaccagttcaagttgatgggagaagatgagttccactttacccaagtgatgtgccagggatgtgtcaagtacaatatgatgcaaactgatatttacattaaacacactaaaaacccacactaaattgtatttaagacaataatttattattatataagtatcccaaataaagatgattgatgaaaccatttttcgttcagaggacttaaaattaaaaataccttttggcatggtaattagtggtccatcaagcagtggaaaaacaacatttttgttaaggtttttgaatcaaataaatgaattagtagccccacacccaaagtcaattgtttattgttatggacaatttaatattagcatcccactgctacaaaaaatgggtgtacatgtgcacagagggccacccacagatgaaatactaagttctcaaaagaagccgctcatattaattcttgatgaccttttaacaataatagatgataaacatttgaccgaattattcactaaaaaagctcatcatttgaatatgggagtgatttttataactcaaaatttgtttgaaaaaaaggtgaaagtagcgcgaataaactcacaatatatagttttaatgtctgctccgaatgcagcgctacaaattcgtaatttgggtatacaattatttcctaaaaatcttgcatttttcctaagtgcctataaagacgctacttctacaccgtatgggtatttatttttggatttacaccctgcctcaaacccattattgagaattcgcacaaaaatatttaaagaagatgaagagaaaactctttatattaacaaccaaaatgcataatataccgcaaaatgttattaaaaatttggagtttttgaagaaattatcaaaaacaaaatctcaaaggaaacgtgaaataatatttaaagaagcaactaatgatcaaattgcattattaattgaaatttgttataacatattaaagggatattttttgcttaccaaaaaacaaaaacatagacttataccttatgttaattttataagaaaattaggaagagttagaacagaaaagggtgcaaagaaaattattcaacaaagtggaggagggtttattagctttgctccattacttttacctataattatcgctgcattaaaatatggaaaataaatttattcttgttccttccgacatgtacaaaaatttattaaaaccagacgccggggaaattaatgttgataatgctaaaaataaattgtcttcacttttgaagcagcgaaaattggactccgggacaaaaaatttactttacaaccaggaattgcgtcgtttcttaaaactaaggaaggaaatagaagacaaaccggtaaaggttgagctcaccgacggctcattaatggtttttaatccaagacatcgcgaaaaagacagaaaaattcctacacagattgtgaaggaagatgatgaagaagaattggatgaaacgggatctattccaacgtttgaagacccttatgcgacagctgaagagagtgatgcggagcctactacaacaacaacaccaaaatcaagaccacttttcagacctttacgtattgggacaagtaaatttcgtcaaaagcaaaagtctttcatagataggaaacaacaaaaaattatgtcgattataaataatgaccctgaaaaatttggggttggctctagaggacatatactgagagctgatggtacggcatatttaaaaagtaatattaaacaagcattagagcgaatacttagacggtcacccgagaatgctccatcacccataggtacaaaaactttagagcaacgactgagaaacgacccgaggactagtggaatattaaaacaaaaatttaatgaacaatcgggatcgggccttaaaaataaacaacaaaaatttataattaaaaaatggagaagttactaaacaaattgtataatgacccaaattcacctgcgtgttatgcagggcaggaaagactttacgaagaggcacaaaaatatgactcttcgattacaaggaaagacgttgaacactttctcgagggagacagaacatatactttacataaacctaggcgtgttcgatttaagaagtcaagaactgtgcccgctggattcatgactgatgttcaggtcgacttggcagattttcaaaaattatcaagagaaaataatggattcaattatatattgttgggtattgatgtgttgagtaagagggtatttgctacaccggtaaagtcgaagaatttcaaacatatgagagaagcgtttgacaaattgatcagtcaaatgccaatggttcctcatagaatattttcagatagaggaacagaatttgaaaatagagaaatacataaatatttccaagagaagaacatacaaaagcacaaggctcatactagtacggtgaaggctgcgctagccgaacgttgcataagaacgcttaaacaacgactatatcgttattttagtcaatcacatacaattaaatgggttgacgttttgccaaaaattgtaaatgctttgaataactcaaaatcacgaatcaccggtatgaaaccagttgatattaacccggataatgctcaaaaaatttggaaaaaggtctatggaaatgaattttcacgaaaaacttatagaagaccaagatttaaagagggggatcatgttagacttgcaaagtataaatccagttttgaaaaatcataccttcccaattattcggatgaaattttccaagtttatgatattaaaaaagcaaatccttatcggtttgggataaaagacgataaagaagagccgtttgacacccgattttatgctgaagacttggccaagaccagaaaggacgcggagacaacatacagaattgagagggtgctgaagactaggacaagaagtggacataaagaacatttggtgaaattttacgggtacaaagaaccggagtggattaaagacaatgatattgagagatgaatgtatttaagtgtattgttattatgttttagaaaaataaaaatgtcaaatttattttacgttcttttacctagtga

SEQ ID NO: 1003 - DNA, 634 bp, Heterodera glycines
aggactcgaaggggcaaaaggcgctggcgggggaagaaccttaggaagtgaaaacgcgaacctaacaatagtggaaccaatttcactgtactttttacacagctgtagtcagacattgtaaattttggcatcatttacgatttaagcattcgccggttcgttaattaatttgtcgtgttgtgattttctgtacttttcccttaaaattttttatcctaatttagcgactcatcacctcccttcctacatcaacaataatttcattgtttttttcatttcgttttattgaataaaataaatctctaccctttccatctttttcttgagttgctttttctctttcacttttacaacatatgttccacttgcttcatagatttttatttcttgatgactgctcatttggccacgcccgattatcgcattgaccatccgagtgtttatcctccttccgaggacacttttttgttgcttgatgccctcgaagctgaacaattggtacatacattaattgcgaagtcgacaatgaaattcttcggcaattgtgaagatcattggtcccgaaattttttaattttatttttttatcttaaaatgttttaacacttttctagggttgctatgaggagctgag

SEQ ID NO: 1004 - DNA, 3196 bp, Heterodera glycines
acgaaaattttaaatcctatcgaatgaatttggaagggaacggcttggcattgaggggaccgtggtgatggagcgacagtgtcggaatgaacatttgttcgtgctccgtttcacccatgcaaacgcggaaattgctgtcccaaccaccgccggtccatcgtctgccccgacagcgaaattacccgtcgccacaacagcagctgaaacaccgcctcctgcaggcagtggcaacaccccaaagacaccgtccaaaatcaccatccacctgagacctgtcggcagcgcaccgcaacttgaggcccagtacagaaaactggtcacaaactctggccagtcaatcgcccacatcactgtaccaaattaatttaactgcttatattgtccccaattgagacatttatttttgcttttatttgagtgttccctttagcgtgtgcttaggaaatggctcggccttggtcccaccgattcgctcttcttgttcgtcaacgaaacgttcgccccttttcccgagcataccattggcaatctgtacgaatgttttggatcacatgacagtcggaaattgtacctccaatactgtttgacaccagcatggggatgaaataaatatatgtaaagctcccttcaataaaacactttattttcatgctaaaaataatatcttatacggtccattaaaaatcgttggaaaaatgtacacactaagaggaagcgcttacttttacctacaaaaagttgtttaaaatactatgtatattattaaagagcaattagttgaacatccccacaatcagccgtccatgggaggcaccgattcattatcgcgctcctcaaaaggtgtttccgagtgggaagactcggacaagtcggaccttaagagacgagtacaacatctttggccctaatttgaagtgtacctgtcggatgacgacgaggaaccctctctgtggtccgcagcagtgctcaaatgcattccttgcgcgtggttctgacgccctccgactccctcagtcgaaacacactcttcctgctgttggttgttgttgttattgtccactgcctcctcggtctgtacattcgctgcaattcgttcaacaattgaatccaaagcattttgagacgaggccaaaatggacgacgaactcggcacaccaatggacggaggcgaaatgttgtcttcaatggtctttgtgacgatacgtcgcagtcgggcgagccgttcctcctctgagacactgtccgtttccattgccggacattcaaaatgtacacagtggaacacttcgttggccgaattggatgtgcctgaagcgatcgcaaattttgctttttgagattaaatcgggttcttctatcaccaactatgcggatgaaaacgaccggttgtcgtataaaatggacagtttgccaactcctgcaaatgttttcattaattaagtgtatttttcatttgttatcaattagtaaagtgtgttcgttgtacctgcgctcattcacgtccgccactttcatccatttgcattggtccgtggacacttcgatgaaaaatgaataacaccgatcgatcatcgcaatcccaaagcaaaagcctggacacaaaatgaaccttttttgtgttttaatggatgggaattaagtgcctcatcgtttccacaagagacggctggggaagttggacgaccaaagcgccgctgcccaattggtggcaagtgtacctgaaacatatttcaccaaaatccacatttatatcccaaaattaaaattcatgtggcctaaataaggaattcaaaaaaggtttttctttttgattccaatactgaccaggtgtaaatttgaagttcgtttggagggacggtaccacgcgaataatcactggtcgaattatgacgtccatgggcacaaaaaatccgtagtaacagaggacaaacctaataaattcacatgaactagtatataaaataattattaaatatttaccttttcacggtcgatggttttctcaactggcacttccacttgggacacaacttgtgcagaagccattttcaaaatataaaaaacagtaaaacacaataaaatatcaagagaattaattctataaaaatctttatttaaattaaaacttaaatagagttagtccaaaaaaaattccgcgggaatttgtatggtactgtgcggcatattacaaagatacaaagcgataccgattcagttttttttaattgaaaatttttaaatgtttattacgccaaatagcgtattttgcatttttaaatgaggaagaaagtaattaggtagcagctacttatctacgtctacctaatcttcggattcctccaaacctaaaaatcggaatatgagctcaaaatctcattttctaatgaaaattttctcattccagaaaattaacggtaatactgccgatggtagccccccttttttgaagaaatttttttttgttttcaaaagtcatgaaaacatggttccaatggttttcagggtcgctgatcacgaatccggcatccatttcgactaatttcgaaccccagacccgaattcgaaccaaaatgtcgaaaaatcagattttcgaatttcacatttttggtttaaaaaaagttttaatattttattgaaccaaggatgactttcacttcgtttccgtgtatttacacagcgtccgggaaatgagctcctgtaccagaaaagatttgcatgtgtggctcagtggtttttgtaagatagtaaagggacaaagggtggtggctcaagtccgttgtgcaacatgaatattttcatttatttttgtcaaaatattaaaaaatcacgatatttgggaattatttttgaaggtttttgccaaccaaattggataatcttggtatctttcgaaagctcttgataatgagaagctttttctaagcaaatgctaagcgatttggtgtaccagagaaaagttatgaggctctaaaattttgtttttcttataacttttgaaatagagcattaacaaaaataaattcagcattaatagatgcagaatttttttctctaacgatatgcaaaatttcctatggatctaacatatacaaaataagctaaacatagcgaagtaaatgttgtttttcctaataataaaaatattatatagtacgacaaaagaagacgaaaaatttagagaaaaaaagataatgtt

SEQ ID NO: 1005 - DNA, 5788 bp, Heterodera glycines
  unsure (1)..(5788): unsure at all n locations
gggtgcaatttgttaacagattttcaacaaaaaaggttggttttttgcgattattaagctcaattggtaggattttcatttaaaaaatgataaaatatgtatcaatttaaaaaaaaggctatgaggaatcatattttctttataggaaacccacgagtatacaaaacaaaaaattgaaaataatctaatttctgtagagggattgaaccaggggaaagaagaagggaaagtcgaggagactaaccattaggccatttgcacacttgggcagtgttacttttaaagaataggtatattaattattattttttatttttccctttgactccaattttcttcactaatttttcactcagaccccattcttaccagtgcttgtttttcccggttcccggttgccctaccgggaccgggacctgaacttttcaaaacccgggacctcggatgaccgggaattcccggcccggtcccgtggcactctaatacaaagcgataccgattcagtttttttaattgaaaaattttaaatgtttattacgccaaatagcgtattttgcatttttaaatgaggaagaaagtaattaggtagcagctacttatctacgtctacctaatcttcggattcctccaaacctaaaaatcggaatatgagctcaaaatctcattttctaatgaaaattttctcattccagaaaattaacggtaatactgccgatggtagccccccttttttgaagaaatttttttttgttttcaaaagtcatgaaaacatggttccaatggttttcagggccgctgatcacgaatccggcatccatttcgactaatttcgaaccccagacccgaattcgaaccaaaatgtcgaaaaatcagattttcgaatttcacatttttggtttaaaaaaagttttaatattttattgaaccaaggatgactttcacttcgtttccgtgtatttacacagcgtccgggaaatgagctcctgtaccagaaaagatttgcatgtgtggctcagtggtttttgtaagatagtaaagggacaaagggtggtggttcgagtccgttgtgcaacatgaatattttcatttatttttgtcaaaatattaaaaaatcacgatatttgggaattatttttgaaggtttttgccaaccaaattggataatcttggtatctttcgaaagctcttgataatgagaagctttttctaagcaaatgctaagcgatttggtgtaccagagaaaagttatgaggctctaaaattttgtttttcttataacttttgaaatagagcattaacaaaaataaattcagcattaatagatgcagaatttttttctctaacgatatgcaaaatttcctatggatctaacatatagaaaagaagctaaacatagcgaagtaaatgttgtttttcctaataataaaaatattagatagtacgccaaaaggagacaaaaaattagagaaaaaaagataatgttttctctggcactctctatttattggtacacatctcgttttttcggacggtgtgtttagactaagtttgaaccaaaaataaaattcaaagatttgaattttcgactttttgttcgagttcgggtccggggttccgaattggtcgaaatggatgccggattcgtgatcagcaccctgacaaccattggaaccatgttttcatgacttttgaaaacaaaaaaaaattggcgctatatgttatcatggttttttatcacaaaaaaattttgcaaaacaaaagggtcccaccccttttgtttcaaaaaggcccactttccatatagcgccaaaaaatttcttcaaaaaaggggggctaccatcggcagtattaccaaattaactttaagagtattaaatggctggacccgactctcgttttattctcgaattcttcaaccgtgaggctaaagagattggagtaacgcaggaattgcttaacaattcacaggtttttgactttatgatcgtttgaattttatttttttttattcagcagtccgatcagttgatccaggcctactactttctgtgtgatttgatttttgaaaatgtcggcaccaccaaagagaacgagtgtgaagtggccactgatctgacgagggctcgtcccaagatgatcatccgaacgcaacagcataggtacgttggtttttgttattttgatcttacaattagtattttcgtatagttttatatacattgcatccacaatttgttcagcaatttggtgttcaacaagttgttcgatggttctaacgaatttctctactccgatctattgcaaccggacccccgcagaacgaagatgcacattgctcaactgattcgcttgtacaccacaaagtgtgacattgccaaagagctttccgcggtggacaatcacattgtgagtgtataatttggcggagtttactagttttagtttatcaattgggctaatttattcggaatttacaaatttaaggatgaacaaatgaaagcgcatgactttgagaagaactgtgaacgttccacacatgctgtatgagatgatgtgtaattatacgcggaagagtttttcccttttagcaactgaaagatcgcgaagaagcgcttaaccgcatggagacgcgaaatgacgaaatgggcagcaaagtgcgacgactcaaggacaaattgaacgatcgacaagcgctagcggaggatgagaaaagaaatgtcgaacgcattgacaaaattttgttgggggcacagtgcgaaaatgcaagtgaaaaatgaaatgctgaaaaaggggcggaaaattgtcaaaaactttggatttattaacatgttattagtgatttttcgcttatttttaataaaaattataggacgaatgcaagaaattgtttgcccaggaagaggaaaaccgcaagcgattggacaacaacattgtgaactcaccggaacgcatcatcgaagagctgtccaacatggaggtcgaagtggaggacatccgtcgcaaaaatgatcaagcagtgtcagttgtccattcgttcggtttttgtaattggtcatttattttgttaggcaaaacgaccgaaagttggagagggaatacggcgaacaacgcgtgaccagccaatgcgtggagagtctgatcaacggcatgcaacaattggagatgatgcaggaacaaatggtggagatgcgggcgaaggaagaagagcgacgaaaggtcgtcccatttggtgatttaataccaatttaatttatattattaagcaaatggacgacttggaaatgacccgcaaaaatttggtggccgaaattgaagtgttggagagacagtcgacgaccgacttggaatcgttggggggcgaagtcaaccacagggctaagtcgctggcgatgctcaaccagcagaaggcacagctcgaaaggtgccgctgccaatcagtgggatttggagagagttttcctgaaattgcatcaatttttattcccatttaaacctccctattttattgggaaagtaatttaacactgaccatgagagaatcggttcatgaattctaaatttaaaagttaaataggtaactaattaattattcagtgatgaaaaggagttggccaagcaactgaaggagaagaaggacgacattcgccagcatcagcaggagatcaagcgaaaagaccgttctttcatcattctcaccgacacttacgacgattccgtggccaaacttttcaaaaatttgagccttgtggagcaaaaggtgtgggaaagggcgtccttttgtcttataaatccggcaaatatgaaaacatatggcggaaaatgtgattttttcgtggtcatttttcaggttcaagtgagtcgctcgaaccttctcagcctgttcaacgagagcgaaatttttggtccgttcaatcagtgaaatgataattattatgatggtggtgaacccccattggtctcgtgtataatttctgatcatgaaatatctcttcggttttgtatttttttatcgtttatccgctgacactcacatttattctgccaatggtaaaagattcttgctaattgttttggtccttataataattggctctattgcactttaaccgtcccatcagctgattttctctgttttcttggccataactttttaaaaaactgaacacaaaagtcaatttgggagcctaaaatgcaagagcccaacagtttatgttaattgggacatttggaaatcctgtctaatttaagagtgtgttttgcccatggcaagtgataattaattaattacataattaattgcctgttttccatatatttttttttgtctttccgttggccaacagcaggtgaaacacccgtcgcattcttctaatttccgttgtcccccggggcgttctcccccccccttttcccgccctttcagacgattttcccatggccaaaagattcgttcgtcagtgttaattaattttccattaattacgccattatcctttttttttctccggcaaaatgttcagtaacattttgcagattttcttcaattatttcaaacaattaatcatttttggactaaatcatcgaatattaatagaaattcagatttgattttcacatcactttttttcggagcgctttttcaaaaaacttttgggaaagaaggggtccggcggtgccgataggcgccgccgggggaaattttagaaatttgggtgcaatttgttaacagattttcaacaaaaaaaggttggtttttgcgattattaagctcaattggtaggattttcatttaaaaaatgataaaatatgtatcaatttaaaaaaaaactatgaggaatcataggagactagccattagaccatttgcacacttgggcggtgttacttttaaagaatatattaattattattttttatttttccctttgactccaattttcttcactaatttttcactcagaccccattcttaccagtgtttgtttttcccggttgccctatcgggaccgggacctgaacttttcaaaatccgggaccgggaacccggacctcggtacccgtatgcataaagatcggatcctcggatcacgacccttattacaagggaaaataggatccgaggatcggatccgtagatgaggctcacgatccgtatgcataaagatcacgatccgcgatccatggatcatttttggtgatccgcggctcaggatccctatctacctccggagtaggattggtgcgcggatcgagtgagaaaatttaaaaaaataaattttttaaagatgaaaaattaataaatcagaaagatttatcattttttggcatgaatagaaaagaaaaaataaaataaattacgaagagccaccaaaaaagttttcggcaatattattgcgcaaattaaaactgtcaagcgatcgaaatgtaggaagtgaattaatttggaggagagagggctgattgtcaacaaaagtttcattaagaaaatctggcaaattgcgatcgattgcaatgttgtgcagcacagctgctgccgtgatcaatgttggcacattctgcaatttaattcgtacttcggaatgtaaaatatggaatcgccgcttccatctcccaaatgcattctcgacaataacccttgtttttgcatgtgcataattatattgttgttgagcagcttcccatacgtttgactggcggagaacaaggcatcgtggctgcaaccagccattggcaagaatgtttgaaatcggccattgtgatcgancacacctaatcacattgctaatga

SEQ ID NO: 1006 - DNA, 2541 bp, Heterodera glycines
  unsure (1)..(2541): unsure at all n locations
aactcaaaataatttaaaaaatactactaacaaattacgtttattaatcatattcaaatataattagttaaaagattaaattaaaaagcaatataaaatattttgtttgcttaataaaatttattttgctttgcttgattgctgtggctttgtgtgtatacggtttagggccgaaacacaaataataattaatttaaataaattaacccaaagagacaccgtactgatgaggcccggtctctttcggttaaatttgcacgtttcgcgaagtgcccatttttgcactgtcgcgaagtgcccaatttttgcatttttcgcgaagtgcccaatttttgcactgtcgcgaagtgccctttttgcacttgtcgcgaaatgacgtagcacccgcggatcgagtgagaaaatttaaaaaaataaattttttaaagatgaaaaattaataaatcagaaagatttatcattttttggcatgaatagaaaagaaaaaataaaataaattacgaagagccaccaaaaaagttttcggcaatattattgcgcaaattaaaactgtcaagcgatcgaaatgtaggaagtgaattaatttggaggagagagggctgattgtcaacaaaagtttcattaagaaaatctggcaaattgcgatcgattgcaatgttgtgcagcacagctgctgccgtgatcaatgttggcacattctgcaatttaattcgtacttcggaatgtaaaatatggaatcgccgcttccatctcccaaatgcattctcgacaataacccttgtttttgcatgtgcataattatattgttgttgagcagcttcccatacgtttgactggcggagaacaaaggcatcgtggctgcaaccaggccattggcaagaaatgtttgaaaatcggccattgtgatcgacaacacctaatcacattgctaatgaattattcggtccattttatatgtattgtaccttggacgttaatcgaggggtatccttttcgattaaaatagtccttttcgtgagcggatgctggaggaataattcgcacgtgtgtacaatcaatggcgccaattacaccaggaaaattagcaacattataaaagcttggtataattatttctctggcctgcaaagggtactaattttttgaccaaaattcattcataattccggtacttgttcataaggagcaaaataaatgaattttccagccaaatttcgtaatgctgtagtaactcttagcactgatcgggacactgtagattgatcaaatcccagcaaatcaccacagatcatttgaaaagaatttgatgccaaataagcaagagttgcaacaacttgcaactctaccggaattgctccccctctcgaacggccgttagactcaacttcttcacgcaccaaattagtaatgtacttaatttacttttctaaatgaatttataaaaatggtacttttatcccttccctgtcaaatcgaaatctcttatagagatcttgatcagacatttgggcgagaatttctgccctctttcggtaaatttttaccgctgtttgtgtctcaattggggcacacattgctgcagacaaaaaagtttattaaaataaactgaaaaaaatacaaagtgctaaaacgcaccaattaataaatgaatgtagcattatttaattttctttctcatttgaatgctttccacgaaaaaattcgcgaccctcagtaaaaaatgtcttagcatcgtcaagaacatcctcaaattttttaaaaatttcttgtttttttgtcatttctttcaattgcatctcgagaacactccgctgcagttccattacatcagcagctgtaacagttgaagcagttccggcacgagatcgtaatggcacgcgagaggtgcttgattcaaattttggagttttcaccgcctctccgcgtggcacagtgccaagaacggcataggactttccttcttcaacaacaacttgctgtgaggaaaattcggcactttcctcttgttctttgccttcaaagaaaatggtgtcgccgatgatgagaccggtctgtacgccgccgggcactcctttaacaaacatctacttacacattagctcgaacacatatctaccctcaaatgccggtgaatcagcaaacaattgggaaacattgcgcgaaacttcagtcatttcgaatttcttgccaccgcctgtggcacgctgatgcctaaagaaaatgctgaaacccagcacaggcgcacatatgattaactttttttcggtttgtcgttcgtccttggccctttgttttagatttttgaattttgtttggatttctgcaatcgttaagccgccctggggcacttcctgaggaaactcacgattcatagaatcagtgacaaatttccacgcctctttttgctttcgtttgcttttgcagttcgagttggagggttcaaatcatcttgacgcgattgaacaagttcgatcaagcgagccaccatggcttcattgaatcgcgccgccattaataattntaattttttggggaaattga

SEQ ID NO: 1007 - DNA, 1278 bp, Heterodera glycines
  unsure (1)..(1278): unsure at all n locations
aatgtagcatatttaagtttctttctcatttgaatgcttccacgaaaaaaattcgcgaccctcagtaaaaaatgtcttacatncgtcaagaacatcctcaaattttttaaaaatttcttgtttttttgtcatttctttcaatgcatctcgagaacactccgctgcagttccattacatcagcagctgtaacagttgaagcagttccggcacgagatcggaatggcacgcgagaggtgcttgattcaaattttggagttttcaccgcctctccgcgtggcacagtgccaagaacggcataggactttccttcttcaacaacaacttgctgtgaggaaaattcggcactttcctcttgttctcaagttcgatcaagcgagccaccatggcttcattgaatcgcgccgccattaataattttaattttttggggaaattgatttgggaaaaataagaaagaatggcaaaagaaattgttttgatgtaaattcaccgccatcaaaaacatagtttgggtaaacaatctttcagttattgatcatctaggttaatccataaattatgcaacaacaaaaatacaaaaaacccaaatatttaatattcatggtaaataaagtgatccacggatcaggtcgatttagaggaaaggaaaatagcgttggatttgatgagaactactgaggaaaagaaaaggaatacaatccacggatcgagatccatggatcacccaatccgatctttatgcatacggattttgatccacggatttttcgatcctcgaatcagtgattcgtggatcacgatccggggatccgatcctgatctttatgcatacgggtacggatgaccgggaattcccggcccggtcccggtcccgtggcactctagtaaaaatagaagagccgatctcgagttagaaaagaaactcaaaaaacaaaagagaattcaatagagtgggtcgaaatatgggcctatgcaaaatttcaagaaaattggtcaataggaaaattttttttcaaggacaaagttttttttttctctcattttgacgtactatttccatgtctctaacatataaaataacacataataatttatttgtcaataaacaatttttttaacttttgactaacttagaaatattcttcagaattttcccttcaaaatgagcataaaatggttttatttggtctagtagtgacccagttataagctaaaaaaaattcataaaatcagtggtaaaacattgtgtctaacttttactatttgtatttgttctt

SEQ ID NO: 1008 - DNA, 6545 bp, Heterodera glycines
ggacaaattcatggatggaggtaggcaaaaatagaaactattcaattattataaataattaactatggatgcatgaaaaatgataaaaatcacaaaatttgatcattttttagtgaaaatctgtcaacaaattgtaatcaaattttcaaattttttcgcggcgccgcctgccccctcttcacaaaaagttttttttgaaaaagcgcgcctcaaaaaagcgttttattgatttttaaatttggaataaaatttaaaaaaatgatttttgctttatgattttaattattaaaaagttgtagaaaaaatttcgcattttcgcatattttagcttttcgcatttcgctttttttcatttcgcattttttagtttcgcaaatttcgctttttatttttcaatttggcccatccctgctaaaaagtaataccgtttttgcacccaaacttcccccctcccattcactattgatataaaataatgattttgaggtctgctcgcaaacaatccaagcctggaactgttggatgaaataagcaaggaaaatgcattggcaaaacaacacaatgtatgcagcagttgaccagttttatttagttttttttcaatttttacattttcaggaaccccagtatgagctggagtgttttgtttcgcttggcactggcaaggcaccgactgaaccggttggcacaacatcgttggagattgggactgaacttattggagcaattaagaatctggcggggattttgatggatcaggtacacacacacacacacactatatatatgtgtgtgtaaagcaaatcattttaaaactaatttcaagctggggttgtatatttccccttcctcacaattgtttctgaaataattgctttttttggaattagactcaaaattttcaatcgaaaaaatttgagtgcgtttcaggcctcccacagtccaggaaaaaaatatggatttccatataattggaatccctaattatgacccctcgaaaatggtagaactttgggcgccatggtgccgataggcgatgccagaaaattttgattttcattgaatttagttaagaaaatgttgcacgcactttgaagtcataaaacgaaattttttgcgatttttcaagaaaaaatttgtttgttttttgaaatttttaaagtttttggtagcagttttgcataaaaatggccagattagatcattttaacaatcattctcatacatatgttttccttttttcacatagaattctcttcttatttcggttttgattttagcttacaaattttctacaaaaaattttcatggatttggacgcattttttcgtttcttcgctggggtttgcaatttattttaatgtttgtcttaaactttttttttgtccagccgcgcagcagccagcaccaatgagtatttacgaacgctttaacaaggaagtttgcgaaaaaaacccttgagcgtaaatctaaaaatgtacatttagttcttaaaaaattggttgcgatcaaatactgtggagtcaattaacgcaagaagcgttgaccacggaggaaagacgcctttgatttgcgccatacagcgtgaatgtttgttgttttttctatttaaaaataatttttatttgcacttttaatagcacctcttgcgtgcacgatgatgattttggcgaacggagcgggcccgaacgcgactgacagcgctgccatgttgccattggcacatgtgttggaggttcgttagcgggcaaaaaacaaattgcttgaggggctaataattaatttgtgtccgttttttgcatttttactgtgaattctttgaatttttgttggggtccggatttagttaggggtgcagaatgactaattgagtgaatcgtattcagcaattactaaaaccccttaatgcgtttccatgatttttttgactttttgaaaatcgtggtagagttttcccaattaaaatatcaccaaataagtattatttggtaaaatttagaaagttttaccaaaaattatattttcacacattaaggatgaaacaggcaaattccaaattgccaagttgttgctttgcttccatgcacgttgaatgtgccggccggaaagagagacaaaatgtattttaattcttatttttgattgttaacattgaatactttagcaatgaaaaggcattggcgaagctcgtggccaaactgaacaaacaaaaggtctcagaaatttttgtttcatattttccacttggaaaattctttttttttttttgctttaatttatttaaacattttttgtttagaagaaaaagacgggcacaaaatcggaagagtcgaccgttaaaaagccagagtgtgtggatgttgaggaagcaattaggaatgagtgcagcaaatggcactgaaaacgagaagaaatgaacaaaggaaaaccccgagacgcaagggcacgggcgtccgagcactttcactggacggtggcggaattcgaggcattgtattagtgcaggttttgattcgggactttttaattaaaaattaaattttcgattaacaatttgcgacttaaataattttttcctgcaaatgaaaaattggggtttactttcttgacaaacagttaaaaaacacttccataaaaaccatattttttaaagaagcatccaaaataaacaccaatatcattcgataaacctaggtcttccattctcctgcaaaattccaaaaaattcgttctgcttcaaaaaagtcattgcccgaaaacctcaaaaaaaattttttatctaagcattttgtttataaattttccgaaacagagaatattctttaaaattttgcatcctaataaagttatcgaatgatataaagaatgtttaatttgagtgtttctttaaaaagttgtgatttacttcatttgcaaaattatttattggctggtcttttttatggtcatgtcaatgcaatagagcggcttaccaccatatttttcgctatgcttatcccttatcaaatttgcagatgttaattgaaatggagtcgctgatgtacggcgagggtttgcaagcgggtggccatgaaaaaaacttcgtacaaaagaacttcaattgggttatcgggacgagcaccggagcggtgagagcaaaaattaaaattatcagttttaacttgctaagtatcatatttgtgcaattttgggtctgatttcaaaaaaatgcaaacattggagggggggggggggtggcggtgaagagaaattttcgaaaatttgttaatgcattttccaattaaaaaaattatttgaactgatcaattaaagatgttggacattgcgaatttcagatcgttgcgttggcacttgtctcgggcacctcactgatcgacgcactgtgagtttttgggagatccattttaaaattggatagtcgcagaagagccatttatagttttttgaactttttgaaaaattaattttttttttgtttttgagtgatggtcatcagtgaaatttttaaaatattgatgactcagaacatttgttattggtctctgccaaactgaatattttttcagagggctgaaaattgggtaagcccgtccgtttgttagcctttaaattgggaaaaaattttgctattagaaaattttcaatttttttggttttgctttaatgaattttcaaaaaaaaattgcagattgtttactaccgcaacatacgttggccaaaaaccttcccgacttgtcaaattcgaaacttcacttcggacctcaacgaatacaacccatacaaaaccaacatttggctagcggcgcgctattcaagtgcggcgccaacgtactttgaaagtcgggacaaattcatggatggaggtaggcaaaaatagaaactattcaattattataaataattaactatggatgcatgaaaaatgataaaaatcacaaaatttgatcattttttagtgaaaatctgtcaacaaattttaatcaaattttcaaattttttcccggcgccgcctgccccctcttcccaaaaagttttttttgaaaaagcgcgcctcaaaaaagcgttttattgatttttaaatttggaataaaatttaaaaaaatgatttttgctttatgattttaattattaaaaagttgtagaaaaaatttcgcattttcgcatattttagcttttcgcatttcgctttttttcatttcgcattttttagtttcgcaaatttcgctttttatttttcaatttggcccatccctgctaaaaagtaataccgtttttgcacccaaacttcccccctcccattcactattgatataaaataatgattttgaggtctgctcgcaaacaatccaagcctggaactgttggatgaaataagcaaggaaaatgcattggcaaaacaacacaatgtatgcagcagttgaccagttttatttagttttttttcaatttttacattttcaggaaccccagtatgagctggagtgttttgtttcgcttggcactggcaaggcaccgactgaaccggttggcacaacatcgttggagattgggattattggagcaattaagaatctggcggggattttgatggatcaggtacacacacacacacacactatatatatatgtgtgtgtaaagcaaatcattttaaaagtaatttcaagctgggtttgtatatttccccttcctcacaattgtttctgaaataattgtttttttttggaattagactcaaaattttcaatcgaaaaaatttgagtgcgtttcaggcctcccacagtccaggaaaaaaatatggatttccatataattggaatccctaattatggcccctcgaaaatggtagaactttgggcgccatggtgccgataggcgatgccagaaaattttgattttcattgaatttagttaagaaaatgttgcacgcactttgaagtcataaaacgaaaatttttgcgatttttcaagaaaaatttgtttgttttttgacatttttaaagtttttggttgcagttttgcataaaaatggccagattagatcattttaacaatcattctcatacatatgttttccttttttcacataaaattctcttcttatttcggttttgattttagcttacaaattttctacaaaaatttttcatggatttggacgcatttcttcgtttcttcgctggggtttgcaatttattttaatgtttgtcttaaacttttttttttgtccagccgcagcagcagccggcaccaatgagtatttacgaacgctttaacaaggaagtttgcgaaaaaaacccttgagcgtaaaactaaaaatgtacatttagttcttaaaaattggttgcgatcaaatactgtggagtcaattaacgcaagaagcgttgaccacggaggaaatacgcctttgatttgcgccatacagcggaatgtttgttgttttttctatttaaaaataatttttatttgcacttataatagcacctcttgcgtgcacgatgatgattttggcgaacggagcggacccgaacgcgactgacagcgctgccatgtcgccattggcacatgtgttggaggttcgttagcgggcaaaaaacaaattgcctgaggggctaataattaatttgtgtccgttttttgcatttttactgtgaattctttgaatttttgttggggtccggatttagttaggggtgcagaatgactaattgagtgaatcgtattcagcaattactaaaaccccttaatgcgtttccatgatttttttgactttttgaaaatcgtggtagagttttcccaattaaaatatcaccaaataagtattatttgataaatagaaagttttaccaaaaattatattttcacacattaaggatgaaacaggcaaattccaaattgccaagttgttgctttgcttccatgcaaagttgaatgtgccaggcggaaagagggacaaaatgtattttaattcttatttttgattgttaacattgaatactttagcaatgaaaaggcattggcgaagctcgtggccaaactgaacaaacaaaaggtctcagagatttttgtttcatattttccacttggaaaattctttttttttttgctttcatttatttaaacattttttgtttagaagaaaaagacgggcacaaaatcggaagagtcgaccgttaaaaagccagatgtgtggatgttgaggaagcaatttggaaggagtggcagcaaatggcactgaaaacgagaagaaatgaacaaaggaaaaccccgagacgcaagggcacgggcgtccgagcactttcactggacggtggcggaattcgaggcattgtattagtgcaggttttgattctggactttttaattaaaaattaaattattcgattaacaatttgcgacttacataattttttcctgcaaatgaaaaattgaggtttactttcttgacagacagataaatgaacacttccataaacaccatattttttacagaagcatctagaataaacaccaatatcattcgatagaactaggtcttccattctcc

SEQ ID NO: 1009 - DNA, 5680 bp, Heterodera glycines
tttgaaagtggggacaaattcatggatggaggtagtcaaatatagaaactattcaattattataaataattaactatggatgcatgaaaaatgataaaaatcacaaaatttgatcattttttagtgaaaatctgtcaacaaattttaatcaaattttcaaattttttcccggcgccgcctgccccctcttcccaaaaagtttttttgaaaaagcgcgcctcaaaaaagcgttttattgatttttaaatttcgaataaaattttaaaaaatgatttttgctttatgattttaattattaaaaagttgtagaaaaaatttcgcattttcgcatattttagcttttcgcatttcgctttttttcatttcgcatttttcagtttcgcaaattttgtttttatttttcaatttggcccttccctgctaaaaagtaataccgtttttgcacccaaacttcccccctcccattcactattgatagtgaatataaaataatgattttgaggtctgctcgcaaacaatccaagcctggaactgttggatgaaataagcaaggaaaatgcattggcaaaacaacacaatgtatgcagcagttgaccagttttatttagtttttttcaatttttacattttcaggaaccccagtatgagctggagtgttttctttcgcttggcactggcaaggcaccgactgaaccggttggcacaacatcgttggagattgggactgaacttattggagcaattaagaatctggcggggattttgatggatcaggtacacacacacacacacacactatatatatgtgtgtgtaaagcaaatcattttaaaactaatttcaagctggggttgtatatttccccttcctcacaattgtttctgaaataattgctttttttggaattagactcaaaattttcaatcgaaaaaatttgagtgcgtttcaggcctcccacagtccaggaaaaaaatatggatttccatataattggaatccctaattatgacccctcgaaaatggtagaactttgggcgccatggtgccgataggcgatgccagaaaattttgattttcattgaatttagttaagaaaatgttgcacgcactttgaagtcataaaacgaaattttttgcgatttttcaagaaaaaatttgtttgtttttttaaatttttaaagtttttggtagcagttttgcataaaaatggccagattagatcattttaacaatcattctcatacatatgttttccttttttcacatagaattctcttcttatttcggttttgattttagcttacaaattttctacaaaaaattttcatggatttggacgcatttcttcgtttcttcgctggggtttgcaatttattttaatgtttgtcttaaactttttttttgtccagccgcgcagcagccagcaccaatgagtatttacgaacgctttaacaaggaagtttgcgaaaaaaacccttgagcgtaaatctaaaaatgtacatttagttcttaaaaaattggttgcgatcaaatactgtggagtcaattaacgcaagaagcgttgaccacggaggaaagacgtctttgatttgcgccatacagcgtgaatgtttgttgttttttctatttaaaaataatttttatttgcacttttaatagcacctcttgcgtgcacgatgatgattttggcaaacggagcgggcccgaacgcgactgacagcgctgccatgtcgccattggcacatgtgttggaggttcgttagcgggcaaaaaacaaattgcctgaggggctaataattaatttgtgtccgttttttgcatttttacagtgaattctttgaatttttgttggggtccggatttagttaggggtgcagaatgactaattgagtgaatcgtattcagcaattactaaaaccccttaatgcgtttccatgatttttttgactttttgaaaatcgtggtagagttttcccaattaaaatatcaccaaataagtattatttggtaaaattgagaaagttttaccaaaaattatattttcacacattaaggatgaaacaggcaaattccaaattgccaagttgttgctttgcttccatgcacgttgaatgtgccggccggaaagagagacaaaatgtattttaattcttatttttgattgttaacattgaatactttagcaatgaaaaggcattggcgaagctcgtggccaaactgaacaaacaaaaggtctcagagatttttgtttcatattttccacttggaaaattcttttcgatgccagaaaattttgattttcattgaatttagttaagaaaatgttgcacgcactttgaagtcataaaacgaaattttttgcgatttttcaagaaaaaatttgtttgttttttgaaatttttaaattttttggtagcagttttgcataaaaatggccagattagatcattttaacaatcattctcatacatatgttttccttttttcacataaaattctcttcttatttcggttttgattttagcttacaaattttctacaaaaaattttcatggatttggacgcatttcttcgtttcttcgctggggtttgcaatttattttaatgtttgtcttaaacttttttttgtccagccgcagcagcagccggcaccaatgagtatttacgaacgctttaacaaggaagtttgcgaaaaaaacccttgagcgtaaaactaaaaatgtacatttagttgaatgtttgttgtttttctatttaaaaataatttttatttgcacttttaatagcacctcttgcgtgcacgatgatgattttggcgaacggagcggacccgaacgcgactgacagcgctgccatgtcgccattggcacatgtgttggaggttcgttagcgggcaaaaaacaaattgcctgaggggctaataattaatttgtgtccgttttttgcatttttactatgaattctttgaatttttgttggggtccggatttagttaggggtgcagaatgactaattgagtgaatcgtattcagcaattactaaaaccccttaatgcgtttccatgatttttttgactttttgaaaatcgtggtagagttttcccaattaaaatatcaccaaataagtattatttggtaaaattgagaaagttttaccaaaaattatattttcacacattaaggatgaaacaggcaaattccaaattgccaagttgttgctttgcttccatgcaaagttgaatgtgccggccggaaagagagacaaaatgtattttaattcttatttttgattgttaacattgaatactttagcaatgaaaaggcattggcgaagctcgtggccaaactgaacaaacaaaaggtctcagagatttttgtttcatattttccacttggaaaattcttttttttttttgctttaatttatttaaacattttttgtttagaagaaaaagacgggcacaaaatcggaagagtcgaccgttaaaaagccagagtgtgtggatgttgaggaagcaatttggaaggagtggcagcaaatggcactgaaaacgagaagaaatgagcaaaggaaaaccccgagacgcacgggcatgggcgtccgagcactttcactggacggtggcggaattcgaggcattgtattagtgcaggttttgattcgggactttttaattaaaaattaaatttttcgattaacaatttgcgacttaaataattttttcctgcaaatgaaaaattggggtttactttcttgacaaacagttaaaaaaacacttccataaaaaccatattttttaaagaagcatccaaaataaacaccaatatcattcgataaacctaggtcttccattctcctgcaaaattccaaaaaattcgttctgcttcaaaaaagtcattgcccgaaaacctcaaaaaaaaaattttatctaagcattttgtttataaattttccgaaacagagaatattctttaaaattttgcatcctaatagagttatcgaatgatataaagaatgtttaatttgagtgtttctttaaaaagttgtgatttacttcatttgcaaaattatttattggccgtgtcttttttatggtcatgtcaatgcaatagagcggcttaccaccatatttttcgctatgcttatcccttatcaaatttgcagatgttaattgaaatggagtcgctgatgtacggcgagggtttgcaagcgggtggccatgaaaaaaacttcgtacaaaagaacttcaattggattatcgggacgagcaccggagcggtgagagcaaaattaaaattatcagttttaacttgctaagtatcatatttgtgcaattttgggtctgatttcaaaaaaatgcaaacattggagggggggggggggggtggcggtgaagagaaattttcgaaaatttgttaatgcattttccaattaaaaaaattatttgaactgatcaattaaagatgttggacattgcgaatttcagatcgttgcgttggcacttgtctcgggcacctcactgatcgacgcactccgactttacttgcgcctgaaggattcggtgtttggcgcccgggcgcagctgatcggttacaacgcgcaaaatttggaaacattcctccaagcgcagtttggcgaacacaaaaaaaaatggccgaattatcgcgtggaaacattaagtgagtttttgggagatccattttaaaattggatagtcgcagaagagccatttatagttttttgaactttttgaaaaattaattttttttttgtttttgagtgatggtcatcagtgaaatttttaaaatattgatgactcagaacatttgttattggtctctgccaaactgaatattttttcagagggctgaaaattgggtaagcccgtccgtttgttagcctttaaattgggaaaaaattttgctattagaaaattttcaatttttttggttttgctttaatgaattttcaaaaaaaaattgcagattgtttactaccgcaacatacgttggccaaaaacctccccgacttgtcaaatttcgaaacttcacttcggacctcaacgaatacaacccatacaaaaccaacatttggctagcggcgcgctattcaagtgcggcgccaacgtactttgaaagtcgggacaaattcatggatggaggtaggcaaaaatagaaactattcaattattataaataattaactatggatgcatgaaaaatgataaaaatcacaaaatttgatcattttttagtgaaaatctgtcaacaaattttaatcaaattttcaaattttttcccggcgccgcctgccccctcttcccaaaaagttttttttgaaaaagcgcgcctcaaaaaagcgttttattgatttttaaatttggaataaaattttaaaaaatgatttttgctttatgattttaattattaaaaagttgtagaaaaaattttttcgcatattttagcttttcgcatttcgcttttttttcatttcgcatttttcagtttcgcaaatttcgctttttatttttcaatttggcccatccctgctaaaaagtaataccgttttgcacccaaacttcccccctcccattcactattgatagtgaatataaaataatattttgaggtctgctcgcaaacaagccaagcctggaactgttggatgaaataagcaaggaaa

SEQ ID NO: 1010 - DNA, 2471 bp, Heterodera glycines
tttaatttatttttgtcaaaatattaaaaaatgacgacttttgggaatatttttggaggtttttaccaaccaaattggtccatcttggtatcattcgaaagcccttgatgaggagaagctttttctaagcaaaagttaagcaatttgacatcccagaaacgagttgtgagattttcaaattttcatagttgtctcatgaaaaaatgggatgtataacctaaaaaaatatttgataggttcgatgcagaatttttttctctatcgatatgcaaaatttggtaaagatttaacatccagaaaaaaagttaaacatcacgaagtgaatgttgttttcgctaataatgaaaatattagatagtacgccaaaaggagacaaaaaattagagaaaaaaagataatgtttttctctggcattctctatttattggtacacatctcgttttttgggatggtgtgagtaattaaaaaaaatcaacaaattattcgaatgcaatttttttttttgcatatccactcgtacgaaaactgctcgcaattttgaaaaaggtgatagagggagggcgggggaaggctgaattacttgacaaatggcgaaacaaattcagcaaacggatgccaatgatcggaagcgcaaaggtacgcccattgagtccgattttgtcaactccgctgaccctctcgacgagaacaaaaacgcatccgccgtcgaacattcgcctgtccaaagccaagtcgagcctttgcctccttcagtatcgctctcgaattcgtttatgatcgacaaaagtgatcatttcattttatttccttttgatggtgttttactttctcagttctttcatcgcagtcgctcaatttggaggagaaacatccgctaatggtcgaccagcaacagaattctcaacttcttctgacgcgtcggtttgaacctgtcactttcgagggcacaatggatgaacttcgcttggaatttgagcaggtcattttaacaaaccaacaacagtcatttggttcaaattttaaaccactgccaattttgctggaatggctaaatattgttagagttgctttcgttttaaatcaaaaatcaattctctgaaatgacattttgaccagttccctttgctctggcaggtgttgcggcactattaccatgggaatgcgttgcaattggcctctctaatggccaattacgtgcgctacgaatacgaattgcgttggcaacagtccatgttcggcatcccgccgcatctgatgaagtccgcctaccttctattgtcgcgccattttcacatgaagaatctgcgcctcactgatgtcaacgatggtttggccgcgatggacgtaaacgtcggaggcacttccaacaattggttggggcattaattgtatgtgccattcccacgacaaatgaaatgcctacccaatttttaaattttctcatgggtatgaagaagttcacaatgttctttattctgtcgtttaaaacttatttcaattttaatggaatctaacaaattgaggtaatccttcggatttattatgctggcccatgaaaaaatgcagtttttccggtgccaaatttttgtgaattttcattcggcgcgtcataagcggattgtttggtggcaaatgcaaacaaattttgtgttattcgaatgcgctaggcgggctcgacatttccaaatgtatcaacaaagggtctatctccactctctggcaaggtatggccagccaaagcagagtggggcataaacaagaattttttaatctttggtatttcctctattttgtgcctgctctacatttatgtcttgtgccaatatgcctattgcaacagaaatttattcagctttcccgacaaattgttgagataattattctagacgatttttttatatctcaatgcttaactatcgcctttttgtttggcaactggtagaaattggcagtgaaaaaaagtttgtttgtaactatttacaataaaaatttatgtagcatttctaaaaaggatgtaaaaataagttcttgcgtaatatttttatattgtgtgttgaagaatttgagtctgcttctgatgcaagtggaaaatttttcagcttttctcgaaaagttttttcccagaaaaaggatgggacaaataaaaaactaaacatctctcatgaccaatttaaatttccttacattttgggtttactttattatgctggcccatgaaaaaatgcagtttttccggtgccaaatttttgtgaattttcattcagcgcgtcataagcggattgtttggtgccaaattgcaacaaattttgtgttattcaaatgcgctaggcggactcgacatttcaaatgtatcaacaaaggatctatctccactctctggcgagggatggaaggccaaagaagagtggggcataaacaagaattttttatctttggaatttcctctattttgtgcctgctctacatttatg

SEQ ID NO: 1011 - DNA, 8644 bp, Heterodera glycines
ttttcatcgagtacttgatttttttgaaaattttttcggtaatttcgatgttctgattggtgtagaatgcataggtaaatattttagaatgaatcagtaaatgtataggaaagacaaaattttagaaaacaaaaaattccaaaaaatcaagtatatgatgaaatcagtgattttgcaaaatccgaactcggattcgtgatcagcgccttttttaccctagcaaaagtgattttgtaagaaaattttatttattttttctgtcgggacaccaattccgaaggattacccaaattgaaatgggtacagcccacgaatgttgaaaattcgaaaccagtgtctacaatataatatttattcagcaataagcgatcaaatggcttcaatgttgaaaaagacagttgggtaatcgaagaagttcggccgtctcgccaatgccaacaccgtgcacattgattcattagcataaagacgagtcattttattattatacaactgaaaaaataaacaaagcttgacgagaaaaggcggtatccgcggagtgtcacctgaacgaagaaactgagttcgactttggccatgtttttacaaatgttcacgaatttaacacgaagttcttccactggaaaaaaaattatgagccgattaccataacaaatgaattaaccggtcgcccgatgcattaatttcattcgaaaacgttcgtcgatgggtcggcgaagtttgggcaaaggtacgatttcaactgtgatcagtcccaactgacccgtcttcgacacgtactctctcaacgccgattccatcgaaacgttaattctgaactcctcgaaattaaacattaattcaaaataatgaaccacaatactatcatccaatagtcatacaaataaacgtcaaaaagatcacccaaaattggtgttgcaatcatcgagaggatttggggtgtaaagacgcagaatttcattggcgggaaaaggagacgacgaggaagaggcggtccaaattccggacgattcatcctccacagtttgacacgaaagaggcgacggcattgccacatttgacgacgcaccttaacaattagcagtgataaccattagaaatggatattggggacgggagggggttagttggtgggtcacatttcactataatttaatggccaattcgaataaatggtcttttaccgcctaattcagcttctctgctcgttaattgtccgatgaatcggtcatcaacgcttttgttgaacagacccacgtccacgtcgacgatgagacttttggacaattgcgtgcccttccccgcatcagaagttgggtcgaaggaagtgtctttgccggatgaagatgatggagattcagaggaagaatcagtgtaaaagtcagctgaaaacaacaataaacaaagaaaacaacaacaatagtcattgtcagtttgcatttttaataaagaaatttgtcccttcacaatttctctgtagttttataaggaaaacccatgaaaagcagcagaaaaacaacacattaccacaatatgtccaatctcaaaatttcgaaatgattgctttttagacaccagtcccatttattacttactactcaccatttgcgatgtcattttccatcacatgacgaggaagaagacatagttttttgggagcacagattgcattgtgttgaataggtggcgaagctttttttgctggaacaaatcaattaaaatattagtcacatttaaattctgaaagcctcgtggagggcacaacgagtcgctgataaaggacaagaaacggtgcattagaacatggttttcccaatcgcacctttattcgccacctgtcccgacccttccgcccttttcgtcgtcgtcggttcgtttacgtcggcattcgaatggcgaatgagtgccttcgcttgcgcccgcattccctccgcaatgctccgttgcaatgcgacaacatcgaaatgtttgctccatttttgcgccttctcgcgttgcaacgcttcgtactgctcacgatcaggccaaatctgaaaaacggaagaacaaccgttagtccagagaagaacggtggaatttgttgctgctgttactttgtcgatcaatttgtccatgtttgggtcggctcggagattgcgtttggaaatgattttctttcgacaagtcggacattccctctaagattcattccattgataaattaaataatggtggtcatttgtcttacatttcccttgtaaatgcattttttgatgcattcggaacagaaacggtgaagacattccttaaagttttaacgtaaaagcaaacaaaagcagaaaaaatggtacaaatagtgttcaacttttgggtttcgacagaatgttacccattcgtaccgtgaccatagtgtttttcagcaaatccaagcaaattggacatgaaaattccgtgttgagcgtatcaatcaaatcggaccgcttcagcaactgatcatcctccccctttttcagagtatgcggcaatcgattctaaagaaaaagtttagaaaagtatagtgaaaataaaaccaagtcgtattcagtgagttctttctgataaatgccagccaaagggtcagccgatggattaagagacatcggaaatgacaaaaagaagtcaaaaggatgaaaaagacaaactgaggacaatcttaaataaatttattggaagttttaaactgaaatttgaaaatctgcgaattcaaagaatttaattcaaattttttacaaaaaacatttcgccatgctaatcttttttaaattttatattttactcttcttcatttttttggattttaatacgcttttctcttaattaagatggtcgaacttgatggcgcgcctatgatttccgctgaagagattttggacacaaaaatatctttccaagactgtgttcggaaaattaaaaaaacccatgaagtgagtaacaaaattcgataaacaaatctgtccgtttgaattaaggaaattaatagagccttcgacatggagaaatttgacataattcaaagaacgatgcgaatgtattttgagtcggaagattcctcggatgtgtttgaaggctttctgaacgttgtcaaatatgtgaagtcacttaccactgagcaattggacatttcgctcgtcaaactcgctctgctcgcattttacgaatttcagaaactcggaatcgcgcaaggccaacaaatcccttttgaccttcacattgataagactcttctcgtgagatccgctttctgtcatgtcactaaaattggcttttcccttagttggatgcgctcgtcccgtgtttccgacttaaaaccaaatacatcgaagcgatcagttccgtattccatctgaaggacagggaaatggttgaagttgcgattgctcaaattaaaacccttttggagaacgaagtgccaaaggctgtcttttggatggaccatttgaatctgcgcgaccatttcccatttaacacagtgagttttgattcggaataattgatagacttttgatataatttaatgaccctatttagatcgtttgtaaacttattttggaaaaccaaactgctttgatttatcctttcgtcggtgaaagtcaatttcgacgtaataaactcattcattatttggacaatttgttgggccttgttttgcgcaacagacgagcggaggatgaatatgagcgggaaattatgaaaaaccaaaaacaattggagaaggttgggtaaggggccagagtacaaattggggcagtcaaaaatggcgattcttttcgtaaattttcagaaatgtcgctttctcacttttaattgttattgttacccttatactgttccgcttaatgctacgagaaacttaatccctatttaaatttagctcaccagaaagtttgtcaagaatttcgaattaacggaaagtgaagtgcctaatttgatgaagcttggtacgcaaaatgctttgttatacaatcactatcgttggtgccacaaagaaattacatggagtcaatttgaggagatagcgcgcgtaatacttttttaatttgtgctttttgccaattgttttttcttcccccccccccttcgttttctttccattctctcctttctgctgatttctttcctcgtcctacctttgcgttttcgccctttcttcccacttttctgtctctgtttcagcatgctctgcagttctcttccgatgttcgtgaccattacttccgccgtctgttcgagtccaaattgccagaacgagcgtgtcattttgcggaattgcttgaactcagtgagcacgattacatccccgaattgaggcattattgtcagcaaaacgcggatgaagtgcaacgaatccgcaaccaaatcagaaagtgattttatccgattttctttccattttcgcacatttagagacattgccattcgcctgcagaaccaacagattgaagagcagtgcgtctgcgagttgacccccggccaccaaattgtcctcgtcgacacgtggccgaagttagagcaactgattgaccatcttcggcacgacaacgaggaactctttggcatcgatgccgaatggcgtcctcactatctttgcgcagcagaaaagtgattttaccatttatttcttttttggtattataaatgtgcttttgttgtctaaaatttcctcagaatttcactgattcaaatcgcaacaacaaaggccgtttttctggtcgatgtcctcgtgttggaagagagtcggacgatgactgaaagtcaatggttaaatttcttcgacgcacttttatgcactgacgtaacgaggaaaattggtgggatttgtttttgtgccatcgtttatcgcttgtttaaaggggagtaaattcctttcttttcggcatttcctttcaatggcaaatccctttaggctacgactttcgcaatgatatgcgtgtcttgcgcagcactttccctttcatcgcaaagcttttcccgacggtgagaaaggtcgtctgtatgtatcggctgctctccaaagtcgaccaataccccgaggcgtcccgaatcgttttcgaccgcacagacgtggccaagccgacgctgtccctttctggagtgtccgagtacttcttgaacattaaattagaaaaaactgaacgcgaaggcaattggagtcagcggccgctccgtctcgagcgtaagtgcattttgatggccattctttggcatttattttcagagaaaaaatacgcggcgcaagacgcgcactgtctgaatcggatcttcagaattgtggcatcgaaattgaaaagattgaaggacaatgaacttgccaaggagttgaaacggcactcactgatcgatttcaacgaagaaaaggcaaagccaacgatggcaattccgctgctcagcggacaattggtgcgagtgaaggaaggcgaggaggacttcattttgaacgtgcaagtgagtggaggggaaggccagcagatgccgaagccaacaatgccattttgagaaagccgccgtggaaattgagcgatcagccaacggagtgttggacggcttcagaaccattggagatgtccgcttcatcgtcgactcgatgcttttcgggttgggcaaacgtttacgcaagtgcggcttcgacacgcgaatgattggcgaccgtgaacaaattgtcgagttttgcaagcagtcgaaggacgaaaaatttgtggtgttaagcgccggcaaaggacataaacaggtcaattgaggcatttggagaatggtgtcatggagatttattggttatgttttgcaaagccatggcgacacttggcacactttcagctcgccctccaaatgccagacaatgaagtggtcaatgtgccaattgcgaccgacggcaccaccccaccttccctgttggtcaggaacttgttggacgaactccgcatcattctccgtccttccgacatgtggtcacgctgtgtggagtgcaacaagcggtccttcgtccgtataccaaaacgaattgtgcagaccttgtgctttatgaccgcagttcggcactcggccgaatggatgggtgtcgatgaacaggtcgacaaattccaatgatttgtgatggattcattttaacccaacaaaacgcacaggatttgaatgaatctgtcgcccgtttgaaagctgaaagtgttccgtttgacttggaccaggacaacgactacgaagcgcagcagttcgtttttgtttgtttgtcttttcaaattaattggcattcaaaggcccacccttttcaaccgcaggcgaatgttggatgcggaagagtacattttgatcgttgaccagaagcgcgaagtctgtctgtgtcgtaatttctccattgacatgctgtacgtttttattttctttcacttcctatgcacagtctcccccccccccacccctcaatctctctcccccctcaccgtcctctgtcggtccgtctgcactttctgtcctctgctttcttcctctctccgtcctctgtctgtctcttcctctctctttctcttcctctccgttctctgtctgtctcttcttctcctctctctttctcttcctctctccgttctctgtctgtctcttcctctcctctctctttctcttcctctctccgtcctctgtctgtctctcttctccactgctttctcctctctctaaaccccttcccttaatttaccgtccaattcatttccatccattcaaattcattctccattcagcaatcgtctgctgttggctgaccattgttggtcccccgttcaaatgcgtgttgggcttaagtacaaaaaggacacttttgacgttgctggcatccaatttttcgtgtgttccgactgtggcaggctccaactgaacagtgcgagcagcgaatgaccgcgggcaaagcaattcacttccgccgaaagtgttgttgttttttgttaacaatttgtgtcattgtttttgcatatttaatttattcttttcttttggctgatctgtcgcttctctccgctcatttccttttctgtttttatttgtttacgcttcaggaacgatttattacttctttaaataataagtgcatagtgagtgttgtcaaacacctcctaaaaacccaaaattgttcctcagcagtgcctacaaaactcatatttttataaatggctcaataaaaaactcattttttggggaaaatattttaataagcaaaaatagggttgcaaccccgaccgtcggggttggaaaagtcggggttcggggttgtcggggtcagcaaggttggggtcggggttgaccaaatggttcggggtcggggtttttcgatttttgccttatgctatatagtcaaaaaactttattattttttcttaaaaatcttttattattcataataataattttatcaaatttttcctccggcgccgggcccccaaaacttattttttcttaaaaaaatttgcctcaaagtcgaaaaatttggttatttttggtgaaaataaaaaattgcattttaattctttaattttcaaaaatttttcgcagcggcacttactgacaccgccggacccttgttcccgaaaatttttttgttttcaacatctttttttcgcaacgcactttttctaaagacttttaggagaaaggggtccggcggtgccgataggcgtcgccgggaaatttttttttcaaaatttggatagatatgtaacagaatttgtccaaaaattataattcgattttgagcaatatttttaggttttttggggtgctggcgatgcccataggcagcgccgggcgaattttaaaatttaagctttattttctaaaagattttcatcaaaaaatttatgaatttccgtgaaatttttatttatttttttattttgtcaaaaattgtcaaaatttcatatttttcctccggcgcctggcccccaaataaaatagaggagattttattcaaaaaaatgcccaaaaatttctgatcacctttctttttcttttttttgtttttcgaatcatctttttttcgcggcgctctttttctagacttttaggagaattctattaatcacataaaaataaattaaaaaggaaacagtcaaccgggttcgaaatcataacaaaggtagtgttagtgttaaagtactaaccactacatcacaatacaaaaaacaacaaaatcattttactttatttaataaaaatttggcaaaatggtttaaaaaaatacaaaatttatatattttttgccttttctcacacgaaaatgccattcttaggggtgtatatttaaccccgaccccgagtcggggttaagggtcggggatcggggtcgtcggggttcgggtcggggttaaccccgaaaaatggccaaaaatgtcggggcggggtcggggttgcaaccctaagcaaaaagaaaaaaaatcgaataaatgatattttgatcactgattttattccgattgttcgcattttctgcgtccgtcccttctaattatcgtccgttccttcgatcttcttcagcgcatctttggtcttgtaatattcgaccaatcggtattttgcaaaactctgaattttggtgttatttctttcttttaataatattaccgtgtaatcgaattcttcaattgat

SEQ ID NO: 1012 - DNA, 992 bp, Heterodera glycines
cggtttttttcaggaaattcccctttttgccgtttcacatttctttgggaatttgggcctggtcaagggcgcaagcccatcaatgaagaattcgattacacggtggtatggttaaaagaaagaaataacaccaaaattcagagtttgcaaaaatcccgattggtcgaatattacaagaccaaagatgcgctgaagaagatcgaaggaacggacgataattagaagggacggacgcagaaaatgcgaacaatcggaataaaatcagtgatcaaaatatcatttattcgattttttttctttttgcttagggttgcaaccccgaccccgccccgacatttttggccatttttcggggttaaccccaacgaccccgatccttaaccccgactcggggtcggggttaaatatacacccctaagaatggcattttcgtgtgagaaaagtcaaaaaatatataaattttgtattttttaaaccattttgccaaatttttattaaataaagtaaaataccgacgtttacgtccatcgcggccaaaccatcgttaacatcagtgaggcgcagattcttcatgtgaaaatggcgcgacaatagaaggtaggcggacttcatcagatgcggcgggatgccgaacatggactgttgccaacgcaattcgtattcgtagcgcacgtaattggccattagagaggccaattgcaacgcattcccatggtaatagtgccgcaacacctgccagagcaaagggaactggtcaaaatgtcatttcagagaattgatttttgatttaaaacgaaagcaactctaacaatatttagccattccagcaaaattggcagtggtttaaaatttgaaccaaatgactgttgttggtttgttaaaatgacctgctcaaattccaagcgaagttcatccattgtgccctcgaaagtgacaggttcaaaccgacgcgacagaagaagttgagaattctgttgctggtcgaccattag

SEQ ID NO: 1013 - DNA, 3320 bp, Heterodera glycines
  unsure (1)..(3320): unsure at all n locations
ggcacagaaacggtcccgacggcgcagcaaataccgtgcgtttgtggttaagccgccgcccgcctcgcgctgttcgtccgcgcaggcgcacggcgtcgccaacgggtacagccgctgggcaaccgcggcccaactgcagccgctgcccatccaaccgctgctggtgttcgtcaacccgaaaagtggcggcaacaaaggagccaaggcgttgaacacgctgtgctggttgttgaacccgcggcaggtgattgattgcttggcccaccttttttgcccttggctggctgtcaattttgaatatatttggtacaacgatcaattttagttggtcctcattagccagtgattggtaatgaattgcctaaatgatcaggcttgaccagactagacaaagggccatttgccaagcttttatgtatttaaaatgctaagatcattgatttttgatgaccgatttgattgcagtaattttgatcaattattgacaaatcatttagtcagattaggctttggctcttaccattgtgggtctggtttctgctaatattatataaattcttgatgcccttcaggtgttcgacgtcaatgtgatgcgcggtccaaagtacgggttggacatgttccgcaaggtaaagccggccatttatgcttcaactcagactgatctgttcattaaataatagattatcaaccatctttgttgtttttttaattgacaaataccggataagtactctaaaaattccatatattttgatcaattatatattgatcattctggttcatccaatcaatgatcatcatatttgtgatcagatccactcttccatgcgcattttggtgtgcggcggggacggcaccgtcggctgggtgctgtccacgctcgaccagctcggctggcccgcctacccgcccattgcgctgcttccgctcggcaccggcaacgatttgtcgcgcgccatgggctggggcggcacattcagcagcgacgagcctttggcggaagtgctggctgcaattcagacggagaccagcatcacccatttggacaggtggggacgaacatgatgacccatcggagacaaacggctttatgtgggggagggagaaaagaaaggcatggcacggcataaaatttcgcaaaaatttgaaaattttgaaattgataaaaaaagtgccgccggtttcctcttgccgctctgttggtgccgtgcctaaaattgttgttcattttccccttcatcagatggcgcattgatgtgtgcccattggcggctgcaacgaccgcagcgggagcaaacaatggcacaacggaacagcagcagcagacgaccacggcattcggcaccaccggaaacaaaagtgacgacaattgcagcaatggaagcgacgtcaaaacggagcagcaccaacagaaacaacaaacaaatggaggggcaacgacgacaatcgcaacaggtggcacggggggagagagagggacggcacgaaaattgagccaaaaatatggaaatcatttttaaaattttaattttttaatattccgaattaaaatcatacattccatttaaaaagaaattaggcgcaaatggtgcatttaatgaattcaattaaaacaccgcaaaaatgataatttcaaacttccatttttaataataaaccccaaaatttaagaaattttaaagtctgaataagtagaaatattcggtaggcgcttctctcaccgccaatttgcctttgctgtcaccgccaacagtcgacggcggaggcgttcttcaagcagttcaacccgcccaaactgttgctgccgcctccgccactaccgccgcttcttcggccgatgaggcggcggctgtcggggcgaacggcgaagcggcggacgccgtgcaaaaccaactgccgctgtcggtgatgaacaattacttctccatcggcgcggacgcacatgtcgcactccaattccaccagtcacggagtgccaacccgcagatgctcaactcgcgcttcaaaaatcgcatcgcttacggaggccttggcaccatcgacctgttcaagcgcacatggaaggtggttgacggcattcatcgggcgatagggggagtggggaggaataggcacggcccaagaagggtgtcatgacaacactcgcacaaaaagggaactcgtacaatggcttaggctaggcctaagcttcagactagacataggcttagacttgtttggcttaggctttattttgtaaatttttattgtacgaattacctttagtacgagttgccattaatccccaagaggggttggcacaactccaaatttaagggtttaggctaaatcagttgggcatgaatgggggagtactgggttggcacagtcggagaacagtgacatccaaatttggtgggtaggagcgtttggcacgttcactgaaccgattgggagagattggcacggctcagaacaaatggcactacagaacccaaccaaatacataattgtttatcccttaggacctttccgagtacattaatgttgagtgtgacggggtggacatcaccgccaaaattcgcgagttcaaattccactgcattctgttccacaacatctctttctacgccggcggcaccgtcccgtggggtgccggcgacggagtgcaagtgaggcgattaatgtgttaattagtagtttttggcaaaagcattcaaacaattagttggcaaataatgccattggcattttggcaaaataaatttggcattctgctcaccaattttactgctccgatttgaggagaactgtggcgaagtgttctcccgtccgtcgccatgtgatggcaaaattgaggtgctcggcttcaccaccgccactttggccgccctccaaatgggcggcaaaggcgagcgcatcgcgcagtgctcaaaggtgcgcattgagacgagcaagccgatcccgatgcaagtggacggggtaagcaaaagggacacaatgggggggggacagggataaatgacaaagagcggaagaatggataaaatgaggagaaacgacaaaatggggacaaatggttaaagtggggacaaacggaaaaagggcgacaaaaggacaaagagaggacaaatggaaaagggcggcaaattgggggcgggagtaattaggaatcgaaagttgcaatttggaggtgaatcagccccttctcctttcaattcaggagccgtgtctgctcggcccatcgcttattcatctttcattccacaacaaaggtaaagccataaagcagttaattatctttattatctatctccccatcactgntttactctaga

SEQ ID NO: 1014 - DNA, 2591 bp, Heterodera glycines
  unsure (1)..(2591): unsure at all n locations
gacgggacatcatgccacttccagggtaatgtggtgaatgtggacgaaaagtttggcatcatttaaaatgccaagctgntcttaggcaagcgtaagccccgagggcccttgttcgccgccgcgttcgcttcgtcatgtgccgccgtcggcggcaagggcgcagccgcctcaccgccaagcagcacaatgttgctggacgtgccagtggttgttgttggccggcacgactacgacacgtacagagactcggtggaacggctgaaagacaccggtaagcaaagcaattaattaaattaattttataatccttaattaccctcattaccgaaaatatcctcacttaggctttgagcttggcctgttaaatgtggaggcggagacggaacttgtccaactgcggccgcacattcagcaaatgatgtgtgaacaccaaattttgccgtacgacccgggcccggactggcgctttctcgactgtgagtttaattctgaaaactcagcgggggtccggcacccgagtcccaaggggtggcattgatcagcggcattttggctagcgatatggcctgctttttttaaattttgcctcacaaattccgtcaatgccttttctcagatgtgtccaacgcggaggagggcactttccgcgtgtcgcgtcaccaggagcagagtcggacggtggccgacgtgtgcacattggaggcggaggagggcaccagcagcagagcgggcattttcattttggacgacgctttcccttcaatgagtgcccgggcggcggccatcggaggacacgaattggtgttcacaccggccaaaatgaggtgacatccaacaccactttcgtccctgatttgaaaaatagagaaaaggacaaatcattttccctgactcaaacggtccccggttttccgattgatcgggctcagattttgatcgatgttcgagccaaagcattttccttggcattctcccgatctctgattatatatggtcccgaatcgactttgatctggaaattaccttaatcgttttctgagatttcctcgtccctcgttttttaggatttttatcactatcaaattaatttgcacaaaaataatgtcttgcttcatttctggcatagtgttgtgccaacagtggctgatcgcagaacaatgattcggcgccgaatcagtgaaacgctgcgcattgtgttggccaacgacgcgccggaaacgcacctttgagcggagagaagcaaaaagggagagagagtggggcacaactgatcagagagcaaaaaatgatcagtcgaagtgatcagaatgatgaccgaccaattggtgttcaactttggcacgccaaaatttgccataatttgttttcttcatttttttgtaattttccaaggttcacttccatcttcccggtgtgtacataaaacaataaatatttcacatttttgttaatcattttgaagaaataaaacatgaaatgataatttgtaaattacaaatttgaatttgaattttattttttttaccaaaatattattagatgatttgtatttaatcattgagaaatgaaaattatttctgaaggatttgacgctttatcgtcaattgtttaatcattttctttgaattccacaaattaaaatacgaaaaataattaaatttaattccgattaatttgctccttttccttttcctcatcctcaattaattgtcattcgtttccatttcaagttttggcattccgtcctctgttattttggcgcacattcgtgcggtttgtcgtaacattccgtgcacttcggttccgacaaattgtcgccgcaagtgcttttgcaggccgacttcacgcagctttggcactcgcgcacgcacttaagcccctttttgtcgcacgcggatgaacactcgcggaaaagcgcctttggaattttaataatttattaattaaagaaaatttaaattaaaaaaggaaatccctttaaatcgaattttaaattcaacaattcattaccgaagattggtggagaaactgtgcgaaaatgagagaggccaacagaaaggccaaaatgacaaatttggccattttaatttttattttgaaaaaatattttgctaaaaatgttagtgaaactgtgaaaataaaaaataataggccaattcaatcgctgtaaataaaatggcaaattatgggcggaggacaaaaacaggcgaaaaagagggattatttttaattggcccaaaaatggcgcaacaaaaacacaaaaacagtgaatgaatggacttttgaaaacaactaacaatttgctattaaatgataaaaattgaaaaacgaaaatgaattttttttttttttgccgattttaatcgaattaccaaactcatttttggggccaaatttgcaaaattttttgaaaatgtccaaattatgatggaaaattttgtgggattcgttctctgactatttgtattccttcaaagtgttctttcgtttttgtttatttgtttttctattgtttccttcaattttgccctttcttctcccatttttcatttgcattttcattttttactttttcacttatgtcccaaata

SEQ ID NO: 1015 - DNA, 4320 bp, Heterodera glycines
  unsure (1)..(4320): unsure at all n locations
tcacttatgtcccaaataaacaaacaantcgccaaaattcatttaaggttatattacatacagaaatattaaaatttattttattataccaatgattacaaaaaaatgaacgcgaaatgcaaaaaataaaaatatttggaaataatgtgaaacgatggcaaaaaaggaaggggggaggtgaacaaaaacaatgccttgggagaaagacgggcacggcacaatcaatgggacataaaatgagagtggcataaactgagtaatggacgatcagccaataatctctcccactcatctccattctcttccgatcactgatcatttgttttggttttgtctttttgtaccactaagagatccaccgtaatccatcatcccatacagtagtcagtcgtccccagtcgcctcgttgttgtcaacacttaggcaccgtaaccgctgggtgccgtttttggcgcagcgccgcccgcatacggaggcgagccggcggcagcggactccgcaggttttgcctgttccgccggtgccgaggcggacggttggggctgcgccgaggcttctggagcgggagcagcaccgcttggtccaccggcgttcgcgggtgccggctgctcggctggtgcagcagcatttgccccggccggtgcgggttgtgcggcagcgggcgcggactcagcgccgccataacctgctgcggcagagggtgcggactgagctggtgcggattcggcaggtgccggcgcagcagcggcagctggtgcaggtgcggcttcggcaggtttttgctgctcggctcctccgtaaacagaagctggagcttgggcaggctgagattgagcgggtgcagcggctggcgcttgttcagctacagcaggtgcaggagcagcttcagcgggttttggttgttcaacggcagctggtgcaggtgcagcttcggcaggtttctgctgctcaccagcattggctccgccgtatccgccggctgcgggttgtgctgcagctacaggagcctgttcggccgctgccggtgcgggtgcagcttgggcaggctgagattgagcgggtgaagcggctggcgcttgttcagctacagcaggtgcaggagcagcttcagcgggctttggttgttcaacggcagctggtgcaggtgcagcttcggcaggtttttgctgctcagctcctccgtaaccagcagctggttgtgcggcttgagcaggttgcgctgctggtgctggagctgcctccgctggttttggttgttccgctgcagctggtgcgggtgctgcttcagcaggctgggcttgagattgcgctgcgggtgctggctgttcgccttgagcggggttggcttcactcggcggggcagcagcagaaccctgaaaagtaaaaaatagaaaaattttaaagaattttaatagcctacctccgaagttggtgcactgactgacgggattccagcagatggctgagcatttccgtaaacggcggcacctccggaaggcgcagctgcagctgatgctgaccctgcttcagtcgggctggcattcgaagcgggcggcgcgttttctgccggtttaggcgcctaaagtgaaaaagtatttttgtttttttaatatattcacctcaggcggtgaggctgcgggataagaaacagcttctgatggtttcggttgctctacgggcttttgctcggcagtttccggttttggtccctaacgattaaaggaaataactttcaaaaagtcatgcaaaatattcacttccgatggtgcagctgcacctggtgctgattcagcaggctgggattgtgcgggcgcaggcgcttgttcagccacagcaggtgcgggcgctgactccgctggtttcggctgttccgcggctgctgcgccgtaaccagagcttgcagcaggcgatggggctgcctgttgagcaggtgcagactcagcgggatgttctgcgggttgcgctgcgggtgttggagctgcttccgctggctttggttgctcagctgcagctggtgcaggcgcggattcagcaggttgaggtggagcgggcgctgcggctggcgcttgttcagccgcagcaggtgcaggggcagcctcagcgggttttggctgttcggcagcattcccatatccagcaggcgctgcttgggctggtgcgggttgtgctggagcaggctgagctggtgcgggcacagctgctggctgttcaaccggtgcaggtgcagcttccgcaggtttttgttgttcaccagcgttggctccgccgtatccgccagctgctggttgtgctgcaactgcgggcgcctgttcggccgctgccggtgcgggtgcagcagccggctgttcagctggtgcgggtgctgattgagcaggttgagacgcaggtgctggtgcagccgcttgcgcctgttcagccgctgacggtgcaggggcagattccgcaggttttttctgttcaccagcgttggctgcggcgtatccgccggctgcgggttgtgctgcagatgcaggtgcctgttcggctgttgccggtgcgggtgcagcttgggcaggctgagattgcgcgggtgcagctgctggcgcttgttcagctgctgctggggccgatgctgccgcttctgctggctttgagggctgtgcgcccgcgttcgctcctccgctgtacggtaccgctgctgcttcgccctgttgcggctgtgttgcagtgggggcagcgttcgggctcggctgagcgcctgcctgtgcttgctccggcgggcttaccgggctcggctgctgcacggttggcgcgttttgctcagctggtgccggtgccgcctgatgcgcacccgagggcaccaccggctcgtctccatatgcgttctgctggttggcgcgcttgacgactaaaaatggaaagtttaaagaaaattgctgagaaaaaactgttacaccaacttgatctgttctgcacctcgacagcgagcagtacaacgagcagaacgatggtcgcaaaagctttgttcatttttggaatactttttgaatataaaaaagaaaatctaaatgtgatcagaaatgtcatttgtcggcttattggggatataaattaaaaaacattgtggcaccacaaaaagccgaaataggaatggcataaatcattttttggtttttgggaaagggaaaagcgctaaaaatttgcacaaaaggaggcgatgcgacgcaatgccgcgggcatttgggcaaatgaatggctgctgatcacttgagcgggggcgagtgactgatcagatagaggcgggacttgctcaatgccccgggggaaagagacaaaatttaaattggaaaaacgatcggtagaagaaggcccgaacaaatgtgcttttaaaataagaaatgttgctttttaattgcaattttgatcagaaaagcgattccgtccaaaaagcttcatccgggcgcaataaactgggttaagtattggtttctccgtcgtcccaattcgggcggattatcctcccctccaccgggggatcgtccctatcccaaacatgattgaaatgactggttgttctcctgcagctgtacagtgtttttggagggctttgggtggaatcgtcccaacaagtcatccatcccatcggcagcttttccaatttatccatccgatcacctctcactctctgtgcccccatattcggcggtggcgtccaaccggtcaaccttcgtcgcccccgccgatcacgtctttccatttccagtagcagcggcagacaattgcaaagtgatcgatggattttggtgggatgggatggactggattaagctgctaatgatgatgattatttgggacgaatttgccgcttcttcccatttgtcccatgactgccggggcggggcgaccgacggacggacaccgaaatccgccgccacacaccattcatcggcaggccaaggtgttggctaaattgatggctcacctgctgccgccgccgctgcagcactaagaccaaaatgcgggccaaatcggctgctgatcggtcggtcggccaatcgacggcggtcccagtggccagaccaacccctgccgactgacgacgacgacaggacggacagaggcggggggggggaggagggaaggaggcagagcggacttggattgtgagcattggcggggaccgcggcggtatttattccctcccgccccattcatcaaacccaaagccattaattcattcatttatgcatcattcattgaacccctcggggtttcccttgggtcggctgatgtccccagagggaacaatggaagcggcggcggagggggggggggagaaga

SEQ ID NO: 1016 - DNA, 1001 bp, Heterodera glycines
ggggggggggaggaggagatgaatttgaagaggaagatcagcacggaatgggacgggtcgaaggtggcggggggggggggaagagaaaaaaaaaggtcgatggtgcgggtgcagcgccaccgccgccccttttgtgggggaatggacgggcggacgggcacgggtaatgaatggaataatgcacgaatgaaccagtggatgtgaatggtacgatttgtgggaaagtccgctgaaaggacgccatttatatgggcaggggacggggggaggacgacctcgacgaggagggcgagtgggagcagtagttgttcatgtggggatcaccgggatcagctgctgctgctgctgctgctgctgctgctgagggaggggtgaggcgacgacaacgacctaaatctgatcagccgatcagctgcaggagcagcagcatgcccgagggacggacgggggcatagaacgccgccccacccgccggtccgtccgtcggtccgtcagccgatcagttccctcctccctctctccctccgcgttcgcccactccgttcattgggcgctgtgcgtgatctgatcggatggtgattaagcgatgattatttacgatggcagctgcgaattggcgcatttagcaaaggggacaaacggatctgcgaattcctatcattattagcaaaaaaagtaaaagcgaatgccaaaaatgaggatggaacagaggagacgacgcaccccgcccaagtgatcagccagccgttcctatcgcgctgtccgatcagtgtcgcggcggtgatcagcagtcatcccgagcaccagcagtccgccgatcactcacagggacattcccagagggaggggagagttcttgcttttaccggatcagcatttagctttttgtgatttatttttattgaacccattaaaagggggcagagaaaatcctggaccggtggtggaacagctgagggagacacattttgatcatatgattagatggatcaccaaggtct

SEQ ID NO: 1017 - DNA, 4838 bp, Heterodera glycines
ggaatttgggggatgcttatgcttatgcaatattatttttgtttgtccaatgggtggtggacgacggaccgacgatgggatgggctgacaaaagattggggaagtgaaaatgaggagaaaatgaatcggtcggaagcggacgaacaaaaaaggaagaaaaggagaagaagaatgggcaagggagaagaagaagaagcgcacttttggggaggagaaaaacagcaaaaagtgtccaaaaagagaagggaattaattattattaacaaatgggcaaatacatcacagcaaaacgacaataattaacaaaaagtgctaatttatggctttgttgatcggtggatccctcgtttgatcgaacgaccgatcggttggactctttttttgtttttgattctctcctctattcaatagcatatgcaattggcaagaaaattaaataaattttttatgtaaaattcaatttaatttcaatttttaatttatttcaaaattactctcataatcattcccccacaatatccattacaatacaattagtgttttggtcatttatcccaatttctcgcctttctcccgctcccctaatttgatcagtcaattccaatcggatcaaaagtcacttttggaggtcgttttagttcttttgcggcgatcgccagcaaaaaatgtttgttaattgcagtaatttgtgcgcttttttttgtgctgtgaccacagtgtttttcacactaattaatgagcacaaatggaagaagggtgaatcggtcggcggggcttttggtgacggatcgtaatcgaaattggtcaagcatgaccagcaacaacactcaccgatcattgctgatcagtgtttgatcactttttgcatcaccctatcattgctgatcactagcaatacaaattgataacacctacacggcactgattgttagcattccctcattgaggttcagcgaacggatcgaaaacggcttagcatgatcagctaaccgatcgccgctaatcagctgatcatcgatcagcaatcattcagtttttttgaaccaatcaaaatcagtttgtattctgcgtgtccgccaattcacgtgttggattttgttttcattgagctcagttcgctcggttcgtgatgtaccggtgcgtggcgtacttttgcactgaccgatcattttggcggatcaaatgatcggaaaaccaaaaataataatttgggggatgtgacagagcaatacgacatacatttgtgacttttttcgggataatctcgctaaatccatcggaaaaatgccccagattaacggagaacgggaaaaaatgaatgagtaatatatgaacaaacaacaaaaagcttttttcttggattattttattacaatttaacaaaaatgaatattattttgataaaataaattatgtttctaaagttaattaatttatttattcaaaccaaatttattatttaaattccatttatttgtaaaatttaaaattcacttttttgggcttttattaaatatctttttattaaaaaataattatttatttattccacttaaatgtgatttataaaaaaaaatttcttctaatattctgatgttttaatttttttaaagctatttcacagtgatttcaattcaattaaaataatattttatttgctttttaaaaaatgcaaaattcaaaattatacaacaaaaaatcgagagagatgtaattaaagcactaatttgagtttgtatttgttgaggcacagctgaatgagtttcggcgcggctgtgccgtgccgtggccattcgtcggcaggggcaaattcgccggcgcttggcgctgtccttcctccaccagccgatgccaacagcactcgtcctccatttcgtcgactaattaattagaaaaattatcaattagtaacataattattcaatgtaagaattggctgcactaccgtatcccataatacattctccaacgtttactgtaattcgcagaaagaatgagaaattaaactgaataatgaaaaacggaaaggtaaataactaacaatgtttttgctgtctattgccgttgctaattctaccgtatccgtcagtccctgtgatctcttcaccgttttccttaccgtaatcctcgtcgtccgtcagcggcggtgtgtccacaggcgcctcgttcagaatggccatcatcatctgctgccgatgtagttgttcctgcttctgactgaacagcttggcaagcccgggcgtccgaaaaacgggcgattggttcagccgatggtattgggaagccatgtggggccacgaggacagaaaaaggtcggacgaacgggaggccactgctgcggatgagtgccgggaggaccagcgatgtgttggcgaggagtccaaagccaatgcgacgatgatcacacctatggacaatagccaaatgaagaattaattttggcagccattttcaggactgaaatggccggggtcgaaacagtcagagagaaattgacccgagtacaaaggcaactcgtacaataaaattttttaaataaagcctaagcctaggcccaagcaagtctaagcttagtctaatgcttaggaccaaacctatgctaaagcttaggcctagcctaagccattgtacgagttgtcatgacaccaaaaaaaaacgaaaaagtgagaaagttcacggccaaaaaaaacaatgaaatgatagccaaagagatgatcaaaacgaaatttgaagaatgaaagttaaaacaaagaacggaagaaatgcttaaccccaagactctcgatttatgatgatttccagtggaattaaatgattttggttttatgtgctcacagcaaattgcggtgatcagaatggcaatggacagcagcgagacgatcagcacaatggccaagttcagcgtcagagcgttgcccgtgccgttgttgtgcagcgccggcgggaagcgtccgatagggaacagtgacatcaatgccggtgccatctccgccgacgcgtcttcgaagcgattgggctcgggtgccgcgtcctcatcagtgccggcaccggccaagagaaggcgacgcacttccgcatctgttaaaatgggaagaattggagaggaaagagatttaaaaacaattaaaatttaattggataattaaaatgaaaattgatcaaaaataatcagattgggaagaaaccaatggaaagaaatgatcagataagaaaattaaaacaaaattaaatgatcaaaatgatataattacaatagtgaaaaaagagtgtcctcaagttttattggccagaagataattaaatggttggttaattgcttttaatgatgataatcagcattaattaccctcatttgtcccgatttcgtctccgtttgatgaatgaccgccttgctgattggtactctgagatgacgaactattgttaagctagcgggaaattaagtgccaaattcctaaggtaacaagtcaaaggcacggaagagcatttgccgcgccctaccgtaccctgccgtatactgtacttacagtgtgccgttgtgtgaccagcaaaatgatcagaagagcggtaagcacagtgccgagcagcagcagaacacagcgacggaagcgaaagcgcatccaccaaaagtcgcattcagtggggagccaaaaggaagcgcaataaatgcaaatataaaaaataaaaagcaaaattaaatggcgaatcaatcggaaaggggccaactcagtacggcaaaatttgagtcaatggagcttagaaaaaggtaaagcagcattcttaaaactggctgagacagagttggccagacggagttaccacgtcgtggtaatgtaaatgccaaaaaagtgtggcattatagaaaaaaaatgcctgatgagaagaacttacgacgagtggggctcgtttggtcctggacatgttttgaaatgatttattaatataggtatttagggctgcaacttgaaattttctaaataattctaaaagagtaaacttaaactgtagacggaaaaactaattttatagtaaaaatttgattttttcataagaattttcataaaatggcggaaaatttttacacaaaattcaaattttaattttagacgaattcaattttgaaaaaaatacacaggtcgaattcaatcactaaaagttgcagcccttttctattgctaattgatttaaaactaaaaaacttaaaagttaaaatattttttaattaaataaaattattttgttctttgctttcacaaattttgccccacaaataaataaggcaccgtaaaagtttttgtggccaaacattttgttggccaagaatttttgcccaatcggcggcaccgggcgaacctcgcgttttttcgctgtttcgtgtgaatggcacattaatgggggggggggggcaaaaataataattcattatatgccatggaaatgatagggaaaaggaacagcagcagacaacaaagaacaaagagagagaagagcatctgtcacatacagcttattagcaaagactgggctgtcagcaaaatttgattagcaaaaaatggaaatgagcgaattaattataattaattaatgagtaaatggtgggtgtgactcactgacgcatcatggccattgcaatgtgcaaataattatgtaattaattaattaattatgcattttcgcaattgttgctaatgtgaaagtccgctgcttaaaattgcttttctctttctgctgattggtgcatacattttaaaatgttgtccgattatgaattaccatattcattttcagcattattactttaagaaaaactttgaaagtgtaaaaaagaaaataagaaa

SEQ ID NO: 1018 - DNA, 2647 bp, Heterodera glycines
tataagcgcatgcattttcccccattttggttgttcgctctttttcattcatttcattttatgtttttcatctctctcttcttttgcatttattttatttgtgttttccaaacaataaatatttgtcgccaaactatcggacataacattggcgctttcagcaggatttttttatttcattctaaattattgccagttccgaccgaattctatttaaatataattgctcataattgtccaagcctcctagcccgtaacacatctgtcgggggcgtcaagacgataagtagtccgctgaacgtacccttacaaagaagactgctaggaccacacaagtcaaagcgaccgctgtgtgcatccttagcaggaaagcctctttggtgaaagcacaagttgataagtaaaccgctgtgctcagcatcatcgagcaaattcccatcataaaggctgaggaagcccattcaaatcattcatcctcattccatcatcggatcggactgccaatcaaaacatttcaaaccaaaagttgtggctgaaagtgcattttcatttggcatttattcattcatcattcggtcacttcttttcactctcatttcaattccatcatcataaaaatgagcgacaaattggaaaacctccttcaaaaactgcttacggcgcaagccgatcagcaaacccaatttactcaagctttaaattccttggtcaacaacaatcccgacaaagaacaggcttcattgttctcgacaattaattcccaaatttcagaattcgtgtatgaaccagagaacgaccagacatttcagacatggttcgaacgattcggcgagtacatcacaaccgatggcaagctcctcacggacgcgatgaaggttcgggtggtagtcggtaaattggggagtcaggagtacagcaaatatgtggagcgcatactcccacaaaaaaccggggatttaaattttaatgacaccattaaaaagcttgaagacatcttttgtggcacaaaaagcctcttcgtgcggcgctacgactgtttcagaatggcaaaggcaccgagtcaagcagttttggattttgcctcgcatgtcagtgccgaatgcgagaagtcaaagatgcaattgaccaaagaagagatgaaggcgttcattttcgtcagcggcctggacgagggagaccgtgacctccgcgaacgatgtttgcgcatgatggaagaggcacgacaacgcaacgcgaccatcacattcgcaagtttgattgaggaatgccgatcaattctttcattacgcagcacagcagctgccttttcccaatcatcatctttaggcgctcaaacaaattcaatttcagtcaggccacagcaaattacagagcgttcgagcagaccagcatcgaagggacagaaccgaacattcaatcatcgttccccttccgttcaatcacacaggtccgatcaacagcgaaaaccgccaccgccattcccgtgcaaatggtgcaaacagatgcattggaacaacgagtgcagaaatcggaacaaatgcacaaaatgcggaaaattcggacacaattcgtcgacatgccgatcgcgcaattattcaaatgatcggaaattcaaccgcggttcgatgacggtaatgtctgtgcatgattcgagcgagccatggatcgacattcattgtaagatcaatgcgtatccggtcaaactcatggccgactcgggatccaaaatggcagtcattcagacttgcctctgggaggaaattgggaaacccccacttaatcattgcacagctaatggcacatcatattcaggcgatgaatttgaaatttcagggtggttcaattgtcaggtcacttatggtgacatcacgctcaccttaaaatgttttgtcacgcccaaaggtgtgatgaatttatttggtttgccgtggattcgtgcgttcgaaacggcactccaacggccaattgcgaccactttgccaatgcccttgccaacagcagcatcacatcaaagcatggcgattccatcatcaacagaattggccgacctactcaaacaaaatttcccagatgtttttagttcagagttgggacattgcaccaaaatgagggctcatttgtatttgaagccaggcgcacagccagtattctgcaggcctaggccagtaccgcatggagcacgagatgctgtcgacgcggagttggaccgtttgttaaaaatcggtgcaatcaaaccggtggatttcagtaaatgggccgcacccattgtggcggtcaaaaagaaaagcggagacattcgggtctgtattgatttctcaacaggtttgaacgacaggctcgagctcaaccgccatccgctgcctcggcccgatgacattttcaatttaatccgtggcgccactgtcttcagtctgatcgacttcaaggacgcctacctacagatcgaattggactacgagtcgaagcagttagtatgtttaaacacacatcgtggtctgtttcaatttcaaagacttccatttggcattaaatctgctccatcaatttttcagaaattgacagatcagctcatcgcaggcctgcccgatgttcatgaataatggacgacttcattgtagcatctgcgtctgttcataaggactctaga

SEQ ID NO: 1019 - DNA, 13045 bp, Heterodera glycines
attaatttttgcagtgcaaaaattccatcgcatgatttatggccgacagttcacattgctcactgatcataagccattaatttcaatttttggttcaaaaggtggaattcccatttacacgggttccagacttcagcgttgggcactcattctcctgaactacgacttcaaaatcaaatacatttcgactaaagagtttggtaaagttgacatgttgtcgcgactaattgccaaacagcgagaagacgacggagatgaccatgttattgccaacatcaatcagtttcccatttcagaagaggaggagcaactcgatttgtgtgccaacgcagtcgattacattttccaggcaaacattgaacagttaccggtcacagcattggaagtggccgaagcaacgaaacaagacgaagtcctgagcgaagtctcacagttttgccgcaacgaatggccaaggaaagttcaatccccattgattgaaccatattttacgcatcgttcgaaaatctccgaaattcagggatgtttgcatttcggggacagagtcatcattccggcaaaactccgtcagcgcattctcacggcacttcatttttcccacccgggaatcgtccgaatgaaagcgctggcacggcaattcgtctattggccacggattaatttggacattgaacgttggtcaagaaattgtgccgattgttcccttgcagcgaaaatgccagcaaaagtcccacttcaaccatggccgacatcgcatgaagtcttcgaacgacttcacatggactttgcaggaccgtgtgccgatggaaacaaatatttgatcatcatcgacgcgtacagccgttggccggaagtgatcaaaatgcattcaacgacagcacgatttgtcattgatcagtttgtttggttattctcacggtatggatatccaaaacaaatcgtaactgataatggtccaccattaaagtcatcaaaaatttttgatttttgcagaaaacatggcatcgaacaggtttttgcaccgccatatcatcccatgttaaatggacgagcggaacgttttgtcgacaccttcaagcgacaaatggcaaaatgttcaaggacggattcaaattgggtgcaaaactccttattggcataccggagcacaccaagcgacattctcagcggaaaaacaccggctgaacttttcttagggcgtaaaataagaacaattttttccctattaaagccaaaacaggagtcgcaacatcaacaaccgaggaccgatcacaaaacgcagcaaatggaggcacaattcaacaagaagcacaacacacatgagaggatcttcaaagtcggagacaaagtgttgttcatcaattaccgagacaacaagaaattttggttgtttggtaaaatcgtaagagggtcaggggtcatgtggcggattgaggcgccatgtctgagtgccatagtaaccaggcactcgaatcaaatacgacttttcaatcccatcccatacaaggaaaccgatcagattcagcactctccgcagcgtggtcaagcacagaaccctcccgaacaaattcaagtggagcgcgagatcaccccgccgagagcaccgaaaaaggtccgattcgccgatgaacagcctcatcatcatgaacagccagctgaagaagagcaaattcaagagacaccgaatctgaggcgttcgacccgcgtcagaaaagccccggaccgtttagatctttaaaagggggaggtgttgggtatgactaaagtccatttcattcccttccttcttttattgcatttctctatcctttattattgattgtgtctgaccatttcattcgcatataagcgcatgcattttcccccattttggttgttcgctctcattcattcatttcattttatgtttttcatctctctcttctttcgcatttattttatttgtgttttccaaacaataaatatttgtcgccaaactatcggacataacaaaatgaaaatggggaaatggagggggaaataactttggcatatacaagttggcctgaagccaatttaatttcattaacatcattggttccgacaaatttaataaaagatcactgggaagtacacacaaatgaatttggaaaaagatacattacggcatggctttttgggataagttttgaattatttttgagcgatgagcctgacagggttgtcctaggaattcaggcacaattttcaataaatgacgaatggcactcaaaaactgagggggaaagtgaaacatattgggaacaattgggtgagattgacggacgaatcctcgaaattcagagaattcccgacataaccattacttattccgaaaacccattaataattgattatgaatttgatcaaaatgatgatcagaataattcaccgacaattaatgttatttccgaaggggatttattcatgagcatattggacataaatacagaaacagagaaacaaaaagaaaaatgtgcggagatttcaaaaaataaaacagaattaaataaaaaggccgaaaacccaaaaaaaattgatcaaaattttgctgaacatacatcaaatttagtcatggattcaccaaaagcgcctgaagtggtgccgttcgaggatgaacagttaagtgcggaggaaaaacaaattttgaatgatattgaagtgctgaaaacgaaactggaagagacaaacaagcgaaaaagtgaactgaaaaagcaaaatgaggaaaaagagaagataaaacaagtggacgaggtcatattagaagatgatgaagaggaggaggaagaggaccaaacgcccaaaatgagtaaaaagccgcggttggacccggttgtggcaaaatgtgttgtggaaaaagtcataaatgaaaagtgggaaggaaacgatttggtggtaatggatccaagaggaaagggatcaatggaagagcaaaatgatgaagaaagccggaggaaggaagatttggtgcgaattggccgaagaaatgatcacaatgaggcctggcgagagtttctgaccacaacgacttccttggacagagaaaaggaagagcgattaaaagcaatgggcaaaattggtttgggggaaaatggccgaagaatggcagagaaaagtatgagagcagcagagaaaacaatttttgaaagtccgtgcttacagccggaggggatgagaaggaatgtgattaatgaattggagagccaagaggagcgagagcgaaggaagcgtttcgccacccggactcctccgagtggccaagcatttgcaaattcggtttgggcggaaaaagattggaaaagggatgatgagggggaaaaggatgaaaaagaagagcctgtcttcaccaaaataataaaaattcaacggaagttaaaagaagcaaatgaagaattaaaaatgctgcaaaagagataatgaatgtgtttgtaaaaatgtgtgaaaaataacttaatgaatgtgaacagatcgccaaaagtgtgttcaaatattatcttctcacatgccccgtccattgaagaattggtccccaattctgatcagtttccccgggctcctctgatgcgacgtccccggcgcatggcggcgatggcagtgcttttcattgctgatctgttgaaattctgaaatggaaaaaaggaaaggagggatggatttgcctttggactcaaaatcaaatgtgccgttgtcagtcatgggaatgccattctgatcaaaacaaattaaaagctgttccagccatggggttcccattctggttaaataacaaatcaaattttaatgaaggcaaaatgtagttttgcagcacagtacaaattaaaagaaaggggaattgatctcaatcgaagatggcatgttttgggatgatcgtcggttggcattaatgttcacacatatttttcacacacatacaaatttaatgagaataaaagaaatacataaatgaggtaaattaagcaattatttagatcaaaattaagtcactcgatgtgaataaaataaataatatcaaatgaataaaatggggtctgggaggtcatgtcagaagttgccaaattgcacatttttccctcactcgtacttccttctcttgtattgggccagttgttcgtttccggtccttttcatcggctgctctcgttcgaaataaaaatttggccttcctgtcgggaaattttttattcctcccgaattcggatttgcatttgtcagccgtccgaatttttggaactgtggacgcttcctgaagcctttcccatttcgtcccgacttttcggcacttccatttcaaacgacaccttttttgtcggcactttaaactcaaatacttctgtcaggtgcttcaacatggcagttacgccaataaattttaagcgccctttttcgtcgacgcatcgcttttcttcctgtcttccccacatagtcacttccaagattgagcgaaaccttttcattaagcataagtctctctccggaacgcagtttgtcagcatttccaaaaattcattatgcttaacagccttaatgcgatggaacggtggtgggacgacccaaatttttaggccaaattgtccgatgtgtgatagaattttttaattgcttctttacaccattccattggcgtttccatgtccaaatcggctgttccaacacaaataatgacttcattcacttcttcaccaaatgccacttttgccaatacgtcgcttaatcccatgcagttatcagcctggattaattcggcatcgcatctttttccgagttcctccgccaatttgtctccagcaagaacaaatggggatcggataattcggtgtaagccatgaattttgattgagcggatgttttcgaaagcgcgggcaatttcaggcccaaatttttccaatggccccggagggatttcgaaaataattggcttgaattttgagtttttcaactcaggaaacgctctgttgcagttgttcagccatttttctagcgtcccctcaattcctccgactttgtttttcggatcggccacaaatttgatgagtgccactgggtctctgtctctttttgccgcccattcccgtagttgcccgtggagcacatccgaagcgaagtgaagacagatcagttcgctgagtttggaaattggcagacggcgcagcgggtcattgtttggcaattctgtgaaaattttgcccaacataatgcggcaacagttcgaatgctcgtctccctggcactccgaaagccaattcactgtgtccatttgcacgagacctgttgaaaatgaaaagaatttctgtgaaatgatcaaatttatttttatttgatcactccgtttttcagacaaccaattctcaaacactttctttttctgttgtcgtggcaaaaagactttatcgggaaattcttttggaactcgtgttaagttttctaatgggattttcattggttcagcttctgctttatcgattggtacaacccaagcggaagttggagaaagttgggttattttgtacggaccgtaatatttccattctagttttttgtgttctccttgtgcttttggtctaaagaaaaccattactttttcgtccaacgaatatttgttaggattgacattcggttttgcgttaaagtgcactttttgtgcttctcgtgccttcaccatattttgtcgtgcttctttcaaaatatcttcaaaattttcacgaaaatgttggaggtaatcgtcatgatcaatcagatatgccggatttggtctttttggggcggtaagatttgtcggaaaattgaccgttcttccgaaaaagagagtaaatggtgggaaaccagtggattcattaggagtaatgttgtaagaaaaaacaacaaatcccattcgtgtgtcccattcccatggtgatgctacacattttctcgtcatttcaacaattgaaccattcaaacgctcacacattccattacaagccggatcataccccgatgttgtggaccgcgcaatcagcaatttttccgaaatttctttgagagtttcattaacaaattcttttcccaaatcagaatgaatacgttagggtgcaccaaattttaaaatccatttttcgacaaattcttttgcaactgtttcagcagttttattcggtactgggacaacttcagcaaatctcgtaaagtgatcaatcattactaagcaatatttattgccattgcgagttggaccaagcttcaaaatatccatgcaaaccaattcggaaggtcttgttgtgacaatagggtttaagcccgggtgattctttttcggaattcggttatgcccacagactctacaacttcttgcccatcggtggcaatccgaatacatatttggccagaaaaaatataatgcttttatgcgcttgaacatttttttttccactctggtggctggcacacgacccagcgtgatgttcgaagagaattgcttctcgaaattttaaagggacaaaaatttcggtttcaaatttttcattcaaatgataaaggaccccatcttccaccgtatatttttcaagaacacttagcagtttttgtcgaagtttcggatctgctgggaggcatctttgatccaaaaacttaaaaatgaaattcaattctgacttttcaacttcggctgtccattgatcttttgaaacattttcaggaaaattaatttttttctgcgtgatcactgtcaaaattttcaccgattcttcttccttttttaaaaactgcaaatcattgggaaatgccctcgaaagagcatcggcgacgtaattcgtttttcctggactataaatcacttccaactgaaacggtgcacctaattccataatccatcgatcgactctcgcgtttccaaccgaattttttgtccgaaacatcgctggaagtgctttgtgatcggttacaacaacggttggcaaccaagcgatgtaatgcttaaattttgttgtcgcaaatttaattccaaggcattctaggacagttgggccgtatcttctctccgcatcgctgcaacgtcgggacgcataacaaactggacgcatctgaccagaaatgtctttttggcaaaggactgctccaagcccatttgcactagcatccgtataaacatggaagcgaaaattcgcatctttttgtgccatttcaaaatttggatattttaaaacaacatcatcaacaataatttctttaaagtcagaaaagcattttccgcagaatcattccactccaactttttgccatcttcagactttttcatcaaccgatttaagggaccagcaattttcgcaaaatctttgatgaattttcggtgccaatttaacattccaacaaatctttgcagctcttttacagtcttcggtctaggaaagtccaaaattggttggaatttttcgagatccttcttaaggccttcttttgttaggatatgtcccaaaaatggtatcgaattttgtgcaaatttgcattttttcgctttaacctgtaatccaaactgcgacaatctttcaaagactttttctaaatcgtgcatgtgttctttaaacgatgaactcgccaccaaaatatcgtccaaatacacaaacacacttttgttcaccaaaccttcaagcactttgttcataaccctttgaaaagttgcgggtgcgttgcacagaccaaaaggcatcaccacaaattcaaacaggccactcgggacagcaaatgctgttttagggacgtcttcgggatggactttgatttgccaatacccacttactaggtcaagacttgagaaaattttctttctccaagatacattagcatttcttcgatgtttgggattgggtagctgtctttacgagttattgcatttaacttccgataatcaacacacattcgcaaactcccatcctttttattcattaatacgaccggtgctgcccatggactgtttgaaggtcttatgacacctttaccgagatattcctccaacatttccgaaattttggtcctaattccaatggtatgggacgtggtgaacattttataggagctgcgtcgcccgtatcaattttatgctcaaccaaatttgtttgtgttagctcggactcatccaaaatcaagattttttcaaattttttccaaatttcctccattgaattttcttcagctttttccagctggcccaaattcatttttagtaccgacaacaactcagaaaaccggtcttcgtttccgttttttcttaagcagaaaaccgtatgttttggctgacaaattccatcaaattcatttgggaggatttcagtaccaggctcaaaaattgtctctaccatttctgcttttgcgattttttcaccaatttccaaagtcagcatttttggtgatttattgtgtaccaaaattttgacgaaacctttttcctccgcttcgacaatgcatggctcgacgaatgttccaccacttttgaccggcgtgttttccttctccgtctcttcgatcactcccaattttttcagtgccgcctcttcgtcttttccactcatttttaaaaccggctcattctgttgctgttcttcgtcgtagtccagcaaggactcggtgtccatttgatccataattagaaattttttggtttctaaacaatggaaattgttaatgaaagttcgaacaatttgtgatgaaaatggcggaatataatgtggttcaaagactttgacttcacgcatttctccctttccattgctcgttttctttgatggaaaattgaggatttcttttgtcaaagaatttccaaaataaaaacccaaattgtgcaaagccgtagtgcccaaaattaggtcataagaaaaggaatcacgggttattagacacggtatttggcattcaactgttttcatttgaatgggaacattaaccacaccaattacgtcgatttttgtgtcggtaaatgacgaaacagcaaaaggcaatttgcttttcccggtgtttgggctaaatccccaatctagcaaatttattcccttttctttcaccaacatatgcaaaaaaattgggtttacaatggcagtttcagcccctgagtcggaaagtgcgtctgccgaatttccaacgacagataagttcaaaaccaaacactccgaaatttgaggaaaggcgggattttctgccggaaattggtttgcgtgcaatgtcagttcattgaaaaattttacgtgttccgccataccgagctgtcgaacattaactgaactactttctttttctgtttcgccttttttaagaaaaattgtgtttgcacttcttgggtttgctctttccgattcttgttcggggggattagcgttcaaaggcattgcattgccaccggtgaagcgaattggctgattatttctccaattttggctttggttttgagtttggttttgatttgggaaatttcttcgattcccccaaaaatttccgtaattttgttgcctgttctggaattgagtgttcgagtcggtccggttccaatttctattgtgaaacggttgattttgctgcgtccgtcctgatttcgactcgatttttgcccggactcgttctgggtctgccaaatgtatgcgattggccaacattaacaattcgtcgaatgtttgtcccggcctgctttggcactccaaaaatctcgccaaatcgccatcatttatgttcatcacaaaaaatttcttggcaatttcgtccaattgggtttcattgagccctgtgtatgagcattttaccagacgataaattttctcaccaaaactcattaaatcttcatttggtgtgcgttttccgaattgggtcagctcggtaaaagctgatgcttcgcggcaatctgtttccctcaaagtcgaagcgatctcggcttttaaaattttgaatgggggattgggaccaaattttgaaagggcgatgttcagtgctttcagtgcttttcccctcaaccttgttttcaaaacatttacttgcttttcgggttcccaatcagccgtcagcgtctcaaccgtcaggaaaaaatcatgaattttgtcgcgaccctcagtcccttcaattgttggaatctctctcaaaatacttgcgtattgtgtggccaatgtcatccggtacatttgaagggccaaattttcactcattctagggaaccccacaaaattttcaccaaaatttctttcccccattctcatttggtcaatttcgggatgttgttcgtgatttcggtaaaaatcatttctccgttctctttcttcggctaaccggtcaacccttcgatgttcattgcctctttggtcatacatttcacgcctcaaaaaatttccatccgctaattcgtttctctgctcaatttgacgcggcctctgtccattccggtctccttctctttgcacttcgcggcctcgcaacaaagaaaattcacccaaatttgccctcctatccattaattcttgtccgcgttgattttccaggcgttcaactctccgtgcttcgtcagcccggtttctcaaaacactaccatacgaaatgtgcggactcgaaagattttgcatgtttagccggccataattttcattaatcgatgtcgaatgtgctgcaggtctaccaaaaatttctccctcgttggcatctgctcggcccaatctcactctttccgggatccacaaagccatttctcggccaaaattttcaaactctcattcctattcactaaaactggataagtgcggttttgattttcagccatttcattcacattttgctgggcgtttgcatttacagcctgagggcggtctctttccaatctccgaatttcctgacttatagcctcatcaaattcattctcaatttctgcccaatttcgccgattttgccggtctctcaaatcgtaccgtctctcatccggcacttgtcctccatcattctctcttgcatttaaaccttgacgccttcccgacatcctcggatcaaatgtgcttcttgtcgcttcggtacacagttggcgtttcccgaatgactggtgcagtccgagtgtcgcgccaggagcgccaagtcagctttctcgggggttcgcagcagggattttgggggaaagtcagagtcaaatacggcgagaaaaacgatcggtgaattcgaagaaatgtcaataaagttaaaaccttcactcagccaccgaatcacaaatttgatgataaatatttattttaaagagagaggaaatttcaatataattataaaatcggagagaaaaaactaataacgtgaagtgaaagataatgaatgtgtgtgtaaaaatgtgtgaaaaataacttaatgaatgtgaacagatcgccaaaagtgtgttcaaatattatcttctcacaattcaagtaatttaaattgttttaaaaatgaacaattttggtgatttttatacaaatttttataaaagtggaaatagaaatatttaaattgcttaagcttaaaaaattctactaactaaaggaaaattgtaattcagaaaaaataactttgtataaaaaacaaaaaatagtcaaaaaatctcacgcggcaaaaactgaagatagacgtgattagcaatattcactttaaaattaattaataggtttgaaatgtaaattaaattaatttttaacagtttcttcatcttcaattaataattctgcaatccacaattgcggacccactaaaagccggcaatttgagcaaaatgaaattatgttcagcccggccaaaaactattctgtacaatcaatttcaaattttattatttaaatttgaaattaaagaaagaattttttgaataataaaatgaagtcaaaaagaaaagttggtcggacaaagatgaaacatttcagtaatctgatcacattgacttaaaagtccttcacttagtttaataaattaacaattcgtttttctcaccccaaaaggtcggataattatcctaacatatttaatttactttttttttgattatttcttattctcaattttttttatacataattaacaataagccagtccgactcggtctttgcgatgtgattcattttccattccaccgatggcccactaattccatcccacttttccatcccaacacattcgtgtttatgaaaataataaaatgcatagaataatataataaataaatgtttaaaaatattcagaaatagttcactggaatgccaaaaatggaataataatcttcgacttgtacggatcaacaacttgatgaatgtatcggaaacctggtatgtatatgccaatagtgtcactgatcaaaaatgcgttgatcaagtattcatggttaatgagtttattagtgacaaatggtgaacaataaataaaacgaagtctacaatagatttaatgaactgctttgcatgaaatgcgtgcggattggcaattgacgcaaaagaaggccggcaatgtcgccacatgtgcacggtcccatgttgtgccgatcatttcgagttctcatgctgcacgacagagcaggtcgtccccccccccgcgaaattttttttaaatttttcaaaaattataagtaaaatttttttgaaaattttttcttataaatttttgggcaaaatctgttaacagattgcattaaaaattacaaaaattttccagacggcacctatcggcgctgccggactcccatgtgttgttccccaaatgtttttggaaaaagatcgccaaaagcggttaaaaggtcgtcgccatatggctcaaaatcccaaaaaatggcctttatagaaaaaaatgagtttcaaagcaaatcccgtgtgatcccgaaaaatatttgggattgatcgggattcggtcgggatcccgggtatctgtcccggttgcttttcaaaaatctacgggatagatcggtatcgggattcgatcgggatcccagttattatctgtccggatcgcttttcaaaaatcttcgggattatcaggaccgggattcgttcgggataccaccgaccccagctgtctggtccctaggggggggggg

SEQ ID NO: 1020 - DNA, 1257 bp, Heterodera glycines
cgtcggcaacgatgcgggcgggggaggaaggacgacggagtattggccacgcattttacgcttttggccacccccgaaggcagagaagcagggcaaaagcaatcaatttgcgtgccaatgaaaggcacggagaaaaatgtacagaaaagaaagggcgataagcctaaagaggggaatagagacaatgcaaactgaactgtgttaaagaaaaagaggatcgcgaaacattgtgaagaaagagtaaaaaaatagcattgcttacagacaattagaatgggacgagaaattaggtgggctggccgacagacagttagagcttatgagagagtgttgcaatgcgagagggtgggggagagtgcttgagtgagtccgtcagagccgaaagagtgcttaaaaaggggtgagattatctgctgctgctgaatgccaatgcgggggcgtaccccccgcccagcaaggctaagagaaagcgcattccatgcgccaatttggggcgcaatggacacgcggcagcggcggcagcgggtggcacaacaaagagaacaaggaaaaaggggagggggcggagaagaagcaatttcctccactcggcgggcgaaagcggtgcaaaaagcgacttgggatgggcagcccaacgccgccggaaggggtaaagcgggggacaacgaccgacggacgaaaccattgattggcttttcggcggtaccgggggcgactgtgacagacaatgaatgaatggtggcactaatgaatggggcggagagatggactgctggcccgaggcattagcggtctaatgggccgaaggattggctgccgaatggccaaagtgattaattagtggcaccgctacttcacttgttaggcataaggtcaatgatcacaatgatcagagagagtccaacaggtgaaaaacatttgatggcagcagcacagccccaagccaagtgatgccctgagggaacgctttaatgaggcgggcgggggacgccgcaggcaaaaagaaacccgtgacgacaccagaacaaagaccggcatcatcaaagcgggcagcagatagaccggagaaggagcagacaaagtgcattcccagccctttggcatttatatttggggtgcattccttcgtctcccccccccaatccctcgggccaaatttcgttagcctcaggggaaaagacaatttatcaaaacagataaaagaaagaggaagggggggggggggggattttgaggtttgctgaaaagcaaagaaag

SEQ ID NO: 1021 - DNA, 6693 bp, Heterodera glycines
  unsure (1)..(6693): unsure at all n locations
ttcccttttttattttcaaatgaatataattttatttttaaatttgctttctcattgaattgccattttgtgcagtgtttcgcccccggcggcggcgctttgtgcccaaatgttttggttggttggcattcaaatggcggcacaacaacaaaaggccaacagtgcgttcaagaagaagctgaaggacaatttgcgcaaaaagatggacgagaaaatcaaaagggacttcgagaagggatggttttacaatgtaaagctgagctcggaagtgacggagcgggaaaagctgcgcaattggtgggctaatggggcaacaattattgaagtgattaaccggggaacttaatatgtgttaattattgaggactgataattatgaccagggttgccaactcaaaattttcaaaatcaacatttaaaaaccaacatttggggtcaaaaagtacctttttggaaatttttccaaatgaaaaacaataaaaaatgttttttttttgcggcgtaatttttcaaaaaaaaaaaacaacttatttttgggaacaggggaccggcgatgttgataggctaacactgtttatgatcataattaattgatggagaattgtaattatgctaaacctattaaaaaaatattattattgttttttcattttaggataattgatccaaatatctgacaatgaaaatggaatcgatcgtcgcactttttaatttttgctcctaaaattgtacttttaattttgttaataaacaaaagaattacaagcatttcatcttcaatatgtagacaatttttttgtggaattttacatgacaaaaagaaagcttttatatgtganaatttgcccacattggnnagacaattgataagaanattggcaaaatgttttttgggttttgttttgtcactttgaattcgttgaaaatgggcgacacattgcttaattgggaaagacatatacatttggaaataaaaggggcaaataaaagcgaaaaagcgaaaaaagggggaaatggtcagcagatgccattcccgcccgaatgctgatttttacaattccgatctcgagaaagcaaagactgggcaatgatgagatttttaggcaataaaggcataaattagccaattgtgaaaagaaatatttacttttcttatttctgtgccaatttttgcgtttccgtgcctaaaaatctcatccggacattgcatcgtttgtcggccttttgtccgttcgctgctaatccctacaaatggtcgaatttgaatgaaagcacatctctcagtgggaactcttccaacgcttcttgtctccatctcgtccactgttgctcagttctgccccgcttcttcggtccccgctccatcagaaacatttgtacataagtccctccggggacacgtcgaaatgagaggcgttcattggtttggccattgtccaacacgaaattgtcaagggcgaggccatcgaaagcatcgaaattgggttttaagccagggttgccagcggataagctcaacttcaagcacacagagaagctgataagtccaaggaaataatgcgaaatccaaaaaatattcaaaatttgcctccgatccattggaccaatttccaattgtgtgcttttggttggcatccaagaaggaaaagcaaccctgtttaaaaagagagatttgttcgaacacaaccaaaaagttgaccgatgccgtggcattaaaaaacaactgaaaatgagaaaatttgaagtctccgaaaaaggctaccgttttgagttcgtccaccacagcgggaagaagttgacgaactttgatcactttgggctgcccatcggagcgtgccgtgtgcagccatttggacaagggatggagaggcgaagaccaaatgcgatcggacttgacataagcgaaccaatcggcgatataaatgatcagtcggatagtggtcgaccattggcacttaaatttccatttttgatttaaaaatgggcatttacgtcgtttgagaaaaatttcgggtaaaaatcggaattttgccgtttttgcattgttttaattggcaattaattgactttaccgttgggctggtggacggaaacatttcctgccaactttcataacaagcaaattgaattttgttgatctcgcaatcgctgccgcactttgtcggttttatcaaaggcaaaatttggctgacaaaaaacgcgtggaggggatgagaattggccgtgtcgtttaattcgtaagtctcaaatttgcgtacaccgcacaaactcaatgtgacgtcggcggattgtaaaaggcggcgattgttgcggagaaaggcaatgacattgctctcgaattccctgtgatttgaaattgcccattgctgatacgataatccaggatttaaccaatatttaaataattaaaataaaattaaattaatcacataataattgtatttaaattttcccattagggttgccgtctgaatcccgatgttcttcccgtcccgaatccctcggccggcaattttctcgaccgagcccggaaaccctgaccctcattagtcgacaaaaaattctgagttcgctaagaacagggcaattcgtgtcccaattttccggcttcaacttactctatgcaaatcgttctaaagccgcggataaagtgcggcattgtcactgtcggcaatttcgttgccgacgagagggccagaggaggacgaagcggaatattggtgttcaacgccgacggtacggcgagggaactgtcagaggatgaggaaaatgagtgggccggggggatcttctgccacccccccccccccgcccaaccgcgggacccgaacaaaggagggaagaagcgccgaggaggacggcgctgatcgaaaattccggaggggacattcccggataaaggccattgccgtggtgaacgatccattttttaaatttgtcgacattttcacccctcttatttctctctttatttaaacttttcatttcctttcacttttgctcatttacataatgttttccttcaacttcaccatttgccttttctttccaatttttttgcccattcacatctgcctccgattttgattcctttgttcacactttctccgatcgccatttccattgggccgtttttgcattcatctcattttttccctttgtttggcatttttctccccgccgatttttgtacccttcggcgtcgctcttttgcatcttaatctttgcccccccccaggggaaattgtttttggtacttaagtattcgattatcgtctatttggcacacacacattcacctcttgctcttcacttttttcactcctcaccatctttttctttttgctgaatcattcccaatttttgaccccctcaataatccttatcgcccttcccttcctccaattttcaccatataatccatcaacatctcgcatataatcatccaccaatttttgaccattttatcatcatcatcaccaataaacattttgtcggaaaagtgttgaaagggtcagagggcaaaaaaggggggaaaattcgctcgggaacgaagtgaccaaggggagccaaagccccgagaatcgaagcgggggacaatcccccgcagagcagcagcaaacaaggacgggagccagttcccggcggttgacgcagttcgcggccggaagtccaactcttctcccgaacctcaaccgggagcgccggcagctcttcaaaaagtcggtggtgccgttacagcaacaaccgcaaaccccatcttgtttgtcctccccaccccctccccagttcactcccttgggcacggacccaacggcagcagtagcagtttcaggaaattgagtgaattgggcccgagggacgggagagaaactcccgcgcacagaccccctagccgtcagcgccggccgagtttctttgccacaaacaatttggtgccgttagcagggggaccagcaacaacaccccggtcgcaaaggaccagcacaaccaccagcaacagcacttcggtcgccgaggaccaacacaacgcatttgaacaaaaatggagcgacacgacgacgaccaattcaacgaaaacgcgaatcagggggatcctcccccctctgatcagcaggacgagaggcgagcgatcggagctcagccagctaagcccaagacaatcttggaagcgcacggacttgggacaagccaaccgggtgttacacccgccgtgacgaagaatttgcgtagcggactaatcgcagtgcgatcggcacgggaccaaatcgaaagagcagcgggcactcttgccgcgcgaatcgtcgacgcgcgggagctgatggacgacgattacacaaggggcgaagcgctcgaacacgctgctcggatgatggcaatggagcgggggttcggagaagtcaagcgaatttttgaagggcattttgagaagggcatagccgaagcgggtgcggcacctgatgaacggcaggacttcttctatgattccattgccgcccctttgccagctgcaacgaaataccttcgactgcgggagcacccaactcccgccgaactccttcaaattgcggccgagcacctcggggatctgcgagcgatgcggcaaacattcgaggacgaagaaagggagagcatctctcgatcgagcagatctgtcgaaaccgagaacaatcaggcggaggaagaactcccacgtgccatgccacgacggagcatgcaagagtgggagacatcgttcagagaagcttatgttcgacagcatgacgaactgttcggccagcagcaaccattggtcaaccaagcggaacgggtggccacacccgtaatgtcaaacatggccgcgcttatccaacgacgctcaaatgctccctcggtggccagtgttcgtgtgaacaatccggtcagggagtggatggcaaggaaccaaggggtcgggaacggacccccggcacaggcccaacaaccaacacaagcgcaacgcccgctacaggccgtacagcaacgcctcgaacaacttacgctcaacgatccaagagccaatttccctcgggcagcacctcatttccatgtccgacgggaggaacctcccactcgggaccgtacccgagctcagggggtatttccttcacggcctcatcgcccagacgaatcagctggcatgttaacaacttttgaagcagtgcgcctacaaccgccgacattttcggggaggccggaggattggaccactttttgggcctacttccaacgggccgtggacgacaagcaaattcccggcttcgagaagcagcttcatctgctgcggtgcttaaaagaaggatcgccggcacggagagcggtggaagtgtacccaccgtcggatggcaattatccggttgtggtgcagctgctgaaggaacgatttggggacacgaacgacttgcaaagagcgatccgagctcagcttctacacttgcagccagcaaaggacaacgtgtcgagcttgacggcagtgatcgacgaattcgagagaggagtgtgccagctcgaacaactgggagcgaacgtggacgacgagtcgttcggcccgttgttggaggccaaactcccggtccacatcctcacagaattgaggatccgggagagtacgatgggagcaaactggacagtgcgagagtttcggaaagcggtgggagtgcaagtcaagtgcatgagggccgccgaatccgcgttggcagcaatgaaaggacccgaacgccgacatgagcagcgatcggagcccgagcgaggcggacggaacgcccgaacaggacaaggattccagcgggcatttatgatcagagatcagcccccggagaaacgaacgtcgaacgaagcaaccaccaggaccgaagtcgcgatgccacccattcgaccaacgaatccgaatcgtgtgccgctcgggagttactcccgaccgatgggagcgcattcccaagcacaggatggacagggaggacaaccccgacaagggtgctcgttgtgtggacaaacgggacaccaaccaagccggtgtggcaaatatgggtcagcacaagccaaaaggaggagactgatcgagcaacgccgttgtctcaaatgcctgggatccgatcacaccgcgcagcagtgtacacgaaaaacagcctgccggacgtgcgaacaaatggatcaccactggctgatatgctggaagggggagagaaggaacgaaccccctagccactcgagaacggaagatgcacaacaaaatcggacgatgatcattcgggaaattgaagcgaagcacttgcgcactccccctcccaccgagtccagcaaggacgggatgggggctaaaggggaggacccacctttgctcgacggagagcagagagcattcaccaccgtgggccagcaactcccggcctatttaatggtgtgcccggtggtggtggcatcggaggatggcatgacagaatgcaataccaatcttcttctcgacccagccagccatggcgattatggggatgcggctctgatcaagcagctgggcaccgagaaagtcgggagtgaccagctggcaatccaagtgttcggtggaaagaaagtgaagctacaatcgggaagatacaaagtgaagctcaaacggctggacggagaatgggaaagtattgagctttctgaggtgccaacgatttgcactccaatcaggac

SEQ ID NO: 1022 - DNA, 4953 bp, Heterodera glycines
tcggcactgtgatttgcggggagcagattcagaccacgacgggagttactcccgattcgtcggtattcgcgatcccccccatgtggggaggacgagcgggatcaaatgccatcggtcaaagcaatcgaccagttttggtcggttgaagcgatcggaattcgcgacgacccaacacaagacgccgacacggaggcgatcatccaattcgaacgatcagtgcggcaacacgacgacggacggtacagcattcggctcccatggcgggaggaacatcccgagctgccctccaattatgcggtggcttatcgacgactgatcgggctactccagcggcttcagaggacgcccggagtcctcgagcagtaccaaggagtgatcgaggagcaattgcgggctggcgtgattgaggaggcgacagtggggacgggaagtaccgagtatttcatccctcatcaggccgtgatcacccccaagaagctgagggtggtgtacgacgccagcgctcatgccaaaggagttccctccctcaacgactgccctttgagaggccccgtgtggctgccagacttggccggaatgctcatccgttttcgggcatgccaagtacccgtactcgccgatgtggagaaagcttttctgatggtcggcattgaagaagctgaccgagaagtgtgcaaatttctgtgggcgcgcgacccacttggaccactgacaacggccaatttggtgccataccggtttcggcgattggcgttcggcctgacacccagcccgttctgtttggctgcggtggtacgtcaccacttgcgcaaatacaactccgaatttgccgagcaactcatccgggatacatacgtcgacaatgtgttaattccggccgacaccattgaggaagcgacggcaaaggcccgagaagccaaacgaatgttcacggacgcaaaaatgaatcttcgggagtttctgacgaatgacagagggctcaatgacagcttttcggaagccgacgcgctgggcaaaacgacagcgaaagttctgggactggagtgggactcagtggacgattcaatccaaatttccttcccgggagttactcccgagggagagtgccgccaaacaaggaggacagtcctcaagaccattgcgcgactgttcgacccgctcggactgctcgcaccggccaccctccccgccaagcagtacttccaaaggctgtgggacactacccataattgggacacgcctctcgaaccggacgatgcgcgagattggaacagagttttggcaagttgggaagggggactcattaccattccccgagccgtccgggctggaggtgtccaacccggacagctgcatgtgttcaccgacgcttcggagacagcatacgcagccgtggcctatctccgatctgagggagccgacgggagatttcactcccgactcctcatggcaaaatcgaggctgaagccgaagaaagcggcagcgacgtataccatcccgagaatggagctgatgggactggtcctgggcacgcgactggcagcattcgtcaaagcgcaactgcaccgcccaatttcggaggagcacacttggagtgattcgatgattgcgctgcagtgggtgaaaaatcgagcaccccaaccacaattcgtggccaatcggttggccgagattcgccgggccacagctacgaccttccatcatgtgccgaccggcttcaacccggccgattcggccactcgggggctttcccccgcgcagcttcaaaattacgatctgtggtggaagggaccgaagtggctaacatcgccatgggcaacttggccaaaggagctggactttcaggtggactcagccgaggacgaggcgatactcccggacgaagcaactacgacggcactcgtaaccaggcgggagcacagtcccgagcaaccgaaggaatggtcggaggagctgctgaacagatgcagcagatgggtgaaagcactgcgcgtgatggcctgggcacgacgatttgccaacaacgcacgaagaaaagccgaggatatgcacggaacaatggggggatctgacccctctcggcgaaaagcggcaattcggggacaaatcgtggctctcccaacccacgacgaagagacggacgcaaaatgggcaattgtccgggcaacacaacggaattgccaaccccgggacggcatgcgaaccgagctggacgaaaacggggtgcaacggctcatcagtcgaatcggctggtgcgaagaagcggaactcagtcggccggtgatactcccgaaaagatcaagagcaggagcgctcattatcgacgacatacatgtgcgactccatcacatgggaacggacggcactctgtcggaattcttgaggagctggtggtgtcccagtgcacgacaacaagttcggcaagtacttggtcaatgcaaacgatgccgacggctcagggggatgccctaccccctcccgacaatgccacaactgccaatggatcgagtgagacgacgattgccgtttgaatcagtcgggctcgactacctcgggccgacagtcactctcgacgataagggacaacgaaggaagacatgggtgctgctaatcacctgtttgacgacgagggccatttatgtcgacgcgactcgagacttatcggccaacagcttcatctcagcactgaggagattcatcgcccggcggggagcaccgagtcgaattctcagtgacaacgcgccaaccttcactgtggttggcaaaacgctcgccgagttcggcatgccgggagacaatccgatcgattttgcggactcccgaggcattaagtggcgattcacgccccagcacacgccgtgggccggaggaattttcgagcgggccgtgcaactcgtcaaacgtgccttgcagaagacattgggaagcactgtactcgactacgacggtttggtcacgctcttggccgaaatcgaggccaccgtcaattctcggccaattacatacgtcaatggcaattcgggagagcctctcccgctccgtcctatcgacctcatccaagaaaatggccgattatgggtggacccgccgcacccatctgcacaacgaggagacgaaccgcgcgatccgacgcacaaacaattggccaaacattggcgagactcgcaacaacgacttgaacatttctggcgacgatggcaccgggaatacctcatgaccttgcgagagagggccggctggcatcatcctcaacgacgagtgaatgcacccggggcaccggaagtcggggacgtcgtgcttgtggaagacaaattccaccctcgcaacttatgggccatggggcgaatcgaggagctcagaggttcagacggtcacacccgcagcgtgctgatcagaatggcaaatggaaggatttgggggagacccgtaagcaaaatttgccccctggagagaagtccagaaatgggggaagcacaggaccaaccagacgaagcagtacaggaagaggaactcggcgcggtggctgggacagaagccgaaggtcagcccggggaggacaacaatgctccccgtggcttgagtggcagtgagggagaaaaaactgtggaggctgaagaagtcgcgcaagacgaagcagaggaagggcccattccaccgagtttcgttcaaaacgaagtcgggagcacctctcccgtgtcgcagacaaatgaccggtctctattggaaaccatgaaccgagagacggaagcggagaaagctgactcaccggagggagcgaacagcatgcgaggaattgaaccaagaaggtcgcttagagtccgacgaattcgagaagtatggtcaccggaccgatacgccccgaaaaggagggggattggaggccccctagtcagcttggccatgctgatcatgttggtttacccgactgtgacattcgggtgtcaaccgactatccgatccgaaattgttgggaaacagtcgctggagttgccaacaacgatgttgccgtgccacatgcggtgtactgaacgcggagtaaaagtactgagcaagcagcgactcgaaaaaatggaaatttgttgcccggatggatgctgggcaattgtgcccacttcgacggagatcagttacgagctaccatccagcgagagcagaatgcgatctgatcagttgctccttctgttgggagcagctggccaacccgacatgcaacccgcggtgggcatcctctttcttcggttttggagccgcaattttgctcggcatcattgcttgcctctgctcaatttttgggcgatttttgtcaggagccaagttgctctcgaaagccgtggcatggggagttcgttaccccatcgggctgatcaattgggcaaccggacgcaattacgacggcggtcaagcggtgcccatcggctgggtcatgccgcggcaacatgtgcaactcaatccggagtgagacggtcattcccgaattggccgagctgaacaaccgcccgggacactcgttttgcatgcgtagcaccagtttctggcagaacgcctgcggacttccaacagcctcttgcctcttctacagatgggcggcggtaccgacaacgacggtttgaggagtttacttgcctcgaatgggacatgcagatcacggcgtgggtggagctggagacgaacagtggacaagtcgacacacatctgctgactctacacccgggagtctcggaacagtggggaaatatgacaattgcggtcgtccccacttccctcccgcccaattatcgtgtgctcttaattaaaagatgtccatagttttgacttaaatgaattatggttttcagacttttaaggacaaattttttctataaacagttcacagatgttgcggtgaatattaaaataattcacccacttcattacgacatggaattaattactgaatatctgttttttataaaa

SEQ ID NO: 1023 - DNA, 1313 bp, Heterodera glycines
aataatataaattttattttactcataataatatttttttgaaatggtcgaacccacgatttaactttaaatggtgtcgacggttttatttatttatttatttttataaactttattaaggaaatttagtttttaaataaatattcatcatgattatttattatctctcctcacttgttgaaatagtatttggttggaagttttagttggcaaaatgaagaaataattactaaattaaattttatttttatttaaatgttcataaattaaagttaaatttaatatttagattttaatatttttcattaatcttttgctttacaaaacctatcaaattcaaatgattgattcataaaatttagagacttaaataatgagtaattctatttcacatttagtcaaatatgtttttatattaaatactccatttatattaatttttgctattcaataattgaaattgaccagattatgttttttaattgtaatatttttaaaggaatttaattcagttaatttttttaattttttctcatggtgagttcgtggggttttttttggcgaagcagatgactcatatatacaatattttcttttttactaaatgcttttattaaattattagggccgataaaccatcgatataattgattttttcaatcaataaattatttacagttttaaggttaattactatgtttttgttactgttttaatatgatgacttaaataaaaatattatttccatttaattttcgcatatttttctcttttgtttctcagattcatctgtcatttagggcttttcgataagatcactatctagccaagtttgttttttttcgacaaaatgtcaatcttttacaaccaaattgatcagatcattgcttcaaagcgacggtacaccctaaaatacacagaaaattggggaaattttaggaaaaaatcctatgcggttgtttaaatgtttctagaagaaattaacaacccacaggaaaactcaatatatcaaaaaaatttaaaaaagggggctgctactacaattattgcaattcctagagcacaaaattctctactgaattacattttgaatattgtggataaaacatgtacaaaaaaagttatagttggttgaatttgatgattataaatttactgaaataaatttatttttcattgtcataaatattttatatataaaattaatgtatggttataaaaatgtaagcatttccgtttatttattgagtattaatatttaatttaacaaataaaatgttttaattgaataaaaaattttttttttgaaatac

SEQ ID NO: 1024 - DNA, 5991 bp, Heterodera glycines
  unsure (1)..(5991): unsure at all n locations
caaataaaactattttatgctcattttgaagggaaaattctgaagaatgcttctaagttagtcattaaaaaaatgtttattggcaaataattgattcatgtgtaattttatatgtatgttagagacatggaaatagcacgccaaaatgagagaaaaagaaaaaactttgtcctggtaaaaaaattttcctattgtcgtgcccattatctcactctagcgattccaagtttattttgtgaaagttaagtttttaacacgagatcgattcttcctttttaacacgagatcgattcttccattttacaagggaaaagcccaaaaaaatttaagttttgcaaagttttggcgttatgattactaaataaactgttgtgttcttccacttagaacacacaaagaaaaagaaataaataaataattttattgattcggtcggagggcaaattggaaatataaataaatgaatgatgaaagggaagaacaaaaagtgggaggaggtgtccacttttatggacgagggtgggggcggatggacatagaaataacaaataaagtcaataagtcagatcgccataaattcaaattattcactatccaacatctccctcctcaattcttgaacggcgtcagcctggcgagaagcggatcggcggtttggtgttgcgactagagcgtctcaatgccatgggtggtgaattggcagtagttgggtggatttcgtcgggctgcttccgcttttggcatttcggtgtcgtgttttggcgtgccggtgttggatggttttgatgtgccggtgaatgatgatttgggtcatttgccacctgggcgggaccaacaaatcctaaactttcttcgaagacatatcgacggcgcatttggttggcatgtcgatgaatgtttcgtccgagtcttggcacatttacccgataagttggcgaattgttgagtcgttcgatgactgtaccttggagccaatgtgtcttaccatgctggtaattcaaaacaagcactgggtcagtcggaagaaactcatttgacttaactccatgcttttcattaaaattttgtgccattttcgtgcggtatttttcctgtttctgatgaaaaattgtcttgtcaattgtctcattgacttttcctgtcggatgtgtaagagacaattgagtgcggagttttctaccaaagaataattggtccggtgaatgtccattaattgcagaattcggtgttgttctataggacaggagcattttctcagcccaatttttgtcctttttcgaacacttctgcattgcccttttaaaagtgtcgacaaagcgttcgacttggccatttgactgtggatgaaatagcggcgtgaacatatgtcgaatcccaaattctttacaaaattcggaaaattctgacgatcgaaattgtcgtccgttgtccgagacaatttcttctgggattccaagccgattgatgattaatctgagaacactgatcgttgctttcgctgtcatggtgttcatctgataaacttcgggccattttgaaaaagaatccactaaaagtagataaacatgaccgtcttggcatgggccggcaaaatcaatatgcacacgttcgaatggccgtttggtggcattccaaggagaaagtggtgcttttggagcagctttttgggcgatttggcattcttcgcagctttttaccaatttctcaatggctgagtccattccgggccagtaaacgtgttggcgagcgagagccttcatgcgcacaattcctgggtgtgccatgtgaagtgctttcaacgtcctatctcgcaaaattgttggaatgatcacccggttttgataaagcaggcaattctcaatttgcaaaatttcgttccgttttggaaagaacggtgcgaggtcggggtcattacacttttgtgaccatccttccttggagaatttggccactttttggagaatttcatctttttcagtcatttctgctatttcggtggcagtgacgggaagatgattaattcgtgcctgcaaaattgtgccgatgaaacattctgtttcggtgcaaattttcgctatcaaaatatcttcttcaggtcgcggataattcgcgataagtcgtgaaagcatgtcgacttgaccaaacgcagtggtattgatgtagcgaatgtcaaattcgtaatttgacaagataagcgcccatctttggagtcgacaggcggcgtaaattgggattcctttcttggacccaaatatggaaatcagcggtttatggtcggtcagaagtgtgaattttcttccaaaaatcattctgtgaaatttttggacggcgaaaataagagccaaagcttctttttcgacttggctgtagttccgctgtgcttctgaaagaacacttgacgcgtgctcaatgaccttctccgttttgtctgggaaaatgtgacttatggtcgctccaattccatcttttgaagcatcagctgcgacgattattggaagcgaggggtcgaagtgggttaaaagcagatcagacaacatgatctcttttgctttttcaaaagctttctgctggtcttcaccccaattccaaagttcgtctttccgaagaagttggtccaatggcgccctaagttcgcgcatctttttgatgaaccgactgtagtaagtaagggctccgagaaatgagcgaagagtcgatttgtcatgtggcactggcaattttcggattgcatctgagcggcctggatcaggtctaattccattagccgacacaatgtgcccaagaaaaagcaattctttctgcaagaatttgcatttttcaagttgaatgcacaatccgtatgctttgaatcgtgtgaacaattgatggatggctgaaaggtgctcttcgagggttttggacgcgattagtccatcatccaaataagcaaatgctccggggattccagcacatatttgatccatcaaatgttgaaaaattgccggtgctgatttgacgccaaatggaagacgttggcactgaaaaaggccacgatgcgtgttcaaaacgcagagctgtttggattcgtcatccaattccatttgtaggtatgcgtcttttaagtccaaatttgtgaaaaatgcagcgccgcttatggctgcataaatgtcatcaggccgagggagtgggtggcggttgagttcaagtgcattgtttaagccagttgagaaatcaatgcacactctgattttgccatttttctttttgacggccaaaatgggtgctgcccaatggctaaattctatcggattaatggcaccgatctgtaagaggcggtccagctccgtgttgactgcttccagtgagccatgaggaacgggtcgggctttacagaaaaccggtcgagcgtcggatttaagaatcaagtgtgccttaatcttggtgcactgtcctagctctttaccaaaaacatccggaaaattttctttaagagccgtcgtgagtgacttaacatcggcgatttcttggaaaggtgcggcagatgatgcgcggattccaaccgatgtgtgcgtctccggaaacatgatttctttgggaatcagttccgttgcctcaatccatggcaaaccaaacaaatcgtaattgagctcttcagtcacataagctgttagctttttggctggttgtcccttaatgctgacaagacatataaatttgccaattgtgttaaatgtgacgtcgttgcagttacgagtctcaatgtcggttggcaacaatttaggttgtcctaatttggtccatgtttcaatggtaaggactgtcgcctgagctcctgtgtcgacattcatttcgatttttgtgccgttaatttcgaccaaaattttccaccaccgtccttgagtcgtgccaatttgtaggcatgttgctttgacttggaccgtgtgaaatgaacggcgttggttctttgtcgtgaatgctccctttcggcaaacattagcaatgtggccttgtttttggcaggtgtggcatgtcgcttctcggaagcgacaatctgatctccagtgatcagtaccaccacatgagccgcacggctgggtcggttgtccacgaattgcttttcctcctgtggccggtttttgctgtgccgggtggttttgttgcacggcatttgctgatttggccttggtttttgattctctccactgttgagggcgagttcggatggcatttgtcgaagctggcgtggaaaggagtgacaaagcgctatctttaacaatttggattgcttttaactcctcttccaactttttgagtgtgactgtggtgccacttttctcggcttcttccatcattttaagacatttctgcctcaaatcgtgatgttcatccctcagtgaaatcaccaaaatcatgcatttgagctgttccttggtaaggctcaaattggcatgctcacacgctgcgttgatttgagcaaccaaagaactgatgtcttggtttggatgctgtctgattcgaaagcattcatatcggcggacgaaaagagagcgcgtttcagcgaacaactcttttaatctgttgattgattcagcccacgaagctttgtcgggcaactccgggctgattgtgtccctgtacttcgtgtactcttcgtctccgagctttcccaacaatagtcggactttggcttgctcggttaagtctttgccatcctcttcaatcaatatgccgaagcgtttgtgccactgttcaaatgtttgaccattctcggggtcataaacaaactttgaaattctactgtcgattgagctggccaaattcgcttggcttatgcttgaagcggcatttccttggagcaaagcggtcaaaagttgttgaatttgttcggcgttcattgtccgtcaattgaaattgttgaaaaagtccacaaaatccacacctggtggatgcttacaccgtcttggtgctaagctgacgaatttgttgaaaaaccgcttcttgcggaacctcacccttcttaggtctattggtttttttgttgagttaaactgcttcttagcagacctcacaccacctgggtgctattggtttttgttgaatttgcagctgtccttgtcctcagtgatgaagaatggctgctgactgcgccaatttgttgtgttcttccacttagaacacacaaagaaaaagaaataaataaataattttattgattcggtcggagggcaaattgggaaataaaatataaatgaatgatgaaaggaaagaacaaaaagtgggaggaggtgtccacttttatggacgagggagggggcggatggacatagaaataacaaataaagtcaataagtcagatcgccataaattcaaattattcactatccaacaattattaaagcaaaaactgtttctctcatcaaactcacccaatgcaatccttaaaaagccaaaagttgacatagttcaaattgtgccgacttttatactcccactgaatcgccgccgtctccccaatttggcatcgtttcaacagccaatcactacaaatgaattgttcataatcggcttctttctccagtatcagcatttctttagtccgttcgttcaccaattcaaatggctcaaattccattaaatcaaaaagttcaattcgaattttgtagcaggcagaagtggtggcacggagaaatgcctaaacaatgggaaacgaaaagcaaatgccaattaatccaaatattttaattgaaatcataaaaatgattagtcccgttgaccgctttgaaactgtcgatccattcgtaaatgttttctgatccgtaatttatatatatcaatcgcttgggttggccatcttttgtcggagtgtgcaaccatttggacaacgcttggccagcagttggaattgcatttggatcatcattcccatcgaggaacagatcaccagattgtattgaagtcagctgattgaaatcagtgagaattgtcggcgaagtgtgngcgacgcanaattgt

SEQ ID NO: 1025 - DNA, 1359 bp, Heterodera glycines
tttcccaaatttccccaattttcgtcctccattccctaaaattggtcgtcccgcattataaatttatttatttatcatccatcaattttgttttttttgtttcgtccactaattcaaattcattcatttattcgtctcgccatttaaactccgttctcgcctcgtcccgtgccttttgctgttgtgctgtgctaatcgctcaccttcggcctccccacccattctcttctcattcatttctccccattttttttttgcccctcgggcgacgaaatttttttttttttatcgaatcgaacacacacagcccaacaaaacaaacaaaacgaacgaaccaaccaacgacgggaggacggagaacgacgacgacggacgatggccccgcgggggctgtcattttttgggggcgcatggggggggggccaccgacggaacggacggacagtctttggtccgtccgtccattttttggaactttttttttcgcccatcgcctcgacactacgccaagcaaaaaaaaaaaaatacaaattcgtaaagtgtgaagatgtgagtgaatagggaaaagggaaagaaagaatatgtacatagaattaattttttttaaagaattagtaattttgtttacttttggcagtttttttttcaaaaaaaaaatttttaatttaattttttaaagacattttttttgtgatttttaatgtttggaaaaaacaaacaaacaaatcgcttcttctgctgtttgtttgtttggcctgtgttctttcttcttctgacgtgtcaattttcaaacaacaaaacttttttttttgtgtgtaaaatgaattttggtactttttttttcatgggacaccgtttttagtggtctcgttttttttaaattttaaaatcagagagagggtatgtgccttggtcttactattgaggctcgagagaacgagacaagcttaaaccgaccaagattttaacccaagaaggggtattatgactcaaaacttcttgcttatttagccctggaaattttgggccgggaaacagggtttgcagcatgtcgagaaaaatgtatgccgagtcgggattagggactcggggacggccatagttcgggccgggacttgggacgagaaaaaagagatgtgtctggtttcgacgagtcaggtttcggcattcgggtcggcaaccctggatcggaaatggagtcgtcaaaccgccggcaaccccaacttttgattatctcgagaccaagctttatctcgaaacaaccctttgcccaccgatgctcgagactcgagactgcctccccaataactgggcttaaaaactccatttcgagactctcgggcaaccgggggggggggg

SEQ ID NO: 1026 - DNA, 631 bp, Heterodera glycines
ccccccccccccccagtctccaatttcattcactttttttttgttttatgtctcctaacccctcaccccttcggcattccccccctctacccaacctgcaaatttttttttttttgcctcccgccgggcgttgcaataaaccagcggctgtcggccggccggcagctgctgagaccgacctgcgccgaccccggcggggcgaacacggacagagggggggggggataattattgctctcgagagtggggcagtctcgaggaaaccgaacaacaaaaaagagagaaagtgaagtgtgtaagctgtgtcatgtgagagggggcggtaggcggcggtccccacccccaaacagttcaccagacattttgggcgacgaccaacgacgaacccatggacacaattgggggggggggggggtctggaattttgttgatgtgaatcatcatcattattattatgtattgtggagaagagaataatgggcgtggtgccgccgccgtcccgcccccggggcgatggatgtgcatattttgtggggtttgttgacgacggacaaaaaaaaatgggtaaatgccccgggggtaacgacacagcacaacagagacggagggcgggggggcagagacggtaaat

SEQ ID NO: 1027 - DNA, 2991 bp, Heterodera glycines
tgttgttggggatgtattatcgatattgactgttgttgttgcggtggttgtggtattgatgcagatgccaaattttgttgtgttggtagttgcgatgacgaggttgacggttgatgtgatgttgcttgcgcagttacagcagcaacgacagatttaaaaagcgaatctgcagaagtttctgtggggctgaatgcgtgttttgttgtcaagagttgggcgtccgtttgtcgcaatgtctcagccgtttgtagaccaaattgttcattttgcgcgaatgccattgtctttttgcgttttgcaataggcgccaagggaaaaatgtcatcataaaataaaaaacaagttacaaaaagggttaagacatatatgtccttacaatgttgacacagcaatttgtggtctcatcaaaaccatgtatttttagagctccatttgtatttcgaagcatactataattaattattttttcattaaaacaaggatttatatatttataacccaatgttaagaaagaaattttaataatttataactttaaaaattacatttttcgtgccagagtgatgtctatgtgtccttcaattctggtgcgcttgtttatttcttcgaggagtaaaagaagtgactcgccagccttaatgttatgtcaattttttcaaaataagattaataaaattacatgctcgagtacatccgtttccaataaatactcggattccccttggaacccaattttccaaaaatggcactgtttttcgcatctaatacagctacggatgtcgtacagccgaagtgacgttatttcgtagaattcctttccttcgtcatgaaagtccctctggcattgctccatgtggcgatgcgagcaaagctgaaaaataagcggtttatttcgaagttcaggcgagcaaacgcccaccttccggcgagcaaacgcccgccttctggttagcaaacgcccgccttccggcgagcaaacggccgccttccggcgagcaaaacgcccgccttccggcgagcaaaacgcctgccttcccaagagcaaaacgcccgccttccggcgagcaaaacgcccgccttccggcgagcaaacgcccgccttccggcgagctaacgcccgccttccggcgagaaatgcgcccgcctttcggcgagcaaaacgcccgccttccggcgagcaaacgcccgccttccggcgagctaacgcccgccttccggcgagcaaagcgcccgcctttcggcgagcaaaacgcccgccttccggcgaggaaaacgcccgccttctggcgagcaatgcgcccgccttccggcgagctaacgcccgccttctggcgagcaaaacgcccgccttccggcgagcaaaacgcctgccttccggtgagctaacgcccgccttccggcgagaaatgcgcccgcctttcggcgagcaaaacgcccgccttccggcgagcaaaacgcccgccttccggcgagcaatgcgcccgcctttcggcgagaaatgcgcccgccttccggcgagcaatgcgcccgcctttcggcgagcaaaacgcccgccttccggcgagcaatgcgcccgcctttcggcgagcaaaacgcccgccttccggcgaggaaaacgcccgccttctggcgagcaatgcgcccgccttccggcgagcaaaacgcccgccttccggcgagcaatgcgcccgcctttcggcgagaaatgcgcccgccttctggcgagcaatgcgcccgccttccggcgagcaaaacgcccgccttccggcgagcaatgcgcccgcctttcggcgagcaaaacgcccgccttccggcgagcaatgcgcccgcctttcggcgagcaaaacgcccgccttcccgcgagcaaaacgcccgccttccggtgagcaaaaagagaaaaaccccattaagccacctcttgcgattgctgacgtcgtgtgcgtgctcctccaatcaaagtcagagacaggtgaagcgtcgactcgttctggatgttgtagtccgcgagggttcgaccattctccagttgctttcctgaaccgtaattcttttaagaaaagtttaacaaacggaagaattaccagagaagatgagacgctgttggtccggtgggatgccttccttgtcctggatcttcgccttcacattctcgatggtgtccaaggaatgggcaaaaatagtcagcgtcattcccccaagagtcttgacgaagatttggatgaaagtagttttctttgcagttattcggtggcaaagccgcatgatgattgaataaaataatacataaagaataattatttcaatcatttgtaaatactgaatgaaaaaattaaataattttgaaaaaggactcacatgacagaaaatattcctaatttttattatgggattcgggatttaaattttatttgaatataagtaaaaaaattaaaagaattaaatattaaatttggtaaaatctttaatcgcataaaacgaatgaataatttttttcaaattcaacgccatccaaagttgcggaaataacggcgatgggcggaaaagaatcaatgaaaaattgctgttacttagggggggggcgactggtggaggcagttgcgacgccaactaaaagacccagttgcggcgataacgatggacggaaagaatcgatgagaaattgttgttatttggggggggggctggtcagagtcagtgcgcaagacgaatggatgggaggcttgtgaaaaaacagagaagaagaggaatccctgatggaaaagagaaagcgcaacgaaatttggaaaaggaaagggcgaaaatttggaaaaggaaaggggggggggggaaggaatttgcgagttatcacatccgttcaatctctttctcacaccatttatccccgcttttccccatctttattccgttccataagtccaactatttaatcgggagcattctctcgataaggagtcaggtgagcgggcaggtaaatcgcgagcgagagccgag

SEQ ID NO: 1028 - DNA, 1764 bp, Heterodera glycines
aaaaaacacacctaaataaagcatctcgatgggcacgaacgacaattttaaaagaatatacattcgttaaaagaaaaattttcttttattaaattttgttcattaaaagcaaggacgggatttttttttgaatatttttctaaaaatatttttcataaatatgtttttaatttatttttaggtcaaatacaattttttattaaaatctgttaacaaataaaatttgtgcaactttgattataaaatttaaaaaaatggtaatcttctattttagcttgggaataataggcaaagcaatgaaacgaccttttttgttgtcttcaaagcacttttttaaaatatttaaatataactttattttaaaatcgggtagttctatttcaacattaagcaatattcataaaatgcataaactaaccaataaatacaactgtaaaattagtcataaaataaattaaatctagccgtgttaaattcaagtaaaaattattacttcaaaaaatttaaaaatgaattaatttaggcaccgtttgaaaacactggttgaccgcaagcttataatttattacttcaagaactttaaaattatgtaattaattaaacgtaaaaaatatttatatcacaaaaagtgataatgtgctaaattttacaactgtcataaaaatgcaatatttgtaaaaattaaaaacagaaaaggtggattatctaatgagattttggtaattaaattggaaattaataatttattaaaaagtcactttaacaaagtgaatttaaaatatgatttacaaaaacagttaaattaatacaatgttagatcttaattaatgaatataaagagatcgaagatgctaattgttatttaaaaagaattcaaacccttgaaaaattacattgaatctcaataataaaaattagaaattttttttttgtaattcattgaaagataaataatgtataggaaaaggttttaattttattttttaaagaaatgaaatttgaaactttttataaatctatacaaatatggttgtcaaaattttatactaacaagtacgattttaaatattgaaggtgatcaaaattattcgctaccaatatgtttctctacaaactacactaatagtaacaacagaagcgagtcaagaaactcaatatgtataatttgctaaacaaccggtatttttaattgaaacaacaaaacaagctaattatccttaaaaactattactaaaatttagttattttaaaataattgcaaaactaaaaccggctttaaatagataaaaaaatttttagttaaaacacgaaataacgcatatattttaatttacttaatgttcagtgataaaataacatataaaattatttttaaatataatatcaatatctatattaataaataagtaaattaaaaaattgacattctaagttttcttaattaataatagcaaaaatataaatctatacaaatatggttgtcaaaattttatactgacaagtttcgaaaattctattacgcttgtaaataaattgagcaaaatctgttgatgagaaaataaacgaaaaagattaagagttaaaaatattcataaagaattttaatcttgactcaaacctgaaaaactatcttatagttcatctaaaaacttgaaataattcatgcttgcacaacttttcgtctgatcaaaaaagtctcttactccaacttgatcagatcactccttcctagtgaccgggacacccaaaatacactgaaaatcg

SEQ ID NO: 1029 - DNA, 6497 bp, Heterodera glycines
aatgaataaataaattaaaaaactttttcaaaagtaggtcacctgtcaactaaaaattgattgatggggtttttttatttttcttcccttatttctcaatctgcacgtgactttttgttcaaattatttcgcaatatctcccctaaattaggtcaactgtcaataaaatgtgattgattagtttcttatttaaatgtctccattatttttagttttctgttccaactatttcgcaatatggcccgtaattttgcaaacctgtcaaaaaaaaatgattgatgactttcgaaataaggaatatccaaacgatttttgcacggtttttgaataaaatgagacagctgtctaccgaaatgattgatgaccccctaaattaaggcaaccccagacagtcacgtgactagacccctcccctctcgcccaatccgtacacccggcccaaatcgaaaatcattcaactaaatagttggatttcattaaatctcttcgcgctctaattttaattcactccgctctatttttaattgaattaattaaatcttctattaaattcccgtctttttcttttcaaatctctcttcactctttaattttactgcatcaatttcgcggttttttgttttaaaatgtcttttaaacgcgtgaactccttccaacccgccgtgccaatggccaaaaaatgggatttccgatcaatcgggtaagtgatttttaataaattaaataaaaaaataatttcttaaacaattataaatacaattataagataataccccttaagaattatttcaaaaaaaaattttttttgttcagaaataattttgctgaagaaatggaaaattataaattgatggattaccaatcgacaacttgcgaaaaatttggatttacgaaaaatattacggaatttcgtgtcaacccggacgccccgatgaagcgatcaaggatgcgatcgacaacatgataaaggtggctttaaagactacggaagaaaaaatgaagcgaaaagtgcggatgtttggagttgcaattacgggtgccgggcttgctttcccggtgtgggtgccgtatcgggcgtacccccagaataatgcggatgttatcatggaggagattaatgagctggggcagagcggggacggggatgaaaataagaaaatgcttttattatctgaaccgattactatgaaaattacatgcgttacaatgcccagtggagaggggccgaggaatgtccacaaatttgactttggattcaaggaacaccagcggatagggtaagtgttttaataaaataaaattaaaatagaaaaaaaatcaataaataaatttaaaataattatttctaaaaattttaatgaagcaaaaaaaactttttttttaaaaaaaaaaatgaaaaaataataatttaatgaaacaaaaaaaacagaataaaattaaaaataaagaaagtaaaaaataaatttaaaataattattttaaaaaattttaatgaaacaaaaaaaaaataaacttaaaatatttatttttaaataatttaattaggtaaaaaaaaaaaagtaaattttaggattgtgaatactgataaattttgccttttttacgcactggcgtcgtcgatgaattatttaattatggataaatattcgtttattcgttttatgaagaacttagcaagacaaaaggaagcggctgttgaacttttacggaattgtagaattgatggaaacgaaattagttatggtgtggagcaattgccgaatgttcagaaatattgggtgggtttaaaaacggtgaaaaacatagaaatgaccaatttttcaggatgagatttaccccggaaagtaccgggttgttgcgtttgagaagtcagctgatccgcggaaatcgatctgtgttttgtggaaggcccctatgggacgagagaaggtcgtaccgatatttttggagaatggtcactgggatggtctgaagaattacgtctgtttttttaatcgtgggagaaaattttgtattgattgtgagtgcttttttgacaaggatgtcaaacatactttcgagtgccgggcaaggtgttattattgcaatagagtgaggggaatgccatgtgaaaaggagagtggagtgaagattgaatgcccgaagtgtcatcgttacttttacaattgggagtgttataattatcatcagggacatcagacttgcaaattatggaggcgttgcgtgatctgtgacaagacttatcgatttaacccgaagaagggacatgaatgcggagagacttattgccagctttgtagtgtgagccacgaccccaagcggggttgctatattataccgatcgaggagaaggaggaaaaagatgtctacagaattgtagtttgggtaagttctacaaataaaatcaacaaaaataagtctttaactccaggattcggagacttcgcaggattctatttacaagggggaccagaaggagcatgttattaattatatttcggtgagagttacgtgtacggaatgctgtgatgacaaaaacaggacgaattgcaaaatttgtggggaggagaggatcaaggattggagcgaggcagagggacatgagccgaccaaggattttgtggagtggattttaactgcttttacgaattacgatacgtacatatttgcacataacgccggacgttttgacggtaatttcaaaatttaatttttaaatcctaaatttttaggtcattttgtttttaattacctctgccgtaccgggaagaacccgttaccgctcatcaatggattgaaaatttatgaatttaaagtgcaaaactcgaagaaacattcaaagctgatttggagagactcatgtttattgatgccggtgaagcttgagtcgctgaaggcgacatttaatttggactgtgaggacaagccctttttcccttgttattacaacaagaaagaaaattatggaatacgattggaacatctgccaccgatggaggactattcgccgggatctatgaacaaggataaatttataaaattcgaaaaatggtaggaaaatagaaaaatttttgaataaaattctttttttttcaggtacaatgagaacaaggagacgcccttttatttggatgaagaattgagaaattattgcagaaacgacacggagattttattgttgtcgattattgagtttcgaaggatattgattaacgacattactaagggatttgacccactaccgaggagttgtacgaatgcgggggttgcgatgaatatttttaaggcaatgtttttattgacggagcagttatcgattgtgccggagaagggatatgagcggtgtgatcgcgccagtgtgatggcaataaagtatttggagtggcggagccagcgggatcgaattgagatacggcacgcggggaacggacgagaagttaaaattgggaattacaaattggatggatttattgcgaataacggagctagggacaaatgcatcgaggttatgggatgttacatacatggatgtttgaattgttatgacccggcggcggaactgattggaggaaggacggcccaggaattgaacgatgagactcaggagagattagtggagctacggaagactttggatgtcgaagaagtttgggtatgtttatttgacatttacatttttattgtgaatttttaggggtgtcaaattgagaaggaattgaaaaaggatgaggaaatgaggggcttcttcgacgacagaggaaatgagaaggggccgattgatccgaggatggcatatgcgggagggaggaccggaccgatgaaattgtttgcgaaatcggatgagaagaaaaagattagtgtttacgatattgtgagtctgtatccgtcagtgaattacggtacagcttacccgattggtttgccggagattattataccgaagagcgatgagattaatgtaaattggacgagaccggaggatttgaagtttaatggattgtataaagtgagggtccacccgccgcgagggttgcggattccggttctgcagttgaagtgtgatgagagattattattcccgttgtgttggagatgtgcgtcaacatttaagaaggaaactacgagatgtgattacaattgcccccatgatgaggcacagcggagatacgtggcgacatatactagcgttgaattggtaagaacttatgtgggaaaattttaggaaaattttgacatttttcaggcaaaggcgttggaatgcggttatactgtggacagattttatagagcgtggcactacgaagaggaggcggatgatttattcaagggatacgtgcgattatttttgaagctgaaggaggaggcgagcagttttccgaaaggggttgagacggatgagcaaaagaatatttggagagaagagtataaggaaaaatatggaatcgacattgaattggctaaagttaagaagaatccaggattgcggtacataagcaagttgatgctaaatagcttatgggtaagatttagggttttccgaaagagttttaacttaaaattttagggaaagttttcgatgagaaattgtttgaacaagaatgcggtgattgatagggcgtcggagttttataaaatagcgtgtgaccataaaattgaattatgtgatattgttgaatattcggaagaggcgattagattgatatacagggacaaggaggactttgtgatggagcacaagtcgagcaacatagtcattagcttatggtgagttcaaaaaattataaatttgtatataacctaatttttaggacgacgagtatggcgaggttaaaattattggaatttatgagggaggctgaaagcaacggaggggaaattttgtatacggacactgacagtatttttgttttgcacgatcgggatgtggagccgatcacgacggggaaatatttgggagagatgagcgaggaatacggcggctatgagattgaagaatattgctgtggaggggcgaagcagtacgcactgaagatgagaagcaagcagacgggggagactgaatacgttatgaaaattagaggaattacgttcgacgtggacaacaggaaaacattgcactacgatacattcagggagatggttttgaattatgggaaaggggaggtggacccggcattcttcgtctataagaatgattttgggtgagttttgtaaaaattatttgcttcattaataaatcaatttttaggccgacaagggattcgaaagtggtgacgagggagaagcataaaatgtacaggccggtctgtcagaagggtatcatcgatgaggagcttaatgtgatgccatttggattttgttaattttgtattttattgttgtttttttttgttaaataaagttgaataaaaattaatgtgatattaggactagcgggggtggaacggtctaaagtgaaggcccactcctgttagccgtaatatttttataaaaaatccagcagttcaaggggaaaatagcatctatgaccgttattctggtacatagttatacatgggagttgagggaattgtagcttgacacggtgtctcgagtagagatgctgttcgacagtaaccccgaggaaccctcggtaggcaaaaagcctattggaacctctaaatgcgatgtcatccggtgagataaactgattgtgcctaaggtgtctcgttattagggcgtgtcttctcaaaaatttcaaattttgtttcttccgctgtcgtagaatttctgataattcgtgaggttcgcattcgttaaaatcgcatagaatttcaatgagagaattcattttgagcaccagtaggcattttcatattcgttgcaaatccttatataccattacctcaccgccgtatgatgaatttttaccttttctttttatttttaaaattctgagaactgaaatacagatgatgaccactaccaaatcgacaattgacaaaaaatatacccaaatatttgaacttgaaactttaattgtctcaaattctttgaacacgacaaaattaaagaattcactatttgtgtctgccacatatttgggaagtatctcgtttgagtcaaatcgatctttatatattttcttttccttaatcagataaatttgtccctcaattattaggaaatcggtaaatgaagacggcattgatccgatcggtttagtaataatttcggttttattatgatgtgtccataaattttcgattgatctaatgtcaatttcatctattcgatcgtcactgattacaaaaagtcggccattaatgtgatcaaatctaaggtacccactgggaaaattcctaacaaccttttcttgactccctctggttatcgaagtctcatttgtattttcgttttggaaattaataactatgatcgttgtaataaagcacgctcggggctttaattgtcgaaaatcctggtaaagcttaacattagttggtccgctcttttct

SEQ ID NO: 1030 - DNA, 1378 bp, Heterodera glycines
ctttttatatatttaccaaaattattaattaacaatttcttagaaataaacaaaggttaaattattgttaaaaatgaataatgatccgcccccaaatatgagaatctgaacagatgataaatagatttaataaagcaaatttttaagagagaaatcacaataaagattaataaaaatatatatatatatatatatataaaagaaaattaacataactaattgttactcagtaagaattgtttgctaaatttaacttacaatttactaatattattcttattttttttttggagaaaaggaattataaatctaatggaaataataactacctttttaaaaaatttaattcaacgatcgtaaattcttgaatgtaaacatgatttgattaaaatactaatgttcaataacaactttagaaattttcataaaaaattactggtggatgagacaaaaaatcacaaaaattttccctgataattagggttataattgtatgatttttttctggaaacggattatttttctcaaaaaactcctttcaaaattccaatttcccattcgacgctgccctaaaccttaaattttctttaaaaaaagattggctcaaaatcaccaatggattaatttttagacagaatcttttggcaagttgcacataaattttcgattatcaggaggcacctatcgaccaccggcccacctcctgttcttcaatttggacacacccccccccccccctccagtcccatcgcaaattttgtgtgcaccgggacgcaccggaatttttattaatttttatttgaaaatttaaagttttttaaaaatatggaaattttaaaaattggaaaaagcagagaattccaaatccttttataaatacctttctactaagcattttatcttggtttgatgatcctagatctttgcttattcaacattttcgtacctaatgaataggcttgtaaattatatggattaacatattttttctgcgcatatgctatgaagaaaggggctaaaaaatagtattaaagaaaaaaattttgaattttttgtaagaacttttggaaaaaaattgttgatataagaaaaatgtaattttgttttagcatatgataaaaatttaaaaaattcgaaattgcatatataaatttagaaaatcaaaatttttgcaattctctaaaaacgcgccttagctatttattgtttttgatgtttttaagtcaattctgtatttttgcaaaagtttttgcgtagatttttagggctgtattttttgaaaaatttttgcgttgatttttagcggtgtatttttgaaaaattttttggccgattcttaggggtgtatttttccttttcattgcatttgcaaaacgtc

SEQ ID NO: 1031 - DNA, 2480 bp, Heterodera glycines
  unsure (1)..(2480): unsure at all n locations
aatttgagaatttttgtatttttttatattttggtccttcgaacacatcttactaaaaaactcagggaaatattaaaaagaattagttagagtaaaataaataaaatcatagtcattcaattaaatttcttttagttttttcttcgaatttaacacaataatatctacaattaaaaatgctttaaatattgcgttaaaaagaatttgaataaagcttttaaaattcactcactaatttattgaatttctccaaaaaaactttagatatttttaaaaataatttcttaaataaatatcatttaaataaacacaaaaataatttaacattatttcatttactgaaaattaaattaacaaaaaaagatttatttgagtcgcaaattttatatcaatttaaaatctgggaaattgttttaaaatttgaaagggatttttttggtacaaaatatttgattctccatgattaattaacaaatacaaatttttataattatcattaataaaaatttgcgtattaaataaatcctttaaaaggaatatatcgatttatttattcatataaatgcattttatatagatttttacgatacaaatttcaaacaaacaaaaacacgtattaaagctacttaaaatatttgctagaaagaataaataaattcttaagaaaattagccgaaacttatttaatctaattcattcaaataaataattaaagaattatttgacaatgaaaaatggaaatttatatttgacacaaaagataataaacgaattataaagaaataaagtaatcaaaaaagaagaattgactaattataacttatttgctccaccttaccatattaatgaaatagtgataaggaatacaaagaaaatattaaagaattaaaaaaatggaaattatcaagaaaaaacagagaatattcttataataatacaattaatttgttttttaattaaactcaaaaatttgtttattttaagttagtaattgaaaaaatgaaatgaaaagcttaaattaagacataataatgttttatgaatttgtaaaataaaaaaaaacaaatataataaaatttttattaatgtgaatttcaaagaaaaaatctttagcaaataataacaacatttacagaattttataccacacacaaaatatgttaacatagttttttggaataaatgaattaaataataatttagaaaaattctcatcatgtttaataaaataaccctttattaattgtgaagtaaatgaaaataaataaaaaataaaacagaataaactataaaaatagaaatctttagtcttaatcatttatgttattcataatattaacttcataaaatttaaagagagaaaataatttataataaatttaacatacatattaaacaaaacttgtgaaaacattaagcgattcaaagacaaacattaatttttcaaatacacattaaatttttatcaattttaactgtattgcattaaaacccagcgccaagagccattatgattccgaggaaccatgaagaaacaaacatgaaaatcgatttaaataaaaacagattaaaattaattaacaattataaacaaaattaatatttatatatttaattatattattaaaagaaataacatattttgaaatgctcattaaaagttacatccgaatataataaacaaaacaaaaataatttcatttgataatataattaatttaataatgcattaaataattaaatttattttatttattcggttctattttcatattaaacttgtcaaatgtttataaggaaaatataaataaaaaacaaaattataaattaaaaaattctcaaaaaagaaaattaagataatactttgtaattttacatgtgaattaaaatatgtaccgaatttatttctttacaaacaaaattttgtcattatttttggatatgaaagaaattggattttaagaattaaaaaagggagtattaacttgaaaagaatcatattcataactttgtttttattaataattaagaagaaaaaatgaatttgatttaaataaagaaaagcataaaagatagcaaaacaaatgtttatgtgctttttatatatttaccaaaattatgaattaacaatttattagaaataaacaaaggttaaattattgttaaaaatgaataatgatccgcccccaaatatgagaatctgaacagatgataaatagattttttctacaaaaatgaccaatcattgattaattggattttttggctattttaaaaataaagaaaaaataatttttaaattttacaattaattaaatttcaattanaaaaatttcgagaatggaaaacgaatttgtgcgggacgatattcccgaatgggactaccgtatttttttccccgtcccagtaaaatcccgccagggaaaaagacgngaaacgggacccgggattcccaggttttcctgcgggatatttaaaaa

SEQ ID NO: 1032 - DNA, 6761 bp, Heterodera glycines
tttaaatagagtgcgccgggaccgggacgggaggacgggaattcccggtcatccgaggtcccggttcccggattttgaaacgctcaggtcccggtcccggtagggcaaccgggaaaaacaagcactggtaagaatgggggtctgagtgaaaacttagagatgaaaattagagtcaaatgaaaaaaaaaataattattaatatattctttaaaagtaaccctgccaagtgtgcaaataacctagtggctagtctccttgactttcccttattctttaacctggttcaatccctctacagaaattaaattattttgaattttctttttgtatactcgtgggtttcctatagagaaaatatgattactcatagttttttttaaattgatacatattttatcattttttaaatgaaaatcctaccaattgagcttaataatcgcaaaaaccaacctttttttgttgaaaatctgttaacaaattgcacccaaatttttaaaattttccccggcggcgcctatcggcaccgccggaccccttctttcccaaaagttttttgaaaaagcgctctgaaaaaaagtgatgtgaaaatcaaatctgaatttctattaatattcgatgatttagtccaaaaatgattaattgtttgaaataattgaagaaaatttgtttgaaaattttcattaatttaatttattaaataaaaaaccaaataattttgtattattttcacttgatataaattaaaatttgaattttttttttaatttttaaaatttttttgaatttttaaaatttcccggttggtcccggttcccggtcccgaaaaaaaatcgaggtcccggtcccggcttctcaggtcccggcaagtcccggtcccggttttggcaaaaattcccggtcccgtggcactctagtaaaatgacaaaattaagtcaaatcagtattgagttaatttttaaaatcacaaatttttgtttaaataaataaatttggagatgattttttaagaaaatttttattcttttatgtattttttgaaattttggggtcaattcttaggggtctatttttcttttttattgaatttttgttaataaatagggctgggatttttatgtgctaaaaatcctgaaatatgtaataaaatatgtgataaaaaaacccaaaatatgtgctaaaaaccaaaaaaaaaaggcctaaatatgtgttaaaaaatgcaaaaatatgtgctaaaaattggaaaaaccaagtgtatttacgcaaaaaaaaatcatatttaatatcagtctttatcaattttcgcccgacctccaatcaaaattttggcgatatcaatcaatttgtaaagtcccggattaatttttccatcagttgaataagttccttccgggaactttgaaatccagtgacgatttaaaacagcgtttgatttggctgctttaggcatttgaatatataaagaaattttctaaatgcttaataaacgtaaagtagtcaatttttagggtgcattttcagattttcttgtattttttttacgatttttctcaaaaatgccaaaatatgtgccaaaaccccgaaatatgtgccatatgtttttatgtgccaaaacgccaaaatatgtgtttttatgtttttataactcgctctaaatcaaacattgttcggagaaaatgctatttttgggcttctctcgccataactaagccgcaaaaaaaatatgttaaaacataaaaatcccagccctactaattaagattttgaaaattttaaaataaatactaaaaaaatgtaaaaatatgaccctaataaggcgcggtttcgttttcacctttcacatctttcacctttttggcattttaaccaatcagttaatctttcacttttcccggcaaaagggagtttcggacccgggattttgtccctttcccatttcaaaagtttcggtaccggtcccggccatttgggtcgggattttgaaaagtgcggtcctgtcctggtccaggccaattcaaattaataaataattattaattggtaacaattctgtgttttgaaaggaaaaactccatcctcaatgaattcatttgtaagttatttttttaataattcaacaaattccttaaagttggttttggaggcttaaatattatgtgattaaaccaataggctctagtagaaattcattacttttatttcaatgatttacaattcgacaaaaaaattaataataaattttcttttttttctgcgtttttttaatttaaaaacaaaaaagcaaagaaaaacaactttatttaattcttttagagtaatttaaaatttacataaaagaacaaattaaattttatatttttctttcagcaattatctattaataaattttaaaaaagctgaataaattaatttttttttaaatatgttaatatatacaaaaggtttaaaaaaaattaataaaccatatattatgtaaaaaatattttaaatagattatatatataatttaaaatatctaagaataaaaataattatgctggtgatatgctccccacagacagtccaaaaaattttaaatacaaacttatttattcaaaaaattctttgatactcaaatattttacttaaatatactagattaataattttaatttcttttttacccatctttttctaaatttaaatgtattattaagtacgaggacataaatttataaaggcggcaatctgtatatgaaactaccattaatcatcaaaagagattatttgctaaatattattttataatcgcagtgtaaatcactacaaatcaattcaatgctttatcataattataattcaataaaagcatttgtgtgaaattatgatttaatgggtatttaatgcagaatttagtaaaatagtttcataaataatattgtataaaaatctaaaaattaattaaaattatttaaattgtataaatatcgttaacttaattaaatgttcagcattagtttattttaaatttcatatttatttacttgcattatttcaaaaataaacatataagagtattttcaatagaacatttggaactgatgagtatcggagagatctacaaataaaaataaaattcattaaaaaacaataaagaagatgaataaatctaaaaatatatcaaattataaaaattaattaaacattaattgacgaatatttgaataaataaaataattaagtgctaagaacttgttctataaaagtgattataaacagaaaaatatcatattttattgcaaaattggagtaattgaaaaaatgagaaccaaatatttgaaggatttttgaataaaatagtaaatttattagcaaaaaaccgaattcaagattttgattaatgtttaaaactctatcgaataaaatacatgtctgatttaaaattaaaatattaaacaatatgtaaagattatcaagtgataattcatctcacagagaataaattttgttgttaattaaattttaaatgaaaatatcgaaaaattcttatatatttaagttaatttaaatatacgagaataatcacaattaatataacaaatttacaaatattacttttcagccatttaaatgtttaatagaaaaatagagaatataatgaggaggacctaatttatttttaattaataatttactattttattcaaaaaatccttcaaatatttggttctctttttttcaattattccaatttggcaataaaatttggtgctttttttaatatacatataaacccttaaaaaatttgttgttacttacttattttttttaatttttgtatattaaataataatatttagcaaataatctctcttggtaaataatggcagttctcgaacaatttggttcctttataaattttgacaacacaaactaagcaatttcagaaaacaaataagaatatgaaataaataaaacagaaaagcaattaaatctgaaggacaaataaaatattaaaattattttacttttattaaatcattcaaaaattactaataaagtttttaagaaaaatttaattttaaaatatatttaataaaatcaaagaacaggattaaaaaaattatttaaaaattacattatattatttattttgtaaactgaaaataataaatattgagtcatttgattgaaaaaagccaattaaatgtgttatatcgttggaaataattattaaagaatttaaatcaattatttagttagtaaaataaaaaaaaaactgttaaaaattaaaaaaaaaatttaaaccaacattgataaaattatttatttgctcaatttagattaaaaatgtaatttaatatttcaattcttttaactatctataatcaatttttaatagttaaaataaataaaacccacaataaaaaatttcatttcatttcaaataaataaattaaagtttaacaaatacacaatattgattaattatatccaaaaataattttaattttctaccctaaaaaattcgaaaatatattagaggtgaattatattgagaattatatcaaatttaatgtactcgcacttaaattatatcgagttattgaaaattgtaattttggcttagaatgcttaaagaatgaaagtttaaacatataaatctaaatgaatatttttttaaaattcttattcagttattttcatggtgctatgtcatttcgcgacagtgcaaaaatgggcacttcgcgaaacgtgcaaatttaaccgaaagagaccgggcctcatcagtacggtgtctctttgggttaaataatttaaattaattattatgtgtgtttcggccctaaaccgtatacacacaaagccacagcaatcaagcaaagcaaataaatataatataccatggcatataaaaagagtatatacggtaaatataattttatttatattggtttatttattatttatttaagttaaaattttttaaactaattttatttgaatatgtttaatcaattttataatttgttagtaatattttttaaatttattttgagcttgcaaggctccaacatttgcattattctgtgtaaattagttacacacgtacaagtctaaacgttttccattggctaagcaatatagcaggataaggggaaggttttcttcgtctttgtggatttctttctgcttcccgtttgcatcctgaaaacagattttatgaacgtgggatttggcagggcaatgacagagggaatgccgtgccgtgttgtcccgttgggaggcccctccggcagctccgatgagagtggataatacggttttagcagttttaaaggtttttagggaattaaataacatttaacaaattataaaactgattaaacatattcaaataaaattagtttaaaaaattttaacttaaataaataaaccaatataaataaattatatttattttgcttaataaaatttatttgctttgcttgattgctgtggctttgtgtgtatacggtttagggccgaaacacacataataattaatttaaattatttatattataacaatggcactaatgctatttatatgttaaagcaaatagaaaaggaataaataatttatgaaataaaacaaaaatataattttaagaatacaaaatcataaatattataatttacccagcagtgatgccacaaataaaataaaacaaaccttatcagatttttattggtaaaaaaaaacaattcataattggggcaaataaatggggaaaattaagcggtaacttggacaaggatttaaattgaagaattaaaatttataatttttttatgaagaaggaaacaaatacattaataatgtttagacaaaatgaacatcaaaaccataaaaagaaacggtccctactaacaccaatttataaattgtaaatttggtaaaattttatatggaacaattctttgttttattagaaatgcataatcagctcagtatttattgaaaaacaataaatattatattttaaatataaacttttacgttaacaattaatatatattaaaatattaaaaaattttaaaaataaatgaataaaaaattttatattatataattatgaataaataatattatgttttgcatagttggctattctataataaaaggtaataaattgaaataataaaaagttttagagaaaactatttcaatcgcatcctgaaaattgtatcctattaattatctatgaatgggtaaacattattaaaaatttgtgttaatgtaatccaattttaaatttcttgttctgactgtgagatggattaataccttcatcaacattttcatttatttaaaaaaattattttgtggacaaatgccaatggaaattgttaaactttaatttattttgctaataatttataatagaatgcagagaattgttcataatatgcatttgtatgcattttttcaaactttatcttttcttttaattaaaaatttgattaatttactacaatgaataattcattaattattttttttagttagtgtagtttttgccttttattttatctaaataatttttttatctttatttttctgtttaacaaatctgtttctatgcgttttaatgattataaattttcttttatttatgaatttgtttattttttattctaattgttgtgtaaaacgagtctttgacgttaaatgaaatattaaaacaatcaatgaaatagcacgataataatacatatttcaaattgaattagctaatatt

SEQ ID NO: 1033 - DNA, 3700 bp, Heterodera glycines
aattgttatgatccactgaatattctggagaggagctaaatctccgtctttgatcatttttgtttccaaaatatttgtgtttttgttcattttgaacttttttccattcctctctaaattttactgcaaaattcattgttgcctctgactcgtatttgttgtaatttacttctttttgactcgtactgaccttttgtctcacttcttgtctgtttttaatttgctcaattgctctcgatagagcatttctaaatttggtagtattccaattttgattatcttcggcatcttttataacgaaatacttgtccaaaactaaaggtgataatttcccttcaagcgataaataatgaggggataaatccatgtcttgatttaaacttgacaattgtcggcaaattttttcaaatttaatgtacaatttttcatcttcttcaacagtgtcactttggggaaataaattaatttcttgattgagtgcccttattagttttgtacttttaccgtatttttccaaaagtaaatcaattgcaatttggtaaccatcttccgaaattggtattccctcaattagctccttagcttccccttctaaatttgactctaataaattatgcttttcaattttggtaaccgaatcatcctcgtggacatgtactctgaatgtctcccaaaatggtatccatttttcaactgacccatcaaatttttcaattgtatttgtagaattttcactcttttgattggctgatttcttggagtaagaattgtgctgtttagcgaattttgagggtttatgtcaaaaatatcttccaattgttcttttttgttttgccattcatttttcttaatcactgctcgattaatttttgcctcaatgtcaagctgtgtacaaaagtctacataaactctttccttattttcgcgcgctgcaactgcaattttttgcaaactttctgccatttctacgcgttttccctgaatttcttccaaaatttcgcttaactcatcacaagcattttttgctctgtataaatgtctttggattgtatttggggttgcattttgaccgggatttatcggaatttctctgtttaattcaacctctatccgattaactaacccgtgaattatatccaatattggcgaactcattttaatcttttgctagccaactagctttttcgaaatttatcaaaaaataatttgtccacctttaaacaattcggttcgcaatggccaaatggtcgccacgtgtcctaatccggtgttcgtccgcggttctcttttgtcagttcgtccaatgacagtagaagaatcaatcaatcaatcaatcagcctttgtttggtggaacaaattagagtttgccaatcacttttaattcctgatggaccccttgatttttcagattttgttttcaaaaagtccccggtggaccaatctctcgtttcccgttgaaacaaattttagcaccaaattttcccctaccgtaaccttcaaaataatgtcccggtgacaagtttttattacgggcgaaaaatacgaaattgacaaataatatttttttaaatcggagagcaagaacgttgaacagattttttaaaaagttaagcgaatgaataacagattttaatttttcatctttcccccttttttcgctcacggacattttccgcctaaattcacatatgctccattgaaaataatatgaattttgaacaaagaaaaaacattaattaaaatggcgatataaactttttctttcttcatttaaattttataattacatttaatcttgccaattcttatcttaatacaaatatttgcaaaatatttacatttatttgattatgttcagaaagaccacaagaaagatgggaaagagggaagaacatacccaaaaaacaaattccgttcaaattcgaatagctcaaataactctaatggttcaatttttatctttaatgactataataggcacttgattttttaattcctttagaattaatatcttgaatcctatgacacgcataaaaattatttttttaattgctctagttaagtataaaagtttaaatataatgaatttttataatattcatttgttttttaattttcatatgttttttttaatgttggatttttataataattttaaattatcaaattgatctctaacccaaaaatttcacctgttgaacattcaattgatttatataacagtagctttctgtgttttcatatttgaatataaaattgaattatgtttttctttttgggttgagttttattttaacttttttataaaaaacaataatattatcataaaaacaataataaaataaatataaaatcattgagtcataatgtatttttactttaaaaaaaattatagtttatatataatttaattataaaatatatttagtggaatttatttaattttctaaattttagctttttgctttcttatttttacctacgctcctttcctctaacaaaaattttccagtcacggttattgtttcttaattatcttgttaaatattatttaagtggaataattgttactttcttttcttaaaagcatcattttaatactgtgaatttcttgtaaaactttaattttttatatttctgttaattaaaaggaagctgttaatatacatatacatattttctagatattaaaaaaattatctttttttcattttttggttttttattttattatctaattacagataatcctttatatttatttttcaaattataaatcttcttatgtaaatacgaaaaacgagtatcctctttgtgtggaccaggatctatcatttgattttttatattttgctataattgggtgcagaataaatatatcgaataacttattttcttataaccagttaagtttttaatttcttttaaaaaaagaatttattatgcgtggaaggttaaattattcagcaaatgttttaattcattaaattaataataaagttaatttattgtagagtagagaatttaatttttttacattaactaattttcttgattggtaatgaataacggcatattcagttgttttaattttttaattttgttaattatcaatatataaataaattcaattattgtttttattttttaagttttaagaaattttctttaattacagaaatctttttatatttatagtataaaatataaatgttgttctttatcgctttctttgtctcaaattttatttagacttcatttcttgatttaaattattaaaattatttttttctctatttttaattatgtaattcccctgctccttgcaccagtaattttgtacattgttggttcttttcaaaatttatttatttgattaaatatcttcattattttatttatgttaaaataaatattttttattatcaattaaatttctatattaacaaaatgtttaattgattttgatatttaaaagtgattcaatttataactaattattattttctttataatgtatatttgtttcggaaaaaaaattttacaaattttttccatatttaaaaaaaaatttccataaactttacaagcagtgtattatgttggttaatttaattttgatttgaataatttaatatgtaatatttttggaattttttgtatttttaatacatattttgggagatagatttttcattt

SEQ ID NO: 1034 - DNA, 7913 bp, Heterodera glycines
ccatgtaagccgaacccagcctcatcctgggagaacctgtgtgttaaactcagaaaactcaaaaagagggcaagatatattaattgggctgatattttatttttttcactattttttttctgagctccccgtaaccttaaatgcgcgaaaaacgtttttttagctgttgttaagctatttttctagtatttttgaaaaaaactgttttcaattaagtatttcggcagtttttagcaactataaatgttggataagggaacaaccctattgattatattttccctttcactccctctcttattgtctctcgccccgccccttgaccagccccataaatatgtctccctttccctcactccgggcattctcccattcattccaccatttcattattttattttattattatttatttcctgctgtcctcctcctcatttatttgtttaataaattatttatttatttattggacaacatttgttttggttaaaaaccaaacatttttattgttgtagcaaatacacaacaatttggcgcagtcacaaacaaaggacctgctctacatcttcgggtgagaaaaggcatcaaattttgttttaaggaccaaaagccgagacggcaaaacaactcatcaaaaagccgggattggctctgagttttgttaaagccgagtcggccatttttcaaaaagcagtaaaagaaactgctagcgtctaaagccgagtcggctcatcaaaattcgtcaaaagccgggtcggctcagcaaaaattcgacaaaagccgggttggctcgtcaatttcgtaaaaaaaaacaggcaaaagaactgcttattcttctaaagccgggtcggctcgacaaaattcaacaaaagccgggtcggctcgacaagttcttcaaaagccggttggctaaacaaattgatggaccccaatcagcttaaactgattttggaggctgttttgaaggcatcggcgggacaagtcaacaattctgcggcattggcgacatcaatcgatgcgcgcctttcgacatttgattatgaccctgagttagggcatacatacgacgtttggctcaagcgctatgggcagaccatcgcccaggatggacaagcactcagcgaccagtcaaaagtccaactattgattggcaaactgggcgaagtcgagtacaagcggtacatcgacagcatcgcaccaaagtcgcagaacgacttcaactgggatgagacgaccgcaaaattgaaacatttgttcggtgaaacccgatcattgtttctccgccgttttgattgcttccaaattcgtcaagacgcgcatcaggacgtgcaaagtttgatcgcattgatcaactcgtcctgcgaaaatgccgatctgtcgctgagcaaagaggagctcaaatgcatgatactgatcattgcattgcgggacgaattcaccgatctgaggcaaaaatgccttcagcgcttggaagacagtcgaacgagcggacggtcgacctcactgcaagagctgggagaagagtgccgcaaataccaaatcataaaggaaagcgcgctctccctcggctcaaatccctgcagcaccagtgccatccgagccaaaccgcagcagatcaaggacaagcagaagcccaaaacgaagccgcagcaaagccacaaaggccaaaatttcctgccgaaaaattcaacggcacctaaaggaaaagtggaccaacgtgatcagccctgctattcatgcggaggcaaaagtcactggcaaaaagactgctggttcaaaaactcgacgtgtgaaaaatgcggacggaacggtcacattgcgaaagcatgcaaaagcggcacagagatccgacgtgttcgtgcagtggccactgattccgtgaaggacacgcacattcacaccgtctcaattaagccaaaatgtatggctattgaaggaagcagcaacaaatggtgggaagtgatcatccaaatcaatgggatggatcacccaatgaatgtcgacaccgctgcccaaatcacggtgatcaaaacggactcatggcaaaagcttggcaaaccaaagctaggcaaaacggccatcaccgtcaggaattgcaatgaaaaagcattctcaatcgaaggcaaattcaaatgccaagtttcgtacaaaggacgaacggcaagcctgattgcttacgtcagcgacgaaatccatcaggatttgctcggcatgccttggattgaagaattggaaataatcccgaaggaattgatgtttccaaattcgtcgcaaatcgtcaattcactgccaacgaagccaatttcatcacaaatcagtgatgaaaagtcactcatttcggcacttcaaaccaattacgccaatacttttggacctgaacttggccattgcaccaaattcagagctcatctgatcctgaaaaaggaggcgaagccggtctactgcaaggctcggcctgttcctcatggagcattggatgaagtcaatgccgaaattgatcgtctttcgaaaattggcgcaattaaaccgattgagttcagccattgggcggctccgattttggcagtgaagaaaaagagcggaaaaacgcgagtctgcatcgatttttcgaccggcctaaacgatgcgatcgaactgcatcgtcatccactgccaaggcctgaggacatctacaacgcagttggcggcgctaagtttttctcacggctcgacttgcgtgatgcctatctgcagttagagttgtcggaagcctcgaaaaatctttgcgtgctcaacacgcaccgaggcctgtttcagtgccagcgtttgccgtttggagtcaaatcggcgcccgcgatttttcaaggattgatggacaaaatcatcgccggaattccaggcgcattcgtctatttggatgatgttgtgatcgccaataaatcactgaccgatcacacctcaacaattttcgcggttttcgacaaaatcagtgaatatggccttcgaattcaattggaaaaatgcagtttcctgcaaaaggaaacgcttttcctgggccacattatctctgaaaatggcattcgacctgacccatcaagggcagaagccattgagaaaatgccggcaccgaccgacaaatcaacgctccgatcattcctcggcgcactcacttattacggcaaattcatcaaaccgatgcgtgagctcagaggcccgctggatgaattgcttaagaaggaggccaaatgggaatggggagttgagcaacagaaatcttttgagaaagcgaaagaaattatgctttccgatttactgttgactcatttcgatccagaattgccgatcgtagtcgctgccgacgcttcgaaagatggaattggcgcgacgataagccacatctttccggacaagagtgagcgcgtcattgaacacgcctcttgtaccttcaacgcggcacaacacaactacagccaaatcgaaaaggaggcacttggcttggtcttcgcagttcaaaaatttcaccggatgctgtacggtagaaaatttacgctgctgaccgaccacaagccccttttggccattttcggatcgaagaaaggcattccgatctatgccgccagccgacttcaacgttgggcgttaatactctccaattatgaatttgacataaaatatgtcaacacaaattcgtttggaaacgccgacgtcctgtcgcgactgattgcaaactacccacggcccaacgaagacattctgatcgccaacatttgcgaaaagacagaatgctacgtcaacttcgtttttcaggccaaagttgagcaattgccgatcacggccaaagaaattgctgatcagacgaaaacggacgaagtccttcaacaaatcagcaaattcaccaacaaaggatggccacaaaaatgcacagacactgatctgatgccattttatccaaaaagagaccaaataaccgaaatcgatggttgtctcacttatggcgaccgtgtaatcattccaacgacacttcgcagacaaattctgaaatcccttcattttgcccatccaggaattgttcggatgaaggccattgccaaaaaccatgtttattggccagggatcaacagcgaaattgagcgcactgtccgccaatgcgacgactgtcaaatggccgcgaaaaacccaacaaaggcacaaattcagccttggaaagcggcagacgaagtttttgagcgcatccatctcgactttgcgggcccatgcgaagacggccaaacgtatctcgttgtcgtcgacgcctattcaaactggccggaagtttgggagatgagtcgtgcaacaagcgaaaagaccgtcgctatgctaaaatcgttcgtccatcgaatgggaattccccgagaaattgtgtccgacaacggaacacaattccgatcagcggaattcgccaacttctgcaaggaattcgacattcgtcacacgttcacgccgccatatcacccgatgtcaaatggggcggccgaacgattcgtcgacatcttcaagagggccatgaaaaagtgccgaaaagaaggcaaagattggattcccaaagcacttttggcctacagaacaacgccaagtgcagtgctcgacggacactctcccgacgaattattccttggacgccggatgcgaaccaaaatttcattggtccatcccaccaatcagaaaatgccgaaagtggatttgaaaaattttggcaattttcaacaaaattaccgtcaaaagatgaaacggcaattcaacgacaaaaacggcgccaagcccatcattttccaaaatggagagccagttttcatttggaatttgaaaggcaataaggcaaattggttgccggcgacgattatcgagagagttggcaactctccgacttatcgagtcgacgttcagacgctccgtcgcgcagtacatcgccatgccaaccaaattcgccgtcgtttcccaatggaaatggagacatcgcaaattggccaagcaaatggaaatattttggctgggaaccaaccaaatcggacccccattaaggagattgaaaaagccaaatctccaattggccaaaatcaaaatgcgccgcgaagatcagcacgcgccaagagggcacctcagcagctgaacatggacccgtcgaagcggaagtacgatgtattccggccatgatctcgcgcagagggatttttccaaaaaagggaggtgttggataagggaacaaccctattgattatattttccctttcactccctctcttattgtctctcgccccgccccttgaccagccccataaatatgtctccctttccctcactccaggcattctcccattcattcctccatttcattattttatttatttattccctgctgtcctccatatttatttgtttaataaattatttatttatttattggacaacatttgctttggttaaaaaccaaacatttttattgttgtagcgaatacacaacagaaagtataattgaaaatattttcttttattattatcgctttaagtaataatgactccaacataaaattttaaaaatcttattgtttctttattatcgctttaagtaataatgactccaacataaaattttaaaaatcttattgtttctcattaattttaattttttaaatatatttactatttcaaaatatattaataagattaaatatataaacaatttatcccacccaataagttcttatttatctataacataaagttaaagatttaataataattttattaaaattcatatataagactgaacgctttcttctttattaatttttaatattttggatttaatttaacaaattgaaaagaaaataattattatctgaataatactcgcactgttgacaacgccaaactgaaataccgcatcaaatttaaattttagttcccgcatatttaataagttcatttaaaatatttgattaattttttaagtatccgttcaagctaatttataattcattgggaaagtatttttttgtgtattttgatggttttcgattcacatttcttttttcgcacccaattctcgtttttgaaaaatttaatttattttttattgttttctgaaaaatttctttgtgtaatatccgaatttatatttaaccttgtcttttggacttttttcaaggtcatcacttgcgaataaacattaaattttagtctatttagttatctattcttttaatattgtagagataaaatttataaatattcactgctatttttgattgaatttttatgctatatataaaagattttcgggtaaatggtactgttctctcgatttgttgaagaacttgttggttcggttaattttacatttctcgattacgtcaattactttaattaacttatttaaatttttctaatagattaaaattttgtcttcttacatgaattttataattatattaattgattttcttctttttgcagtttttaacgagataatataattaataaatgtttattttataatattaatttaactatttttgaattattaaatttttaggttcattgacacttttcattatttatggttttataagtttttaaattccgatgctagaatttttattttaatttttaaataggctgcaataatttaaataatagttttaaaagttgaattgacaaaatgaactgacaagttcaaacactcattatgttttattcaaatgaacatataatttataattcttttaacatttctgcatattttagtttttaaatgtgtggcattgaaaaattctttaacattaaattaaattcttaaattaggtgaaattatattttttctgacttggcgagccttatttttttcttatacacagaatttttaaaatttatttaccagttcattttacattttttaaaattattataagccgataatgtttttaatccatttaatttaaaatatatttgtaagttatgtgaaaatttatatataatattgttgtccttgtcacgagaggctcatttgttctactgcgttccagaaatttacatcttgttcgttttattttagtttgttttattatttgtatttgttttttggttattcaatcataataaaatcaatattttatgggccaaaaattctgaataaatacttgctaatctgactttttatgctgatcaaaaaagtctttccagggttgttccgggtcgagaaaaaggccgggtttcgggtatcgggtttcgggtcaattgacaaatttttaatttgtttaaaaatcaaatggcactgcaatatttgcagcgaattgcgccatttataggacgatggaaataaaaccaaatggaatcaggtttttcagccatctgctttgcttaaattcaagaaattcatacaaaatatctttagaaaaaggataataatgaacaaaaacgaatacaaaattttcgattccattgaacacaatcgtttcaaaaaaaattctcaatttccttatccacctaattttcacccagacccctttcttaccagtgcttatttcgacccgaaacccgacccaaaatcatcgggtcgggtttcgggtttcgggtcgagaaaaaggccgggtttcgggtaacccggaacaaccctgatctctactgtaaaatgcactatttacttaataaatacagtaccttttatagatgaaagtgcccatatctcagcgagcataagtggtagaatcaatattcaaaaggcaattcggtagtaaattttgtgctccttccagtgggcctactaaaaatttccagaaaaattttcccaaccccctagggattttttcgaaaattttcaccatttcaagccatttttgggttttcagatcaccatgaaggagtgatctgatcaagttggtgttaaagacttttttgat

SEQ ID NO: 1035 - DNA, 5099 bp, Heterodera glycines
  unsure (1)..(5099): unsure at all n locations
attttccccgaatcggaaaatttccaaactgatcggcctttctcgggggngaaaattggagtgatcggcgatttggagatgatggcgtgcattttcgtgatcagctcctcgcattccgttgccttggcgtgcacatacggtggagggcaccaaaatatctgcacgtgcgggaagcgctggcacaggctgacgatcatttcgaattgggccgcgatcgatttttcggtttcgccctgcatcagagaatcacgtccagccaaaatgagcagtgccttgacacggcttgacaaaacgatcggctgaaattggcggattaagtcggccatggaactctctcctccgatgcagtaggagctgttgatgtgtttggcgagcatttcggccgatgagtctccgagcagaacacggtcatgtgccaaaaagcggctcgctttatgcacaatcgtggcccgcacacgttcgagtgcccatgaactgtctttgaagacctcgtgccatttgtttttctcagaatcgggcagcgaattgactccctctggcatttgcatcgacaagggcttatatcccgactcggttaaagcctgtcgagccacaaagcacgatccgacccacttctccaaagcctgccgttggtcctcctccgttgggtatttgccggtgctgatttggtccccccttttccctgtgtacatacacaactccagcttcggttctgctccaacaattgtctggaccaaagtttgggctgccgtgagcgatgaagccacgcccgatcggagcagaaagatgctgagaagggcttgaagcggtgttttgactaccgccgatcccagattcgacatgttcaggaccgggtcgatacttcccagcgtgattttctcgcacagctcgtgccccgagccgcctccactgcactccgaagtccatccaaatccggcactgacacttccgacatccattggctctgaaaaggagtcgcttttccaatttccccccaaacaatctgaagcaattgtccccaattgcgattcgctttttcccccaatttcgcggcacttatttccagtcatttcgcaaatttctgaacgaattcctgcgtacatcgacaacaattttaggtcgtttttaaacggatttttccctttaggcagtgtcgaaatgtctgggacgccttttgggactttaaccaatcgttcaatcggcacttttattggggtgatctcctttttgtctattggtaccaaatttgccgatgaatcaccaatttctgtgatcaaatatggtccaaaatgtgaccaaagtaactttttgtgaggcgaacgacgattttgaccaggaaagacgaccataactttctctcctttttggaacttgttggccgtgacttttggtcgggaatcataccaaattttcgactgttccctcgcttcttccgaatttttctgggcttcttccaacatgtttagcagattttctcggaataattgaatgtattttccggaatctatcgtgtaaacaggattaacccgaaatggtacgtgtttatcgagcggaaattttgcattccggccaaacattaacagaaagggtgagtaccccgtaacatttgacggtgtaatgttgtaggcgaaaacgccatacgccaatctctcatcccaagtccaattgctcgcggtcgactttttcagaattccgatgataattctgtttattctttcggccaatccattggcctgagggtcataccccgctgtgaaggacctttttatgtccaaaacttttgaaatttcttccattgtcgcattcaaaaattcctttcctctgtccgaatggatcttttgtggggtgccataaaccaaaatgaatttttcgacaaaaacttttgccactgattctgccgacttatccggaattggttctgcgaccaaatattttgtgaaatgatcaacgatcacacaaatatattttttgttcgattggcttgggccgacatctaagatgtccatgcagaccaattctaatggttctaacgatttgacgacgttcaacggcggttcattagcccgtgaaatgcgtgtgtgagcgcaaattcggcaactttcgtgtgcccgaatgcaatcagtgagcatatttggccaaaaatactcttccgaaagttgcttaaacaattttttgccactcatatgtcctgcacaaattccttcatggcgatttttcaccaactcatttctgaatttttgtgggacaaaaagtctcattttgccttccttctcggaaaggtacaaaaggtctttgaagacgacaaatttatggcatttatcaatgactctttgctgatctctttggtcatttggcaaaactttacgttcaagaaactcgtaaattggcttcatttcgccaattttggtctgttcgacccattcttgtctttcttccatcaaaccaaaattctccaaatcattttctgttgttcgaattttaccgatgaatgcgatttcttcggaattttgttcgctttcttcaatttcgttgccagttcccgatcgtgacaaaacatcagcaattatgttcttttttccgggctgatattcaactttaagaatgaatcttgaattcaattctaatagccagcggtcaattcgcgcatttcccgtttcgtttttgctccgaaacatccaaattagcgctttgtggtcggtaattacgcgagttggaatcattgtgacgaactgcgcgaatttcttcacaccgaaacggacagcaagtgcctcaagttcggtggcagaatatcgagactcatgaacattgcactgtctcgaagcaaaataaatcggtctgatccttttctcggcatcaggctgacttaatattgcagaaattcccattttgctggcgtcagtcattatgataaaacgccgactttgatcattttgagctgcttcgaaatcgggaaagtacagcaagacgtcctcaacgatttttcctttcagataattaatgattttaatttcgtcgtcacaaattttgaactcaactttttcgctcaacaacttaaacagaggagcggcgatcgtaccgaacgagtgaatgaatttccggtagtatgtcagaaatccaagcagtgaatgaagttcctttttatttttaggaattggcaaatcaacgacgggcttcactttgtctgcatccatttttattccgcttctcgttaagatgtggcccaaaaaaggcaattcttcggcacacattttacattttgacattttcaattttagaccggccgctttgatcctttcaaaaacttcgtgcaagtgtttggtatgttcttcaaacgattctgaagcgatcaaaatgtcatcgatgtaaatgaagacaaaatcgttgatcatgccgtcgaaaagacgagtcatgaatctttggaaagtcgcgactgcgtttgttagcccgaatggcataactttgaactcgtaaagaccgtactcagttgtaaacgccgttttttccaccgaattgtcttccattttaatctgccaataccctgacataaaatcgagagtactgaaaaacttttttcctcctagcattaacagtatgttgtcaatgtttggtaaggggaagctatctttacgcgtaaccgagttcacagctcgctaattgacacaaaaacgtaatgtaccatcacgttttggcactaatacgatgggactggcccatggagaaatggacgattggatgactcctcttcccagatagtcttgaagcattgccgcaattttctcgcggtatgcatatggcacattcctcattttgattttgatcggcggtgcgtcacccgtttcgattttgtgctggaccagatttgtttgggtcaaatcttcgtcccttgcagcaaaaatttctccaaaaccttcacacaattctcttaattcttcactctgttcctcgttcaaaattccaacatttttctgtaccgtttcccacaacaattgttgtttttcaagggtttccccgtttggctcagatagcatggatacgatgaccgggcttatcaacatatcatcactttctcccagttcaaaaatcggctcaacttctccgactttttgccctttttcaagcgcaattttggaatgcgaccgattcgttacagggacaatgattttgccctcattggcaatagcaactgtcggctcgacgtgcagatcatttgaattatccgatgaaatcagaagctcactagcttcatagttttcattgactcccatttccaaaatcttcgttgaccgtggctcgatggttgtaccgtaaattacagtaagaagatttttggagttcagttctgaattctcaaattcaaccatcgaatcatttgcctcgtcataaagcttaaagcccaattttccaagtccatttgtgccgatcagcatgtcaaaaccgatcggagcttttgtcacatgcaccgcgattttaacttctgatttgagaccacgacgatgaattggcaaattcacttttaacaaacatggcaccattttgccgttgacatcgagaactcgcacgtttgtttgcgacggttcaagggagtcgaaatccaaatttttctcttttaccaattggtaaagaaaattggcacttatcagtgatatttgggcaccaccatcaagcattgagtccgtttccactccaaacgtcgaggttttcacgaccatcacttttccgatgggaggaactgcctcattttcacgaccaacaacaagtctttccaaaaaatcatcgacttctggcgcaatttcgattttgccaaggcaaacatccgttgtcacgctttcttgttgctccacgatgcaattttgtcgaagaaaattcgaagaatttggtttcgttgaaccaaaatttctatttgaattttcaaaagttttgttcgaaacgtttacgggttgggtttgggccttattttgggcgtttgcctcaaattgtttgggccttggacagttccgcgaaatgtgcccgacttcattacaattgtagcacttccacagtttttgctcaaaacttggattgttttgtctgatcggtccattatttggttgaaatccggg

SEQ ID NO: 1036 - DNA, 4421 bp, Heterodera glycines
  unsure (1)..(4421): unsure at all n locations
ccaaagaatcgtcgacttctggcgcaatttcgattttgccaaggcaaacttccgttgtcacgctttcttgttgctgcacgatgcaattttggcgaagaaaattcgaagaagttggtttggttgaaccaaaatttctatttgaattgtcaaaagttttgtttgaaaggtttccgggttgggtttgggcgcttattttgggcgttggcctcaaattgtttgggcctcggacagttccgtgaaatgtgtccgacttcattacaattgtagcatttccacagttttggctcaaaacttgggttgttttgtctgatcggtccattattcggttgaaattcgggctgccaatcacgaaaaattggttggaattcgtgctgccgttgatattcccgactaaaattacggcggggttctcgaaactgagtttcattccgatcaatctttgacttttccgcagacacaaaacgttgcgttgcgcgctgtgtcgattccgcacgcgctgctagcgagacgaaatggtccaaagacattcgaggcgttcgaatgagttccaaattaagtgacaaagttgggtcaccaattgatcggatcaaatatttgatggagaattcgtctgacaattggaaagaaagaccagggtaggctctcttcaccaaccccgaaattcgacctgccaaatcatcaatcgattcgttgggttttcgtcggacccctaacatcagctcatcaaaagcattcaagttttttgagtccgtttcctccaactgtcgcatcatttcaccccgaagcagttcatactttatcggaatgactgctttcgccgcttcaaaagctctttcagctcggccatacactttgctttctagtcccttaattcttttttcatccggccaactgtcggtgtaagcgtcgaattttttgaaaaaacgcttaacttcgtccgtcccttcctttccgttgaggtctgggatcctttcaaggaccatattgtactccagactacttaaaaccgctaaattttggctttggggtggcagcatttggttttcgtaaaccgtaaaattttgctgctgtcgcgccactggacggtacaaaacactgttttgttgctgccatccacgctcttctcttggtggctgttgatgcatttgcctcggaatctccgttgggtgcatcttttgacgtccatcctcaaaaagatgtcgtccgacgaattcgttgtgttgccgttcgcatggcaaaaagccgaagtttgcgttttgttgttgccgcgctaacgcaggttgttggcgaatttgaatttggcttgagcgaaaattttcgtgctcccggtaggggccaaaatcctcataaatttctcggtgccggatttggttgcttacaattggaaagttgtgcaattcgccattaaaatttattggcgtcgatgtacacccaatgagttcgctttgcgaaacatgacgtgaatttggcgccgtttcccgaaccaaatttctgttaattcgctcgaaatgcctattttcggtgccattctcaacgaatctcatccttactccttcttcccgcaccaataagtttccaaaatttggtctcaaaacttcacgcaaaccttcaacaaagtcctcgtgaccaacatttgcattgcgaatttgctgctgttcggcaccattgttaccaccaccgtttgctcgcggcggcaaattcgattggatggacacatgcagaaggcgccgccgaatttcaatttgctgctgctgcttccatttcactaaaatggtgttcgttttcctccgccgacaaactcaaatttcggttaagtcctggcgagatcggagcgttaaccaatggttcattttcaccatgaactccttcaacctgttgttgttgctgctgctcttcaaccgctgcgttttggttttgcgcaaaggttcgcaaattcaacgctctttgtcgtgtcaatggcggagagcgaattatcatttttgcacctggctcaggtatagcaaaaacaaaacaaaagtttccgctgtcgacacttttccactttttcgtttgatggcgtggcgattaggacggcgaatgcgatagttcggctcgaatttgttgcaattttaaaacgttcgactcgaatcgttttgttgccctttatcctgtctcaggatttttaactccacttcttttcaacttcaactccaactcttttcttcaacttcactccaacttcttttcttcaaattttgaaatttgccctggctcagggtcaattcaattccgttgattttgttgtccggttcggacttcaaacaaaactacctaattccgatctcgcctttccccgtttacctgctgttcctcaggagcgccaaataggaaagaaaaaccgttttccttcaattgaattggggggtggagaccaaacacacgaagacaaagccacacacaatatttttttttgaagtccgaggagatcaccaatgtgaagcaaattgagaacgaaatttagagaggaaattttggaaaacaaattaatgagaataatgagaagtgaaaagtaccaaacataaattaaagaggtcaacaaacataaaataaatagagataaaatgccataataatttaaaattaaaacaaatatcttaattaaattaaaatctccaacaggaatgccaaactgaatggaaagcggacaaatgccaaaactgaaaaaattggtgattgcaaattattaccatttagcagactaattacaaatttttggtgtttgttaatgtgttatttgtattagtttaaataagtaacgatgcaaaaaatggtccaagcgatgtgaaaagcaaaagctaaaaataattggagtgaaaaaacaaacagataaaaattataaaatttattttttaactaaaaataaataaaaatttataacttttttatttaaaatcttaattcatatatcggcgaaatatataattttttattaaatttttctaggattatgaatttattttccaatttttttttggcactttgtttacctaccgtaaacaggtggtaccgttgttgtgccacggcttcgtcccgttttgtgtcaataacttgggttaacaacagccgttgctgtagcccgtcacaaatgccaacaacaaacaatggcacaagcagcaggaatagcatcgacgagagcactccaccgtcaagaaaacagtaaaaaattgccatgaaaaacagacaaacggttttggccaagttcgacagaaaagcgggtggacactgctttaatctaaaatatttggagaatttaatgaaataaattttaaaaaattagttgtgtatataagagcattttattcgtttataaatttgaaattattcttatttaaaaaatattatttaaacacatgaaatttgatcggactattttttaatacaaaattaattgaataagttaatatcatctaaatggataaggaagaacttttgaagcaccctaataaaatttgaattaatttaaaattattaaaaaatcgaaattcattgatttaaatttcttatattatgtacaaaaaaagaaaatatttttaatcgaaaaaatgcaataataataaaatttataaattaaaatttactttaatgaagctggatatattacggcaccaacaattgccgaaacgtggtggacaaggtgaaaaattagcggaaaccaatgcaaatgctcaacgcaagaagattttcggagaaaaagcaatggaaacaatgcccttgacaggccaaaagcaatggccataatggccaaggtcataggatcgagatgggattgggacaacattcctttactaaaatttaaaattaaaaaatttatttgttttgaggtgccatgtttagtgccatcatggcaatggcatggactcgaaattggactggggaaaacattcaattttctcaaaataaacaaaatttgataggagtggatgaatttttttaaattatgatttttttttcggtatttgaactctttttggctaatttgagttttaatttttttttctgaaagaatttttgagacattaaaaattttaattgattaaaattaaataaaaaattcaaatatttaaacaataacactaaaaatggcattcaatgtcaccataaaacaaattacaaaatcacatcaacncatttcgagtgccatttttcttcgaatttaaaagataaatgccggatcatcactattaaattttgatgtcatcatatcagaaagcacacaaaataattgctttacgccccaaatgatgtaaaaaaataaggaaaaagccgcggtgtgaaaatccgccgtcgcacagataagccaacagcgaaaaatgatgatggcacggcactgtgaccgagtgtgcccgtgcccaaaaatttgccttttctctcgcccccccccc

SEQ ID NO: 1037 - DNA, 1246 bp, Heterodera glycines
tttttttaaatgggaattttctaagggcatgcccttaaattgccctgaattttttataaatgtcaatgaaattggaatttcactctgcttctaaatctaattctgtatataactcggcgatgaccaaaaaagaaattttctaaaatgaaaacgaacgaaaatatttttatttttatatttattgatttgtcaatgcataaagaaagattgacagcttttttgttaatttaaaaaattttttatccaaaaaagttgttgttactgccttttccattattttatgcctttttcgcttttcgtgttaattagaaaagttatataattgattttttaatgaaaatttaaaaaataaataggtggtataagaggcggtcgtggacgtgttggcggctttggcgtgagcggaggtggttttcgttggcgcggtgctgctggcgggcgcggagttggaggtgttggcggacgcggaggtgttggcggacgcggaggtggtggtggacacggaggtggtgctggtcagggatggcacggaattccgagttccgacttccgacatttttggggtcggaattccgacttccgacttccgaaaatttttggggcctcggaattccgacttccgacttccgaaatttttgatgaaaagtcggaatttttttgagttttttttttcaaaaaattagcaatttttgtacaatttatgttaataaattgcatagaaattttcaattttttttccgacggcacctatcggcaccgccggacccaaaaaaaaacttaattttcttgaaaatttgctcaaaatcgcaaaattttccattttttggacaaaatttgttaacaatttacattaaaaattacaaaatctttcccggcggcgcatatcggcaccgccggacccttccttccccacagtttctccaattctctttggataaagcgcgccgcaaaaaaagggtgtaactttcccaaaaaaaaatccaaaataatagaaattacttaaaatattttgatctttttaaaaaatatagaaataaactaaaaacagtttgaaattaccttttacatggttaaaaatttagcctattaaatatatttttttaaatttattatattttttttgaaaaattccgacttccgagttccgacttcgacattttttgggggtcggaattccgacttcccgaaatttttggggcatcggaattccgacttccgacttccaaaaatttttggggcctcggaa

SEQ ID NO: 1038 - DNA, 5398 bp, Heterodera glycines
  unsure (1)..(5398): unsure at all n locations
tgaccgtcctcaaattggcactgatttcgcctcgtttcaatgtgttggtggataaacatttcgatggcaaacaagtgaattcttttttagggtttctattgttttcaaagatttcgtgacaaaaacgggcctcaaatttcaaaggattttgcataaaaataccgctgaaaaaatttttttccaatttttttagttgtgtccgtttttatgttacggcaagttttttttagcttttttttgttgtaaaagtgattgttttttatagtgtttttatggaatttaggcgtcacaaacctttttaggtttcaaaaatgactgaaaattattattattttcaaaagtcagtatttttttttgttaaagtgccgggtttttaagggctttttggttatctaactaatttattgtaatttcaaatagaataaaaacggacaacacaccaaaaattgaaccttaagaatttaaaattggtctataagatccccgaattgtcagtttcgttgattttctgtggcaaaatcaaaaattcttaaaaaaaacacttacaattagcagaaaatttgctgaatttactgaatttaaaattttcacgtaatagaagctctaattttttaggaagattttcttttttaatcgataatttggcgatttttttaaggaaaaaacccgtaaaagtgccaaaaaatttttatcctttttcgttacagcattttttgaattttataaaatagtgaaacgggcgggccctcccaggatcattggcgaccaaatattatccagaattactttattctcccatctcaaacttgggtaattaaaccacacgtattggtgaataaaacgaaatgtgaaaatgaagtgaatgatggatataacgcggatggcgaaggatggaaatgaaatggataagaaaatgactgattgaacggagataaagagatgggaaagtgaaggaaaatgcgggaaggaatttgtcccggaaaaggccaaaaatccaattaagaaatcccttttacacctccatcccttgaagcgatcgtccccgatcgatgagtaaaattttggtggtatccgaaaatttaaatttttttttttaaatcactttttgataaagcccagaggtgaaaatgatgaaaaaggaatgagtgagaaatatagagaacagaaaaaaaatcacgttcggcatcgtttttcaatgtgtccgaatcttccacatctgcggcatacaacatccgtccttcgttctttcggtgctggtcggccatgttcgactgcttctgcgtaactcgttcgtggctctcgttgtggtggataaggcgtcatgcgtacatttggtcctgctcgtccagtccgagcatacactgctggcggtggaacggaagtgtcaatgaccatcatgccgaatgaatgtgccgaggatggtgcaagggaagaagtgttcgcacagggcaaaacagggtgtgcaaaaactgagaaagaattgcctaagaaactgggagaggaaaaattagttgtgttaatcctttggcctagactctcatgtctcaaagtgctatccctttctgcgtaaaactcataggccattgggactgatccattgggccgggtgattgtatttcccacccgattcggccaggggttgcttattaggccaatatagtcaggggttaccgcaaccgtcattttaagtgcttggtcgagaaaccgtctccacacttctcccttgtgccacaacagagtgaggtcgccaatgacaatcaaaccaaaacgtggtcgagaaaccgcaacggttgtgcgcgccgcatccgcccagaattctttcccaatgttaacatcttcagtccgtccagctccggtgcgtgttgtcaagacgatcacgagatctgcctcttgactttggatcgaatcaactgtaccagctttgacattttgccaattcctcctttcaatttccaatgtcacctgctttcgttcggcctgataaaaacaaacaatttgaattagtcccgaaaaggtccgctgaattatccccaaaaattccaaagccgtttcacgctgttccggattgtgtgaagagaatgacacgctttcctgttgagcgggcgttttttggtgaatgagtatgactggacaattttctgtgacaattcgtggtcccatgaaattcagaaagaatgacatctcagtgtcgggttttcctggaacgagtcggtcaccggctggtgcgtacactcccgcgtctaggcatttgacaatggcactgtgagacctgtaacaacgcgaaaggacagttcgatcaattcctttggccctttccaaaacctccaaaaccgactcaaatccgtacttaccacgaatcggaagcatttgacttggcaaatgcactcgtaattgttgcttatcgccagttagtagaattttccttaccttgcgaaattgggttaatgtggacagaatggctgaaagcgtggcttgaccacattcgtcaaccaacacataattgatgtttcccaaatccagtgccaactcctccgccaatgccagggtcatgaaatacacacggtatttcgtcatgttcagtagagcggcagtggtcgtccgctctcgtgcccttctcggtgcccggttaaaatcgtccacgtatttctgaaataatttttcctcattccacctctttcctggtgctccttccgtgggagggatatttccatacctttggactgcctcaaccaacaaattgtccccgaggggccgaattctgtccatatatcgccctttaccttgaccagagaaaagtgccagcattggaactttttcagttagtgcctccattgtatcttttaccaactcacacaccgcaacgttcagaggggaaacggcaagaatggcggcatcagggtcctttttcagcacactggcaatgcactccgctacggaaacactttttccagtacctgcgggggcttgcataaaaattactcgcgtctcctggtccaaaaacaatgagtgagcaatccgttgctcttcgttcaattttccaaccttttctgtcagcctgacggctgttctcgtttcgtccgttccttttcccattaaaacccttaaaatatgagagacgggggcattaccctgcgcaatatcggacaaaatcgttttttcgaagcacatttctctaaatgttaatccgccataattcggtaccaagaccaaataagactccatctcgtccaaaatattttcccagtcctcccaggccttttcataacccttttttgcctgaaaactcaaaattaatttcacctttattgtgaaaattcccgggtttatttcacttgccgatgccgaaatgacgtgtccatgagcgcaccaatgggccttggtgtcattggcaatttttgcattcaccggcgtatcttcctcccatgcttctaaaaagtctgcgactgaagatttgtttgttaaggtccaatcaaaagagagaagttgcgcctttttcaaatttctctgaacttcctcatccctgacttgtggtctgtcccagaccaattgaacagtcacagcttgcttggccaattttaccatttcgtgggtcctttgtaccgctgctgctgctcccatcaatctttctgaaaatgtatccaagggaaagcagaaagaatcattacaatctttggcaccaataaccacgtggtttgcatgggccttaatctcatctcctttcatgtaaggcgttggatggggcaataaataattctcacccatccaccattcttgaggactcgtaatggatgccaactgcagataaagcacctgattcaaagttacccttccaggactcatttcggtcaaatgacgggcataaattgtctgtggtcttagcatttgggatgccattacgaccgccgaccgaaagtctccgcccttatacctttttaagtcagtgactatccctgggcaaaacgtacctgtaacgaaactcacatcagaaatattttgtgcgattgcttggacattgattcggccttgtacgtaccatggacgtgtttcatcaacggggtttatgtcgtacgacaacctttcaaaaccgactttccatacccattgacttaccatcacaacatcacccatttgcaaacgccttttagcgcttacaatttcatccgggatgcccataaagaaagggccctgaccactcaatttgcctccaactacgcttttcgcgtccgtttggcataccaaatattttaaaaccgaattttgtgattcgtccatttcttccacattttcaaactcttcctctgtttgaatgggtggcacttcctggttggcattcacatccgtatccatttcctaatttttgcatatcgatagagaaaaaaattctgaatttttctatactgattttattttggtttatactcccattccaaaattattaaataataattttaaaaaataatatttttnaaagattaaatggctaagcggaccgtaataaagaaacttcaaagcaaaaaatcagtccaaaaaacgtggaacaattgngaggagagaaaggcgcagacgcagagggcgacagaagcccgtctggccaagaaaagtgagttttttcatcaattttaactcaaaaaaatcatgactcggtgtgtacaaacattcttggtatcattcgaaagcttaaagattagggaatttataaatacaagaaaagagcaaatactgcaatgagaaaaccggaaatgcatcattttacgcgtataatcacgaataattgtttgtctattgccattatctcataattttgcaacagaaaaacttttgtagacttcaagctctcgaatgataccaagaatgtttgtattgaccaagtaataaaaaaaggtatgacctataaaagtgaggatagtcactgattggacgtgtaaattggaatagagccaaaaaatcaacaatttataaaattataaacagaaaaacttagtggactttgatttgggcaaacactttatttttcctaccatcagttttccatattatttcaaaaaaaaacaatttttttaatgggaaaggtctgccgaagaagttttgcactatataaattaaaaatttttttattatttaatataattttaatttaattataaccaaaaggcattatcataccagcagattatcagtttgtaaatttacataattaattatttaaataaaatttctaactataattgtctacattcttttttcccaaaggcgttttacttttttaatttaaataaaattttgttattagcaactattttctagttttttattttagcaactaaaaaactataaaatttttgaaaaaactattttaaactattattgcttgtgaataaaaatttgttatgaaaaatgc

SEQ ID NO: 1039 - DNA, 3395 bp, Heterodera glycines
agaaagggccctgaccactcaatttgcctccaactacgcttttcgcgtccgtttggcataccaaatattttaaaaccgaattttgtgattcgtccatttcttccacattttcaaactcttcctctgtttgaatgggtggcacttcctggttggcattcacatccgtctccatttcctctccttcttccactctgtccagacaaattcgcttttcaccttcgcttaactcaaggcctttctcaaactcttcctcgaggccttcagacacaccacgtgtcttttcaattacagaaataacagtttcaactgtggttgacaccacatcctcaacaacaatttcctttgaagctgacgcttcttcaatcacacacaactcttcctgtgtggctgacgccacttcaacttcaccagaactctccaaaacatgggtcggcgaattgtccttgcggcgacgtgctgaacgtttgcgaggcattagcaattaattattttgcttttgaaaaaagaaaaagaaattatttgttaaaattaaatacaaacgtaaagttaaaacaaaatttaaagtcatcaataattgaatgaaatgatgaatggacgaaagaaggacgaaaaataatgcctaatctaaatatcgcgctggtttgttaagttttgtacgatttcttaaagcataatgaggcaattgtgttggttcgcatgtatcattttctatgttttgagtatcactaaccaggtcattagcatggttttgcgcaggtaactctatttgttcttttataataattggatgagaatgaccaggtaaatcagcaatttcttcgctttctgcttccacaagagcattattttcttcgggactaagccagggagaagtgcaagctggtcctaggatttcaacgcatttcttaagttgattaatgtgaacgcggcgcgggttgctttggggcgaattgcaacttacaatggtagcataaataccgtcaattttaattatcctaaagacgcccttccacggcaactggaattttttagatgtatttatttttcccgcataatttcttagcaaaactctatcaccttcctttagcttaggcgttctcattgttttgtcatactgtattttcattttttcttgtgcatctgcatgcacttctgaggcacttttccacgctctccgaagagagatcactagtttttgtttaaattcagtttcgtcagtaaacgctaccgggtctctaactttagggtctaaaatttgatctatgcaaaatataggatcgcgcccaaacattaaaaaataaggggtctcgttagtagaagaatgaactgatgtattataacaaaaattagcataatcaaggaattcgtcaaaatctggctgttctttcgtaatgtacttagctaaaatattatgaaaagtcctaaaggtacgttcagtcgcagcattgccttgagaccaatggggtacagcatattttttatttatatataatagtgaacaaaattctcggaaaaattccgatgtaaaggcggtggcattatcactgactaattcagtgcagccaccaaattttaaatagcagttctttaaaaaggctatcgctattgtgtgtgatttagcgtcaggtaatggtaccgaaatgacatacttacaaaaccagcaaataatattcaaaatatatttatttccactaatagtcattgggaagggcccggccaaatcaaggcctacgcgagcaaataaagtatttgcgggaaccatttgcatttcagctctaaaagctggagatggagaatgccttaattggcaagtaatacattgtttgtaccaggataaaatatcagaatattgtaaaggccaataatatttacgacatttctttaatgtctttttcaggtccatgtgtccccctcctaatggtgaagaatgaaatgaatcaaaaatgagagatcttaatgaaattggtaaataaattcttggtgattgttcggaatatttaaaatataaaattcctgagtccataacaagatttttagcattttcggtgagattttccatagattgagggtccatttcatcaggaaatttgcctctttgtaaaaaattaatcaattttgaacactgagggtcttctctttgttctttctttaaatcaatgtcataagaatgcccgtcctttcctctaagaattaaattatttatgaaaggatcaaaaattactctctggtcaattgtcaaagacaagcaaattggaaattcagcaatgtcatccagttcgtccaaattttggacttccttaattgaaatattttcctgtgctcttgacagagcgtctgccaaactgttttgttttccactgatgtggacaattttaatttgataggcctgtaactcaattagccaacgtgccaaattgggatgagcttctgcctttttaagtaagtaagctaatggtttatgatcagtatgtaattcgacatcagacaagaaaataaagggtttaaattctctaagagcataaatgatggcacctaattctatttggactgtgggccatttcctttctgaggcacttaatgttctgctacaatacgaaatcgccgaaaatactccattgttattcttttgcattaggactccggcctgacctactaaagaggcatccgtaaatacatgaaaaggttttgagtaatcaggaaaagtgagcaatggctcgtgtgataaaaggtctttgattttctggaaagcctttatttgttcgtctccccaattaaagacagaatttttacgagtaagacttgtcagaggttcgacaattgtagagaaattaggcacatgccttctgtaaaaagaagccataccaataactcgttttacctctttcacattagttggtgcttgtaaatttttaataatttctatgcgacttaaactaggtctataacctttggcatctaaaacatagcctaagaaattcatttgagaagaagcaaagacgcatttcttcggacttaattttaaacggaattgcctaaatctctcaaagactttacgtaatgcacttaaatgttcttcaaaatcaggagattttgtgaaaatgagaatgtcatctacatatgcaattacattgtcattgagacctgttaaaactcttgccattgcccgggaaaatgccgcagtggcattttttaatccaaaaggcatatgtgtcatttgatagactccgtcttcagtaattacaccgcattttcgggatgcttcctcactaagtttaatttgaagataaccactggacaaatccaaagaggaatagtaatggcaattagcaactctttccatgatggcatccattctaggaagaggataatggtcaggaattgtgacatcgtttaat

SEQ ID NO: 1040 - DNA, 2209 bp, Heterodera glycines
ctggatcatccgtggtagttactatgttatgctcaccctccgtaaatgaacctaagtcatattgagattgactaaaaacatcataaaattcatcgcacagcgattttagtttttctaagtctttacctactacagaacttttggaaagatctattttaaaattcgggtcgacaacaacaccttcactaattgacatggccattaggtcttcagagctattactcattgtataattgttaatttgtctgacttcgtcggcataagccaaatgtttacccttgtaaatttgaaaaggcatagcagttggattaataataagaattttcactgtccctcgaaagggctccacaattaaaggaattaatccgaaatgttcattcaaaagttttttatcaagagaatgaatataaatgggtttatcagaaactattgagggatcaaattgagcctgaattatggtccctttattcggaggaagaattagagaattgattgcttggattcttaaattattcaagagagaattatttggtaaagagcctaatggggtgataaaattacctacactgaatttactattaggatagtcaaaagtaaaaggtggcaatttaccaaggatattacaaccaattagaagattataggctgatgttttaaatttgttatcgtccacaagataaatggtttccttaatttcaaaattccctatagaaaaaacaacagaaactttttcagtaagttcaagtgtgtgacccgaggcacttataacattgacaaatgttggatatggtatgcattgccaaataggagccatcaattttggcgctacactaatgctagctccagtatcaaccagacttgggtttttcacattattaattcgtgatgtaataattgagcaattaggtgaaattgagccaagaaaattaacagaaatcttttcaaagcgaggtgattgatccactttcttcatcaattgaattggattgggagtgaggcttaaaacgcccctttcttttgaaccgttccgaagtcggtatccgttttttgatactttgttcactttctgctactgaaatttcatttacttgagaaatgggagatatcgccctaacattatttgtgagagtgcaaccaaaaataatttttcgttcttttggaaggattgtgactccaccaaaacgatcgattaaattggcaccaattattaaatcaaaacattcgttttcaaaaaccgaatgatcagtaaacaataaaggagcttctcctaaaatatcttcaccttttgctaaatgagcccatgcaactatttttccaactaatgaatcacccgaaacttcgagtgggttcattccaagcgatctgaatcggatattaacttccctttgtgcacttttgggtacacttgctaaataaagaattcgatctgagccaactgaggtttcagaagcactatcaactaaagctctaaattcaacaccattaatcttaattaggaaaatcggaaggtctaaatttgcaggaataaatccaaattctttaaattcagcataagaacgaagcataaatattgattcacaaatagtttcacttttgctgtctctctgaggagagttcatttgctttgaaggggatggaattttattaacttgaacaaatttaatgtcaaaagattcaatgggagattgggagggttgtgaattggatgattgaggcaatgattgaattatattttgagctgtcctaattgtttggtttcctaaaagaagtgatcctaaacgaccatttcccagatatatctgtagtgcaaaaattccaaatcttaacaaaacatcgatcaatgaaatcaaagaaataatagtgattattactttccaaatataagaccaatctccaaaaatttccttctgtaattcatccctcgttttttgccaagtattggaaaaagcagaagataatttagtatcatgttgatgaatttggtaagttatgtcacttactttgactaaattatgaataaaagcatgaaagttgatatctgtgacattaaacataactaaatgatgaaatgcgatgatttgggatttgtggaatagggtttatattccattccaaattgtcgtccctcagtacatttaactttgataaacgtgctgatatttggtcaatcatcagtacctcattgtcaagctgaaatgctatttctcta

SEQ ID NO: 1041 - DNA, 1175 bp, Heterodera glycines
  unsure (1)..(1175): unsure at all n locations
caaggactagcaaattcgtcgaaatggaggttgatgaacattggaatggccaggacgtgctctggcaactaattgtggttttttaaataatatgcgtgctaaaatagttgggtcaatgagcagtgcagtttctgcccaacgatgtgactctaccatgaggtcacaaattgaggtgacagcattctgaaatgcatatgtcattgtttcagatacttcagagtctaaataagtcaattgagatgctaattgtgaattagtcactaaactgtctaacattcttttgctcctggtctgacgaccattcttaatgatttgataagctaaattttgttcagttaaacgaagtgttatgttacagctctttacggtaggtttaacccgtgagtctgttagtgcaagctgagtttcgtctgctaaccaggtattgttcagcattcgaccattaaatacaccaaagatccgaaattcgcaattcctccctgattccggtttccaaataagttgggttttatcactcatggtacaactaccctttgtatatggacaatttgaaacatctccaagaggagaatgaatagatttatcaccaaaacgagagcttactaaagttttgaaaagataacaattttcactggtggttttttcccatgagaatgagccaaaaatccatgtacgtggtgtgagattgatctgatgatttgtgtgatatagtccttctgtcattataagtgagcccaaataacaccgtttttgatcaatcatgagtttacattcattaaaagagacactaagaaattcggaatcatgaaatttttcgaccggaacccctgttaaggaagtgtacttagacatggctttcctgacgattctacaagcccaagcttcagtattatattcaagaaaattaggagtaaagattctccttctttgtggtttgggcacatgagaatgacttaaggctaaagaggaacagccacgaaatttgggaagttcccatatcgcaccttgaaaattagtttgacaaataagaggatgctcaggaacatgagaggtaaatgcatcagtaccaattgataaaagcaaaaatagagtcatggataacataagaattcgactaagtcgtgggccaatgccagtgcttccccanattagaaactttaataggagagggagaa

SEQ ID NO: 1042 - DNA, 6524 bp, Heterodera glycines
atgaaacgggtctggggttcaaatccgcttggctgcggattattttttatgacagccaatgaccgttcgtgctttatttgcgcacatttatttaataatgacatacaatgtcaattgttaaccggataataatacgcaatactctacaacatctgtgcttgagtttttacgctcatttaattttttttaaattttggaaaaaatcaattacttgatgaaaaatcatagataaaatcaatgattttgcaaaatctgagctcagattcgtaatcggcacattttttcgccctaaaaaaactaaaataaaattttttaattaatttttcgtcgggaccgcaattctgaaggattaccgaattccgatttccgaaaatttttggggcctcggaatgccatccgtgccatggacacaaaatgtcatgggacgcgtaaaatgccatgggacgcgtaaaaccgtctagaaccttttttaccctagaaaaaatgctttttgaaattttactatttttccgtcgggaccacaattccacaccattgccctagaatgggtgtcaatcaatcagaccctgaaaacccaggaaaggcgttttagattttctaaaaaatttattttcagaaaataggagggacatgcagaggtattacccgcctgcctcaaatttaaaaaaatcaaatcactgtcaaactcctcacacgccaaggaataagattttcctaattactccaagcaattcataaaattaaatccgcctctatatattatcatttttaaattaaatacgccaatgacgaacagcaataaaaagaaaatcaaatttgatctttccaacatttccttcctcttccgcctccgtgcggacatcaaacagccgctcacaatcagaagcacttgcggtgcacatcctcatgttcagcccggccaatgcaagaatttggaatttgtcatgagtcatgatgttggaggagattgagtgtattaattaggcccgtacccagaaaatgtgcacaaaatctaataattttaatgaggaagggagaaaacttaaatcgggtcgtgccaaatcgtccgccccttttttggtattcccttagaaagcacccatccgttaccgtaccgccgtttggcatcccttgattaaatttctaaactttcccgataaattattttctgggtgcaggcattattagattttgctgacttcttccgctttccaaattttgtcaattcatgtcattgcatcatggcaccacagcagaagctgatggtcacaacgacgcaatcccgttggcactcattcaatttcgcctgagaaaattcgggagtaagccgaaaatttatttaaaaaattgttggagtgtttgcactatgtttcagcattttctatacccataccaaaaaatggtttttccaacatatttacaaaaacctaaatttttcgtaaatggatgtacgtctaccatgtaataggcctatctctttttttaaaacaaccgctcatcaaactgatcatcagccaatgccaatttttcataaagctttttggcggtaaaattgtgcaattggttcatacgttgaaaaaatatgtaaatataacattaatatatattaagcaaaaaaaaacataaaaacttcgggaacgggtcgttttggcgccgccgttttggcgccagcctcagtttttttattataaccttttttcttgttgaccaaatctaacaatcttggtatcattcgaaagccattcacaagctctattagccttacaaaaaacaaacaaaaattttagcttctaaaaaagtcattatggaaaaaacctcaaaattttcgacttttttgcaatttcatgttataacttttttggtaattgtctaatcgcgaagcaatagcttagaaatatcttctaaacatgttaatctttcgaataataccaagattattggatttggttaacaaataaaaaagttatagtccgaaaacttgggctggcgccaaaacggcggcgccaaaacgatacagacccgccaaaaggaccctcccccccccctcgggcactctggcagtttttaatgcaaaattttttttttcataagctctcaatcgtcaaacaaattgtctatgtcaaattttcgcttcctccttccctccctcatattcccacaatttcattggtgcccatgtcgccgccccttttcctccctccgtttctattgaaacaattttcggccccattaaagcaatcaatcctcaaacaattccaaaacccgggaccattggacataaaagtgcaaccattttttatttttaattccttaaaattttcaaatttatgaaattgaataaacaaattgattaattcttctgtgttttcaaacatttctgcttatgtcgctcccgcacgtgtgcagagatttgcgcctatgcttaaaatcggtttcaaatttaagttttttcaattttgatacttaaaattggggaaattaagatttgaaacagattttatgcataggcgtatgtaagtgtcacataattctggaaaatttatcacaaataaaaatccaaacaaaaaaaaagatcagtctccaaatttttaagtagagtgcagcgggaccggaaaatttgggcaagaccgggaccgggactttttgggttgaaaaaccgggactttttggctggaaaaaccgggaaaaaagccgggaatttcctggtcccggtcaaaaccgggaccttggtactcagttgtccttgttcaggtcccggtcccgctgcacctatttttaaggcatcaataagacaaagaaacactcatttatactgatggctcccgtaattatgaattttaaatttttttttatgaatttttaagtaaacaagataattgatgcaaaattttctgtcccatttgaaggctctttttttttactccctcacatcgttacggcactaattcattagtgcaccgccggctgtcacaacataaacaaaaagcgagcggttgtgccgccatttggtgtttccactgctgctgcgttggcaccctcccctccccctcccccattaaccaaccactcactaatttggtgcgacaacaaattgcactgctcatcagtaaggctgggattatatttataaaaaatctaaatattttaagaaaaaccccttaaatatctatgaaaattttggtcaaaaatgaaaaaacttagaccaacaaaaaattgtaattttcttacatgaattttttattcactggttgcaatcacaaattgagtacatttcatgcgtttccgaggaaaagcatcggcaagaatatttttgtaatcggaaaatgatcgttcaatgtcgcaaaaatagagaagcatatttgcaaaattggatttttgaatttgttcgaaagttcaattcctaagggttcataaaaacccaaaatgccaaaatattattaaaataaattgataaaaaaattaaaaatatttttgtaaatatttttatttattcaaacattaaatattttttttaatttatggataatcacattaaaagcgaaatattttcggctaaaatgatagtttttcgtaaatttctcatcaaaatatttaaataaattaaaatcatagccttactcatcaacagcaacaaacattcattcacaaataggcaggccaattagtcggacgtcgtcactgacagccgacaacgacggcgacgagtaaaaacggcaatgagcgactatcatcatcagcagaagggcggtggtggcagtggctacccacaacatcaatccagctacggatatccggcaatgtgagctatatatgttggcacacaattggtggtcggtcggtgagcaaatgcgatgtatcggcacgggaattccatggaattcttttttggcgattttttgccaagcgttgaccgtgaaagcaaaaaatgattggtgttgcttatggttctcgagtcatgaaaattgcttgtttcggttgaatgggatcgggattctcgagggggattcggtcccagttaaaattgattgcgcgcgaacttttctaaaaacaaatttttgtgggagacagaaatggttcaacagagttcagcagatggagttatatacatacagtagggctaatttacatgatttatgggttcttttctgttttgtgaccccccctgaaattttcaaataaaaagtcatttctagggtaatttggggcgtaggcttagggttcagcttaggcctaggcttaggcttcagcttaggcttaagcttatgcttaagcttaggcttaggcttcagcttaggcttaggcataggcccaatacgtattcagcgacctcgaaaacccataaaaatatgttttccttgtaatttatgaatttcaaatttatgttcgaattcgggttcgggattcggaattttgaaaaataaatgccatattcgtgatcagcgccccaaattaccctagaaatgactttttatttgaaaatttcagggggggtcccaaaaccacaaaaaaagttcgatttatgttttgttttcattcattttttgttgggacttttttatggatttattttgaggatttcaagccgtttattgtggctcctctgttcgcacaaataatctaccaaaaactttttattttccaaggcattgcaacatttctcggtcgtatcttgaactcaccgaattggagcgaaaatgtttagaacaggtagaggaggaagtcgtaaaaattttttcattaatgatcgtaatatttaaatttaattattatttaaattttattttgcagaataataaatcatgatgtagctcaaactttatcatatttttatggtcaaataaaatatttgaggatgttattccgtttaacatcaaaaggttgtttataatttgattaactttgagctaaattatgatttattttctgaaaatgaatttaaaaataataataataaatttaaatttgctattattaactcttattattttcgttttatatgtgctaaaaatttgcacaaatcgtccattgaaccgatcccgatgaaaaaaaaaaattgacataaaggctagcagtctgcaaaaattttcgattttttggttggagtgccatgtgacagaaccgtttagtgaactattagtaagcctcagggcttctagttcacgaggcggggtttatatttaaataaatacggattttgcgaattaattctataacaatagcaaaattaagagaaaatattgacaaaacggtagattaatttattatgtaattaataatagtaattaagagaaaatattgacaaaacggtagattaatttattatgtaattaataatagtaattaagagaaaatattgacaaaacggtagattaatttattatgtaattaataatagtaattaagagaaaatattgacaaaacggtagattaatttattatgtaattaataatagtaattaagagaaaatattgacaaaacggtagattaatttattatgtaattaataatagtaattaagagaaaatattggtgctttctgttgtcctccattgtcactttttgcttgtcaatgcttttggtggtcatttggagggtatgtcaatttgaaagtcatttcaacaaatatttatcttagagtaatggacaaaacatatttatttctttaggcgattaattcgacaaaatgttgatcaaaaaaagtggagaaaaatctcatttcaataaaaaaaatttttttttgtatgaatataaatggaattgatcatcactgttgtttttggcgtgccaaaattttgtcgggcaaaagtttttttcagtttatgtcccaatcaaaaaagttggaaatttatttgttaccaaaaattttcataattctttctaaaatatttttaattaagttacaattatttttcagtaaaataaaaataaaattttattaaattaaaatgccaatttatgatttttgttgcacatataccacagattgtcacccatgtgtgttttcaacagcgcgaacggggcgccggtgttgagccacttgtgcagcaacatgacgacatcgaagggtacaaacaacaacagcaacaagcagccaagggcggtggggtcggcggtatggatcagttgcgcaaggaggagccggtccaaattggttggatgaccgaggccaaggattgggccgggtatgccatgccataattattagagaccggacgggaccagcaggggcccacgccggagcttttaaccagctcccggtcccgtttcttttagacaaaacgcccagatcgggaatgccgggatcccgtcccggtagcattttccaagttcaggcccgatcccggccatttcaaatttcaaacaacaaaatttacgttttttgcacgctttttagtgaattgatttctggccaaagtatgactggccgaattcttgttgtgctcgtgtttctgctctcaatcggctcgctggtccgttttgcgacttcttttttctgggatgctatgatgggcgggggggggga

SEQ ID NO: 1043 - DNA, 934 bp, Heterodera glycines
aaaatgtggcaaaatttttcaggtaatttacttcatcgacacactgaaggactcgttccaagtcgagacttgtgtgccatggtaagttttgttgaccccagagacggtcttcccccaattttttctaaatgcaccgcaaaaaatccataaaaaggtcccccccccccccctctcccctcgggcggtaccccctccaagtcgaaatcctgggattgtccctggttaaaaccccttgtaattcctaaaaattttcaaagtttgaaaaagttatgacatatttttattgtgactctttaccattgtgatgctctttaagtgagtagaagaaacagatggcaattttttgtgatttttttggtcatcaatttaccgtactcttcccttcccttccctacgatcccatggtatttcgccatgttctttgacatttattttcctattaaggagtgaaagtcccacacaacaaattgaccttggtaagtcatttacacaaagcaatatgaattaaaatttccaaattttccatttctccctcccaatttgtttttttttggaatactgtataataccgaattttcttaaattaaatataacacacggattcagcagtcctcagaatagaaaagtcctgcggaagaatggggagtgggaattaattttttcttaataaatttggagaaaaagttaaaatagtttaaaaatattttcgaaaaaaactttatatttcaaatttctttttttttcaattttcttgaagaaattttttaaagaattaagctaggagtgaaaaatttttcaaatagttaaatttaaacataaataaattaattaattaaataagcaaggaatttagtttttgctccatggttttcatttcctaccattccgcagggttcaacatcttcttcctcatctacttcttcatccgcttcat

SEQ ID NO: 1044 - DNA, 2018 bp, Heterodera glycines
atcagtttcatgaacaagaaggggtgttcaatcatgccccatatttgtcaggtctccgtttcttgcgtgctctgcggttaatgaccgttccggacattctccagtacttgaacatactcaaaacttcgtcatatattcgacttgctcagctgctttcaagtgatttcggattttgactcatcaacaattcaatacgccataaaaaatttaaaaaaaaaacgcaaatttcaagttttcatttcgacctctttggccggtgctggtgtcatccatttgctggagaacagtggtgacccgtggaagtaagtgatcctcctcttgtttgttatttttgtcacaagaatttatttatactctcaaaactttgtttgactgtattacgggttacggtgttgcgaattttcgaaaatatcctttacgggttactgtatttcgatcctcaaaaatctccttaattaatggttacggtgttgaaaactccccattataggggggtgacttacggtatggagatactcgaaaagccccttattttttttgcagggattttgtgaattcacatcgcatttcctatcctgattgcgtctactttttgctggtcaccatttccaccgttggctacggtgacatttactgtaccactgttctgggtacggttttcatttttttgtttttgacgcattttgcattcattaaacatatttcacaggacgtgtctttatggtctttttcatcctcggcggtcttgccatgtttgcatcatatgtatgttagtgtgtgattatgttgtcattttttgtgatgaacctcttttttgagcaattaaaatggtgataattgataatttaagaagtgctaaattgcctatttcccaaaaaattggcaattaatgatatcgaaacgaacataacgccttttttgagagattaaggcatttaattgaatttaaaaaacaacaaaatgtcaatcatcatggaagccattttaaaatgaattctcaatgtgctaacatggagcagctcgtccccctcccctccccgtgtcgtttcccgttctgaatttttttttaattttccaaaaaacagaaaatgaagaaaattttaaaatggttttttcaatttttgtaatttcatagaattttgaaaattaaaaaaattttttgggccgtagatatggcggggggggggaacgtacttcgcccgagctaattataaaaacaatttgttgcatagaaaagttaaaaacaataatttgcaaattcccaaaaggtgcccgaaattgctgatctgattggcaaccgacaaaagtacggcggcgagtacaaagggtaattacgttcatttttatgacactttaattatctcatattacatatcatatttcttgcagagaacatggcaaacggcatattgttgtgtgcgggtattgtctattttttttaatattgttatttattgcaagaaaaaaaattaaaattttaagggaaataccgtaattgacttggaattcgaatcacccaccaagtcgccaatttctcgaacgtttttttttggccataacttaaaatgacgaaatttttgaaattttctagtttaatagtagagaaaccctagggctattccatgacaatagattaatttaattagggcaacaatgaaagaacttattatactccgaaagcgccgggagagcgcccaggatttgcaggattactcccgggaatccgattcggcaaaaactttgaattgatattttttttttgaaatttcttctccttaaaccatcaccacatgatcaggcacatcaactacgagtcggtgtctcacttcctgcaagactttttgcacgaggaccgggaggacgtggatgtggaggtggtgtttctgcatcgagtggtgcctgacctggagctggaaggcttgttcaaacggcattttaccaaagtcgaattcttcaccggtcagtggcggcggcggctttatatgaaaaataaaaaatgccattttaagcttaattag

SEQ ID NO: 1045 - DNA, 1145 bp, Heterodera glycines
acgctgaggacgccggtaaggggcaatttgtgtgtgattgaagacaggctgactgctgctggagttggttgttgttgttttttcctttcattttatcagtgcaatcaatacgttcccccttcgaaaaattgttttagttttataaatttcttaattttttcaaaacaatttacctttttttactcgataggagtatacggtagtatgtacccgtctactgtatcatgtacaagggtagtttcatcattgttaggctaataaacgattgggacaatgggtgggtggggaaggagaggaagtggggtgtctcgtgagcccagcccaggtgccaatgccatgaaatcctttttagccaacattatgcgtgtcatctccatcaaaaactactcgtccgacatccgggttattgtccagctgatgcaataccacaacaaggtgttgttcatacatttttcatgccattatatgcaattttattcaattaatttgcttcttttttttaaggcgtatttgctgaacatcccaagttgggtaagtttttattcatttactataatattttaaattatttttatgatttatatgtaacaaattcaatattcattttgtttcaaggattggcgacggggtgacgatgtgatctgtttggcagagcttaaggtaatctccaaagatgggtagtgagtttttaaaagaattatttgaaaaatacgagagaaaaagtccgagcgtttaggcaatttaaaccgaacataaaatttaatccgggaaaattttttcaatcaatttaattgcgcgttactacatatacatatgtatgtaccggaacccgtcagttggaccccggcacgtttgggccccagcggttttttggctataacttttttctttgtcatccaaatcaaacattgttggtatcattcgaaagctgtaagtgtcctctattagcctgcaaaattttgaaaaattatgtaaaggttcaaaaaaattatggccagaacaactcaaaaaaccagattttccaacttttatggccataaatttgtacaaaattgacgcaattttttgtaaatttgcagactaatagagcatctgaagggctttagagtgataccaatgatgtttgatttggatgacaaagaaaa

SEQ ID NO: 1046 - DNA, 3708 bp, Heterodera glycines
  unsure (1)..(3708): unsure at all n locations
atgaggaccagaattttttggcgacactgatcccagctggattatttcccgcaatttccaaaaaaaagcgggattaatgtacaggggaatccagcaaaaccctcccgcgcgggaactcccgtgtccagcgccgatctctaattgccatataattttaacaaattgcttgtttgcccttgattttttctaataatgcgaattgatggctttttcattttattttcgggaaactttccaacttttggcttggatggaaaaaatgggtttttcttaattttcgctttaatcatacgcatttcttaacccattctctttaacccaacagtcgcctcacatggccgaatggctgaacgaatatttgcgaggtgctggcatggagtaagtaaattcatcaattaacaaattaatgactaggtcatttcgtaaaactgacatattaagtgttttttcaacaattacataatttttatcataaatttaattaaaattaacaaaacatacattcttgttatcattcgatagcaagtaaattttcctctactcgccaagcaaagcaaaatttcaatgaatttcatcaagtttaaaaatatttcttggaaacgaaatacgatagtatgataatttgaaatcttatccctgaatattgattatgaaaattttttttaataaccatttcacagtatatttttttaaagacatttaatttttcaaaattttattaaaattttgaacgagttccaaagtctgtgactgtttcagaatgaagttttctcaattaatgttctacatttctattacaatttaaaaaaatttcaaacaaaatttttcaaaaaaaaaactacaaattctttcgaaaattttgaaaaaatcgcttcaaattttttctttaaatttttctaatatacatacctaattcctaattctaaaagagaattggccccgagaccccaatcgagtgaaccagaaccattacactcttgcatatatctcaactaaccaatcatttgattgattgcattttcaaataaatgccattgactgaccctttctttctctatgctaatttggaggatgtacaccgaaacgatgagtcactcgttcgccggaatgcgcttccgagacgcggctgagtgagtacagcagtactgttgttgtgtggtgcgaatttatatagtaataatttttttttaatatttccctccaataatttgtaaggctagactttcaaaaaattgaaacactccctaaaatggaattcattaaatttttatgaaattaagatgttttttcttgaaatatttaaattttttgttgcttttcctcccccatatacatattatttaattaattaatttgttttgccgtttctgtgcattgtttgtctaaaaaagtcagtcagaattttgaactagatatgagtattatgcaatttattaattaataattttatatatgtaaaatttaatttataattttttgttaatctccttaaaaatatttcccaccaaatttagtccaaacatacaccagattggctgtcattgtgagttactcgccataaataaatatttttggcttggagcaaaaaataaaataaaatatttttttcagtataaagtataaaaaatcgatttttaataaaaaaaattaaaaaaaaacgaaaaacattttaagcaaattgatatttaaatgtatttatatttatgagtctaagctccaacgcataacatattatcttcaaatattcaataaaacttaatgaatgtcattcatttccagctatctttgcggggcaggcatggagtaagcgcttaaataatcttacactttcgataggttctttggccttacattgggattttttttaccaaattttttttcctaattttgtctagtttcaatgaacctaacatgcccaatttttttttttctaaaatcaaaggctattttcgggcatatccgtaacctgaaattttcgaccggcaggtggagaacctgaaaattctttttttttctctaatttttaatttctccccccccctggttacggagcctgttgtcggtagtatttctgtcacatccattgcgtcatttctccttttttgggatgtacaccgagacattgagccactcttttgtcggcatgcgtttcccagacgcggctcagtctgttttttttctttctctttttgttatctgagtgctgttggtgatcggatggaataatatgggtcagagaaagcctaacaaaagtgcctaacaaattggcaataatttgcttcagcttttaatcttatctctgctcgcaccagagacgtccccaggaattctgcttggacgggatactttttttgtttttgtttttttgcttttacctcactttttcgatgcgcttttttgggtttagtgtggataagtttggtctatgaatgagttgggtgaacccgtcaattatttttattttaagctttaagattttcaaatattaatttttatttttttagaattttgtttttcattatttgactttttttttaatatttttaaattttactatgtattcatttcattcgaccagggaatttacatcttttaagttttttacatcccttttcaggcacaaaaaaaatcataaattgtttttctcgatggcaattatatttctcagttgatgaatcttatattaatagataataatatatagttttcgaattattacttaaagtaaaaatttcagcctaaacggttcatgggaaaggtctaacttccgaaaaaatggggtgtgtaatatcataacagccaatcgaattgaatttctgactgactttttgctgttgttttgttgtatgtgtatttaaatcttcataaatcacgaaaaatccatttttaaattcaaaatccgttcaacaatttgcagacttttgttcactcgtctgggccttttgctgttggccattgagctgaaggatgatgaaaagaaggagtgcaacattgccattaatccgggcccaagcacggtgatccaatcccaaacccaaggctttttcatcgcccaatcggcggatgaagtgaaacggtgggcccacttttttgggtggagggagagccactcgagaattcaactcgagaaatttctcctctcgagaaatgggaacgagaatttcgggagttcttttttctaacattttagttaggggctttatttttaggattttaccttatgctaacatatttcttgcaaaacttccaagtcatcctaaaaaaaaatcttgtccgtatgcgtcagttctaattgctaaaaatatgtagaagcccctaattatagtaaatcgttgaaaactttttcattaccgtacacgcttcattttttattcctaatccactgaatttgctgctggcttactgtattttttccttactgtagtgccttctattggtgtaaaatttgtcacgctgatgtgtacgacgtttcgttgatcaaaaagtgcaaatgcaaaaatttgtcactgtttcgcaaaggcggcaaggcaatgatgaagcgtggtgcgtgccattcaatctaatgcaaaaatggggtcatttgatgccgtttcaactttaatgatgcttgacaatatggatacatataaggacaagatcatattacaggacttcccagngccctagtcctgtagtgttgcaaaatgcacaggacccgccggggtcagg

SEQ ID NO: 1047 - DNA, 5459 bp, Heterodera glycines
  unsure (1)..(5459): unsure at all n locations
cggcgcatttntgggcagaaatcgaaattgggtcggtggcctatggaatttcggcaatttccttaaaatcaaagaaacaaaaagacaatgctttcaaataaaatgggaaagtggcacttggaatatttggcaaaggcgcggaggtcggacgtcttcgatcggaatttgacgccgaacgcggtggaaaagctgttggaacatctccagaagagtggtcagatggtaaaggccgggtacgtaatgttttctgaaaaaattcagttgtcgttgggttttctgtccatttttggtttgtcactttgtcgtcggaatgaacggggaggggtcgtcggaggaagggcgcaacgacggggcgaactccaaattggcgggacagtccggcgaaacgatggcctgggcgacgcgcagccaaaacgaccagcagaccatccacaacgggtcgggcaagggcgcacttgtggagagatccgtctcggttctactgtgtggggatgaatggacattgggttgggttgacacgattttggcccattttttgcagaattgtcgtttttatttccctcattttctccccacctgccgtttgtcgacatttgttgcttcccacgaatgccaattgtctgttgttgttgctgtccctccgtttgctgctgccgaccgaacagcaaatcctgcatatttttcagtgctgccaaactcatctcggcactgtccgcttttgcggccaattcgatgtgcgttaacagctgcgaccaaaagtcgggaaaagcttctggaattgttaaaaaaaataattagtgtaaattaagtctgtacccaattggagcagcattggccgttgtgcgttgaaaatcttcaccacgccacccaatgtttttacgctcgtttcggcccattgctttgattcgctaaatgactttgcacattaaaggagaagattagcccattcggttgatacgtgtctcgggagtgatgaatcattaagttcggtgcgccgagcgtggaagtgttggaacggtgggtagacgccgtttgggtgaggtggcgaacacggtccaacattgggaagagcacctaaaaggggtgagaggaatgcatttggcaataacttaaataatgattggttaattaattacgaatttatttttccgttttacaaacaatacatctcaaaaatcagaagaaagtatttgtttcttaatctttggcttacatctgtcagcatttctgcccatttttgtgtgccgagtgcctgtccgtgcgctgcgactgtttgcaaaagggtgtcgcacgcgcttttccgcaccggcggtcgcgcgtcgacgcacagtctgcccaaggcggcgtaaatgcaaagccacgccgtctccgcctcctctttgcccacgttttgctgcgccctgcgcacaaagtcggaaatgtcccacttaaaggaatcaaaattaaatttcaattaaatttaataaacgaaaaagcaccgaccaattggccaactgaagccaatgcgacgttaaggtgaatttgctgttggccataaagtgcgttcgtttcgacgagcatttggacacattcgaaagggacgacggcgagaaactctttgatcaccagagaaaggacacggaaagactgatcgatcagctggggatcagtgctaaaaggaaaatgatcagaaaagcaaatcaaacaatcacagacattgtgttcatccgcgaatcgggcatcaccacggaagagacaatttgcacgacggaaggccacaaagacggctcaatggggcgactgtcggactggagaatgcgcataagacaatctgtggggaagagcaattaaaaataatccaattagttaaatgaatttgatattgacccaattgcttagcgcggacatccaaaaattcgatttcgcaaattgccgccaaagggttcagaataagttgttccctcttctgtaaaaatataatcaaaacaattaagacatgctaattaggcaatttacgattgtctcttcgtttttcgctgtttttttgttcgtttccaactcgcgttgttccgcaattgtttgtttcatcgcacttcggaccaactgagtcaacgaaacggcgccccactcgcgcgttgcggcgctggaatgagcgcaaagctgaaattgaaaaaaaaattaatgacaattaaatttaattgtttaaagcctcgagcaaatgggcggtgacaggtcgccagaacacatgcaaacgaggaaggttgaccagtgcagtttggagcagtttggcgatggagaagaacgatgtttcacgagaactcgtctgggccacctaaaaattggccaaaattggacggatggcacaaaaagtggcaaaataaggagagacagaccgtcatcgactcgttggacaatttgcaaagagcggcgatgatgtgatggatggacacttcgtccagggtcgaggtcgactcgaacaggacattcagctggtgattctgacaaagagcaaaaattagtgtcaaaggctgcagaatactccgccgttttcccgaccaaatccggcaattccgagctggctgctgtcgtcaaaatcaccgtactcgcggccgaagctgacgtggtggacataacaccgccgccttccgaggctgattttgtctcgccaccggcacgaaaagtgccggtggaagtgggacggaggccgacgatccaaacaaagtgcttaaataaacggaacggaacatttagtccaatgataatccctgtgcgcgtttcacctggatggtagtcaacaccatttcccaacagtcgcccagcaaatggccgttttggtggacgcaaccgatcaaaagtcgcgcaacttgcaagtttttggcggtcatctgaaaattatgcaatgctaaaacttcaacagataaataaatgttatgttatacaaacgtgaaatgcaataaaaataggaaaataaattcaaaaaaggatttacgcaccattacggtggtgttgaagaattgggagggatggtgcggactcggacaaacagtgcccatcgcgaccacttgggttggttcaaccgacgaatctgcaaaatgtgacgggacaccgaatgaccgaccaaaatggcaaatttggattggatgggccaccttttaagctcaaatcgctgttggcgccgactgaaccattggccattgcgccgctttgcagcgcaagcgaagccgatgagtgggagtcgacgaaacgcgagaagtattggcatggcaaagcctgggaaattggaactcgttttggcattttgtaagggactaactgcgcgacaaaacgcccgtaacagcgagtgtttggcatcggcatttccaaatttgcatgccaaagtgaccaatgatgagagacaggtcaacaaatgttcggtgattgaatcgtcgacactataaattgaaaaaggaaattggcattggaatgtcactaaaaaggcacacaaaacctgaagtcgagtaaagtggaaatggccgaacagagaaaggaatgggccacttggaacagctctttggcaatgtctacaattcagcaattaaattatcaattagaaaagtgtgccttcccatttcccaccggagtatgcttgaggcagggatgccgaactgtccaagttggctttttggcacttctcctccgactttggcatctcctcctttgccgttgttgcgccgttctgtgccggcaacaattcgccgctctcaaccgctgaacagacggcgcccgtcgcatcgaccaaagtggcaaaaccaacggacagacaatacgcctcggggattctctccgcgctgtgtttgtcgagccaatccaagctgaagggagagagaggaggacaaaagataaatgccaaaaacataaataaaaatggcaaaaagacgcacagaatagaacgcttttggctcagttgggtttcgtcgagtggcaaaaacacgcctaaagcggaaaaattaaatgccaatgatgaatgaattaaacacgtgcctttgaagataaagccctgttggccaatcttctcgtcacggatactcggggaatcattagcagctaaatgagggccaaagattagcgtaatggaatgactattcgtccaaaacacacgaaaaccgcaaaaggttcaccttcctccaaacatttgcgcaggaatgaatacaaacgggaaaagagcagctcgacaaactttgcgccctcttccctcgcacaaagccatctgcaaattttaaaggcttttttggggtattttttaacaatttcttttacttcaaaagcgtcggttggccaatgatttttcgaaaaacttcgacagccaccgccgcctcccacgaattggtgggcatccagagaaggtccagcaaaatggtgaggatcagttcattttgggaggcctaaaataaaagaaaaaaaggaattgctttaaaaactaaattaaaaaaaggggaggggaaacggaaaaaataaataaaaaccgaccaaaattggatgataattggtgagcagagcgagcgaaattcgcattgaccgaattgtgatgggaaagtcgcgcgctttggtcacaatttggccatgctgctgttgtccgtgtgggtattgttgctgcgtgaggagggcggccgaaattgggagggatcgattttgagaggaggcgccgttggccgacgatgccggagggacggtgccattcggcgcaccgatcgacgatgaagaagcagacagggaaagttcgcgctctccgccaatcattttgatcacttggggacagatgagactcttgagcagttcggcgaattcggaatgcttttgatgagggagagaatgccatgtgaattctcaaatacattggcactcttcgccggcggcgcttacccggaagaaaatgctcgggtaaaatttgaccaccgactcgagcagttcaagcgacagaatcggcgttatcttttggattccgataagccatgtggggttctccctcctgatcagaatgcaaaggtcgcgcaacaacagaaacgcgtcggccgccgccgggcgcagcgtcggcggcgccaaactctgctggacgttcggcgccaaattggcacgctgctgtggcaacactttcatttggtcggcaccggcgcgcattccgtcttcctgaagggcgcgctcaaaaacggcgctgaacaaatggcggacggcggcggaagcggcgtttatcacggaggaatctttggagaaattaagacgaaaagccagcacaatgcactgaaatggagattattgtataaatggaagaggagggcgtttaatgtcaaagtttcaaatgataaaaatacaaattcaaattttggcactcactttggccatgcccagtcagtgaccaacagttcagtgcttaacaatgccgttatcggttgcagcactgaaaatggcttaacggagtgagcacgtcttccctcccccctcctccc

SEQ ID NO: 1048 - DNA, 4357 bp, Heterodera glycines
aagggtgcacaatttcggtgcacaaagtgcgcaaatttagcaagagatcatcgggggacgaggcggaggaactgatgttgcgcactttgaccagcccggactcggccgcctgaggggacaaaatgccattgaattacgcggtaagaaaatgaacgcattccaaagggtcatgggaagtgcccgtcaggcattactgccaaaaggccccaaactaaggaatccaaaagataatttctttgggagaggtgggaaggggagaagcgggttacgtaccccaccccccacaaatttttagagaaaaaatagtatttttgataaaattttcgatttcccttgttggtaccccctccaaggcctccctcatccagtctaaaactgttattaaattgcactcgaattttctaaaaattttcccgtcggcaccgacccactgtccccacttttaaaagaatgccgcaaaaagtggcatgaaaatcgtaaataagtcgtcgcccgagggcgatgtaccccaccccaaacagaaattccgcgaccgtcccaataattgggatagaattttggccaattattagaaataaaaaattctccacacctctttgatgtgattgtgcttcttcttcgcctccgtggaaagtgttcgcaagtcgcccatcaaataatccaccaactttttcggatcattttgctgaattccgccggttgaagcggacgaagaagccatttttgtatctgttctttcaccttttctcctttcgatttattcaaacaaaaaaataatttagcaaatgaaatcaatatgcaaaaagcaaaaaacaaagaaaaatgagaaaaagacaaagaaaggtgaacaattcattcatcattcgtcatcaaaggacgaaaagaaaaaacgaaacgaaaaacggaggaaaaggtgaaaattatgaaaaaagtggcaaaatgcgagatccaaagttggttggtcctaacagaaaacagtcgatggattaggcaaaagtgagaatttttgaccaatgatgacaagtttggtgtgtgtgctatagaatattttcagtaaatggagaaaaaacaatgatttaacggaaagagaaggggagaaggacaaagccaaaaaagagagaattctgaaaacaaattcacaaatggccgattttatttcaattttcttttttttcgttttggctatgtcttgaatgaacatcaaaattttgattcaaaaaataggaattgctgaaaatgccggaaataattgagtaaacaaatgggcgatgattgattggcactctctcagtgatggccgccagtggcgggaacgggtggcactgccgaaggttttgaggctatcaaacccaaaatattttcggggataagcgtccatagataatcccaaagtgcgaaaattgatgccaacacatttttggccatctgaaattggcaaaataaagttaaaaacggggaagaagacgcactgaatggatgaaaaggacggtttcatcagggtattggtggaagagaatggcaaaaatggcaatactgaaaagaaaactgtaagcaaaacagaaataacggaattatgtgtaattgtaactacctgcaagaaaacatcgacgcaaaaagtgtccaaaccggaaattcctttttgggatagacggacacttcgtgatacgcttaatccaaatggtccaattaggtgatggcttttgcttttgacccacatggaagcaattctttgtctgccgcttcagtgcaagcggggtaagggaagaacaaatggcccttctccgtcggatttgggagcatccgaaaagctgaaagtgaaaaaaattctaaaccaatgttttcagttttttttttgttggagtttacgagttcaaaattgttttctcacttccttcccacgtgtattgcaacagctgaagggcgccctccacccttttccagtgctgcaagtgccaaaaggcgtaggccaccgcttcggagtcgccccgcttcaaaatgtgttcgggcggcaaagtgacggctttcaattccaacagatacaaaggaacgtgtgggttctcaaattacttatttcgattaattgcaccatttggtttgcttcttacaaattcgaccgctctatgaattgcttcgactgcgcttaattcggccgaggaaaagccgcgctttcgcatcgtttccggctcaaatttgtcggccaccccgcgagctttgagcaaagcggaagtgaaacaaacggtagcagactttgtcataatgcaatcttaaaagtcaattttatgctaaaaatgtgcattatttgttgcgctaccatcgtacgagtcgtatttggccagcactgccattgtgtcagcataggcgcgttgttcgagcagtgcttcaatcagattctcgtggatgttcatcacattctatcaaatttattaaatgctgacatacgaaaaaatggtaattaccaaagtggggaactctttgatcagctgaacaaacaaaaaaagattaagcaaaatgaatgtgctgtcgtcgacagattaatcactcacatcccgcatcattttgatcgcctcccttacacgtccctgccgtcgtgcgcacatggcgagccggcggcgaatgaacaccaacatgttgatgtccctactctctgaaagaaaatgatttgaaaattacaataagccaatgtgggcgtttaatcggatccaaacgcactttgctgtgactcggggtccgggtacatggcggcctgactccgtttgtacattccctcgacgattctcaatgctttcctgggaaaatttagaagtgatgaggttttaaatgtcatattcattcacaattccacctcagtgtctcctcgacttctgcaactgattggcaaaattcttctgctaatctgaaattttgaaaatattaaagtggaaaaaattcgagctgacaaaatcagtgccggcgcacactccgaattcactttcaacgccctttttgcttcggaaattcgcacttggctgtccctctcgcgccaaaccattgacataacttaaaaaagaattatgttttgaaacattatttgaaatacgcactttccaagtcctcttttcctgcgtcggcttcgcaacagaaaaaggtttggtggtcctgcgcggagagattcaaatcgtagaaagtgagcggttcttggcccgtctcgcgtgtgaaccgttggtattcggcaccgcgaaaaagtgccatcggattgcgccacactttgcagtcgttgccttcatgcccattctcgtcgtactcagtgagctctgaaaaatttcgttctttaaaaacgcaatttacaaatgaaaaccgacctggtaatggttttgtgccgtcgtaattttcgtcgatgtcgcttccgtcttcactttccaaagcgttttcgatggcattgcttaaaagaaagaaaagttttgaaaaccatgccaaatgactaacttcagcaaaaatatcatcattcaacccgttttattggaggtttaatgtgaaatatatttacaataaattatggaataaatgcattacgcactcattagaaaaagtttattggtcttttctttgttgccatcggcgaccaaagcggtgcaatggcaattaataattatggcattgcacctgttcaaccgaccgcctaatttacgtaatgggaagaaagggaaagcgaatggggcgagagactacaaatttatgagtgaataatttcttttttcagtgaaaaggcattaaaagtgccctcattaattgaaaagttttagttgcttttatttgactcttttttttgttaaagaattgaatgataaaataataaattattggttagaaaaataagaaaattaaaagaaagaaaatatcctttactttttgaagtaccaccattcaaaaatgagaatgatgccggatacgagactggatgtgccggtcaatgcaacgtaaaattttggcgtgagattattgaagtacatgctcattgaaagcacttaaaaagtaatattacttaaaaaatagaatatttaaaaattgtagaaatattaaactccttacgcgactcaaatttctcataggctttgagaggaacacggaaataataaatgaaaagcacaataactcccaggtaaagcagccacaagtagcccttgaagaatgtcggaagacgaagcatctttttgcagcgttgggaaagcgtcttaaggggaaaagtgccgaaaatttgaaagagtaaaattaaaataattgttaacctgtgccattaacaaaaccgaaacgaacctaaacaaaattaaataaatatgaatattaacagtagctatagttaagaaagcataaattaaattga

SEQ ID NO: 1049 - DNA, 2582 bp, Heterodera glycines
aagagtaaaattaaaataattgttaacctgtgccatcccccccaccgaaacgaacctaaacaaaattaaataaatatgaatattaaacagtagctatagttaagaaagcataaattaaattgataagcaattagcaccatcgctgccttttttgcatttgtttttgacttggatttcatttatttttttaaacatcatgccaaaaatggcggaaaattttaattaaaatttatttattttcaaaaccataatttaaagagaacaagagaactcttattttcttcctcttcttctccctaatgattcaggaaaaattacttagaaaggaattctaaaatttaagcccttacaaaaattgcgaataaaattctgcatcgacgcatcactcactgtttgtcaaaacatggacgacgccaacatcgctgctattttggcatttgttagtaaactgcgattctctttttgcaatgttttcaattttagtataatttattggccgccaaaattggcctggaagactgccaatcgctgaaggaagtgcgcaatttgatgccaattttagccaattacatgtaacatttatttttcgtttcctttttccatctatctttttactttgaatttctcaccagaaagtccggcacacttactttcattgacgactctaactttggttttcgaaatgccattgatatcattgcgcatggtttggatgaggagttccattcgcatttgcgtcctgaggctgcggagagcggggatttgtccgaggcgaccaaagttgcacccattttttgtcttttcacttttctgacactaagattcatttggctatgctttacactttccgtttacttcaaacggaggcattttcgactatttgtgaacggttggaggacaaacatcaacggcactttgccactgtcgtaagcttcgtcctacaaatactgattttttgtccttgtatttatttagattgaatgtcttgacgaccgtcgctgttggacttccgctccatggcctaaactgttgcacaccgacagcaatgaggaggacaaagagaacgtcgagtcggtccaacggcgtcggaagagttcgctcaacttaacgcaaacgccgaagctcgactctgccagaaagtcgtttttccctagcgggaacagtccaattctcaaggtccgtggggttttgcgaatacatttacgggtgatggatgagcacagctgaactggttttctggccattctcgaaaaaatatttcattcttgagcaaccccaatttcaatgtaataccgttttatatacaggtcatttcgtcaccgcgaggcgaggaagtggttcgaatccatgcgcttcagcgggaagtgaaggctctgcgccaaatccgtgacgttttcggtcgcgagaaggacaaggcggaagagttgtgtcagcagaaggaacgcgaaaacaacaatctgttgaagaagatcgaaaggtaaacacatggaatgcttcgtactgttatggatgctttttactacggtttgggttaaaattaaaaatcccgagctctcttcaggatgcaggctcaaatcgcatgcattacaccgtgcgccgaacgcactccggtgctggaggatcaactgctgatgatggagacacaggcagcgacaaacgccaggcagctgcaggacgcggagaaaagagcacagaatgcggagaagttcgcggcggacttgaagtttgagttgaagaagatggacatcaaacacgacaatttggagaagattgtggaggagcaaagcgcaaagatacgaatgtcacgggacgattcggacgcggtggaacaactccgtaaggtaaagaaaacactcggaatatgtgatgaaggcatcccatctactcccttattttgtcgaacccaagagcgaatcaattgagagagttattgacgaaaataaatgcaaagaaaaattattatttagggggggggtgatatttgaacgcataacccctgcacaaatatgttaagataaacgggtttctgaaaagttttcaggagttgatagaggcgcaacaccaaaattctgtgagcgcatcgaccatcagggagctgcaaaacaaattggaataccaagagagggaattcgcaagtcgattgaatgataaggcatttctttgaattgtgatagatttccaatcggaatatattttcttaaggaccaagaaaaggacacttattggaagatgatagaccaatgcaaagcacgatcagaagagaacactcagaaggcctatgatgagctgaaaaaaacgcaggaggagaagcgcaatttggagcgcgagttggctgagggtaaacggacgatgaacgaactccttgaacttgccgagcaacagaaggaagtcatcacggcatgcgacagtgacaggacggagctggagaaggcgcagaaggagttggacacggtgcagaaacagtcggcggagagggagcgcttttggaagagcgaaatggagcgaatgcaaagggaaattgtggctcaggaaaagacgaaaagtgcgatggaacgccaacggagcgaggcagttcagcagat

SEQ ID NO: 1050 - DNA, 1596 bp, Heterodera glycines
  unsure (1)..(1596): unsure at all n locations
ctcgctgaaaattgccatgaatgaacttagtgccagatcaacncaagcgaatgtccagcagcagaatgacatggaacgatcatttcgctcggggatgaacagaacgcagtcaatgagcgtcacattcgtttcgcgtcttggttctgcgatgtctcaccaggaaacgttgtccaatttggactctgccggaatgaacgacgatgaaaggtgagcgaaaaagttgaaactgataaaacaaaagatatttctgatatttatgttgccaggctgaaagaattgcgcgagcggaaccggcgttatcctccgcacatgcgctcgtattatttgccggagtctgctcatctgaagaacagcgagacggatttgaatgttatgccgtgagagggaataattggcaaaatctttatcaatggaatgacccaattcgcttttttgaactcattattttttctgtgatctgaatattgatttgattgctttaattagaattatcatctcagaataaatttgacgatttgaaacaatggtaaaattagccagaaaagtcattttacggtttcaaatcttaatctttttcgaaaaatggggggggggacaaggtaaaaaaaattcagtggaatgaaaaaggagaagtaccgtatgtccaacgggtttgtgatgacacgctgataggggacgaatgcttaaacaccaaaaaacttcatgccatccaaatgtctacgtcaaacagagagagggagggagaggaccaaatttcagttaataaattgacacacgcttaatgaccatcaattcaatttatttcggaacacagatggaagtccgtcaacgtggacatctcctgcgacgccttcgaccccggcagcgaggacaccaagggcgaccgtggagtggaccaacacgccggacccagccgccaccgcgttcaagctcgagtggttccagggagacgggatggtgcgccgaagaacttgccgatcgagtacaacgtctgatggaaggatgcttcgtcgcctcaacatggacatgataggatcccatcccaccgtcctaaaagtgtcattttgtcccccatcatgtaaattgttgtgtctgtatgtaaatttctgtgatcatcgcttcaaatgaatgtatatttaattgttgcctatgtaattgtattgttgttgtgcttaataaatgctcatctgtgcttcaattccaatgcttttgtaggaagggcgggggaagggtggtaaaatttggcgtctgtttggtaggaggatagctcgcgtagaactcggtctgctcactccttgtaaattcaggtcaaaatgcgttttagacataaaagtggtccctcccataagtctatcagtcacacatttcgtttggaattcgaatgttagccgcccaaatttggagataaactgaaattcagttgcctgcccttccttctgtttcaattcctgagataacactggtacaaaaaatcacgaataacaagccggacaatcaaaatccttcctttctttgatcacttggcaatgttttagcatttgtctcgacgcttgtgattgatggtgtggcgttgaaacgagaaattttttgactttt

SEQ ID NO: 1051 - DNA, 4624 bp, Heterodera glycines
  unsure (1)..(4624): unsure at all n locations
aatagaagagcagatctcgagtaaaaactagacagctaaaaaataactgtgatcatnntagggggtcaaactatgggcctatgcaaaattcaaaaaaagttaccaatggacacacaacataaggaggacttgaacctggggccccctttttggtgactaactcacagaccactaagacgaaaaatccaacaattgtactgggagcccgaaattgactcgccgtgtttattggtcctaattagttctatgagcggatcctaaaaataaacacaaaccaagtcaaaccatttggaatctgttatagaatgctgctgcagttttctatttgcctcctccaactttttgcgctcttcaaatgccaagaatttgtgtcaaaatttagaataaatttctaattaaataaaaattgtggtcttttttagaataacattcgctgcatttttctgtttttgcctgctgtcccattgctttttaattgcaaatggcgccctccgtttattccaatttcgcttcggatgcgtcggttcaattggcactgaatgttccccttccaaggaatgtttgttgtacccaaattgacaatgtccatacccaaattgacaatgtccacgaggtgggcacatcaattcaccaaattgtttgcagtttctcattttcagatgctttaccttttgcttcgccaccgccgtttccgtgagaagtttctcaacgacgacgataaccgcgagctcaaaaagcggcttctccgtgcgctgatgcgcgaagagataatcccatcggaagaaaactgagaaaatcggcaaaatttttggaaatatgccatttgaaaaactgctttttgattgttcattgctttatcatttcattttattagcgaaaaacatcgggtcaaataaaattgttgattatgctcaattatcggtaattacatttgggtaatggctctgataaagaaaaaaagcaaaaattcgcatgaaattttgtgatcaaatttggcggatcgcttcaatatttctcgagctgagttcccggttaaagctgacagactgaatgccttggcatttcatgcggccgttgtcattctcgcgacagtctcccgcgcgtcctctgccggtgattcggccgcgtcttccgtcacccctccggcattctctgcggaaaattgcgccgcttcttccgccgtcgacgccccgggggccaattgggcgccccactggaggagaagttgctgcagaaactgaccaatttcatagaaggaaaaagaaatcaaaatattttttggattttaatttccaaaaaccaaatcaaaagtggtgcatatcattaaatccataattagtgtgtgttttgctgctaaaattagtaccaattggggtccgaacattgcgatttgggcggccaacgccgacggatcggtggcgagaaaggtgggggcgcacgacgcgtccggggattcgggggaaaggtgcggggacgggtcgctgggcgaatcgcgcaaatggtgggcagaggacgaaatggagcggaaggcgggcagcaacacctcctccatgtcgaaaatgcgacggccacgcctcgaagggttctgaggggccgaatgagtccctaaagaagggggcaatgatcaattaacggctaatgagagtgacaatgatatcgagtaattaagatggataatcaatgattgagtttgatggctgagatgaaaggaacggccgagaaattaatcgggacaagtgacccacccatgtgcacttttaagttgcctcgggttgtgaacgcgcgcccgcactcctcgcatttgaagggacgatcacctgacaaattggcaaggagtgatcagcatggacacagagaagaagcaattagggatcaaatggatactaattgaaggaatcactgactctgatcattttgattaatgctctctgttctgatcgtttctcttattctaattgtttcagtcattccattctgatcagtcttccccctctctcctcactgatctggtcagttttgatcatcctcccccctcctttccccgcccgtttctcaccagtatgcgtgcgcgagtgaatgaccaacgcggaactgctgctgaacggcttcatgcaccagcgacactgatgcttggccagcggaacacggccaccattaacagagaaagcggcggaggaggacgaggcgccgaagggatcgttggggaaggcgggcggcggcgaatcggcggcagagaaaatgcgttggatctgccggaaggaatggccaatcaagcggaaaacgggaggacattcatttggcattgttttgacggaattttacttgaaaacccccggaaagaccaagcttttcagattggtctgatccgacccttccaaaatgatttaaaatgcccaaacggatgggtccgatcagtaatttgatcaatcagcactgatcaatgatgggttgatggtttttcaaaattgtctctttccccaccttttccaatgggttctccccatcgccgttttcttctgcgccgtgcgccgtcgttgggtcggcaacgatcaaatcggaagtgcgtgacgccacaattgccgtgccgttttttgtgccccgcggcggcgatttggaaacgcaatttctctgctgcatttcactgctgctactgctgtcaggggataatgttttttgtgctttttcccttctcccgcttcacttacttttcctcaacggcactctctccgccgtccgttccctccgcgtgcctttgcatctccgtctcctccttcaccaacaacgggggctcatttggctctgtgtcgtttaagctttcgcttaattacagtaattagtggctttgattgatagcaaatttatgccaaatgatttgtactttttggtcgcgagctgttgtatgaaaaatgccggcaacggtgccaatcccaccaacggtgccggcgctgtttcctctctccggtgtcgctcgtcgcctcctccgtcatccgccttaggcataaacatatttgccaatgccgcgccgtggtcaactttgtccgtctccgtctccccccgcctctgtccttccccattcccttctgacactgctccaaaatgttgttcccgcggagaagtgttctgctgcagttgtgttcgctgttgttgggcaagcagaaacaaaagggggtgaggggggacaatcatcggagggaacggcgccggaggcattccgtggggagggagaggggcgaacatcgccccggggaacggcgcctggggcgacggatgaaaggcgttcaaagggcggccgaaaggcggcggaggcaccgcggggagcacaccgtttggtggcatacagaaggggagcctggaaaaggaatataagctaaagcaaagacagaaaggacacccaagagaaaagttagcggaatttctattttggatgccgtcactgccaacctttgcatgccgtgaatgtccgccatgtgctgctgcaattggcccgggtctccacttttgtgaccacagcccattgggcatggaatgtcggcagtgccaggcgctgagggcgaaccccccgggcgatgagcgtacaatgcgccgccgtttacgacgttgggcacccctccgccggcattttccgccttcggcatgccgttgttcagcaaatggtgcatctgatgacgcagcggcgctttggaacggtgcacgcccatgtgcgttttcaaattgccctgcaaaattgcaaattgacggcatttatttggcatttaaattgatgtgccatcatttgttttggcacctttgtggtgaatgccctctgacaaattcggcatttgaacggtctttcgcctgaagcagaaactcattggctgacagattctctcgtgtttgatttttgacctgtatgagtccggtaatgcatttgcaatgcgcttttgcagctcaataccctccgacagataatctaaaacggaatttatttgcccttttctaatcgaccaaaatgccacattccgataaatcctctatcccttccgtgtcatttcagtcgaccttccccccttcaaaatgccgttcctaccaaatttcctctccccctctaacaaaagtgtcctctaatcaatcccgcaatgatcaaatgccattccgatcactctctccccccccccttcttacgcattgatttgggtccgtcgttggcaatgcgttttcgccggccaactcgcgaattttctcttgctgaattgaaattgaaattcatttgcataatttattttcgttcattcacctcgtccgtgttgcttatttccatcatcgcctcccaatcgtcctcttcgttctgttgcgtcgtctgtggtgaagcgcaatttggtttcatgtcgaagtttggcattggacggacacaaagcaaatcggaggaggaggaagaggaggagcagggagggccaagggagaagggcacgaacgggggcgagaagagaggcggtgccaaagctaaaggaaaagccaaacaataaggggaaaggagggaggggggaggggtgatcagagagaaaagagatcagagggaaaaggatcagaggaaagtgatcaggaaaagtgatgtgagggaaaagtgattagcagagttagaaagaaa

SEQ ID NO: 1052 - DNA, 4848 bp, Heterodera glycines
ttacaagagattaaatgaatccaataagaaaatactagcacatttctatcttctattcgtttttaaaatttttagaaatcttttaaattttaatgttttaatgatttataaataatataagttaagaagacaaccagtaaaaatactaattatatgagcacacaaaaatggcaaacgcacgaactatattacttggcaagggaatgaataaacataaattcatagataacaacaaaaaatatatatttattttaaattaaaataaatacataaaatctacatgcattatcttaataaaaaaaatttatattaaataaacaaaaatttaacctaatataaaatgctacctgctctgagaaaaaagaaaaaataaactcttatttgttagttcacggaatgctgttttaaattgttgtaatactcaaaaatataaattaaaaattatttatttataatatcaagttttggcataaattcttacaaaaagtgccagttaatcggctgagcgccattaaattacttaattatgctgttttcatctatttaaactagaaatcgaaggaaaattatatatttagctgagaattttaccctaaacaaattaatacaacatgaatctattcaacatttagctgcatccgtaagaacgagcgagtcgctctcatcatcacctgagcgagaagaacaatgagtaatatttattaaatattaattacctaatgatttaatctataaatacaaattttataggaattaattaaataaaattaatttttgctattttaattttctttgaatgcgcatgacaatgaatatggataaaaaaatatcaaaaacgaatattaaacatgaaattagaaaaaagagtaatttatttagtaatagcatagtagttagtcctacagattttggcccctaaagttcggaccctcttgactgcaactcaatttttatcattttttaattcaatgcgtatggaattaatctccataagcccttaccgtttaaaatttttttccccaaggaaacagataattgataataatttaacagaaaaaaaggataaaatatacaaaaagatcttaataattcaagtaaaaaagcaataagacaatagcaccaatggccactgtagtggttccccataaatttaaagaataactagcacagtgagaaagtaaattttaattgatttttatggtaaaaaatcattaaaaatgtaaaacaaaaaataacataaaatcaaattaaaaaaagagaaaaaacatcctataatagactttttttttgattggttcacgaaaactatatttttttggtaaaagacgttgaccgcccctcgtattgccgactctgcaagcaatttcatataaaagaagacgacgacgacgggatgaacccctgtacgaaatgtttcatccaaccattaaaaatgccaaaaatcaagccgtaccgcattattgcatatgattttgaggcaacacaagacaaaaaaatggagaacaaatttgagcacgtggtcaactttgctgcggcaaccgttatttgtaccgattgcatcaacaacggctactggaacaactctcttcttgggaaaaagtgcaacatttgtggaccccaccggaccatcaccttttcgccattcgactacacgaaaacaacagttgatcaaaaaatcatcacccaaaatcctttgcacaaatttgtccaatggttgtttttcgaacgtaacaaaaagtatccgacggtagcatttgcacactttggtggtcgatacgatatgacaatgatcatcaaggaggtcatagagcaaagtgaaattaattttgtaagatttattttatatatattaataaaggtattcacaatccggagatcatcaaacaaggaaaccgactttacgaactgaagataaatgcaaatgatcatcgcccactcacaattcttcacgatagctacaaccttatgcctatcaaattatctggcctcatcaaatcctttggactccaaattgaggacaaacaattttttccacatatgttcaacaaggccacaaactatgacaacgtcctcactcatctgccctctcgcgtagactactgcccaaaccaaatgaaaaaggcagaccttcaaaaatttaacgattggtacagcaacaacttgaaaattttgcaattacgatttataatttaaaaaatcctaaacagctaaatattaaaagaaaatttaaaataaaataattatttcgcataaatgaacaataaagaccagatcgtgaaaaacaagtgattttaggaaaaaaatcaaatttaatatattataaatcaaactttaaataaggaatatttgtaaatttatacttaacaaacttcaatatttattaattcttcttaatattatgattcattttagcagaacggaattcgtatgctttggcttattaaattgtaactaaataaataataattaatatataaaattttgaaataaaaattggcttattataccttgaaggcggtgccagtaggcactaccggtaaaatttttgaaaatttgtagcattttgttaacagatttagaataaaaacacatcaataaaaaagtttagcaaaaattaataaattatttcctacagatgccaataattttcaactttttcataaaatgaacctttttaagttatttgtatttactttatttttataattataattatggctctccgaaatttgtcaaaaatgcgttgaaaattaaattttataaaaacaaattcctttggttttgagttcactgatcaaatgcggtatccatattctaaccccggacaagaactcgaacagtcaaaagtactatttatcaaaaataaaaattttataatttagcatttttagttcaaatgcattgaaggattaatggctttcagttttgttaagagtatttaaattgattttgaaccaaaaatgctatttcggaaaatttttactttaaatatcgttaatttataaaggattaggtaaatcattatttatttaattgcaattgttttataaaacttttaaatttaattagaaaatgattttttttacaatattttatcgtattcatttttactgctttatttttttattaatgtttcttttattaaaatttaattataataggtttattgaattgtcggatctccataattagcattatcccataccatcaatataatatatttttcatcgattttgcatgtttaaaatagatgaaacatcataattaatatgttattttacagcttaatgaatgcagtctcgaagaatttaattttctattctgctagcaaataataggtaccgtatttcctcgattataagccccggggcttctattgttcaaccccctccaaagggggcttatattcgagggggggcttccaatcgagggggggcttttattgttcaacccctttccctatataaattcttaaaattttttgctttctgcataatggtacaatttaaatcttaatctgaaatttttgaattgaaaagatttttcattttttggcccttggaaatttaggcgaatgtttgaaaattcataattcacttctaaatgaatcaattaaagtgcaaaaaagcattaaaaatagagaaaaatctggagcattttatacctttttagaattttctatcttcaaaatgaagaagttattacataaattttggaaaaattcgttttttgagaaaaaaaattaatagcgctgttctgaaaaggttttttgaaaaacatgaaattcttcctctataagcttctgtttattctatatttttataagacttttgaaaaaaagtacaaaaataaactgattttggaattcgggatcatagatggaagcaactgctttttttgagccatgggttaagatccacttgcctgtaaaaatgttttttagggtttttgggaccactaatcaagaacttggcatccattttgcccaattccaaagcattgatccgaactcgaaaccccaaaaataatttttaaaaaatgttgcaggcatgtggattttaacccatggcccaaaaacccatttttaacaaaacaaaaatatattgggtataatatttctatatttgcttgaaaattttttagtgattttcatcaaaatcttttccagtgcaatttattaacagaaattttttctaagctattgcttcgctattagacaatttccaaaaaagttatacacgaaaattgcgaaaagtcgaaatttttgaagttttttcgtaataaaatttttccaggcttgaaaatcttttcgcttttggtaaggctaatagagcatgttaagagctttcgagtgataccaacaatgttgtatttggatgtcaaagaaaaaagctatcgtggaaaaagagctggcgccgaaacgcgagcgccgaaacgcgagcgccgaaacgcgtgggtccgtttgtacatttagtctttctaaaatattttatgaattttaaaaaaatactattttttcagaaaattttttatgttttaaaagtttttaaaataacaaataaatattataaaattatccataaaaagcgacgaagaaattgatgcagaagtttcctaatatttttttttgttaatgttttattaaaacaaattgttcaatagtttttacacgtttctgacttcaaaagttttgaaaaaaaattttttttgagttgggcttatattcgaagggggcttctactcgaggggggcgggcttctatttttcaacccccctacaaggggggcttatattcgagggggggcttccattcgaggggggcgtataatcgaggaaatacggtaaata

SEQ ID NO: 1053 - DNA, 1621 bp, Heterodera glycines
ccgtttgtacatttagtctttctaaaatattttatgaattttaaaaaaatactattttttcagaaaatttttgtgttttaaaagtatttaaaataacaaataaatattataaaattatccataaaaagcgacgaagaaattgatgcagaagtttcctaatattttttttgttaatgttttattaaaataaattgttcaatagtttttgcacgtttctgacttcaaaagttttgaaaaaaaaatttttttgaggggggcttatattcgaagggggcttctactcgagggggggcttctattgttcaacccccctacaaggggggcttatattcgaggggaggggcttccattcgaggggggggcgtataatcgaggaaatacggtatatcctaagattatgtttatttcttgcatatttgattaattaattttttaaatttttttcctgaagagcgaacggcgttgacagcatttcttttcaattatacaaatgattgcatgtatgtgctttaaattgaaaatcagtgttgccaacgacgttgtcccacttggtaatggtagtgatgaacactacaactcaaagcctcattttgaaaatttagtctcattgacctatcaaaaaaccacataatgaggctaaagcctccgatctgcgagccctgtttataccactgaaccacgggtgaaaacagacgaaatttatacattgactaataatgacaagcaatgtgtattttaaaaagaaaaaaaatgatgcatcaagttgttatggtatagatttcttttccttatctcttattttaaaataaataatgatttaattaaattaaaaaataattgcaatattaaaatagataaaatagttaaattgaaaaaggatgaattcagaatgaaaattttaaaaataataatatcatttttctaaattaaatttaactagtttaaaacaattggaaattcaaatataaattttaaaatttaatagtaatatacaattgcaaaaaggacttatttaaaaaaatctccactattataaaggcaattatttatatgttaagtaaattctttattcaacaggagataaaaaatattactacaagaaaaagtttaatatttatttaataatcaaataaaaataaaaaggcttaattcatcaaaaataaaattcataactgaaaatactatataaaagtaaactgagcaacgcaaacacaaagactgcgaagttgtacttctcagtggctgtgcttcgttttttcgatcgagaagcaagacgtttacattatgaacccttcaacccgttcagttgtgtaatgtgtaacagaagcgagtttaagattattctacttctgcaacgagaattgaattaaatatgtatttgaatgaatatgaacaaaacataatttatttaaataaagtaaaactacaaaaataatttctaagtaaatagcatttatggaaaaaaatgcaaaaacttaagattgattagaatacagaaaataaaaatgaattaaaattttttaccggattttttttttacttgggtgaattataaagcaaaatcagaaaaatacattcaatatttatatgcctaaaaaggtattataaataaatcaaagta

SEQ ID NO: 1054 - DNA, 1995 bp, Heterodera glycines
  unsure (1)..(1995): unsure at all n locations
aagttacttcagtcttttntaaaataataattgcactcggcaggtaatatgtataaggaattaaaaaattgaaaatccggaagcgaacaagcggagtattttttatttatgcaatttatgatatttaaaatttttcattatttaaaaaaaagtgcaggtcaatgcggcggacctctatcaaaaatttaaaaaaatattaataaaattaaattaagcacaaaaacgaaaaccgctctataaagctgtaaaaaatgatgatatcatttttaaaataaatcttagcattaatttctgcaagtttataaatttttaacgataagtcttaataataatatgatttaaaaacaatatttttatttccacttttaaaacgaattttctattgtaaaaaataaagaaaagccaatgtatatgaaagaacgatggtcttcgtataaaaagttttgaacgaaaatgaaaaaattagaataaaaaaattatcaagaaagtttaacgaataacaatattaatataaagcgaagaaaaaattttaattgatgttcaaagcagaagtaatcaaatagaaacgatggaaattttcaaaataaatgtgcaaactttggcacatactaattacatttaaagaaaattaattcttttttataattaaattttcatacaaatgaattaatgttttattttacaaaattaatccacaaaaggcctaaattgacttatataaaaattaatggaaaagaaatattatgaagtaatataataacaaattttattgaatacatatttacattgatatcccaaaaaacaaactcaaataataattttaaaaaatcaaataaatttctattgcaagccttttcgaatttattatctttgctattaagatatgacttcatatgtttggaattttataaaaaataaaccaaatgaagcggactctaatttttgtggaaaagtttgtagcacaaaaaaggatcaacgaaagcaaggggccagccatcacatggtccataagtaaaaaaaaaccaaaaaagggtgagaacaagaaaaggccgtaagttataacataactaacgaaaacatgtaatcagaatttttgctttaaaaaacaaacttaatttttagaattacagagaaaaatagacaaaacacaattggattatacttattgaaagctgcctataaaattcatttattataatcattaactcaccaagattttttcgacttttagaccatgaaaaataataaaataatgataaaaaataaatctggatgaacaaaacagaacattgcttataaatagagttgctttatttaaaaaatttaaaaacaaaaatttttatccaaaaaaacctttaatcaattttaagatataaatttagattcactacaatctttgtagtttctccggagctgctacatttgcgcccctacatttgcgccccgcacatttgcgcccctacatttgcgcccctacatttgcgcccctacatttgcgcccctacatttgcgcccctacatttgcgcccctacatttgcgcccctacatttgcgcccctacatttgcgcccctacatttgcgccccgcacatttgcgccccaattgtgaataaaaaatatattcataaaattgcctttcccaagggctaacgggagtagttttttttttaattttgcttcaattatgtcatgttcaaccacaacaaggcaagttttgtagtttaagcaaacaaaaaatcgaaatcaattttcagaccgattagaacccgataagaggacaacgaaaagcaaaacgatgactgtttttgaaggctatgaaatgcgtactgatagaataatagcagcaggccaaacccaggctatttttcagtatttgtatatattaaatattttatcttaaataggtatggagatgtgtcaagaaatcatgcccaggcagggcccattcacctatcgacagcacaaacttatttggaagaacaaatcataaccatt

SEQ ID NO: 1055 - DNA, 1426 bp, Heterodera glycines
aaaaaattttttgaaaccggccgtgctattggatggttgcccattttgacaagcaaaatccagaagatccgcaatgaacatcattggttacgacatctgcacgcaatttcatttcgtctgaccaccaaaggaattgataattggattgaataaacaaacaatcatattaatctcgcgttagcccttgggaaaggcaattttataaatatttttttttgttcataattggggcgcaaatgtgcggggcgcaaatgtaggggcgcaaatgtgtggggcgcaaatgtaggggcgcaaatgtaggggcgcaaatgtgcggggcgcaaatgtaggggcgcaaatgtgtggggcgcaaatgtaggggcgcaaatgtaggggcgcaaatgtgcggggcgcaaatgtaaaggcgcaaatgtgtggggcgcaaatgtaggggcgcaaatgttcagtcaccgtttctccagttatatatgtattaagtctgaatctttgtttatattaaagttttatgttttaggcttttaaataacataatgggattctatttgaaattgatattataatgttatttttcaaggtttatttaaatatcagtaatatcgggaaaactgttatcattttaataaaaaaaaattagattttaaattctgtttagcatatatttatatctttgtgaaatttttttttaaatttaaccatcacaaaaaattgagaaggcataaaagaaaataattaaattaattcaataaaatttgtttaataagacataatctcatttatttgtaataaatctcactttactcgatcgaataatttattttttttaaattacatttggtaattttgttttgaaaatttatgaacattcaattttgttgcttaaaaattttaaatttgttaatttttttgcttttgaagactttctttatgaatatcctttgcctatttaaatcttgttttttttaaatttatttatttatttttcttttatttcttttattgacattttttgtattattttaaaaaaattcccttcatttcaaaccagaatattttttggttctcaaataaataataataaaaatgttttattttttaaattttgcatatgttatatttaaagtcaaatatttttttatacaattattgtattaaaattttatctatcccagatgatgaccgcatataaaatattataaatacttagattcaatgaaaagtgtatttatttgaaattaaaattctgtttattttaaatactgactgtttgataaattgcttatacggattttaattcttaaaaaaattctcacaagatggttgcccatttttctaacatctcagtacgtgtcgcataattcagcgccattatttaagccaaggcacaggagaccagctttgttcactttcttttaaatgaacaatcgat

SEQ ID NO: 1056 - DNA, 5119 bp, Heterodera glycines
  unsure (1)..(5119): unsure at all n locations
cagccccataaatttattaagttaaagtataaaagaataatactcaaatgaatgaatgtagtgatgtgtaactatgaaatcactataatattttatagagaaaacgctaaagttatatctcggataaagaaaaactcatttttcanaatgaaagaataaattaatagcttcaatgccaaacgaaaatagaattaatattcataatgcaaaaagcttaacaattgcatgtaaaaatggaaaacattgcttgcaaaattatacatgtgaaaatgtttttaacactatcaaaaaaaatttaaaaagtaaattagaataatcattttgcatttaaatttagatttctatttctaaacaattgaaaatttaaaagaaaataaaaagaatttagtaaatttaaataccaataacatttattaaaaaaataaacataaaataataattttttgttttctttaatgcctctgtaaaaattacctaaaatgaaaatttattaccctactaaaaaaaataaatggtaaataatttaaagaaaacaaaatatgttttttatgaatatggcaatatttagataaatatactgttttgttattattaaattctaaaagttaatgggaaattatgaaaaaaagttgcttcaaaatgaaggaatgcgtcagaaaccctggacatgaaagaatctaaattagtcaactataaagtaaatacggcataatctcaaattaaaaaatacaaatgattaaattaaaaataaaattttttaaaataaaacaaagatcaaaatattaataaattttatgaaggcattatttttcaaaaatgcatattcttattacaaaggataacggctacaaataaaaaacttataacaaagagtgtttatgtttattgatcaaaacaatttctgaaactcaaaaaatttttcaatttttctcctattgtcacattaaagattgaaactggaacaattttccaaagacaaaaacacctaagtgtgaataaaaaattatattatctttaaaatatgtaaatgaattgaacatatgaataaataaaactcaatttttcgttgtactgatttaaatgaaaaattaataagttatcaattaaaatacattggattttatcaccatatatgtaggaaatcccataattacaaggttttaaaatgaaatcattttaaaattaaaaaatatttaaaatgtttaaaaagaaatttcttgcgccttacaaaagaaataataaattttaaaataaaacaaagatagaatccgttattttattaaatattaacaaaaattaacaaaatatattatatgatatttcaaaataaagaaaaaattaacacatctcaattcatcacttgactcatattgagtaaaattattattttatggtatccttaaaatcactagtgcttttttaagaaattcaaaaattttactataataaaatatgagttttttaaaaaatatggagtcaaaatttttcttaattttttgaaaattaatattctgatagagaaataattagatttagacaagctatttttatataatttttttcattttacattaaaagactaattttatggtcactataaaaatatttttttttaatacaattataaattcaaaagaaaataaaaagaatttagtaaaattgaaatgccaataacttttatttaaaaagataaacataaaacaataatttttcatttattaatgcctctataaaaatagcaaaaattacgaccaaaaaaatatgtataatgtgcatatccttggtgcaaccttaagaaattaaaaaaaaactctttatccttgactagaaaaccgtggctttgaatcatgaaggactttaaaaaacagacagttgtccgtgctaccaaagttacatcgcttcaaacccaatttggacgacaaatttaaaaattcgtaaatatcgtgaatatcctaggtgcaactttaaaaaataaaaaactctttagccttgaatagaaaacccgtggctttgaactagaatattaaaaagtaaatagaacacattcattgcaacaaaaatgaaagaaagaatagaataaaattattcaattaaagaaggcatcatttaatatgaaaaaaacaaatttaaccacctgtattaaaaaaatagccaaaaaaccaaggtcagagaacgaaaatctacgagaataacaattttaatacaaacgtacgaatattaaaagataaataacaaaaaaatatgtcaataataataaataacaaatattcattgctttatgattgcttaaatattaccataaatgtgattttgatacaatgataacaggtggaaattatcaatttctaataaacttgatttatttttttatgaaacattttcaaattcaaaagaaatttatgaaaaattggagtaaattcataacaatttggcctttttaacataaagaaagaaataacaaaacatatacattttgtataatctatcagtctacacagattaataatatgattgcctctattattttagatgaaccttgaggtttttataaaaaaagtaatattttatggatgtattttttaacatgtaaagaataaaatttttcacaatttttttttattatattactaatattatttaattttaccggaatttttatagtattaccaaaatttttaaatttttttaaatttttcaaaattttcaagatttcttgaaatgatgcgagtggcagttttaagaaacgtgcttgttttttagtttcacggctacgggaaaactaaatttaagaaaattaaaatcagttatgagcaacaaagagcaaaattaaaaaattttaaaatttttcaattttgatttctccacttaaataaaattaaatttatgactaagaattatgagaggcctacgcatactgcggcacgggcacgacacatattaccaaaaaattttaatttattttaccgcatattctactgcgaagcctcccggtccccaatgctgcacgggtgccatgcatgttctgttagctaaaattttatgacaaggggcaggtgcttcgcacctgcccttcgaggtgcgcgaacgaggagcggagcgaagcgaagcgacgagcgagtgtaccgagtcaatacgagcctgatcaattttaagcataataaatatcgatattggttttttttattaaattttttaactaattatatttgaatatgataaattaattttataatttgtttgtagtatttttcttctttctgtataagcattttactaccgctaatggaaaatgtcaacggaatttattaattatatgcattataaattttacattgtttggttttaataggcttttttttttgttttttataataaattaaagtcgaacacaaatgtatttttttggtttgtgccaaacatatttgtaataaaataaaataaataaattttttgggtttatacatttttttgaatttttgtttgaatttattgtaattatgttttaattatttgtagtatcatttttggttttaattttttaaataaatgtattaaaaattttatattttacacatatccttcttatttatttttgcatttgttagatatatgaaaagaagaagctaatattatataaataaaatagttcatgtcttcgttaggttacttttcgggaagacgtatgaattttaagttgtttcttcatttttgactactcaatttaaatatttcattaaatttcacatatatgtatttgtaatttatagttcacttggtaatttgttttatgtatttggacttgcttcgttacacatttcgtttttcggtcaaattttcatttttgaaaatccaaacattttttattaaaaaatatttatttaatcatttctttcttcaaatctgactaaaaatttaactttttgatttttttcatttattttttaacttaattttttttgcgaaaatcggcgaaaaattttgtaaaatcaccccataattcgggatttcaaaaaacgaaaaatacatgcctaaaaattgactgaaaaaagaaaaatacacacctaaaaatcaaaatttttaacttcagccccccgctaaagccaggttttggcttcgatcttgatctgttcagttaaagaatgattcaggttaaaaaacacccgtaattttattattccggtaaatgccggtaattaatgtatttcttattaattttatagaatttttcattgaatctattcttgggcatcacttttcttttgtactttcaggtgtttttagcgtggacgcgcattttttaaaataaatatttcaaaatttattttgcaattttttttagaaattattagtatgataatggttctagcaattaaaataaatcacaaataaacttttatttcgctttgaattttttctatatttttaaattttttatcttgtagactcggctaatattcttcttggtatgcataaacatttaattatattatttttgctttttttgccattttatttttaattttataaaatgaataattgtttatttaatttaaatttttaaattttgctattttaataacctaataatgagctacatatttataaaatatattttaagggtagaagttataatcattttttctgatagtttattttttcacttctattataaaaaaattttgacagattcctttttctttaaattttttatctccgtatcttgttaatttattatgtttctgcgatttattcttctcttatttaaattaattttttgaaattaattgtccagacccaaaaaatcagacttttgtctgcttcccatgttgaatgcgttcagatttcattcccaatcaatatgagtttgaattatttcataaacaaagaccgaatatttaaaatgtttataccttatgaattccttttaaaatgtttaatttatttaatttttgttttaatttgtttatttcatttttgaatatttatacttatttcttcttttaatttttgatttgcaataaaacaaattcacctatatgggctttaatttaatttcatcatattacgaacctgaattaaaattattttctcatgatttaaatttcattatggtattcct

SEQ ID NO: 1057 - DNA, 1373 bp, Heterodera glycines
  unsure (1)..(1373): unsure at all n locations
gtctaatatagtgaacccccacaactgaatgcctgctttagccgggccaaaggcccagcctcagcatgcgtgttagcaatagcgcaatcaacgaactgctctctacgacgataaattgaactaattaaaaaaagagctggagatgaccgctggatagccaaatggacacgatttaccatgtgtaaaagaattgaccaaaagccaaagacaaacaaacaaatatctcactcactttttgatgaaaagtgaaagaaaattttcatgacacaacccatttaaaattaatagatttgaaaaaaagaacgagcaaatctcattttaattggatcattagcattcggatgataattatgttctttttaataattatttacctaaaacattaagaataagccatagcttttattgcatatgtttagtatatttccttgtaaattcctttccgttgagttcagtcggcgtttggcagccaatctttggagacagtacccaccgccggcctatcgacgacagaacgacggtacttatttgttagcaggcgggagttttgtcgcttcattttatctcctcccatttttgtagtggcggatggaaattacgcccctttcaatttgtacgacggcggcgaattccaacctccgccgctgccggtgccctttcagccgagtgggtttcttttttgcattgaattcggttgcttcgcttcttcagacgttccgccgcctttcgcttttccgccgaacgatccgcgcttttaccgacaccacggcggatataatatgatgatgtacaacgacaacaacagccaagcaccaccgcaacaggtgccatttgaatgatcagcataatcagcgaattccgtttgtttttagccgccccttccgtacgcgacgaatgaccaccaaaggcaacaccaccacttccaacaaccagcacagcagcaggacccgcgcatttacccacagcaaatgttttacaatccgccgcagcctatgccggnntcggttgggcagtcgccccctcccctccccgtgccaacaattcgaattgtgtgcgaattccctcccattttttcagcatcaataccaccaccaaactctgctgaaccgtctgcccaatgttccgcagccgtccgttgccgatgcgcaagtgatggtgccaccgccagcgatgaccgatattgcgcttgccggtgccgaacaggccattcagatgttctacaacaatgccgggattcacaatcaacagacgcaccagcagaatggtcggccccaatagnggaggggatgaacggcacggcaaggacccgacgaagcgttcaaattttgcaatttgtctcgccccttctctttcccatgactccacattttcct

SEQ ID NO: 1058 - DNA, 2954 bp, Heterodera glycines
  unsure (1)..(2954): unsure at all n locations
ttttattggtcactaaaacacaaaactttttgacggccttttgtgatttaattcctttgcttttatctctgtcgatccatgcgcctttttttgcttctttgacctatgtttttttcgtcttttctttcataaattgtcattttcctatttgtttttctaatatatcaatcaaatcattcatcattcgtcccatttcattttcttcgtcgtcacttttcgcatttcccccttctcaaagttaaaatcacaaacacacgaacattcaaatatcatcctttgttctgcttaagattacacctttgatttgttatttttattttatttggttaacgcttcacaccgattcattttggactcccaactcaaaaagttggtcgttttttgagtttagtaattggacaaagggtggtggatttggatttcgcccaatgtttaaaagtttagcatctcaaaactgggcaattttggtacaataattacggtgttttcttgattctttctttattggcgaatctctttgactcggtgtgtttagtgttcgaaaatgcccttattttcgtaaaattctcataatttttggtgcgcctcggcatatacgtaaaataggcaataagaatttcatttaaactggcaacgcttaaatgatttgatttgtgattgattatctcatgtcaatgcattcgctgtttttgtaattcatttccacgaattaatttttgattttaaatcataagttgaatatctttgttcttgtatttatcgctttttgcagttaagaaacttttaaaacgtttatttttgaaaatgggccgacggaggaaaacggcgcctgcccttttgcgcaacaaacggacgcgaattgacgaggacgaaatggacgaagaagaagaaggggcatggaatgggcatggccaccaaaatatgggacttcgaccgagaaaggcgaggggaattggtggttttgggggacgaacgaaaggggggggggcagcagcactcattaagacgaaatacggggattgatgtgcactgatttgagtgttcatttagcagatccaacggacaatcagtgcccagtgggccccgcgtctgcgcgaaaggcaccaaaatggacagaacacaacggaggaccaattggcggacatggaattggaggacgtggacatggatgaggacgaaatcgtcaaaacattggtgggccaccggggggggggggggggggaatgagggggtcatacctctcncgttgagttttgtttaattttttttaaatttcgaatgctatttgtatacctatgacatttttcgatgctccgtcccttaaattcaaacaattcgtttgtcagaatatggtgttcaccaacctcgacctctcccaattgcccgctttgtctcccggcgccggactttatgcaatggccaattatgcaattgaagagaaatccatcccgaaaagaaaggcggcggaggttccctcccccttctcatctcaaaagtattttaatgagtttagaagaaggttcccgaggatgtgttggagcccactttcctctccctggagcaagccatgcaaaggcatcgaattgcttttcgtccaatttcatttggtttttagagatcagaatttcaaggggaagctgttggacgcgttcttggaggactttcgggagcattttcagacgtatttctcccgtccgaattcgcaaacatttgacaaggatttgtgtgtccgtttccttcttcaacacttccctttcgtacgtttttccttttcctcaattttgcttctgtttgtcccttttccttcagtgccgtgttccgctcattgaacgactcgccgacgaattcgccggtcgttacgccgtcgccgcgtgggtttgcttttttgtggagagtcgtttcggcgttctcatgcgtcgatgtaagtgctgacaatggcacattttcacttggtaataaatatattttttagattttttgcacattgaacactccgaatgggtcattttgtccattccgaacgaaaacgcgcgaagacgccgcgccaattggctgcccgacccgtcggaagaggacgacacaacgctggccaattcaattcgcgagttccgcgctcgtctcgcccgtttccgtgccgattatccgcaactgttcctacccgactccaacaaactgagtcccgtccgtattttatgccattgatttaatttaaattattgttttccttttcagaatgccgaggaagtggcggtgtacaccgaaatgccgggtcttccgctgatcgaatgcatcgtttgcaccggtcaattccccgtcgcacgcactgtgtgttgccaaaacattgtcaattggaccattaccattgacccgactttgccttgttcgcctcccccccccctttccattttattttttaccattttccctccttttcagccggcctctcttcccaccgtttctgtgtcgagtgtttgattggccactctcgcgccgccacccaagaaatgccattggcggacggcggcatcggattgcgatgtatggccagcgactgcccaaatgcgatacttttttgtgagttcattccaacggaatattggagccaaacaaaataaatgtcgtggaaaattaagccgagtgtcgcttttacattccgccaaacattcgccgacaactgaacgcacgcattttggaggagagtttgggcgaagcgaagttggaccaattggaaaggtgggcaaatggaggggacgggaggggaaggaaggacaaaaatggggcggggacgtttaaatggcgtccgaaaagacaccccttggataataatgaagaaattggccgattcttttcattttttatttagatgcaaatcgtgcaactttgccatcattatcgagggaaaaaagggggggacctaatgatccgtgtaattacgacataaaatgtctgtaggt

SEQ ID NO: 1059 - DNA, 1723 bp, Heterodera glycines
aaaacaaaaaaaattgaactcccaggccgggaatcgaacccgggtctcgcacgtgacaggcgcggatactaaccactatactacctgggacatgttagtagaccattaaaattattctatcaaatgaaaattaaagcaaaaaataaataaaaaatgagtggaccaaatgaaaaccttgtttttgaacagtaaaaggtttttcgatctattttcagacttatcaaactcattttggcaatttctaattttttgtgcccaataattcctcgtcccttcccaccgggcgctcttcgccagtcgtacggtgcaccgatgacatcgatgccgcgttggtagcccaatttggcgagggaggcgacgatgggcgcgaagtaacggctcggcgaccgtttggaggagtcaatcataaaatcaacagaaattccacctctttttaataattgtgaattggctgcccatttaagaagaaagtgtccctcccctctcatcccaaccctttccgtctttccgtccctttgcgtttttcttcaaatggatgcgttttgctgctccattcccccccccccccctctgaccattccacggttcgcgtgtgtccaaagccgggcactcgcactttcactccctccaaatcctgcgcccttccgctcgttctgttgaagttgaggcgcatattgtcggcccaacaatcgatgacaaaagggccaaattgctgggcaattagggaattaaaagaagcgaacggaagagatcacttgcaaatcgagccaaagcgcgaagaaatcgttggtctgtcgctggcaaaagtaatggaccaccgacggtttgcctaaagtgcccttggccttacccccttcagcccctctcttctctcacccgtcaaattcgcctttagccgacttcccccgtcgccggggactaaaattagacaaaatgaatggccaattggacaaatgggcgacacacagacaacgcgaactcactgagaacaattgggtttcgtttggcaatgacagaaaaatggccaaatcggcggaagggacgcgacgaaagggcgggggaaatttggcggacattttgagggattaaaatgaaagaaagagagaaagggaggacgatcagaagcaatagcagaacagtggacggggagaaaagcatttgggaaaataaaagcaaaattaaatttgaaaaatttaaaggagagggaaagagtgactcaatgaaaagggaatgggggaattccatgggggggggggggtgccatcaatgcctttgccttatcattcactgactttgtcttatcatttgacgcgccgagcgacgaccgccttaacttatccacaaatacttaagtgaaacgaatttgccaaattattcgaaaagtggagacgatctgggatgagcatgaaatttcgattctgtcatttttgggtctcggaattccgaatttcgaaaatgataggcgtctcgcaatgccatccctagcgccgatagtacttatttaagacaatttgtaacagatacaaataacccgattttgggccaatttttttttcacgattcgaaactgagactctctagcatctcctttaaatacctttttttgtttaccttacacctcatgtcatgcgtatcctgaaaatctgaataatcccccaatgcttggccctctgttattgccaaattgatcaacaaataaacgtctaaaaaaaacaaaaatttt

SEQ ID NO: 1060 - DNA, 1503 bp, Heterodera glycines
  unsure (1)..(1503): unsure at all n locations
ccatggggaaaaagagtgagtggttggcttatggaaatggaaattaagtgatgaatgtaatgtgtaattaggggtaattaggaagcaaatataaagtgaagacaaatcaaaggaccataaacagtgcccatcacagaaagagtgaccattcacattgtgaacagcaaatatctgcttgaattaaggaaaatagaaaagaaaaagatattgacaaaggacaattcgatcaaagggatgacagtgccagtggcaggaataatttcagtctttggagaattggaaaatgggaaatgagaaaagaaaaaaaacgacgacggaagaaaattaccaaaagcagaaaaaagacagttaaagcgaccaaaatggaaatgcaaagggcaatctgtggggggggggggaaatggggaaaatgatcaaatttggggaaaagaggagccaacggacggaccttttcgccagaatcggacggcaaataaaagacgagaatggtcaagaaagagatgccaacgcatggaaaaacctaaagcagaaaaagggggaaagaaaagcaaattgggccagagaaagaaagagaaagagagagagagagagagagagaggagagagagagggagagagagagagagagggagggcgagagagagagagagagaggagagagagagggagagagagagagagggagggcgagagagagagagagggagagagagagggagagagagagagagaagcatttgggaagacaaaaggggaaggaaaagacatttgagtggagacgactcaagcaactaatctgattgatcagtagtgatcctcagtcccattcaatcatcacatcgcccattgctttggaaaactcaccaaattgatggtgtaaaagagcggcttacggcgcaacgccaaattgtactgaaaggagagagagagagaatggcactgtaatggcaatgcttcaccacaatgtcatcaaagtccttctgccgcacatttggcggggggcccaccggcggaggaacgggccgaataaaagtgggaatggcgcactgccttaacggacataatgtcccattcgacggaagggtaataatcggacaaatctgatgagaagagagaggggggggataatgaaagcgaaaaagcgtaattaagagaaaatgaggagcttattagcaaaaagcaacgaatgaatggacaaagtgcttgccaattccgtcctccctttccgtttccgtgccattggcgtcctcccaaaatgtgagacgaagcaaatccgcgggataactccacgaaccgaactgtaaacagcaaagagatgccaaattttggcggggattcctccaccaccttcaattggcaaagctgctcatcgaacggaaaccattggacgtcgatttggcacaacgatttgaaaacggccggaggctcccaaaagacctttaattagagggaaaatganaagataattagccaattatccgctgaatgtttcggcacattacg

SEQ ID NO: 1061 - DNA, 6295 bp, Heterodera glycines
tctagagtcgtgaggtgagtcacctgcgtattccttcggctcccacttcagacgcgggtccatccatgactgacgaagccaaacactgaccgtcattatctgctcaatctcgtgctgaagaaggcgcgttaggatggactatcacccgtcctaattacctaattaccccgctttaattgcttaattcccctcttcgttttttcattttccaacccaaatgcctaaatattgcttttgtgatagtgtctcattattagagctttgttgtccaccgaccacgtcaatgatttgcgagagtcgcaatttcagtctcactgtgctcagtcccacgcgtttttccgtcggctgagcgaccgaagggcggaggtggcgattataagggagcaaaaggtcgtcgaagagacgcttcgcctgctcattggcgcggacaaagcaaacttttgacgagaggagaaaaacggcgaaccaaaaaaacgcaaaaagcgggggaaaacgcatttttagggggggggggggaaggaagtgccgaggacgagcgactcctgacaagggaaacagcaaaatgagtgaagcggagaattgccagaattcgaatgccacgcggcattccctcgggggaaacaatggccaacgaaaagggggcaattccctcttcttcatgaccccccatctcattgacggaatgaaagtattaactaaaagcatagagacaaaacatcactctttttcctcctttctttttattcttcaccacgggcaaaaggaattggccgaaggggaggggaccatgacagccgctagcatagaacggggagagggatttgcaatggcaatgtccggcaatagaagtttgaaagcaaaacaaaacgacaagagaagtgataccagacgaatgcagggttttaaaacagtcaatttaaaataccaagcgtctccaaattcattgatcaatttacttgaattctgacgaaatgtaaaacagacaaatctcccatcaaacttagtcttccgtttcttcctttgtgtcatccatccgcatcttcttctctgaaaaaagattaacatgaaaaaacatgcaaaaaatccttgacatttaagagtatttagaaatgcaaagctatgaaagccaagcactaaagaggacgcaactttttgctctcgtgagtcatcatcattagggacttaataggctacaaggtcgaacaggcccataattttaaaagctaataggcgcgtttgtctactgatcgcccatcacttggactggtcgatgactcaccagcaatattcccttccgacgatgagtctgctgcagcggaggcggcgcctgcagggccaccaccgccgttagcagaagactcatcgcgactcaacggccttttcaatgatgctgcacctccatttcccacgggaggcgcaggagcggggcgcaaatcgggcaagcgctcaatgccgagaatcttgtagagctgattataggcgatcagacgaatcgcgtgctgggccgacgaagtgatgtcctcacgttcctgatccgtgatatgagccaaaatgtccacctgatccttttcgcacggatcggtcagtttggaacgttctgagaaaaagcagaataaacaaagagaaacaaaagcacagagaattgcagtaaatcagaaatgccattaggcaagacgatgtgtaactcactgctcaagaattgtccgctggaaataacttcgaacagccgacgcaccgcgtcacccggacttaatggcatcgaaatggaagcgagcgtcttctcaacaagtaattcaatagcctgaagtaaggctcgtggatcagagaaattttggaaatggaaaattacccaacaattcaatgcggaccaagtttggacacgatttccaatgtcccgtacaattttcacagtcgaattgaccgaatgcaacggcacacacttcgcctgaaaataactaaattatgaatgaagatgagataaccgtaaaagtcagaacagacaaattacatgacaagcatgagaaaaagaaatccgagaaagaacagacatttttatgggtgaaatgtaagacagcttctaattaacatgattaaatggtttaaaattctcatttttaatgcatagaaactgtctaataaaactcacctggaaaaatttagcatgacgcaactccgccaacgctttcaagcaaggttcctttggcaacggatcagtgggtggcttctcctccacttgagaaacggctgatgtcccgtcttacatagaaaaacacacgcaatcaatcaacggacattccattcatcaactcataaattcactaatgacttgctaattatgttattagagttttcaataaatatcgatcaacggtgactgatcgggtccgtgtgttttgctactgtgcagatggggccaaacgcaaatggacgactcaatggaaagcttcttatttttaaaaaccgtcccagccgcatctcaacataaacaacgaattttgcacccctataagtctcagacaatgcgtttcagttggcggaattggattttacaagaaaaaaggttttccaagtgaaccttcggtaggcttttgctgaggctcacgaagaagaacgcaagtgagcgtgacacggcaggtgaaagagagagaattcagcgagacagaaaaagcggactcttcgaccaattcggatacactcaatttgtcgtcgggagaaacctaattacattggaagttaaggttttaaaataaaaaaaacctcggcatgttttttgaagtattcgaccacttggtaaagcaaagtgaccgtaggaatttttgaacacaaaacgaccaaatcaaacttaataaatatgtttaaagtactcgaagaatataaaatcctaagtgtttagtaaggcacctgcgtgtccgtcttgagcatcaggtgcttggccaacagcccaactctcatcactcccttgagaactcgatgttcttcttgcgtttccgggggacaatcagcctcggaaagcattgaatccgaaacagccttcagagttttctaaaaagtatacaaattgaagatgagtgatctaaaaattggtttataaagtctcacttcggataaaacggctaaactttcaactgaattcatttcatccatggacaattggatctgctgaagtttgtgcaccacgtgttggtcatccattatctcatggccacgttgcattggaacaaacggacgcggctgctgtggtggcgggtgatacctaattaacataatcaactgtttagggggtactgaagcaaatcacatacgacatagcataagcccctggccctccgaatttgtgcttttgttgctgcttcttcccgccccactgtttcatttcaaccttcaagctcgggtcgactttttgctgaattacaatgcaattattcattcatttgcaataaaaaactactgactttgtactgaagtcgatgacgacgtcccttgagatgaatgtctttcgcatttttgtcgctaaatttgcaatcacacaatttgcaattgtagttgatgaattttccattagtgtccgtctcctcctcaatatattcttgcccaatcggttttatgtcaacgtccgccaacagagccttctataaatcacagagcattaaaaatataaaaaggagaatagatatattagcctccaaatcctgtggtttcatcgctccggtaacaacattcgcaggattgccgcctgttttcaactcctcgcctgtggttgtgagggtcgtgccaccaacaaatttggtgccagtcacaccaacgacttttttcaacggcacgttgccaccaacggtcggaattggtttgccaagcgcttgggcatttgccgaagtgagaacagccggggacacgtccaattgctcggggaccggcttgcccatccgtctcagaagtgcaacggtacgttggtgcttctgtccttttatgtgcgcatcgtaagtgtccttgctgaatagaattcattgaaaacaaagttcacagtgcttcttaccttgaacaagtcagctcgcaaacttcacaacggaacccaacgcccttgtaagtgggcaccgtactcttgttcttggccgccatctccttctttttgtgtggttttccctccaagtggtctttataagcagcttgtccagcacagcttattttgcacacttcacaaaaatgctgttgcacatctcgattttgatgacccaatccgtaacgcttcttgcgaaattcttaaaaatttctagaacgttaaaaacgaagaaaaataaaaacctttgttgaagttcccacccgacgatttgttgacccaatttccttgcggttgtggagcatggtttttggactgaaggtaagaggaggcagccgcataaacagccgcttcgtaaccggtgtaatgggaagcatttgcgccggtggccgcggaagtagcgttggccccggtcgccttgccaccgccaattacgccgtaagcgccggtggtcgacgaagctgattgtgagacaaaccaatgactatttggctctacaaagaaatcattttctaagtcaacatttgttccaagtgccgttaaacattccattaccgaattcctaaggattccaaacctgaatagtcaggaggtggtggcggaggctgaactccgtaagttgcagcaacggactgctgttgtgttgcggcttggctgtattgtgcgtaagccgaagcagccaacgaatattgggaggcactaaaaaaaccaaattttgcgtcgacaaaacacgaaattcttaaggagccttacgcatatgcatttgttgtggcatttcccgccaccggagcagtcgccgaattgttttgttgctgagcataattgatgaaactttgctgctgaccgtttgctgaagcgtaagcgccgtaattgaattgagtctgctgatatccgaacattctctgctagtgtcaatttggcgagcacaataaaaaaggaaggctaaaaataaaaaaagaataaaatacattaaagcttattatatgtaatccaacaaatttgattaagctaaaaatgagattttttttacaaaatatgtaaaaagcagcaggagaactcctcttgcgacagtcctctattgttgtaatcgataaaaaataatcgctctaatgacaattttcgttaatttttttcaaaataatcatgaaatttatgaaaaattttggcacccccacaaagtgtccaagccacgaaatgtccaaaagagtaaaaacccacgaaatgtccaaaatgtttcaaaatttataaaaacaaaatgagtctaatttaggatttttagggttttcggggtcgctgaatacgaatataccctttatattaccccttgcctaaccttaggcccatctgaataataaaaaactcaaattcgagacttggacatttcgtgggctggacattttgtgggtcagcgaaaattttatttgttacaacgtttctacttttacatctgaatctataagtactacttccctattttaaaataataattattaagtgaattttcgacttatctataaatgtttctgacccgcagcgaatacgacaggggagtgaacactttttccccggagggccgtctgttccaagtggaatatgccatcgaaactgtcaaggtgagttggaagaattcaattcagattcaccataattttcatagcttggttccacaagcatcggaattcacaccaaagaaggcgttcttttggctgcggaaaggcgttcaatgagcaaattggtggtggacgactcaatgagcaaaatttcggaagttgagaagcacattggtaaggcccattttccacaatatatgtatttagtcaaatgggtactaatgtcgtttacagaccataaaaaatagggtaatactgccgatggccccccccctttttttggagaaaaattcttcctgttctaaaaagtcgtgaaaacacgttatgggctttttaaagtcgctgatcacgaactgacattcattttgaccaatttccaatccaggacccgaattcgaacataagtcgagaattaattttaccaaaattcacttttgttagaatctgaacggaattcaggtccggggttcggatgcaatggtttatagttaattttttgcttttttaatctattttagaacataaaagtgaatttgaaattttttgagttttcgactttttgttcgagttcggggtccggggttcgaaataggtcgctaatggatgccggattcatgagcagcgaccctga

SEQ ID NO: 1062 - DNA, 1575 bp, Heterodera glycines
tccccaagaccacttatctctcctaaaattctgaagggattttaaaaaaattttccttgatagataccaatcgaaagcgctggtccaaatccctcaacctttttcaaaaatacaaaactcatctttttttacaaaatctgataataaagttttactgcgctattatggaaccatcggatcacttttcccatttagaaagtctttttgttttaaatttttgcaaacacttttttgcttaatcatttctcttccattggcatttttccaattcattcttgctttcagatcagtctcggccgtccgtttggagtttctatgctttttgccggcattgatcacacgggtgcgcatctcttccatttggacccgtccgggacgtacattaaatgtttggccaaggccatcggtgccggctccgatgcagcggaacaaacgctgcaagagcactgtaaaaactgcgacaaagtgaggaaaatgcactcattgcttttcacattttatcattatcattcgcagaaaatggaaatggccgaggcaaaacaagtcgcactgaacacactcaaacagctgatggaagagaaaatcaattccaaaaatgtggaaattgttatgattaagccgcagacggacaaggaaggcaaaacggtagcaattggaagaaaatgcatattttgttatttattcccattttcagttgggcaaaattgtgtggttagaggaatcggagttgcaagaaatcatttcgcgattgtagtcgaaggggacggatgagagaaggaaaatgggctttgcactgccccttttatgattggatgaccttttgttattctctgcctttttgtgactttttcagtgtataaggcaaatgaaagcaattaattgagaatttggctaatatccaataaatgtttcaattctctgctgaggcacagtgtccgccactgactgacactaatgacaagagtttaacgatgcgtagcactaataaaccgtatttctcacacaccacacaaaattttcatatgaggaggctctgatcgctcccaaaaaaagacattaaaaaacaatgtcagatgataaggcggagtcaatcagtccaactcttatcagaatttattgaacgcttttttgttggaataaaacgaaatatcatggaactaattgacatatttttgggcccggtaaatgccaaaattggtcgaatctttcagcagacaagaacgggacggcacaacagacagtgccgtcaatgtcttctggcacagtgtctccccttcgtgacgttcctctgcgtctctctgataagccctcccttccctttccctcccctcgccgtttgaccaatgactgtccttcttccccttctcccgctccgatcactttgtatctccgattggtcagttgggtctgctcaatgagtggccttctgttcggctacgcttcttcctccattaatgatttggtaggccttttccgtccccatcccctcattgtccccccccccctttttcgctccctttcatcgtccgtgagatgcgtctttggcctgctgaggttggcgtggtcatctcctgc

SEQ ID NO: 1063 - DNA, 2588 bp, Heterodera glycines
ccacgaccacgaccctccgaatgaaaaaaagtgatcagaaaatagtttaaaggccgagttaatgggaaagttagctaatcagaagatgactaaatggaggaaaagatgggtcaaacaaattaagtgatctgatcagagtgatcaatcaaatgcgacgctttcccttcccttccaaaggttgtctctttcttcgcctcatgggccggactttttctcgtttctcggtttggcagacgaccgctgctgatgacgggacaaattggagtcattggaatgaacattctgatggcaatttgcttcggctttttccccttcggaccaattcggggatggctcacattggcacttttgctcgttttcctcacatttggccaaggatttatttctacggtcacatggtctgtgaaatgattctgtccactgattattgtatcaaaggcttctgacggctgaaatctttccgctgcatttgagggggatttgctcagggattggaatgtccgtcgcgtggggaactgcgttcgccgtcactatgcttatccccgtaagaaatggaacgaattccccgctttttatattaaaaaaccatcctgacagatcggaattcattccatcggcatggccgccaacttcgcatgccttgcccttcttggcctcatctctctattgtttgtgtggaattttcttccagaaacgcgcaacaaaacattggaagaattggaaaaacaattccaaaagagggattggacggcattgaaaagagaagggcaaaatgagagggacagaatggtggaagagacggaaggaaaggaaacggaggaaggaacagcaaaagaaacatattgtgaaaaacatttctaatgttgttttacggtaaataccagtcaaataacagatccaagacacacagctcattgttaataatttgttgttttgatttttcaaatattaaaaaggatttaattattgaatttgatcattttttagcaaagttctattttactatagtaagttcattataaaataaaaatcgcaattataggaaggatcacttcgtttatcgttgtaaagaaaattcattaacacaacacagccataaaagattaaaacattttattaattaatagtttggtacgtatgccaaaattccttaagcactaatgtggtacctcttttcaaacaaaaaaaaattcgaattgttttgagattattttagggttttcggtgttgaagaactgattacgatatctaatatcgacccatttcaaatccgaacccactcgaacaaaaagtcgaaaactcttttgccaaaactcacattttgaccaaaaatcaaaatacacgtgtcttcacactctaagtttcatttccttttttaaactaaattagtttggctgcgtagaaagtttaaaatttcaagctaaaaaatcgcatcgaagaattggctttttttggtgcaagaataagactttgttaaaagtaagttctacacttttgttcgagtccaggttcgggggttcgaaatggatgtcagcatgaatactccgacaaaaaaaaacgagaattatttctgaaaaagagggcccacatatattaccctaattaagtatagaaatagtaaagtaggaacacaccaaagctgcctttttcattccccccccccccgatctttttcctttacattgtaattattcttatttgtcaattttcgcttgtcaaatgcccgcctcctctcggtttctctttcgtgtccctctctcttcgtctgcgtcggtctcttcgttggccgtcgtttcgacgcccgtcgtcgtccgctggctgagaagggcgtccaattgagggccgatcatttggccttcccctctggtggaattgttctgttgcgaagagaccgcagcggcagcagcttaatcaaaaaggaaaatgacagaaaaaaagaatcattaaaactgcaatataaaaggtttataaaccaaaagatataaagcgccaaaatgcgatttatgctcaaattgaaagatacatttttgcccaaatgttatgcattcttaacaatttttgacaatcggttagttatacaaatgatcgagaatcaattcaattccaaccggcagcagcggcagccgccgccgcttcggctgacgagccgttggcgttctgctgaccggtggccatcgcttgcattgtcgcagcgtaataattcgccagtccattagaagaaccgtccttaagtatatgtttgtttagtacaaatgtctaacacggggtactcttttcttctcacttactgcccccttgcgaagttcggcttcgccatgggcccaccgacattggtcgccgttgttacagaagccgcgctgctggtaaaaagtgcacagagatgttttgtagaagcgactcattgtgtcatcttgtctaaaaggaaccagaaggaatgaaacgaaaaaattcaatcctacagaatggatgtccctaataaagttattttgagctaaaaattggtatattggggttttcatggagctgcaaaaatgaggcaaaagcttcaaaacagtaataggaaaaacacattaacaaaattccgtgta

SEQ ID NO: 1064 - DNA, 436 bp, Heterodera glycines
gcgcatttttctatcctagaaaaaatgcttcttaaatttttaaattaattttacgcagaaaccacaaaactgcaccattgcccggaaatccaatatttattcaaaaaaataatcgttttcaatttgattttaccaattttcaatgggtagagcacgtagaaaaaaggtaaattaaatcatttgttaaaaatataatttcgtttttcccaacctaatttacaggggaaaactgccagaagagctcggcaaggattgcttggatttacacgaattgcaagagaaggaaagaagccaaaacaatttgtgagcaattttatgctggttttaattctcagaaaatgtttttaggagaagagagtcaatcaaagactggacagaaaagacgatgttcgaacggaggaaattttgcgtgaaaatattgccggacaaaagaccc

SEQ ID NO: 1065 - DNA, 2113 bp, Heterodera glycines
ctccagcattccagtcgccgggactcaattctccagcattccagtcgccgggactcaaccctccagcatttcaatcaccgggactcaacccaccagcattccagtcgccgggactcaaccctccagcatttcaatcactgggactctatcctccagcattccagtcactgggactcaattctccggcatttcaatcaccggcactcaattctccagcattccagtcgccgggactcaattctccagcattccagtcgccgggactcaaccctccagcatttcaatcaccgggactcaacccaccagcattccagtcgccgggactcaaccctccagcatttcaatcactgggactcaatcctccggcattacaatcactgggactcaatcctccggcattccgaacactgggactcaaccctctagcatttcaatcactgggactcaacccaccagcagttcaatcactgggactcaattctccagcatttcaatcaccgggactcaatcctccagcattccagtcactgggactcaattctccagcatttcaatcactgggactcaattctccggcatttcaatcaccgggactcaatcctccagcattccagtcactgggactcaattctccggcatttcaatcaccgggactcaatcctccagcattccagtcactgggactcaacccaccagcatttcaatcactgggactcaattctccagcatttcaatcaccgggactcaatcctccagcattccagtcactgggactcaattctccagcatttcaatcactgggactcaattctccggcatttcaatcaccgggactcaacccaccagcatttcaatcactgggactcaacccaccagcatttcaatcactgggactcaatcctccggcatttcaagttttttgtttacatttcggcacaacatttggcattttcctcgtctttacttgtttctggcattttcttatggcacacgtctcttttctctaccttttcttccctttttttcattttcttatggccagacatttcttctcaatattttaatgacaaaacaattttaaaaacttcttacttggcaaacgttaatgccaaaataagtgtaaacatatagtcatttactaatcaaagcacaaatcaaattcaaagtcgagctttttcctattacaaaatgaaaacaattcaaaatcttttgcttcttcattttttactaaacaaaatcaaaaacacacgtctctttaactataaaattcttttctctttaacaataacaaattctttaataccattaacaaattcaaatgaaatcgcaaacaaaaaaacattaaataatgtagaaaagtaaaggcaaaattttctcacaaacaaaaacaggaatcaaaaagaaccattttcctctttcttttattaaatattttatataataaaagatgggatataaataaggaagggatgcgagacaattttctattttctctccctttaatttcttttctcttatttcttttacttttccaattactctctctttttttcacactccctccctctcccacacacacgcacgcgcccaacagactgctgctgcacagcagcacgcgtctgttcactgtatacccctcccccacccgccgctgcctcgtaaacagacagtcagacagtgcactactatttcccacctttccctctctctaaccaccacttcacgggaagagaaatcttttccctttcaactatttcttccgctttttcttttcctgtactatttcttttgccttcttctttttctaaactatttcttttcatctctttttcttttctaatctctcctcacagcaaatttactcaaaacagaacaccacattcaaaccgtgttacatacatagcacaaacactcaactttattatataagattaattagtaattttttatttctcttggtgttacgtttttaatatttaaattattttttgcaatggtttgtaccttatgtcaaaaggatgttcgatttaggaaaattttgattggacgcgtaaacttttgattggacgcgtaaaagtcgattggacgcgcaaactgtgattggacgcgtaaa

SEQ ID NO: 1066 - DNA, 10067 bp, Heterodera glycines
  unsure (1)..(10067): unsure at all n locations
ggggggaaaaaaacaaaaacaaaaaaaaaaaaaagaaaaaaaaaaaaaagaaagggggggagggagaaacaaaactacaaaaaaaaaaaggggggnngnnnnacaaaaaaaaaaacaaaaaaaaaaaaagaaaaaaaaaaagaagggggggggggggaagagaaaaaaaaaaaaaaaaaaacggcaaaaaaaaaacaaaaaaagaaaaaagaaaagagaaaaaaattaaaagaacaaaaaaaaaaaaaaaaaaaagaaaaacaaaaaaaaaaaaaaaaaaaaaaaaaaaaaagggggggaaaaaaaaaaaaaaaaaaaaaaaaaaaaaaaaaaggggtaaaaaataaaaaataaaaaaaaaaaaagaaaaaaaaaaaaaaaaaaaaaaaaaaaaaaaaaaaaaaaaaaataaataaaggggggggggaaaaaaaaaaaaaaaaaaaaaaaaaaaacggaatgaaaaaaaaaacaaaaaaaccccaaaaatctaaaaaaaaaaaaacaaaaaaaaaaaaaaacaacagngaaaaaacaagaaaaaaaaaaaaagaaaaaaaaaaaaaaaaaagaaagcaaataagaaaaaaaaaaaaaaaaaaaaaaaaaaaaaaaaaaaaaaaaaaaaaacaaaaaaaaaaaaaaaaaaaaaaaaaaaaaaaaaaaaaaaaaaaaaaaaaaaaaaaaaaaaaaaaaaaaaaaaaaaaaaaaagggggggggaaaaaaaaaaaaaaaaaaaaaaaaaaaggggaaaaaaaaaaaaaaaaaaaaaagggggggaaaaaaaaaaaaaaaaattttttttttttttatgaaggaaatgaaacgattgttgatggaatgcttttttttttgttttggctatttattgtttgtttttggatgggttttcagttgaattttttaaaaattttatcagaaaaaaaaattttcggggggggggggaatctgaaggcctttttttttgctcttctgccaaaaaaatttttctattaaaattcgggagcaaaaaaaaaaagtgtcataattattcctaaatttttgaaaattatggtaaatgtcaaatgatagtgcagcaactgcaggtacttccgtgttttgctacccccccccctcccctcgaaaaattttaaaaattcataaaagggaggaaactcaaaaattttttggtggacaattgggtcagttaatgcgctaatggacaaattggtgttatagcattatggtagtcagcggttaggcatacggtaagggtgcttatggcgcgcctaaaaagcctgatacatttgaccaataaattctcagagtttgcaataaaatgtttctcttcaaagtcaaaccgattacagtatgaaaactggcaatggattggaaaaatgcccgattaaaaatttaaatttttagagatattagggctcgatcccatgtgtcgactttattttactttgtcttgaaagccaataattcctcccgtcttaaaaggaaaattatgacaaataaaaaacctcaacatttaaatttggttgtttccatgtgcctttgtccacattttccaaccccaacaattaaaagtgccgttctcaactctctccccctgccatagttgtccaacgaccaacttgacgaggcggaccaattgctgtcggagacggatgtccacctggacactctgttggcaccgccgctggggcgtggcctcttttacatgtccaaatttacgttggcgcgaaagcgatggaaacaatcgccggcggagaatgaaaaagttttggaccgttttgaagtcagttttacataataatttcattttgtttttcgtttgacattcgttgctccccccccccccctccaatctgtaaaagtctgtgtaattcgttggtcgtgaatattacatcattgtgcagttaaaacccggttttgactatttttttaaagaaatcaaaaaaacaattttatttgaaacattttatgacttttgaaaaaaaaatcgaaacgggaagggagcaaacttaactgtttgttacccattgaatatgaatttttggagaggaaaagaggggaatgaaattgggagattcactctccataacactcccattttttactttattaaactttcttaagcctttctcacaaattgccatattttcaggtggctcttcaacatgtgtacagcttcttcttgacctaaagaaactgcgatggcacaatttttaatatgtgatggagagacaacaaattaagagagattttttgtttgatttatatgtgcaactaaggaaaatgactctataaaaatagttcgaaaattgtatcttttttcttttttaaatataatcagtgtgaagacatcaaagtcttgctttttcaccacgtgtttataaacatgaaatgtttcactttttttgtgtgtgcgacacttttttactgaataaaattgtgtgacggaattgtttttttggcccgacatatttgttttggtgtcacaatcttttttcacaatgtgtctaattgttttataattttttctcggacggacaaattcttcctatattttgtgttatgcccacttctgcaacgcttgaggccattgagagcagaaaattggccgatttgaaggtccgtcggcgaggggaggggggtttggggttgaattcgttcccccatttaaatttggttgtttccatgtgcctttgtccacattttccaaccccaacaattaaaagtgccgttctcaactctctccccctgccatagttgtccaacgaccaacttgacgaggcggaccaattgctgtcggagacggatgtccacctggacactctgttggcaccgccgctggggcgtggcctcttttacatgtccaaatttacgttggcgcgaaagcgatggaaacaatcgccggcggagaatgaaaaaggcgtgcattctttaggatttcgtttctcaaattgtgatttgtcaacagttttcattttaaattggtttaacatccatcgacagtttgttgatcttttgaaatagtgggctaacagatattacattcaatttctcgaacagatgttacattcaatttgtaggctcaaaaattacaaaaaaacatttaaaaaaatcaaaatttattaggttaatatgagtcgtcatcagagtaaatggactaacccttcagacggcatatttttatttgagaataaatacataaaaattaaatattaggacattaggagggggagtagatcggctgacctctcaatacaaacgaagtccgggggagggagaattggcacacaaaaatatagtccattaaacacaaattgacgaatttttatccgttatgaattggggggacacaaattctggtccacttcctcctcctcctccttcaacatttgcttgttctgctcgtcctcctccgtttcctccgctgtgccgtgcccttcttttcctccctcctccccctcatcattcgcctcctcctcctcccgtttcaatggcattgtgtagagaattgttgcggccacattgcgcacccttttgttgcccatttcgtcgccaaacagtgccgcctctttcaccgcttttgcggccattgcggggaaacggcggtggaacactgagcgctttgtccaggtagaagcaggcccggctcatttctgaagggggaagaagtgaagagctttgtgattgttataagtgttcactgctcgtgaataataaaaattacaaaaaagtttcaatacttttttgtagtgttcggaccccgtgggcgggggtggcttttcgcgggggcgggggattgcgggggtcagagtcgcggggcgggggcgggggtttgcttttaattagctccaaaatctcacaaaaaaattaattttttgaatgatgtgtttggttccacattcctttattcgttgtatcgcctcgatttaattctttttggtataattgcacagatattgtctaaaaatgaccaaatttagggattataaattatgccagaatagtcaatttttatgggtgtttttgtctattaatccagggtttctatctcaaaattttcaaaataacaaaggccaaaaaataagactatagttaaaaatagaacattttgcaaaattgcttcaaatatttttacattttattcaaccaaaaatgtattctattattatatatcataaatttcagagcattcgggatcactaaatcagatttttaacattttttgcggcacatttccaaaaaacatggtgaatgtgcgaggggagaggtcccgccggaaaaaatttttgaaaatttgaatgcaatttgttaacaaattttgtccaaaaaggacaaacgtttaagatctttggctaatttttaagaaaaaataggattttttgggggctggctgtgccgattggcgccgcaaggggaaaatttttaagactttatatgaattttgttagaaattagcaatttttcagaaatttccctcttttagatgaaaataaggcactacccccaaatcagaacatttcttacaaataagaacatatagaaaaacctgtattaatttgaaaaaaataaaaataaaatcaaaagaaaacgtcaaccggtgtcgaactcataacaaaaactattgttaatgttgaagcactagccactaatccacaaatatatgtaaaaatgaaaataaaattcactttatttcataaaatttgtcaaaatgatttaaaaaaattcaaaattgtatatattttttgccttttatccacgaatatgtcattcttaggggtgtatttttcacccccgcgggggtgaaggtcgcgggggcggtggatacgggggtctgaatcacgggggcggggacgggggtgagccccaaaaacctgtcccgtccccggggacgggggcaggggcggggctcgaaccctactccgaaggaagctgagagagcaatggaaaaagcaatgtaacaatttttaaaacatttttcgttttccatggtaatcattttgatttttcctttttcagcttcatctccggcaacggttggctggcggtgttcaatttgctcgcgccttctcaattgggtctcggaattgcgatgatcagcaaccgttttgactgcttcgtggacaaacacttcaacatgcgcaaatgggcattgaaatttattggaagcatcgatatctcgtaaaaaatggcgattatgtaaaatttttttaacaatttcccatttttagattcatcgaccgcaatgccatcacttttctccaccgttttcgccaactcttcgcctcccgtccaattaatttgttcatcaatacacacaatgatcgtaatgcagaattccttttgcgcaacatttggccaatgttcggcaaaaacattcagtcttcggattgtccggcacagttttccgccgtttgcgtcaattggtctcatcaattctcaacgatcttccattgttacgcgttgtcgatttgtggactgtcaatctcgtcgccttcaacgaattttcggccgatgacaatgccaatgcttcacatggacaagcgttgatcaaatggctgttcactccgcgtccggacaatgtgccaaaagtgttgaaatacccgttggacatggatggttggattttggagtcgaagcttgaagtcttcaaagcggtgcttattaatatttgatttatttggcaattttacggtacacattgacaaaaaatgatcattcgcttaattaaaactgtgcgaaccaaattgcgcgtctttgggttttcatggccactccccaatcataaaagtgtcatacatttgttgctatttactttttcttaatcaattttccacattttaggtgtttgcctatgcttcttcccccgtcaatttcattgtccgcatttggcttcgtttgccttttgctgactccgttttggcctttgatctgaccaacgaattgacccgtgaacaattgaaattgaaaagaattgacgccgaattttttctgttccagtggagtaccttaacattcatttgtttctgtacaagtgtttccctgccggcaaattgagcgacgttggcttaatcccaaacgactggtgccaaccagggatggcacggaatttcgatttccgacctttttgaggcctcggaatgccatccctggtgccaaccgtacacgacgtacttgtccacgcattgttcatggcctttgatgctcaagtatttgggcggcaacaccgacactctcttggtgattccggtgaaggtcggcacatcgccgaaggcgaacgacgcctccttcagcacctcagggtccgtggtcatcttcaggctgttgcgcagctcatccgatatttccgcctgcagctgcttcactttgtccagcttctgcttcggcgtcttgtaggtgttctcgtaggcgtcgaacactttcttcatggccttcctcccctccaaatttgcatgagagtacgtgacaaagtcgtccgcagggctgggacgcgaccgcgatccgcgatgcgcgatccgcgattcgcggcgttttttttgcgcgatccgcgatccgcgaccgcggcaatttgaatccgcgatccgcgaccgcgggatttttctgtgcgcggcgcgccgcgcattttttagggcaaaatttttataaagaaaatttattgaagcgattttcttttttgaatatttagatttgaaggtataaaattttgaaaacgaccaaaattccaattttctcgcgcatttaaatggaatatgcaatcagaaaatatttatacattcatcgttcattttatagacaattttcctctttgtaatttagaccaaatgaccaacgaaaaagactttatttggttttattttgacaaaattcacaattcttcttatgccaaatgtaagattgagcttaataatcgcaaaaaccaacctttttttgttgaaaatctgttaacaaattgcacccaaatttttaaaattttcccctcggcggcgcctatcggcaccgccggaccccttctttcccaaaagttttttggaaaagcgctccgaaaaaaagtgatgtgaaaatcaaatctgaatttctattaatattcgatgatttagtccaaaaatgattaattgtttgaaataattgaagaaaatttgtttgaaaattttcattaatttaatttattaaataaaaaaccaaataattttgtattattttcacttgatataaattaaaatttgaattttttttttaatttttaaaatttttttgaatttttaaaatttcccggttggtcccggttcccggtttttcttgcggtcccggtcccggtcccgaaaaaaaatcgaggtcccggtcccggcttctcaggtcccggcaagtcccggtcccggttttggcaaaaattcccggtcccgtggcactctacttttttgtatgcaggatttattttgaatgacctccgaaaaagtctctcgcatgaaaatctcgaacggcttatttttcttcatcataatattatcctttacaattttgattattgataatatgggaattttctaattatgcttttacaaatgtgcgatccgcggcgttttttgcgcgatccgcgatccgcgaccgcggcaaattgaatccgcgatgcgcgatccgcgaccgcgggattttttttgcgcgatccgcgaccgcggcaaattgaatccgcgatgcgcgatccgcgaccgcgggatttttctgtgcgcgccccacccctggtacaaacgcccccgactccccgcatttacatttacattggcattgtcaagaaaaggcaaattttacttcttttttttgcaaaataatcgatgaaattgatccaaaaggaaaaaatgaattgttggcaaaattattgcagaaaaaaaaaatgtgtaagtgctcatttaaagcggctttagagctttcgattgaaattattagggttgtaaattatattgactaaaaaacgcgaaatatggacattaaatatggactaaaaaagcacgaaatatggactaaaaaggccaaaaatggccaaatatggacaaaatatggataaaaaatgccaaaatatatgttgtaaacccccaaaaatcccaaaaaaggtgtgcatatttaatatttgcttaaataaacctaaaaagtacaattaacaaccaaaaaatggggtttaaaacttaaaaatgcatattttttattgttgttcgttgtatcaaaaacacctccaagtttgccaaatttcgaaaaaattctcattaaaaaaaagaaatgttcgcaaaaaaatgactaaaatatttattgaaaatgccaaaatgacgacgaaaaatcaaatttttcgtgttttgtggggtgtaatttttaaaaatttccaaaaagttgatctttaggggtgtatttttcgtttttttttcatttttcttgtgaaaatttccaaaaaaatggccaaaatatggactaaaaacccaaaaatggcgaaatatggatttattcccgaaaacccccaaaatatggatttatatggactaaaaaccttcaccaaaccaaaaaattttaacgcagaaatgctatttttaagcccctttcttcatagcatatgcgcagaaaaaatatgttaatccatataatttacaaccctagaaattattttcactctttaaaaaatgaataaattcttataaaaaaatcaaaaagaaaaaagcgaaattaattaattaaattatgcgaatttataattatgacgaaattaatggagataataataataatatttattgactttcactaaaattattaatcgaataaaaaaatccataaaatttatattttattgggttgatgaaaaagttctgaccctttaagcacttcaacattaaacaattttttatttcacaaaaaacaaatgttcaatcaatgatgtactcaccatttgatcaatgatcctccccctcgttcgggcaacatttcaatcccctttttataaaactgatcatttttcgatccaaaaaagtcatccaatgcattttcgacctcgttttgatcagcaaattctttccctctcaagaagtgctccatagatcgaaacagatagtagtcacacgggctgatgtctgggctgtatggtggacgaggaagaaccgcccatcgaagtttctcaattttttgttgcgttgagaacgcaacatgtgggcgtgcgttgtcatggagaaggagtactttatttgattaattgcaaattatgcgtaaaaaataaacaaatacaattttttaatttttattattgaattttacaattcgggttttaatatcccaatttttcaattgatttgtctcgctaattgtgccgtcgctcgtcgccttcgtcccgccggtttgaatgggccaacgccgggctcaaaagcctcttgaaaaccgccggccggagactcctaaaattttgatggattctaagttttgaaattctttgttttacccccgccccgtggtcctcattaaacgccgtgccactgaattgagtcggattggtggcgccggggcgtctcccgggcgacgggtggtcctaaaaaggtgcaatttggacaattgcaaaagtgattaatgagtgactccgatcagtgccgggtacacacagaacgggttgggcccgttggcattggcctcgctggtctcgtctaaattggcacagttcggcgcgggaggcgcagcggcgggcatttcagcttaaaattgaaaaaaaagattcattctcatttaagaatattttttgcaaaatccacggaaccctttttttcattttgatcattttggacactgactgatcagttgcctcaatttgagcgaaacttagtctcgaatgggtgggcccaattgtgcggacggtcaatgggtttcgaataaattttcaatttttaattaccttttgactcatagccggcgattgttgctgaagtgaaggggaataaaaacagagacaattgaaacaaaaagcagcagcacagcatttcaattttttaattgaaaaaatcaaaaatataatagttaaaaaatttattcgttgattaacggaaagaattaa

SEQ ID NO: 1067 - DNA, 1012 bp, Heterodera glycines
cggggaatttgagcaaaagaagttaactgataaacagataaaacacacaaatgtatgcatatacaggcataaaaatgtaaaatgtaatcaatttaaatttgtcaataacggaattttctctcaaattagggaaattttgtatttattcgttcgtcaacaataaaaaaaaacagacggccaatgtcgaaaattggctctattccgccatattttggtcgtagttttcactcagcatggcagtttccatcataattatggacaaaattgggtgccaaaatggaattatcgacttttggccagacgatggcatagcggaaaatgtaaaatgagccgggggcttcccgttgtaggcgattccctcatcaggaataaaaattgactttatactagagttgagcgggaccgggaattttgggcaaaacggggaccgggacctcgattttttttcgggaccggaaaattataaaaattcaaaaaaatttaaaaaaatccaaaaaaaattttaaaaattgaattttaattaatttcaattgaaaacaatacaaaactaaatttttattttgttaataaaatccaaaagttaaagctaaattaaattaatgaaaattttcaaacaatttttcttcaatcatttcaaacaattaatcattttgggctaaatgactaccggtattagaaattcagatttgcttctcaatcacttttttcggcgcgctttttccgaaaaacttttgggggagaagggggtccggcggtgccgataggcgccgccgggggaaattttgaaaatttgagtgtaatttgttaacagattttaaacaaaaaagggtggcttttagtattactaggctcaatttgtatcgattttctttaaaaaatgataacaaatgtggaaattagacaaaaatatgaggaatcataaatattttgtcgataggaaaccaatgagcctacaaaaaggaaattcaaaatattttaattactgtagagggattgaactaggtgaaagaag

SEQ ID NO: 1068 - DNA, 4486 bp, Heterodera glycines
  unsure (1)..(4486): unsure at all n locations
tgaaatttggcattntaattttacattgcttttgccatttttttctccgcttcttttcggctgtctgacattttgttgttggcaaattattaagacagttttcggcacttaaatgggctttattttcttcaaaaattcacataaaaaatgaatgtttttgcataaaatgtcataaaagatgttggcaataaaaggaaaggaaaagtgagtaaatgaaaggaaatgtgggagaggatgaatggcttttataatcgcgaaaaaattttgcaaaatgcaaaagcatacaaatggaaaaacagtaaaattaaatttaaagaaattcgtggattttgttggggttgaaagtttttacaggaaacagatattccacaaaggcacacaaaaatttgcagcaaaattaaagcaattaggtaaaatcaaaatccatttgattaggttggcaactgaaaaaagggaaaacaaaattaaaaattgaaaattggcattttaatttaattttacattgcttttgccatctcttttttcgcttctttcccattgtccgacattttggtgagggcaaatattaagacagtttttgacggaattaattagctgattaaattgttgaaacaatcatttttttataaaaattggagagaaaaaaaaactgcgtaaatggtcaatttgaatggaattcttttcgtttttggtttttgtatatgaaaacaaaatccgttttttaattcgttcaaattaaacaacgaaaactaacaaaaaagaaagaacaattggaattttagccgggaccgggaaccgggacctcggaggaccgggaattcccggcccggttccggtcccgctcaactctactttatacaaaggccccggaagggtcgttggatttgccgaaaggtccataaaaaattaaaaacactgaaatgaacagaatagtattttaatatattttaaaataattaaatatttttcgcaccttttaacttttcaccgaaagcggcgaatggaaaaagagagaaaaggaaaaggtgagcccagacagaacaaaacaaatggtgagcccaagggaggaaaagcagaggtgccattctgagcaggatgtcttgccaactaatcgacaatggacgatggcattttttgcctccaaaagagtgcgggggaaacggagcaatgaatgggggggggagggaaaaagatgaaaaatagcagaaaatgccatcaaagacgtacagaacggaagaggtaaagaaggaaaggaatgaggaaaaggagaaaagaccaaaaaaggaaaaaaaagggggggggaagcagcaaaaagcaacggcttcagaagcgagcgggtggaaaatcgaagcgagcgtatgtatgatggagaaggaaaaaagcccaccctcagcagaagcactcgccaagcccccccccccccccgggggattggccggaagggacaagcgcagcacacagagacactcactcactccccgcccctcccctccccccgctcatccattcgcatcaatgatggattattaagacaaaagccaagtaggaaaagggagagagagggcgaaagaacagaagaaaagcgtaagcgttcgattagcaaaaaaaaatgagagaaaacgcggaatttggaggggggggggggggggagaaataaataaggaaaaatgaaagggaagaaaaaaatgaaaagttggacggacagagaaaacaacggaagcacttcccctatcataagggcttcaaatgttttaaaaacaattcggaagcaatttaaaaatgttaaaaaagtggccacgaaccaaaaggacggaatgggcaaaaatggcaataaaaagaaagtcagggcataattgaacaaaaataatgacagcatttaatggcaattgaaaagacaaaatgccaacggaaagaatgacgaacgaacagcggacgaattcattcggatgaggcgaattcgacttatcacagctgttactgacaattggaaggaaaaagtccacaagtgattttgaaatggcttttcattcgaacgtttttctctttcggcgatggatgaaatttgggaaaagggaaagaaaagcatgggaaagaacaaatttcgatggattgagaaagacaaaatctgatgagaaaagaaagtgaagtcccccaaatgagaagaacataagaatgttaggtaagcatttaaaaggttgcatgcaacagccattcttcgtaaacaaacctttttatttccaatgtctaaattcttctgctgtaataataaaatcgctacacaataaaattcaacaatttttgatatcaaaaaccaacaaaaacaaacaaatgaacgttgattggaagcatttaacagattgtactacggcaaacaacaatatggttgatttgtgatggcatttcagtttcataacaataaattgttcattatttaatttgaaaaaatcagtttttcttttggagtgcttttagaaaacaaaatcaaaatagcagaaacgaaaattccaacacaaaataataatggtaatataataataatattattaagagaatccgctgaggtgaaatgaacgaagggagagaaaggacaaccaaatgaataaataatggagatgacgccgggcgaagagagcggagaatcgtcggcagcggcggagagaaaataaacgaagattaagattattattgtttttttcggtcgtttgtttggccatcgcactttgctcaaaaagcagcgcctcactcaacgatcgctaggagaggaagctgaacatggacgaggcactgaaggaagggagagagaggccaaggcttttcccacaattaccgccccatttaacttactattgcattgctcggacagtcgggtggggcacggcttcgaaggagtgcactttgggcgggtacaattggtcgccagtgaatgtgataaaggcacctttgttgccaatggtgtcacaacttttgaaagtgcaattaattacaataattaatttaaaaataaaaatgctttctttgtaatttgtcatttccttctccctaacctaaaacggaaactcactaattcggtgcgctgaatattgtccagcactttccctcgtgatggctttcgtatccttccggcttaacctcgtgactcctaaaaggcataacaaatgaaagaattataaatttttaaaacacttttacctgacaacataaagcaaatcattgtctttcaaaaaccgttctgttacgtcaggtccgaactgaatgccgacgccgcgtttggagggcgaatagccggacaattcttgcgggtccgacctgaaaaaatgacagcgtaaaaagtcggaaacaaagcatttaccatagcaaatcgcacattattccatcctccgggggctgtcggtttcgattggtctttctgatcttaaaaataaaataaatgcaaaggttgttccgataagagaattaaatggcaccttctccaacgttacgccgtcttctttaaacagaccgccatggcaaacctgagaagccatttattacgaatgtaaatacaaagggaaaaacccacaaaaattttcgaattaatgacatgacacaaaggaagaaagttgaaaatttcagtgaaaagctcagccatctgaaaaaaaaatctttggaaattctgtcatttaaataagataaaaaaataatgatatttaaatttggtatccaagaaagaagaaacagacctttgcagtgtatttgctcttcacttcgccctcaaacccgtacattttgttcatcacatcgctttcatggttaccccgggacatgaaaaagtgattgggaaacagcaatttgaagccgaacaacgtgaaaatggtctcaacggaaaaggagcccctgaaataacacgaacaaaattatgaggggaacaacaaaatgaaaagacctgtctacgaagtcaccgttgaacaggtaaggattgctttcagatggaaacccattgagttcaaaaatattacataaatcgtagaattgaccatgaaccttaattttgtacttggatcattgtcaaatgttaagaaacgacttacgtcaccgcaaatggtaaatttctgtttgtcaggcaccgaaatgtcaaccaaagagggcaattcaatgagatatttcctgatggcaagcaaaatctgtaaaaaaaatagtgatcattcttcatcaccctgtcagtcaattatgaatactttgtacgcgtattgcgtgtgtaacttccgctgatctttgaacgtggcgatcatttcctccatgaactcaacgctgatttccccgtccaaatggggccccgagtagtcactttcgatcgctagcaaatacttttcaatgaaatttacaccaagtctttaaaataaattcaaaaagtatgtcatgaactaaccaaaatcttccaaatttaatgtctcggccacacttctgcaataggggtcagatgcaattgctttttcgaaagccaattctc

SEQ ID NO: 1069 - DNA, 4012 bp, Heterodera glycines
tccgccaatgccaacccatacaattcgcgcctcaaataggcgaaagagcgattgccgtaataatgggcaattgaagggtccaattcaatgcatttgctgtacaattcggacgccaagtcatacacctcatctgtgaagaacaatcactgtgagaaggaagaaaataacgaaaaacccttaaaaaattgattggccttctccttcagagcaatcgcaagtccattggcatctgttaacttctctttgcaattgttcaccacatttaacgcacgttcctcagcagtcatcgcaaaaaatttcagttttgttatgaagacaataaaatttaaaaaatttaatggcttatgagtccattccattaggaaaaagcgaaacaaaaataaattttctattaaaaaatgaactaatggcaactcagaataattcttctgtccccttctgtttcggcatgttctgctcaattttctgttgcacaatttccctttgtaagttgttttctttgtaaagctcctccgcgtggcgtatttctgccaaatattgcacaactttcctctaaaaaacccattttgtctaactaacccaaaaagtaaattagtaaaacatacacccaattccacttgcttcactctccgattaaattccgactcagtggtgaaaggaagcctacgaccatccacaaaactgaaatccggcccacgctccaatggattgaccacgggactttgataaatactaaataagacattaagaccaatccaaaataataatttaaaacacttacggctttttccaccattgaggtccaatgcggtaactgctgctggtactgttcatacatttggacacgatcaaagaacaagaatttcttatgtttctcataatctaaaaatagaaattcggtgatggagttatacagtgttaacgatacacaatacaatagcagtaattaaaaaaggaagtaaaaaatccgtatgaggttagagttcaaagcaaatttttaaatttctaactaactacatttagccaataatttatttaaaatatttaatgaaaaaatgactggttggtctaagaccagagcaatatatgattagctgattgggcaaatcagcttaacattgtttcgtagtatcgacataaagttgctttttagccatacaatatttgcttagatggatttgttaaaatcttacgacggctcttcatcatcggacaatgaacaagaattggcagatataccttcttcgtccaatcacaacaaattgctcgctttgaaaatcccatccatcaacttaacacccaacgtgattgaacaacgcgccattcaacaggttgcggttgtggatccaaaaaccaaagagttgtatcacaatccgcgcttcgacgaattgtttagaccagaggtagtgccttatgtcttattgtgtagggttagttatatcttttaatatttgtgatccaccggatttcgaacccttaaatgttttccttttgtgatagtgtaataaataaatttttccctcttcagagcggcccacaaaatccgtttaaaagtgaacatcaacgagcagaaaagaacacactgaccggctatgtggagccagcgcatttcaacgccttccattttgagcgttcacttcgctcctacgatacgcttggctatgcggataatccaacggcagacacaaccagcgcaaagttcgttggtgacgttggacaagcgcaagaaaaggccggcgagtcgctttttgaatcagtaaaaactggcggacagaagcgaaagagagtgataaattacgacgcatcaaacgttgacggatatacgggtaaaaacgataggaaatactaattgtaagataataacttcatttgtaaaggaccgtgggcaaggtttgaggacgagaagacaattgctcgaccggacccagaattgcagaaggaaatggacgaaattgtgcggaaacggaaactgaaaagtcgtgctggccgaagagcggccatcgcggaattgcatttggcagaagagagcaccaaattgcacagtgaacatttatcttttttcaattccataataaaacaattagactttggtttcatattgcactttatcacaccaaatttaattgcagtaaaagatgacactgactatttgggccgttcctttatggaaccgccgaaatacacgggcaccaatctgcgcgaggactttgtgcccgaccgctgtttcccgcccacaaaacaagcacacacctacagcagtcacaccaaaccggtgaccgccatccgatggtttcctcgtagtgcgcacatgtttatctcttgttccatggacggaaaagtaagacggatacaccggaattgggaaaataaacgtacggcttcaggtcaaattgtgggaagtgtacggcaaccgtaagttgatccgcacatacactggacacaaagtgcccgtgaaggacatttattttaacaacaccggcactgaatttctaagtgccgcttatgacaattacatcaaattgtgggacactgaaaccggtgaattcttcaatttaatgttcaaatatttattttgtcatctaaaggtcaggtgaaaaaccgctacacaattggaggccatcgggcgtatgtggtcaaattcaacccggacgatgataaacaaaacattttcatggccggaatgtccaacaaaaagatcatccaatgggacacgcgaactggcgaaatcgaacaagtggaaaaataattcaatttttgaactaattaatgtaattttttaaggaatacgaccgtcatttgggtccagtgaactcgatcacctttttcgacaaaaaccgtcgtttcgtttctacttcggacgataaatctcttcgcatttgggaatttggcattcccgtggatacaaaactgattcaacatgctggactacattccattccttcaatgactagggcaccaaatggtgttagaagaatatgcaattttaaataaatgttaattccagaaaaatggatcgttgggcagtccatggacaatcgaattgtccttttccaaatcgtcgatgacaagttgcgattcgctcgtaaaaaggtggttttacgaaaaagaatttttttaatcgtgccttacaaattaggccttccgtggtcacaatacagcagggtacgcctgctcaactgatttttcgccagagatgaggttatctagcacataattcaaaaggcattcctttcttttttttcttagttttctcgcttccggtgatgcggacggtaaaatcacaatgtgggactggcgcacacacaaaattgtctccacatggaaggcacatgataatgtgtgcatttcaacactgtggcatccgcacgagaaatcgcggatgatttcttgcggatgggacaatgtaatcaaaatgtgggtctgacaatgaagtaaagctgacgacgattcaatgatttaaagtgaatttatttgtaatgtctcaaccgataaaaggaaaaacgtcctatttttttatcaactacctcaaaacttttatcaaataaatgaaaataaataccttaacataaataatgtagcaatctatcaacattaatcacatgtctcactgaatctgggcgtgatacggtcacccttttatttgtaacatcgggaacttgtcgatttgtcagtcacctaggctgaaatacaaggaaaggaaaaaaattagtttaaaaaaagaaaagtaccaaaatgaacaggcttttcggcacagaattgaaagtgtgcttcataatcaaatgattaagttgttccaaatcctcactgccgaattccaaatcagcatagtcaggaatggaagagacacagcgaatggtaggttttgggaaattgacgaagccgagcgaaattgggacaacgcactgctcaatgacacgctcatcattggggaaaaacaaaaaactatcctaaatatggataattaagtattcacaattcatagtctaaatgtacaactagtataatacaataa

SEQ ID NO: 1070 - DNA, 5202 bp, Heterodera glycines
  unsure (1)..(5202): unsure at all n locations
atgtacaactagtataatacaataaaaacaaattgtaatttttctgacttccaaaattccatctatagaagtgccagcagactgctcgaaatttaaatgcacagccaatggtcccccagaagtgttcctcaagtaatatctgatgcggaatggtttcagaattctgaaacaacatccactaatcgcttcattagtctcttccccgtcgttctcgttggccaattccacatttagtgtcatcggaatgaccaaaatgggtggcattgtgggcaatgccaacacggaacgaacatgttcaaaggaaagagtgctaaagatgttcgaaattagttaagaaatccggtgcggtctcttccccctaacctgctccactccaccaccacgtctccgagctgtgtctggtgctcgtcgtcccctccattgctttgtcccgtctctctcattggcgattggccgtcgccatttgttactttcacccaaacagaatgcgtgttgaggaattcgcttgagtcaacagatgaaattttgagtttttcgaagtgttgctttatcaaagaatccaaaggaatagcgtcgaaatgttcaaatgcgtcattctcaataaatatttaacgcattaatcctttactccaaattcaaattgactgaccaatttccaatgtacattatgcactgccactcttccgttgcatttgagttgtaattgcacccgaaacttttgcccaaagaccaaacattgtgcctttcctccctaaaatgcaaagaccaaacgtaaccgatgaaattcgatttctcgcattttcacaaaaaattgcgattttcggttcgaaaggatcaacgcaacggatgggaaagtgctgcaccaattcggcaggctcttccaacggttgaccttcattttctgattttgaaggaagggtacaacaaacctggaaaagaaggtaattttatgggaccagttttagcccaaacttgaacgcgaagggaaatgcaattgttagatttggattgaagccgaatggagaagtcagtctgaagaaatttaaaagttaacaataagatgaagtggcaaaacctaccgattgttcaggcgcaagcaatgaagcgagctcctaaaagttattttgtgtgatgaaacaagttattgtggcgatttatgcataatttgcctggctanacattggcaccaaaagtgtcgttgtctttccgtccttttcgtcgcctatggacacctgctgctgttgcttatggcctttacaagacggaagaacaaaagtccgtcgaatgacgccagggattggtgattttgttgctgccaatgagtttagtgtgtgcgaattctgctgctggttggcgaactcttcatcctcacggcagactttgtggcagattaccctttatagaagtgtaaagagtaattactagttcaatttgaaaatagtttttttcaatttgataaaaaaatgatcaattctcataaaatttaacgaaatcaatttatcttaggtgaagttaagcgccatcggaaaaagtgtaccaggctcaccaaatgttcttcagcagtgttccgttgcgctccgcattacaaagggttaaagtcaattgaacgcattcgtcaacaaataattccaattcggtgctatcagccaaaattggacaggtcagtaacacattgcaccgttgtggtcgcaccataaaaatgatttgtcatattaatttttgttagctgattgttaacattgtttacttcactgcatagttgttcttgtccatctcctcaattgaattttggtgatgtctattactcgtcgatcggtgatcgatgtcccagctgagtgatccggacgatgtacgcaatgaaaagtgtcggacctttaaataatatgcatacacggcatagactaacaatcgaattggggtttacgagaacagaagacggtaaaatcaaaaaaatttcagacgaaactttttattttttccgtgtatacaatgcgaaattgacttcaccccacccaaactcctatttaccacgatgaattatacaattggtttttcaaatttgaataaatgcctaccgttattaaaatttccttggcattctgttcatccatcaacggactttggcatctgctagtcggtgcctttgaggctggcaattgcatcaattgtttaagagatgttgcaaatgtagttttgtagataaagaaaacgcggcttggtcttttgggaaccaataccaacgtagaattttttgacgaatttcccgccgtagaccattcggacagtgttttcgactttttggcaccggatgaatttaaaatttcatccagagtcaatgaacaatattcaaagcgcaatggaacattggaaatattatacagcacaacctaatcgaaaatgattaaacaaattttgtgttttctaacttctatcagaagagagtcatcggcagttgcaatttgaaacccgtcggctatttcttcgtcaaaagcaaatttttcatttgtttgtcgcttattgttagcagacgaatttataacgagaaaacgagcgttgaacttaatgggcgagtagttcaggttggacatttccaattggaactgcagaggtgaagacgattgggcaaccaattggcgccattgactttggaatgaattcagctaagaaaggtgaaagttcatgcagtgaaaaatttaattctgcgataaactaacttaatcttaccgggtgcaccacgctgcatcgatttccccgtaaaatttaaaaaaattaggtactaaaagaaatctttcaagaaaaaaaatcagtaagaaattttctcgaaaaatttggtatttttgaaaatcgggggggggggggcggaagagctgctcccaatattacctgttctatggagaaaattgagcgatgatcgtttgcagaactcgttaagggaaacggtagaaagttcagatcacctaatagaaaacgccgaagattttccatccaaatgctttggtcattttcgccgacagaaaaaacacgcaaagttacggatttattggccaattgcgggtggagaagttggagctgaacagaggcatttaaaatatagaatgcgaactgaatgtaaccacaccaatgcccacgtccattcgttgagacttagcgaacaaaaagcggcattggcaaatgaaaccaatgcttcacgtaaaaatggataaaataacacacttgtgtcctcaatgcataaacgatggagaatctaaggagaaataataaataaaaaatagtgtttgaataaacttttacttgaagagcctttgaaaactgttgcgaggcaacacactcctcggccatgtcaaacagcgacaaattggcaaacctttcgcaaccgtagcgcttacattgagcaacagccgcggaaagcaattgcagagaatgggcatagttttcatgaatgttgttctttaagaaaaatttgttaaccagctgtgggtggataccccactgggccatatataaaggggtgggaagggcagcggtgaattttgcgaaggggtccaaacgcaccttttgatgacctttttttggttttcaaaaccttttgcggcgcgttttttcttaaaaaaactttttggggagagggggtccggcagtgccgataggcgccgccaggaatataacagttttattaagaaatacacatatttttcaaaaattcgctatgaaccttccccacccctcggctgccctctttgcgagcgagggggggggggggggagtcgacgcccgcccctttttcatgtatgcattggacacctccagaaacagcttggcaccgtgttccaatagttgaaggctcaacagtggtaattttgtcacattttgtgctgttgaatcactcaactgcgttgtcattcgccatggcctttgcccgtaatatgtggttgtcatggaaaagtctgaaaatcataattttgaaataaaaatccaaagataatccatctatgtgagcttctctttaaaagattgccgaatgattggagagggtcgccggccaacagcgatttctgtctttgttgcggtgctgcggccaatttcgactttaatattctaatcaaagagttggcctttttgtaatgggtcgccgcctcgccgaggaaacggcctggattttgtgaaggataggccgcgagtccattggaaaccgcacggctgaacagttcagcaaaaagtcgacactaaaaaagcgagtcaattgacaatgagttaaattttgaaagattatggacgaaattatgtcaaatgctctatggatttcaacctgttgtgccttccaccaagtcagttcaatagcagccaactctcggcttgggtaaaaggccgactcgcgcttgaaaaagaagttgtggtgtcgcctgaactgattgatggcttcaacggcgctgtntagcacaaagttcagttcgcatattttgaaattgagcagactcgcgactgaacactgctcgtaaacatcaacatccgacacgtcaaactcatggcaaatctgataggcttgtttgtaatagctgaacaagtggaaaagcgcataatcaaaactgacagctcagcagacaaatgtaccgaagagcagaatgccggtcctcacggagctccgaaatgaatgccagtttgtactgttgtctgactagaaaatgggcatcattattcggcacattccgagaccgaattcttttgaaacaagcatgataaaactccttaaaacatgttaaaatttacaatgtcaatatatatgactcacttgtgcaatattgtgaaaagccttctctaagcgattgactcgctcaattagagcccgatcatcagataggcggggaaaaacgaacaaaagacgtgagttcaaacgacaatgctggcacaattcaagcgctttttcattcgctattgggtcgtccatggatgttgcctttggaggttggatcaacaccagtgctaactttgtctcccgctgaccaattttctgtctaaataaataaattgatgaaaaggatagcgaatttagggctcttaatccactttatgagtccaccaattaaccatacctgattttatacaataagtttgttcatgttcaaacaaaccctacctatttggtatcatttgaaagcacaaagtcgaaagaagctaaaatatataaaatatcagcgtatagataat

SEQ ID NO: 1071 - DNA, 837 bp, Heterodera glycines
ccgaataaatcattcattttactttattatgtcatttttcgaattttcttcccaaaaaaaaaaagaaatttcagattctaataggaaatgccaactgttcacggaaatatttgagagttctgcaaatgaagacggcgtactgaattttgaccggcgcccgtacgggaccgggcttttttcaaaatttttgggaattttgattaaaaattcgaaaaaattttatagtcctttattttagcttagaaatgtcaagccattgtaaatcgaccttttttactcttcaaaagaattttaaggtgtattttttcaaaaagattttgacgacattggtggggggggggggggggtccggcagtgccgacagggccgccgggtaaatttttgaaaatttgagtttggtttgttaacagatttacacgaaaaaatgacaaaactttgctattttgagctacattttagaaaaaaatttagctttttgtaactaggcgtcgctgaagaaaaactttgacttttaatgaaatttattaagaaagtttttggtttttcatgaaattcaaatttttttttttttgtaaaaagaaagttatgaaaatgttgttcaatttcatatggattttggggtctttttaagttgaaattgcccaaaaatttcaaaaatccaaagttctattgaaatttttgaattaaagacatttcgccaaaataattatttaaattttcaaattttggacagtttcgctagcggaatttaagcccgttttagcccggtcaaattgaccgggcccgggaccgggaccgggcttcgaaaattgatcggggcgggccgcccgttcaaaa

SEQ ID NO: 1072 - DNA, 1329 bp, Heterodera glycines
  unsure (1)..(1329): unsure at all n locations
aattattttagctgggactgaaatgggttatcaaatggcgtcgaggaacggatgaatgccgcatgnagtcatggaatatcaaattcggcacccccccccccacattgagaagaaacggacttggatcttctaattcgatgaaagagattgaattaaaaaatgaaaatatatttcgttttttattatattcttccataaagtaataattgtattatttgtagttcatctactatgttaattagtgtacatggaaaattcttcatgtgcttttaatcaacttttacaaatatgatcttaaacacatcgtctcaagattaatgcattggaaaaaagtcaatttttgttctttttagagttttggtttttgcaaaagaaataatttcatttgcaattttaaaagaaaattaataattaattaatataatttatttttgcactgggttcttcaatttcgaatcccactgatcagtggaaaagacattatgagagcttgtaagagagtaattaattaatgaaatatttttaataggaattattaaggtcatgggtagggatgggattcttagtttttcaactatttttctgcggctttatttcgacgagaaatacacgaaaaacacattctttttcgaaaatttttcatttttaatgccactattcatcactaggaatcattattttggagcttcgccaataaaaaaaaaactatttcggaagttggccactaaaataattttttgccactattttggcgtttcgtcattatttttgccactgttttggcatttttggaaaacttccaaaaattgcaataaaaacgaaaaatacacccctaagaatcgacctaaaaattttcaaaaataccaatttattatagtgacctaaccaatttattcataggttttttttcaattcgcgcggtcttctttctatttatttttattcgcataatttagttccatttttcagcccatcattgcttttaattgtaaaacaacatataaaattatattaataaccaaaagaatgttttcaaattttaaaaatcgttgggccagagccttttttatccgatgttaaagcatgaatttgatgctttcagttcaggcaatcgcgtgattcgcccgaaaatccgccctcgagttcaatgcgcccaatgtcgtacaatttnggacgggtttttgccacttgacacataaccgtccttgattttaatggtgaatttgcggtcgcatggctataaaaataaatgattaaaaaatagattgccacgggaccgggaatttttgccaaaaccgggaccgggacttgccgggacctgagaagccg

SEQ ID NO: 1073 - DNA, 9498 bp, Heterodera glycines
ataaaaaccatcaataagggcgttcgccaatatgtacagattagctcagaattctaaaaatataatttttcaataaatgaattttcaaatattttcaatgatgaacaacggattaaatatggtgctatgtcgtttatttaaaaatcatcaaaataaaacatgttgcttttaactttgacctaaagcaaccaattttatcatttgatagcccaaagtgttctctattagcatggaaaatttcaaaaaaatttattaactcataaataagttattatgaccaaaaatgttcaaaagacaattttgctcataccttttctgaaactaaactaatttttttatattttgcagactgatacatagagaacatttaagactatcgaccgaataatcaattaaaaagtttgttgctttggaacaaagttgagatagagaagaagaagcttccccgagaggaagattaatggatcaattgaggcaacattgatcctatatgatcgagcaaagtggggagctggagagggcagggtcggtagttcagctggtagaacactggtccggaaagccagagacgccggttcaaagccggcccgccccatagtttttccctcaaaggcttccccgctcgttcatatatttcaatatcataagattcaatgcggcattcatctgtcccacggcgcaatttgaaaagtccgttcagttcccagctaaaagatttaaatggatagatgatgaaattgctatgaaatttcaagcctgtaaccggcgtcaggacaataaaaatccatcatggaaaatccattagtaatggacacaaaccatcggtaaaaattttaaaatactgaaaaaattatacaggtttttacggcattataactcgttgaaactaatttatattgactgttaaaaatatagtaaacaatttttatagaaattttgataaaacaatttactgacggattatctttttgttgaaaaaaggtatgctgtgaaatgaaatatttttctaaaatgaaacttgacttgaaaacttagatgcccccccccttcctaagccagtaaattttttttctaatttagggccagataaacctaacaacacatttttacctattgccccacgaattgacgcccagccaaaacttgatcagttcgccatttcccgtggtttcttcaccccatccgatcagtttcatgtcatggatgaatggatgctcgtcgtttttcttgtgctgatcaatgaaaagtattttattttatccttttggctcccagaaaaaaagtcagtgatacataattttgaagataagattctgtagcattaaataattataatttaaaaggatcaaaattatatgagaatctcattgtgaattcgtcagtcaaatattattttatgaaaagtttaaaaactaataaaactgaaaattgtttttttaataaattttatttttatttcctatgttggctttttatttgtctttcttcttcagatgcagccatgggacacaaagtgcgaaaacaggtgattttttttcaaattatgtaaaaaaattaaataattcaaaaggaaacaaatgcacttatatttaattgctttgataatgtcaaatgttttatttatgcactttttgtccattgctcaccccacttttaaaaattcgttctttacctgcgtaaaattttttcgtttagtcaagaataaagaaagggtttattttacggatttgctcaaaaatttcaaaaaacttcacttgttgattgaaattttgccatcaataccctcaaaaagcccaaatttagactaaactctcaaatatgagggcctcgctgttcattgtccaccattatccacttaccgcgtaaacattgattcgtttgctgcttttaccataaaattcaaaatccaataaacgcccaaggtggcggtttatttgtaactttccattttttttaaattttttaagagattagccctaggcctctcgtcttccttccctgccatacatataattatttctgtcattgttcactttttcccgcttttactcactgaacactcttaacgaccataatagctctcaaatgacaattagttatctctttttttattgctgtttgaccaaaaatgcaaaattttaatgaacttattgggtcggcttaagtttacgtaggtgtcatgacaataatttaatgtcttctgatttttaaggcgataatcttctcatccttttttaaagtaaaggaagaacggatgaagcaataaaattaattttatcaattttaaatcactaaaatatttctaaaaatatttatttaaacaattcctcatcactataataatcatgaacaatattctaaaagtctaattcggtatatcgcttgacacatcatattggtttggtcacccatcagttgtgaattgtcgtgccgcaaaatggcgagtcaaaaagtgtgccaaatttgtcgtcgaatgcggcacttttggcactgatcaactccttttctgcctcgctgttctcttctgctgaatgctcttccattttatcctccatcacttttagctttcctctttctctcgttgctatttgttgtgccactttcagcatttcctttagcgttttgtcaaattgctcttttttgtccgattggcttttccccttaattgctgcttctcctgcctcattaaacgcgcctttaaatatttgctcaagttttccaattgaaattgacgaattttcgaaaacattttcaaatttgtattctttgcttttgctaaatttcgtgtcaaaatagaatttggtcaccatgttcagcacttttatgacctcaattaaagtcccgaaaagttcaattcttcgaattataatctgagaatttatagcaatcacggggtcttcatctaaaaaaagtaaatttatttttttgtataaaaatttagaaaattttcatagcaaattgttctcttgggaattaaacaaaactactttggtatatccttaattagaacactattttctcgatactttcttatccttttcaccttttacagtactatttaaaaaacaccgtataccttcacggaatacgtgcaacaaatattcataaaaaatgtccaaataatttcggtatttttggcattctctccgttcgttctccgcaaattcattcccaattttggcacagtgccaattgtccatcatcaaagacaaaatgccaagataagccgcatatttttcctgcaaatgtatttttctctgctcagcatttgcctctgctgccattccattgcaaatgttcgccaattcatcagcatattgcaagcaaaaatgttcaaaattggacaaacccttcacaaatgcattaaatgctttgtcttcagtctaaaattgcatttgtgggaaatgtttaaagccatttcgaaatttgaaaaccattatttggcattaaaagctcaaaaaccctcagaaaatgtgaaaaagccttatattttcaaatgaactcataattcctatacatataaaagttttggcgccagtttttgtgaaaaggcttaggaattggtcaaaatagatgtagattcgtgatcagggactccaacatggatgagtttatgattagacaatattttacaacaaaaaaaaatattacaaattaaaaaggcccctttttggttttaataaaattcaaaatttccacttttaaattaccgccaaaacttttagtagacaattttttcgaatattattcaatttattgaagtctaggcgcgagagaccaagctctcgtcgtcagagatcaacagctgatctaaattttgtgggctttgagtttacaatctctcgtcatgcctagtttaattataattggtgatacttacccttgaaattatgtcataaaatggcttttttaaaaatgggttgtaaccttccaatttgttacccttttcatggtccctccactttttaagaatgcttttcaatttttgatcaaatttgttgcgaagtgtttcagttgaattgccaaaatttgctgtgtaattgcccagtttgctctcatttaacagagtcaaccatggcaacttattggcactcatataagctttatattcgtcactctttctgtattctgaatcaaaaaaaattcttgaataatcaaacagttcattcatgataaaagtttgtgacacttgatcattttggcgttgaaattttggctcaattatgggaatttgttgagccaagagcggttcttcatctgcaattaaaaatgataattaaatttaaaaaccagattctgtaaaaaaatagattaaggagttgaattttggaaagaaatttcttaaaataccgaaatttggcactaaaattatgaaatttgaaaaaccccattattaaggctcgaaattgtatggattaacatattttttctgcgcatatgctatgaaggaaggggcttaaaaatagcatttctgcgttaaaattttttgattaggtgaaggtttttagtccatataaatccatattttgtgggttttcggaaataaatccatatttcgccatttttgcgtatttagtccatattttgttaaccaaatattgaatattttggcagtttttagtccatattttggtccatatttggccatttttgagctttttggtccatatttcgggcatttttagtccttattttatgtccatttttttagtccatataatttcgagccctacccattataaatcaatcattacttttcgcatataccatgaacagatactcataaagaatgtgcaaatatttctggatcttctcgcattccttcaccatctcttcatcccccataatttcttcgaccattttggcacattgccaattctgtctcattaaatacaaatcgactaaaaaatactcaaaacgtttttctaattcttttgtggtttgttcacccctttgtgtttcttgacaatattgataaaatttgggtggagtcaaaaattggatgaaaaggcttttttcgatctgaatgacataatttaaccgactataaaatttaactttaaaaatgttatggctccaaaaattttagaaattataaaattgaatttaaaatgctttattttattatttgtttttcgaataatgtttcactgttaccttcattctttctctgcggattcctatttcgtacaaataaaacaaaattttgttcaaattttccccatcatttggccacaaattccattctgagaattgtgtcccaactgtaatttgttgtccgattagtgattccattgttgtttgctccatttttctaaatattttctccaaatttttgccaaatatatgcctcattaatttgcgaagactttcatttcccgtctcaagtgccgtttgtacaatgatatcctcaaatgtttcgtttgggttgtccaattcaactttgtagtccaatttgtcctcattggccaatttgggttcgtaatattccaaaaaatatctgtccaatttgtgccctttcattttgctgaatttcgaatcgaaaaagaatttgaaaagccagctaagactaagcatcacattggacaatgtgcagaatgtgaagatttcggcaaaataaaactgcggtttcactgctggcagccccataaattcagtgaacaaatattcgtacaaaatgtccaaataattgcggaatttttggcattttctctgctcattgtctgcaaattcgctcccaattttggcacagtgccaatgccgtcgcatcaaacacacaatgccaagttggctctcatattgaagcatcaaatattccttcattgtctgcggtggcggatattttatttccaaatcattgagctcttcctccaccaaaaattgctcaaaatttgactgtcctctcacaaatgcaagcagcacattgtcatcgtcaaactgttaaaaatagcgaatttttttaaaacatttattttccagacagaacagataaaaaattataaaattcattttaaaatacgaaaattttaatttttggaattttatcaaattacaaaaaaaagaggataaatatcggtcatattaaaaacggtctgaatcgatataaaaggtttgaaatgggttgaaaaaatagaataatttttataattttttactgcttaggatttggcactcaaatcctggcgctttttggcctgaaaagggacaagcgcgccctaattctatcactcaaaataaatcttattatgttcaaatatcaaaaaacattaattctaactcaataaattagttttactttttttcttaacacaatttttagggggttaaaaaatgccatttaatcaagacgaaatgcgagaatcccaaccgatacagaaaaacccgaggatttcccaactcagaaacttgagcgactctaattcttaccaattgctttgcgtctgttattgttgggaatgaaattagaaaaattaatggaaaaagcattttaaaaaagaaataacaattctttagataaatgtgaaaaagccatttgctaagaaagcatttaaatactcataaatatttttttatttgattacatcattggataattgagttaatttttccatagttaaaatcaatttgtggttataattttgacaaaataaaatttcaattcacttttaacgattttaactcattttatttgtcaatttacattcattcacatgcattcgtgaaaagtggaagtgaggtaatacaattatttattaaaaattttgtaaatattttccaccattttttcttatatttgttggataatattttttggggaatttttaacaatttttaccttattttttaagtcagtttacgtgaaattcaccgcgcagcttccgatgaaaatttgagcataaattattattaagctagaatcaaattttcaaaaagtttaaagtcttatagctaataaacaagctcttaattaggacggtatcccgcaaaatcccgcgccgggctctattagaggatacaattttaaagttcttaattaaaaatgaaatttgttgaaaaattttcggtttttcgtttcgtttcgtacgaaaatggttattttaaaattaaaactaaccaacctaaatacaactattagaaagttttattgaaaaaattgtaaaattctagaattgataatatagtaaaacaaaaatttattttaaataaataaaaataaaaaatcattaaataaagtaaattttcaagtgggccacgatttacaaataaatggcgcagtggggttgtgaccacaaggtagaatagtacaaattgggtgctatgtcgttatataaaaaccatcaataagggcgttcgccaatatgtacagattagctcagaattctaaaaatataatttttcaataaatgaattttcaaatattttcaatgatgaacaacggattaaatggtgctatgtcgtttatttaaaaatcatcaaaataaaaaatgttgcttttattcaagcctgtaaccggcgtcaggacaatgaaaatccatcatttcatgtcatggatgaatggatgatgctcgtcgtctttcttgtgctgatcaatgaaaagtactttattatttatcccttttgcccccccccccttcctaacaaagggaggtggccaagtgtccgtgggatttcggaatgagattttttgggtagatagagcacacctgggttcttaagaaaaatgttttcaattctgccaaatggacccctgtgccgagataaaaaaatgccaaactttttaatgatgaaataaaagaaatacttatttgtgtctcggcttcttgtgctgatcaatgaaaagtacattattttatccttttggctcccggaaaaaaagtcagtgatacataattttgaaaataagattctgtagcattaaataattataatttaaaaggatcaaaattatatgagaatctcattgtgaattcgtcagtcaaatattattttatgaaaagtttaaaaactaataaaactgaaaattgtttttttaataaattttatttttatttcctatgttggctttttatttgtctttcttcttcagatgcagccatgggacacaaagtgcgaaaacaggtgattttttttcaaattatgtaaaaaaattaaataattcaaaaggaaacaaatgcacttatatttaattgctttgataatgtcaaatgttttatttatgcactttttgtccattgctcaccccacttttaaaaattcgttctttacctgcgtaaaattttttcgtttagtcaagaataaagaaagggtttattttacggatttgctcaaaaatttcaaaaaacttcacttgttgattgaaattttgccatcaataccctcaaaaagcccaaatttagactaaactctcaaatatgagggcctcgctgttcattgtccaccattatccacttaccgcgtaaacattgattcgtttgctgcttttaccataaaattcaaaatccaataaacgcccaaggtggcggtttatttgtaactttccattttttttaaattttttaagagattagccctaggcctctcgtcttccttccctgccatacatataattatttctgtcattgttcactttttcccgcttttactcactgaacactcttaacgaccataatagctctcaaatgacaattagttatctctttttttattgctgtttgaccaaaaatgcaaaatttaatgaacttattgggtcggctaaagttaacgcaggtggcatgacaataatttaatgtcttctgaattgtgaggcgaaacagccccccccccccccccttctttttttttttttcttttttttttttttttttttttttttttttttttttcccccggcctctttttttctttttttttttttttttttttttttttttttttttttttttttttttttttttttcccccccccccccccctatcgaagcataaaaatatatatgtaattgtaacgatttaattataatatagaatggcaacaaacattgtaccaccccccccccaccccccccccccccccccccccccccccccccccccccccgcccccccccgccccccccccgggggggggcggcggcgcgcgcgtccttgtttttttttttcccccttccctcccccccccccccccccccccccccccccccccccccttctttttttttttttttttttttttttttttttcccccccccccccccccccccccccccccaaaaaaaaaaaaaaaaaaaaaaaaggaggggggggggggggggggggggggggggggccccccccccccaaaaaaaaaagaaaaaaaaaaaaccccccctcctttttttttttttttttgagaagaaggaaataatttttttttttttcccccccccccccccccccccggggggggggtgtggggaaaaaaaaaaaaaaaaaaaaccccccccccttttttttttttt

SEQ ID NO: 1074 - DNA, 2338 bp, Heterodera glycines
  unsure (1)..(2338): unsure at all n locations
gaaaacgaagaagaaaatgatgaggaggatgaagacgattttgacgaggacgacgatgatgaaccatccgacgaggagacgctgcgcgacattccgctcgacaaaattgacatttgtgcttcatgcgattgttcaaggacaaggacgaagatgaacagggcgaccgcctgatttgtatcagcctggcncaggtggggagttcaagcagtaccaggagggacaacccctaancccccatttgacattttgccgctttttttagcgcttcactgatgaatcgcattacattatgggagcgtcggacgctagtcaactgcccatggatgtgccgctgatctccatcaaccattgtctcgcggatttcatcaaaccggaagacattgaaggctcacgctgtgcacagtgcagcaacgcaacgccaccgccgtctgcgccaccaacgcttgtcaagcagctgatgttcacgcgattgcccgacattttggtgattcattaatcattgattaattgatcatcgattgattgctccccttttttgccccttcacagatcatttgtttcaagcgcttcatctatgaaccatttgagcgccgatacatcaaacagcacgtgcccgtttcgttcccgttggacaacttcagcctgagcaaatacttttcgcccgatgtgccggctgcgctggtggcccaacttcctctctattcctgcattgcaattgtggtgagttgagagtgattttgatcagcggcaatttgaatgacatcattaatcattcttcccctctttcttttccttagactcatcacggccacttgaactctggccattactgctcgtttgtgcgtgacggcttcactgacaattgggttttctgcaacgacgacagaactctcgtaagaaaacaatttcgaatcaattaatgccagcttttcatccattctttttagcccactgaaagctgcgatgtggacacgcgaaatgcctacattgtgttctaccaacgcgcaaattcagtcgctgcccaatgagatgaaatgagaggataaccattgttgtatatatatgtgtataattgttgtcgtatatgtatgtatgtgtatattatcgtatgtgtatattcatttgtatgtacaatatgttcattggtattaatgatgtgttgatgaataaaaaaataaaaaccgagagaatttcattgacaaatttgaaaagttttgttatttattgtttttcattcagagcgatcaatttttgaaatacatttcgtttaatcggagttctatgtattcatttggagtaaacaaaatttaatgcagcattatcaatagggctgggaatttaagtcactaaaaatcttcaaaaagtcgactaaaaaagttaaaaaatcgccaaaaagtcataaaaaacgcaaaaaagtcacgaaaaatggaaaaaagtcctgaaaaattaggcaaaagttaaaaaatcccatttttaataatttatagaataacatttgatcatatttttaggcacttaattttataaataggtacctaataggcataaaaaagtgatccttccaacaattaagaaaaaattcatccaggtttcattcattgcctttttatcgatctaaatttatttttcgtaattattaattacgttgttaattgttggctaattaacacaccataccgaaaaacgagaagtgtaccaataaatagagagtgccagagaaaaacaatatcttttttttctctaattttttgtctccttttggcgtactatctaatattttcttattaggaaaaacaacattcacttcgctatgtttagcttcttttctattccttttatttattcattaaaatcatcgaaatacatcaatagcatgcactgggaatcgaacctgagacccccattttgaactctgtgcttatgtaaaaacctcccattccagtgtataaattaaattttgttacggtaatgggcgcccttttttaagaaaaattgtttttgttagaaaaagtcgcgattggagttttaaattcggagaatagtaaaagttcataatcagttgtgatttcatcaaattagctgatcatttttatgcagaaagatggattaaacgaactgaatgtaaattgaattgcttttaagagacgctaattgcaccattactgctttgaagaacgggctcaatttttacatttcagaataaaagaagccaatctataggttttcggggtcgctgatcgcgaatccggtattcatttcggccaattccaaatcccggacccgaattcgaacaagaagtcgaaaaattaaaattttcttatttttcatctagtctaaa

SEQ ID NO: 1075 - DNA, 3382 bp, Heterodera glycines
agaattttctgaaactttctaataaaatgttaaaaatcttccccgagccgtccgatctgtcccacctgtccaatgcctggtcaatagtttccaccgtttggcccgtgtgcatggcatagatttcgttgagccgttttcgcattcggttgatctcctccgctctgatcacaatgtccgccgccgtgccgtaagcgccaccgctcggctgatggaccataatgcgagcattgggctgaaaaaagaagggcaaaagcaaattttagagcatggaaaaatagttggaatgggcggatgagtcaaatccgtgccaaggaaatttggtttaaaggaaaacaaaatgggacaaaatttaaaagtttttgtgcatttccaaaagtcatagaccaataaaattttgaaggttcatttcttttaactgaaacctaagaaatttggggaaaaccctagaatttattccgcgtttttttatctagcaaaaaatttaaatggtaaatttcgcagatcttcaagaatatgctgatttttaagaatttttagaacaattttccttcgtttttcgtcattcttattactagtatttattttttgcttattgttagaaaaaaagtttctaaaatggctaattgtaagtctatttttctaaaaaatttataggttttgctaattttaaaagaaaacatttctatggggggggggggggtgaagtatcccctttttgtgtcacaactttagcaagtgctattgctaaaaaaaagtaccagcgaagtgcgcattcccttggcaccggccgtcaacaaaagactgcccattgaactcgcctggccaatgcctggggtgaaataaatcccttttttctgaattccaccactccaaattaaaaatgcctaacaccaagtggcgacaggggccgaaatgtgctgcattgtgtcgtaaatgccgaggccagccgtcacactgccacctgaaaaggaagaaaatggccaccaaacccacggaccacactcaaaaatcggagcagctcgttaccccccgcgtcgtttcccatccgaaccaatttaaaattttttgttctttcttttgaaaattgcacttttcagcgtaaaaatttgtcccattgacaattcataattccacaaatccaatccaatgccaggtcatgacaaacctggacaattgatgtaccttaaaatggaaattccttggcaactttgctcgtccaatgttccccccccccaactcacatgttaatcgccgttttgccactttcgctttgcagaaaaagcagctgagcgatcacagaggcagcaaaaaagtcatcaatctgaacaaatttcaatcactcatccaaatatgccaaaatttcttctttttttcattttataaaatggaatttcacaatgacttgccgggttcatgacgcaaacgatgcgatctttgagcagccgcgaataaatgtcgtagacgcgttctaaatatgcgaaaatcaaatttacaacgaattgttaatggatcgggatattattttgtctgtagtttaagcgaaccctttttgagaaccaattttgacggataaattctcattgggattgaattcaatcccgtccaatttcggcgaattttcgatttagaaaaggttaaaaaaatagaaattctcacagtaatggaatcaaaaatgctcaattctgtatttttacattttcagcattgtattcccacaacaacctgttttcccgtcattgtccaccactaaaaaatggaatttgttttatttgttgtacaatgtaaatacatatataaccaatttttgaactcaccgaatggaatgcccactggcgcggtggtcgacctggaaaatgtgcgggaaattgtgcgaattgcatgcatttcgagaaattaaacagaaaaacaaatctgaaaaaaaacgaatcaaaagtgaatcaattaaaaaaggggcaatcaattaaaggtacgacgcatgtgaccaaagggaggagaaaacgcagcaaattttaaaaacgaatacataacagagtgaaatgacggagaaatttattagacgaaaatttaccaataaaacaccatttatcatttaacagattcatttttgtagaaattgcttaaatgagcacccaacgagacaaagtgagcggaaaatcttatttttagttcaattttaaagtaaatttgttttaaagaatgtattgaatctgatcctgaacccaatgcttccattcgatctcgaagatggggaggaaaatgaatgcaaaagcggtctattttgacttcaaatcttcccagttttatttttatgtgttttaagaagaggaaaaatattcaaagttgccaaactttggccaaagtgaacagttgggcaaggaaggcgtggaattggcagaaaagggcgacctcgaaaatgcaatgaaaaaattcaacgaagcgattggagtgaattgggcattagggaaattatatatttttaaataatttcgcacagatgtgtccacaaaacccatccaactacaacaacagagcacaattgtttaggctaatgtccaaaattccaggtaaatccaatatcaatcaactcaatagtgaattttttcatccgcagaagctctcaccgatcttgaaaaggctttggcattgtgtgaaggaaagggccgagttgcggcccaatcgaatgtgcaaaaagcgctaattcatcaattccagggcgacacggcgctggcaaaagtgcgacggcatttttaacttggggagggggctgggggtgttggagtttttcttttttattttgagtgtcggggttggaagtgtcggggataatctcgaaaaagccaaaaatgacgggggtccaaccctacacaaaaccgttgcaggtgaaatttgaacaagcggctaaactcggctcaaagtttgctcagaaacaagccattgccatgaatccgtaaattcaatgccaaaccacgcggataatattccatttttattctttcacagatatgcggcaatgtgcaacaaaatgctcggagaaataatgacaaaatttcacacatgatttttttaatacaaataattattatcaatatttaaaaaattatttgtggcttttaaaataaaactaaagaaacaataaaaagaaaaaaatggtaaaaaaattctgcggtaaagcgttttaaccggctaaaacctcgcaaaataatgaagtcgatcgagtgcacgctaatctttagcgcaataagcaaaatttaattttcaaagttgacggtttttttaatttatttttcattttgaagaggattaccaaaatggtaatccttcagaattgcggtcccgacgaaaaattaattaaaaaaattttataatagttttttctagggcg

SEQ ID NO: 1076 - DNA, 4975 bp, Heterodera glycines
aaaataagaaagagtcaattcgtaaaggtgtatatgtagtgattagcagagatattttgttgtttaatttaggatcttttttggaaaatagcaacttgccaccacaaaaatttatactttttgtgtacttatgggcacatggtgtctcttcttcttgtcaagaatctctttgcgagatgtcatcaagcacagtgtgcgactggtcaagtttcatgcgcgatatttgttcgcgatggctcgttgaacatccaattaaattgggtggactgggaagagtggtccaaattggtaatttatcaattaaatgggctttcccatgatttttttgtagacgagtctcttatgtgtaagagaaagtataatcgcggacgaattgtacccgagagatgggtatttgggatgtatgacattgaacaaaaagttggtgtccttcggtttgtccacaacagacccaggcaaccctgttcccaataattcgccaatacgttcgtggcggaacaatcattcattcggactctgctgcgatgtacgtagacaatgcacggcaacgcagccatatagtgaacatccccaccatcccgatgccggcataccagcatttgtgggttaatcacacagagaattttgtggacccaaatactggtgcatgtacgaatgccgtggaattattttggaagaatgctaagaaaaaaaataaagaaatgagtggcacaacagccgaattgttggaaactcatcttgatgaattccaatggagacagattcatgggaaaaagacaattgaagcgttcaataatatcttggcgcatattgcatattattatccggttaacaattgacattgtgtgtcattaccaaatatatatgcgcaaataaagcatgaacggtcattggctgtcataaaaaataatccgcagccaagcggatttgaaccccagacccgtttcatagacccctaagggccagtaattaaatttcaaaaaatcatataaactttaaatttgccttcttcataaatttaatagttcattcaaaagctatttttaaactctacaacatctatgcatgagtttttcgctcgtttaattttttttaaattttggaaaaaatcaagtacttgatgaaaaatcatagataaaatcaatgatttttgttgtgttcctccaattgaacacacaaagaataaaaatatttattgatcggtcggtggacaaatgcaaataataataaaaacgaatgaatgagggaagagtccaaaaaggaggggaatggtctccttataaacacaatgagaaggggggaaagggcgtggagaacaaagtacaaatatgaaaataattaaaaaggtcaaaacgccaatttaacatttccaacacaatttgttgtgttcctccaattgaacacacaaagaataaaaatatttattgatcggtcggtggacaaatgcaaataataataaaaacgaatgaatgagggaagagtccaaaaaggaggggaatggtctccttataaacacaatgagaaggggggaaagggcgtggagaacaaagtacaaatatgaaaataattaaaaaggtcaaaacgccaatttaacatttccaacacctcccttctcaagcttctaactccttcagcggccggaaggcgagaagcgaatcaccggcttcggcttacgctgcgatcgtcgaagagccattgtcggcgggtcatttgcggcttgttgatcagtccgttgatcgaccggatcagcaatttgatgcgccaaattttgagcttgtccgttgactggtggaattggctgctgatcgggaccaggattgtgtttcgaattctcttcgaaaacacaatttcgacgaagttggttcgaatgtcggtggacaattcgaccaagaactggtacatggactcggtatgtaggcgaattcctgactcgctctacaattgtaccatggagccaataagttttttggttcctgtagttcaaaaggaggactggttcggcggggaaaaagactttttctttggcaccatgccgttcatcgaattgttttgccattttattcgaatagtcctttcttcttttgtcgagctgaattttgtcgatgttctccgaatcgtttcggtgtcctttcggaaggaccaatgccaatttcgttcggagtttccgtccgaagaataattgatcgggagaatagccatcaatggcattgtttggcgttgtcctgtaagcgagcagcaccttttcggtccaatttttatcgtcttttgaacactttttcattgctcttttaaaggtgtcaacaaatcgttcgacttggccatttgactgcgggtgaaatggcggtgaaaaggtgtgcttgatgccgaattctttacaaaaagcggcaaattcagcagacttgaattgtgtgccattatctgacactatttcctcaggaatgccaaggcgatggattatggaacgaagtgtgaaaactgtggacttggccgtaattgaagacatttgatagacttccggccatttggaaaaggcgtccaccagaataaaataaacatatccatcttggcagggtccagcaaagtcgatgtgtacgcgttgaaatgctttgtcggtgactgtccatggggccaatggtgccttaatcggacatttctgtgcaccttggcattcatcacattgccgtacaactctctcaatttccgaatcgattcctggccaatatacatactggcgtgccaaggccttcattcgcacaattcccggatgtgcaaaatgcaatgcctttaaaattcggccacgcagttggcttggaacgataacacgacttttgtagagaaggcagcccccaatttccaaaatttcatttcttttcggatgaaatggtgcaatttcgggttccctgcacttcgttggccaaccagaaataacaaaattaacaattttctggagtgtctcatctttggttgttgattccgcaatttcttgtgccgtgactggaagatgatcggtttgcgactgtaaaatggtgttaatataacagtctgtttcgacgcaaatgttggcaatcaacacatcttcctcaggctttggataattggctattagccttgagaggacatctgcttgtccaaatgatgctgtattcgtgtatttgatgtcgaaatcataatttgccatgatcaacgcccaccgttgtaatcggctggcggaataaatcggaattccctttttggaaccgaaaatggcaagcaaaggcttgtgatcagtaaataaggtgaatttcctgccgaataacattcggtggaatttctgcactgcgaacacaaaagccaatgcttctttttcgatctggctgtaattctgctgggaatctgacaaaacacatgatgcgtgttcgatcactttctcggacttatccggaaaaatgtggccaatcgttgcgccaattccgtttttggacgcgtctgctgccacgatgattggaagagccggattataatgagtcaacagcagatcagatgtcatgatcttcttcgccttttcaaaagccttctgttgctcttcgctccaattccaattttcgtcctttcttaggagctgatcaagcggtgtgcgtatttcacgcatttctttcacgaatcgcccataataattcagcgctcccaaaaacgatcgaagtgatgttttatcgtgtggcgcgggcattttgctgatcgcttcagaacgtgccggatcgggacgaatgccttttgatgacacaatatgaccaagaaaaagcaattctttttggaagaatttgcacttttctaactgaatacgcaggccaaattccttaattttcgtgaaaagctggtaaagtgccgaaatatgtccttccaacgtcttagaagcgatgagcccatcgtcgagataggcaaacacgccgggtattccagcacatatttggtccataagatgttggaaaatggacggtgccgactttactccgaaaggtaaacgttggcattggaataggccgcgatgcgtattgataacacaaaggtccttggactcctcgtccaactccatttgcaaataggcatccctcaagtccaaatttgagaaatatgacgctccattcagtgcggcataaatatcatccggtctcggcaaagggtgtcggttcaattcgagggcattgtttaaccctgtcgaaaagtcgatgcaaacccttgttttgccattcttctttttcacggcgagaattggtgcagcccaatggctgaaatcaattggcttaatggcaccgatttccaaaagtcggtccaattcagcgtttacggcttcagttgcaccgtgtgggattggccgtgctttgcagaaaattggcttggcatcctgtttcaggatcagatgtgccttgattttcgaacattggccaagtcctggttcaaaaacttccgaaaaatccgttttcaaagcctcaatcagtgatgcttcatccttaatgtttgcctttcgcattggtgccaatgtggcatggatgctgattggctcgcacatctctttttgctgaaccttaggaaacatgacttcccttgggatcagatcaaaagccataatccatggcaatccaaagagattgtaattgacagcactgctaacatatgcagttagcctttttggcggcttgtcaaagcaactgacgacacattgaaacattccttcggtgggaaatggttcctcattacaattatgcatttcaatgtccgacagttccaattttggtcttcccaatttaatccatgtttggattgtgatgattgttgcttgggctccggtgtccccattcatctcacaatcattgtcatttatcttcacttgaagcttccaccaatgaccgcgattcagtccgacattcaagcaatggcttgtcactttgactgtgtgcacagccacgattttgacgtcttgaatttgatgtcgaagctgatc

SEQ ID NO: 1077 - DNA, 1220 bp, Heterodera glycines
  unsure (1)..(1220): unsure at all n locations
atatatatcctttaaatactatatatgggtgccaagaatttcaaaattaaacattgcgtcgtgaaaatgagctgctgtaccaaaaaaagattaaattaagaatttttgctggcttttttcatttgatcaatttttctgatcatttttggttcgggtggttcattagacgtacaatcttaatcttttttgtagctaatgtgctttccaatgataccaatcgttaagccaaaaaattttgcaactacggtacttgaaaataccattacagtaacccatttttgtgaaaaatacgattcaatttccatattcttttcagctgacccacaaagttgtaagcgtagaaaacggatttaatcatttgacttgtgaatggccacaaatacaatacaaaagtgttcatttgtcacttttatgagtcaacgttttcgctcgccgtttgcccaaatgtnccgttttcgttggccaaaaaaaaggcgcccttttccaatcgatcgaaggaacgcttttgaagcgctttaaaaatatacggagaggaaacgaaaggggcgtcgagctgaaaagtcggctaattcagtcaattagttgattaatgaggggcattggtcgttcatttcactcaccgaaatggccgacaacaattggttgtcgtcttcgttgtcgttgaacctttttgaaagtgcgtcgaaatcgaacggagacgcgtcgaggcggtcgaacgcgcgtttgggacgcggaagagacgaaacgccggccgacgactggggggcacttaattaaagcaattaattaattagttaattaattatagcgaaatgtgtacttttgtgggtgctggagaagactctgtatcatataaaaggttggatacgcactgacactgatgagaaaagagaggaggaggcaaagggaaagggcattttggacaaatgccattgggagacaattaaaagggagcaattaacaactgctaattaatcaacgatgatccaactgacaaaaatatatatatatatatatatttaagcaattttaaggaattcgaaaacttaagaccaaaaaaagtgagtcggcgcaaagggaaaaaaatttggcaaatcattgaaagagtcggaaatgggcaatctgtgaaaacgatggaaaggagtgaattttgaaaaggaatttaaaaagaaaaaataaattggattccgtcgaaaatttgagaatgaataaacgaaaaa

SEQ ID NO: 1078 - DNA, 1366 bp, Heterodera glycines
agatgcatttaaaaattcataaaaaaataaaagggccattacgcaccgccctccctttcatgatcgagagtatttgtattatagaaaattatccaaaaaagagatagccatttttttgggatacagatgcaatttaaaaattcattaaaaaataaaagggccattacgcaccgccctccctctcatgatcgagagtatttgtattatagaaaattacccaaaaaagagaaagccatttttttgggatacagatgcaatttaaaaattcattaaaaaataaaagggccattacgcaccgccctccctctcatgatcgagagtatttgtattatagaaaattacccaaaaaagagaaagccatttttttgggatacagatgcaatttaaaaattcattaaaaaataaaagggccattacgcaccgccctccctctcatgatcgagagtatttgtattatagaaaattacccaaaaaagagaaagccatttttttgggatacagatgcaatttaaaaattcattaaaaaataaaagggccattacgcaccgccctccctctcatgatcgagagtatttgtattatagaaaattacccaaaaaagagaaagccatttttttgggatacagatgcaatttaaaaattcattaaaaaataaaagggccattacgcaccgccctccctctcatgatcgagagtatttgtattatagaaaattacccaaaaaagagaaagccatttttttgggatacagatgcaatttaaaaattcattaaaaaataaaagggccattacgcaccgtcctccctctcatgatcgagagtatttgtattatagaaaattatccaaaaaagagatagccatttttttgggatacagatgcaatttaaaaattcattaaaaaataaaagggccattacgcaccgccctccctctcatgatcgagagtatttgtattatagaaaattacccaaaaaagagaaagccatttttttgggatacagatgcaatttaaaaattcattaaaaaataaaagggccattacgcaccgccctccctctcatgatcgagagtatttgtattatagaaaattacccaaaaaagagaaagccatttttttgggatacagatgcaatttaaaaattcattaaaaaataaaagggccattacgcaccgccctccctctcatgatcgagagtatttgtattataaaaaaattacccaaaaaagagaaagccatttttttggggatacagatgcaatttaaaaaattcattaaaaaaataaaagggccttacccaccgtcctcctctcatggtcgaaagatttggattaaaaaaattattcaaaaaagaaaaaaccatttttt

SEQ ID NO: 1079 - DNA, 1504 bp, Heterodera glycines
catgattgagagtattgtattatagaaaattacccaaaaaaagagaaagccatttttttgggatacagatgcaatttaaaaattcattaaaaaataaaagggccattacgcaccgtccctccctctcatgatcgagagtatttgtattatagaaaattacccaaaaaagagaaagccatttttttgggatacagatgcaatttaaaaattcattaaaaaataaaagggccattacgcaccgccctccctctcatgatcgagagtatttgtattatagaaaattacccaaaaaagagaaagccatttttttgggatacagatgcaatttaaaaattcattaaaaaataaaagggccattacgcaccgccctccctctcatgatcgagagtatttgtattatagaaaattacccaaaaaagagaaagccatttttttgggatacagatgcaatttaaaaattcattaaaaaataaaagggccattacgcaccgtcctccctctcatgatcgagagtatttgtattatagaaaattacccaaaaaagagaaagccatttttttgggatacagatgcaatttaaaaattcattaaaaaataaaagggccattacgcaccgtcctccctctcatgatcgagagtatttgtattatagaaaattatccaaaaaagagaaagccatttttttgggatacagatgcaatttaaaaattcattaaaaaataaaagggccattacgcaccgccctccctctcatgatcgagagtatttgtattatagaaaattacccaaaaaagagaaagccatttttttgggatacagatgcaatttaaaaattcattaaaaaataaaagggccattacgcaccgccctccctctcatgatcgagagtatttgtattatagaaaattacccaaaaaagagaaagccatttttttgggatacagatgcaatttaaaaattcattaaaaaataaaagggccattacgcaccgccctccctctcatgatcgagagtatttgtattatagaaaattacccaaaaaagagaaagccatttttttgggatacagatgcaatttaaaaattcattaaaaaataaaagggccattacgcaccgccctccctctcatgatcgagagtatttgtattatagaaaattacccaaaaaagagaaagccatttttttgggatacagatgcaatttaaaaattcattaaaaaataaaagggccattacgcaccgccctccctctcatgatcgagagtaattgtattatagaaaattaccccaaaaaaaaagaaagccattttttttgggaatacagatgccaatttaaaaattccattaaaaaaaaaaaagggcccattaacccaccggcccccccttctcctgtatcgaaaaaattttggaataaaataaaaaattacccaaaaaaaaaaaaaagcccttttttttgggggaaaaaaaaaggaaatattaaaaaaaatttttaaaaaaaaaaaaaa

SEQ ID NO: 1080 - DNA, 1146 bp, Heterodera glycines
cccaaaaaaagagaaagccattttttgggatacagatgcaatttaaaattcataaaaaataaaagggccattacgcacagtcctccctctcatgatcgagagtatttgtattatagaaaattatccaaaaaagagatagccatttttttgggatacagatgcaatttaaaaattcattaaaaaataaaagggccattacgcaccgtcctccctctcatgatcgagagtatttgtattatagaaaattatccaaaaaagagaaagccatttttttgggatacagatgcaatttaaaaattcattaaaaaataaaagggccattacgcaccgccctccctctcatgatcgagagtatttgtattatagaaaattacccaaaaaagagaaagccatttttttgggatacagatgcaatttaaaaattcattaaaaaataaaagggccattacgcaccgccctccctctcatgatcgagagtatttgtattatagaaaattacccaaaaaagagaaagccatttttttgggatacagatgcaatttaaaaattcattaaaaaataaaagggccattacgcaccgtcctccctctcatgatcgagagtatttgtattatagaaaattatccaaaaaagagatagccatttttttgggatacagatgcaatttaaaaattcattaaaaaataaaagggccattacgcaccgtcttccctctcatgatcgagagtatttgtattatagaaaattacccaaaaaagagaaatccatttttttgggatacagatgcaatttaaaaattcattaaaaaataaaagggccattacgcaccgccctccctctcatgatcgagagtatttgtattatagaaaattacccaaaaaagagaaagccatttttttgggatacagatgcaatttaaaaattcattaaaaaataaaagggccattacgcaccgccctccctctcatgatcgagagtatttatttgtattatagaaaattacccaaaaaagagaaatccatttttttgggatacagatgcaatttaaaaattcattaaaaaataaaagggccattacgcaccgccctccctctcatgatcgagagtatgtgtattatagaaaattaccaaaaaagagaaagccat

SEQ ID NO: 1081 - DNA, 6433 bp, Heterodera glycines
gtgtagaggtcggcgtacacattgcggtcaattttgcgggaagttgacgcggatggcacgatgttcgccgcccccgtacacgtaaaggtcgtcattgtccaaggcatcatcgctaaattttttttaaatttatttacaaaattaatgcttaattgcaaaactcacattggtccgtcaatgttgtacgtggccagcgtcaggttcttcattgcctcaaaggtgagcagctgctgcgcagtataggacaggcggaagctgcggattttgaggttggcgcgctcgtcggtgccgtcccgcgcagtgtggcggatgccgtagttcttggggccacccgcaacgaactcgacgatccgtcggtcggtgtgttcgcgcttcatctgccccagagcctcgccctctgctacacacggaccacccatcttgttgacgtagtagatggagtcggtgtctaaaacaaagggctgtccaaaaaaaccattcgtgacaaataaacataccacagtagagcagctccgcaccgacgatggctgacacctgctccatgtagtcgtaaagatgaagccggccgtatgaggtgacaaacgcagcgaccggaaggcagttggtcagcggggctttggcgaattccggtcgcttccgcacgacgcagcggtccatgtggtcggacacgtggacaaagtccaacttgtccaccgttgggtcgtcgaggagcgcgtggaattcagccggagtccgcgtgtagcaaatctccgtctggcccacgcgctgcgctagcttccccctgtggatgtcatttttttttttaaatttaaaacccaaaatatttaccacaaggagttggccaatgttttggcgatgaggcgcaggccggggttgaactccattttggtcgagtccaggcggatgccttccgtccgctcaaaatcgtctacaaatgccttttgctgctcatccgtcacacatccttctggccagcccgtcgcctgcactttgagcccgacgaaggtgttgacgtagctgctgaacagcgtaccgtcccactcttcgtagtcccagacctaatttgtgttttcgtacacaaaattttttaatgagtggacaacctcaaaaagatcggtgaccacatagccaagctggagcgctttgttgagctccacgtgggtgtaggcggtcacccacgagcgcttgtcgtcttcatgtcggcacggccgctgctgccgacggtcggcacaccacgcgcacaaagggaaggtgaatcgcccgtcctttgtgcggtagccgagcaacggcacccggatgttgcgtggagcgagcacccgggcgagcagcagcccccggaagatgttgttttccggtgcattccacgggagcggtaccgttggcggacgcagcagcacctcgcgcgtcaggacccgtgggttgcccacagggaagcgattggctttctggtattcatcatgaatatgcgaatgtttaaaagaaaaacctaccatgacgtatgggtagaggctgacaatgtcaatgcacattatctcctcgtcgtcactgcacacgtggtggagcttgaacggttcagtgcgccctccccgcagtgcgtcgttgcgcgggtccagcgggcaagggacgaacacagcatcgtaacggcgcttcaggttcggatcgtggcggagccgctccgtccactggcaggcccacactttgtggatttcgcagccgtggtcattctccagctcaaagaggcgccgctccgtccgttcgtacagatcttccgctgtccgccctgccgccaattgttgctgccggtcgggaaagcacgcgggacagcctcaattttaagatattttggaaacggaaaaaagcctttaccgtgataatagcatccaagccattcaatggccaggggacggagaggcgcttctcgtcgccaaagtccgtccacgcggtagccactgtcctcaatgtgcgcctctccgaccgaccagctggcgcactgcacttgcgcctccgggtgctccagctcgaagaagcggatgtagcgctgcgattctgccgaagcacggcgtccgcgcaagtagccgccctcgggtgagtgaaccagacgattggcgggcaggaaacagcggcgaaaagttgccagcgcaagaccagcagctgttgacgcgtggaggaatgggtcgaggccttgagtattgtcggcgatgagttggcggaatcggatgaccgactccctcaaaatggccacgtcgttgacgcagtacattatgagctgctcgcgtagctggaatccattgccgttgttgtcggcgtgccaacgccaacggagaaattgcgcccgtttctctgccttcatcgtatccggtgcgtaaaactcttgagacggaagattgatgaggcgctgcgacagatgttgtcgtcgtatgtagagataagggaagaatggcttcaatgtggccagatggtccggcacttggaagctcttcaccaacgcgtccaaggcacaaaagaagtaattgattgagtctttgaatgtgactcgccgttggtgacgcccggacagacgcatcgagtagatcttcaatccggtggtgcacagatgcttgggtggacggtttcggcggtgtagtgcctcaagtacgagatggaaatcgtactttccaccgttgtgggcgatgcacacggtgtgtgccttctttggaccatggtgcagcaaaaaatccaaaaattggtccactgggtcgttgccgtcgttgtcaaacgaatggaagaagaagcggcgctggttgaacgctggtgctccaactggcgaagcgctgttgtctcccggtgcattggcaaagggtggcgaagaccactggcgaaacagttgacccctcaccattcctgtcatgcagacgcagccaggagcccgtcttccaaggccatcgctcacgctgatgccagcctgcagacaacgttcgcagatgacttcggcgacgatgagcagcggcacgtgcttctggacggtgcggttgttcagctgtaatggcgtgtcctgggacgtctcggcatcgaagaagcagagacgaagcggcaattcttcatcgtcgtcgtcgtcgtcgtcagaatcgtcgttgtcaacagcaatcgatgcacgttgtcgaactgagccgtcgtcaatgggctggatgtagcaaggctcatcgacggtgtggggcccattgcagcgccgacagattccatcgtcggctggttggtcacgtgggcactgatgtgtggccacgtaggcgatacgtccacacgcacgacacacccggcgccattgacagattggctgacgttgacgctgtccacgcccatccattggagctggaggattgttggccaaatggaagttgtagcagccatcgtttgggaagacgaactggcaatcagcgcactttcgagcactacttccaccattcggtagcttaatatttttttttacacaaattgtttttttttttggcatccatctacctgttcagtttggcatggataaccaggcccgtaccgcaaacaaaggcggcacacaactttgcatccgaacgcgtggtaacgcgcgtcagccctccgctcgcagtcgatgcagtagttgggcacatcaaacagctgctcaactcgtccaatgtagttgaagtgcccgcgctccaacacaaggcaaaggttgaatttcgcagccaatcttcaatcaaccaatttccaaaaaaaatgaaaaaaaactcacccttcccctttgaagacgatgcgatattcctgctccttttcaagcaccaccaggcgaatttggcccacaccgtgctcgttgttgatccactgctggagacgttggacatcgtccagcgtgtacatgtcactgttggcagcaatgccggcacgagtcagcatctgcgctgctgccggaccgtgttggtcttgacgactggcgaacaggttgaatgccgctttgccgccaccgccagccattcgcgtctcgcggtcatgcatccccatcacaacggcacgcgcaaggcagagccggtcgttggggttgtgaatccggacaagtgactgcacgttattggaaacatggtgctccacgtcactgtcacaggctcctattttttatcaatgcgttaatgcaataagaacggcacctcacctcccctttgggggtcagcacgaatggagtcaaggggccagaccgccaagactttggtgaccgttgttccggcaagcaagtcaatgccggctgccgactgctcattgagacgctcgattgctgccgccaatgccgctgcgttgtgttgctctggcggacgaagcccgatgacataagggcgatcaaatcccggcgggtggagctgaagtccgaccatcgatgggcgtgggtgacccgccagcacacggtcgaggagttgctggatgatcgtctccatcaaaagatcaggccgctgtgcctcctccagcggcaggaagcgcagttcacaaatctcgccccgtgtgttgcgtgggacgttccgcatggctgttgagcgctcaatcacaaagcattcatcaatcgatctctctgcctttaattaattcaaaaatttattcatggcaataaatatttacaagttggacaagaacgatggatcctaagccaaggaacaatacaacccgtgtgaaaaatatgaaagcaatggagagaagtggccccctccccaatcacaaaggagcacatgcaaattgggcagtcaagggatttttcaatgtgaatgggtgaaatgtcaaaattgggcagcaaacgaattttacgggcgggatatggcttttgtctttctcctctcgggatttgttcaatatcgggggacaaatcgaatcggaccctcaaacgaaccggttcagcagcccgtctttgtgttggtcgcgcaccagcagttcgactcgcgcaacgactcggacgtggctcaagaccatgattgtcctgagaccaaaagtttattcatcacaatgtaacaaaattacacaaatcgtaataaaaagatcaattcctcacattgttgttgttgttgttgtccaggtccgcgtcctcgcgttgttcatcaccagcattggtcacgtttggcagcgcccggactgcatcacgccctgcgccaacttgaacgggcacaactggtgcaatgtttgccggaaactaaacataaatttcaagaaatatcaatttaaaatttaaaaaaaaacttacctctggggccacgtgcggcaccacaagcgcattggggcctccaaccccaatgcggaaccagcagtccagtcgctggtatttggcacggctcacgcagttggtgaaccagtaggcactgccaacacacaaggccgccagcgaacccgcatgcgcctgccatcccgaggcttcaacgcggtggccgtcacccgtgcgaagcacacagttcgtcacggcaagtggcccagctggcgtctgctgcgcagggcgatggtcaaccgacacgacgatcaggcacagcgggctaaaaaaactcgcgcacaatttaaatatcgatttgtaaattcaacttacggcaatggctgacccaacgcagcaacgcatccaatcaagaattgaatgttgtgcgttccatccgcacaaaaaggttcctgaaattacaaatagcaaaattaaaaaaaaattaaaaaacaaaaaaaaaacaagtaagcaccgccaattgctggtgggacgcgttgacgaggatgggctgcaccaactgcgcaacctttaaaataataaaatattagttttttattatattttaaattatgacttggccaaagggcggcatttggccgaaaacggttggtagctgttgagccataaaataaaggacaatttgaatttttcgctgtaaaaaaaatagaaaatttgtctttttttaaatattgcgtagcttttcttttcttaactaaaaaaatttctatttttcttggcttttcgtttgcatttctttttaatatcgcgctgcttttcttttcttagctttgaaatttctataaatttttcattgcttttcgtcttcttttttttaaatattgcggagcttttcttttcttaattttaaaatttctatttatttttttttcctggctttccgctttttttaaagattgcgcagcttttcttttattgactttaaaatttctatttattttttcttggcttttctttgcttttctttttaatattgtgctgcttttcttttcttagcttttaaaatgtccttaaatttttcattgcttttcgtattgtttttttaaaatattacgcagcttttcttttctgaatttaaaaatttctatttgttttttcttggcttttcgtttctttctttttaatattgcgcagctttttcttttctcaaagaagaatttaaatttttcattgcttttcgacttgtttttt

SEQ ID NO: 1082 - DNA, 2448 bp, Heterodera glycines
ttttttcttggcttttcgtttctttctttttaatattgcgcagcttttttcttttcttaacttaaaatttaaatttttcattgcttttcgacttgttttttttaaaacattgcgcagcttttcttttcttaactttaaaaatttctatttatttttcatagcttttcgtctttttttaaatattgcggagcttttcttttcttaattttaaaatttctatttatttttttcctggctttccgctttttttaaagattgcgcagcttttcttttattgactttaaaatttctatttattttttcttggcttttctttttaatattgtgctgcttttcttttcttagcttttaaaatgtccttaaatttttcattgcttttcgtattgtttttttaaaatattacgcagcttttcttttctgaatttaaaaatttctatttgttttttcttggcttttcgtttctttctttttaatattgcgcagcttttttcttttcttaacttaaaatttaaatttttcattgcttttcgacttgttttttttaaaacattgcgcagcttttcttttctgaattaaaaatttctatttattttttcatggcttttcgttgctttctttttaatattgcgcagctttttcttttcttaactttaaaaatttctatttatttttcattgcttttcgtctttttttaaatattgtgcagcttttcttttcttaattttaaatttctatttattttttcttggcttttcgtttgctttctttgctttcttttctttttttttgttaaattaattaattaataatttgttagttagttatgataagcaaaataaatgcacaaatataaaaatattggacagaacaaataaataaaatggacaacaaatcaatataaacggaagaaatggaaatgaaaatgatgcgttggtggagaacggaccgttgcagatgggtgatagataagaatctagcgaatgggaggggtccgcatcgctgtgcacagttaagtgacaacagtggggagggggtaaacatttgaatttttgaagttcagatggattttataggccgtcattgcaacaccccctaagctgaacggcgaaagaatttcgcctcaggcaccatttcaaacaatactttcccgacgccccgccccctcgcgcaccccgagactcgcgcaccaaaactcgcgcaccccttgtacgattgacttcaaatttcacaggccatcattccaccatcccctaagctgaatggcaaaagaatttcgcctctggcactatttcaagcagtactttcccgacgccccgccccctcgcgcaccccgagactcgcgcagcaaaactcgctcaccccttgtccgattgacttcaaatttcacaggccatcattccaccatcccctaagctgaatggcaaaagaatttcgcctctggcactatttcaagcagtactttcccgacgccccgcctcctcgcgcaccccgagacttgcgcagcaaaactcgctcaccccttgtccgattgacttcaaatttcacagtctgtcaatgcacccatccctaagctgaacggcgaaagaatttcgcctctggcaccatttcaagcagtactttcccgacgccccgccccctcgcgcaccccgagacttgcgcagcaaaactcgcttgcttaccccttgtccgattgacttcaaatttcacagtctgtcaatgcacccatccctaagctgaacggcgaaagaatttcgcctctggcaccatttcaagcagtactttcccgacgcctcgccccctcgcgcaccccgagactcgcgcagcaaaactcgcgcaccacttgtccgattgacttcaaattttatgggccgtcaatccaccaccccctaagctgaacggcgaaagaatttcgcctctggcaccatttcaagcagtactttcccgacgccccgccccctcgcgcaccccgagactcgcgcaccaaaactcgctcaccccttgtccgattgacttcaaatttcacagtctgtcaatccacccatccctaagctgaacggcgaaagaatttcgcctcaggcaccatttcaagcagtactgtcccgacgccccgccccctcgcgcacaccgagactcgcgcaccaaaactcgctcaccccttgtacgattgacttcaaatttaacaggcaatcattccaccactccttaagccgaacggcggggtgagggggtccgcgccgtcggagagagggggtccgcggctatggtgagagggggaccgcgccgacggacggaggaatggtggggaggggtccgcggcagtggagagagggggtccttggaagagagggggtccgcgccgactgacgacggaatggtggggaggggtccgtggcagtagagagaggggtccgcgccgacggacggcggaatggtggggagggtccgcgg

SEQ ID NO: 1083 - DNA, 3446 bp, Heterodera glycines
  unsure (1)..(3446): unsure at all n locations
tttaacccccccggcccaaaaatttcggggcaccccccttctccccacccccaaatcccgacccccacaccattcccgcgcacctccccaacatcccggaacccacatcttcccgacgcatccccccaccccccatccccgtcagagacgcagacacaccacctaaaataggcacggacccgcncgctcatcctctctgcgctcagcggagaaaatcaatcgataattcaagtggtcttaccatgtagtgttggctatggcacaattatgagatggaagaaacaattttgcatttgctgtagaataacggagaaagaaaaaaatggaaaaaatgaatatttattggcaaacaaaaatagaaaatccgaaaatgagtgagaaagaaattgcaaagatgttgaaaattgatagaaatagtataagtaattggaagaaacaagttgagatggaataatggagattattaattcggaaaattttaaaaaaatttaataggcctatttcagataaagttactcacattttacaatttatatatgtcgatttgttagaaggttataataaaataatatttagcgccattttttcaattatatttattaagaataattataatttttgattttttgaaattgatatttttattttttcgatattcaaaaacaaaagattataaaaacatggacaacaaaagcaaaaaaaaaaatttttaatttcataatttttgtcataatgtcacttttatgagaattttttaatccaggaaaaatcgtaccaatttatataaaaatttattaatatttaatttttgcaaaaatacgataatttaaaaaaaataaacttaataacaaattcgatggatttaagaaaattaaatttattgaggtttttttggccataacttttttgtttctgagataaattttttgaaattttgaagacgaataggcactgtcaaacgctttaaaaatcctgccaagtttatttaattcgtatgacaaataaaaatgtgtatagcatttggcgccaaatgggatgaacggttcccccaaattgtttgtattcctaatgagcattttgtcccagttttgcaccgcttagcatcatttgctaatatgccttaaatccattttatttttgcccatatcgaaatcttaatctcgaccaaagaaaattcttggatgtcctcgggcacatgttcagtcttaatcagccactaatacgtaattgactgtaaaaggtgccaagaactgaatttatgatatttctcgagctcatggctaatttcagaacccatcataacaaaaaaaaattttcggcatagtcgtgaaaaggtgttaaaaaattgattgaacaagcgttattaaatcatgtagaccaggggtggagcgcgaccgcgatgcgcgatccgcgattctcggcattttaaatccgcgatgcgcgatccgcggaatttttgaatccgtggcaattttggatatttaaaaagaaaatttttttgaagcgattgtttcatatataaaataatttaaaagtaagtttttgtaaatgaaaaagcaagagatttgattatttttttcgaaaattcctttcaaataagatatattcattcatttgtctagacaattatcctaaaaagagtgaagcggaatttccgagcttgcgacggcttatgaaaaagtatcatagtgcgccgccgggaagtgttgagtcggaacgactattcagctgcgcaggatttattttgaatgatcttcgaaaaaacctatcgcatgaaaatctcgaaaaacttatttttcttcatcataatcttatcctttacaattttgattattgattaaatgaaaatttttttgaattatctggaactccttgcaatttccccccccccccccattcagtcttcccaaatttgtatgcatcggaattttaattaattttttatataagaaaaaataaaaaaagtgtaaaaaatggtttaaaaaataggaaaaaaatgcgcgaccgcgatccgcgattcgcggtaatttttttgcgcgatccgcgatccgcgaccgcggcaaattgaatccgcgacgcgcgatccgcgaccgcggcaatttgaatccgcgacgcgcgatccgcgaccgtgggatttttctgtgcgcgctccacccctgatgtagactctttcagaaaagaatttaatatttaaagcaaaaaatatttgtcgtttggatattttatttaatattgcaataattttttttaaatttcattaaaatagtatctatttcattcaaatattcatttattaattattacctataattatgaattagtatcaattaattcaaaataaacatttggaaccatgaaataaataatttataattatggaaaaaaatttatgttaaaaattcattggttatttatttcttattaaaaattaatagaaaaactagcttaatcaaaaatattatttatatttccaattaagcaatattttttattttacaggaaatcaattgaaaggcgattttaacatcaataactagccaaaataataatcaaaaattatattttacaagaaaaaataaaatttattatttttttaatttgtgaagaagatgaaattccgcctattataccttccaattttattttttgtgattgaaatcaatcaaattaaaatagaaaataaaaaactaccgcaaaaatcatttgatgaaatatttggagaaaaatgggaagaaaaagaaggaaaacaacgaaatgagaagaataaaagagaaataattgaaaaatattataaaataaaagagaaaataaaggaaaaaggaagaaaatactcagaaaaagaatggagaaaaattgaagtaaaaatagcgaaaaaattggggacaaatcgcacatatattcaaaaatggaataaagaatttggtcttcaaaaaaagaaaagctataaatcaaaaactgatgaagaaaaacgtcaaattattcaaaaattcattaaaatgaaaaatgaatttaagcaaaaaagaaaatattcaagaaaagaatggcaacaaaattatgaagaaatttgtaagaaaattggcgtaaaccgtggaacaattaagaaatggaagaaacaatttggcattagctgtaaaataacggagaaagaaaaaatggaaaaaatgaaaaaatattggaaaataaaaagagaaaacccaaaaatgagtgacaaagaaactgctaaaatattgcaaattgatagaacgaccatttcaaaatggaagaaacagtttggaggagagattttggaggatttaaatggatgattataagaaaaattggataaattttcaaacaagaaaattatttacgacataaaaactgattaattcttatattttatcgaaccattgtcaaaataactggcataaaatccgtttatttttctcaattggatacgctgaatt

SEQ ID NO: 1084 - DNA, 1938 bp, Heterodera glycines
ttattattttcctcatccttcgttgaactctcttccttttcatttattctttcaaattattctatgtacactcattgcataaaaacaatacaacgaaagttaagaaattctgtttcttgttgaattgggccctgtttctcctcagtaatacagacccattttgacacggccggcacttctttaggccgtgccaaatggacgaagggtccgccaaatggtccgatcgttgcgactgccttttgctcgtgtgcccttccttcctcccttctctgtctgcccattgtcattgtgcttctcttccctcctctcgcagtgccaatgcgtcgtgcaattccttccgttccgacaaatgcgacgcgtccgccaccgccacactttcggcatttaaacccgtgcaaaggcccaccgccacggccattcccgccagcgcttcgttcagtcccaaaatgccgccgcccgccctttgcctcggccgctcttcccccgcccccaaaatgaccaccgattgtcccatcggtggcaacggcgccgcccttttgcactcgcttttccctcccgcgctcacttggccattcctccatcggtcggtccaatgaccgtactcgcccggctgcgccgctctgtgtccccccgggatacggtatttgctgattgtgcactgtcccgggtagttcagctcgccgctgagtgcgaaatggcaagcggcgattggggagccatggctgacgatcagcacattgcctagggggtggggatgatcagcaaaagtgatcggaagaagtggggacgacagacaaaaacgaaacgaccaaaggcaatcgttgtaaaagcaattcaaatggattcccaacaaaattaaaaggggaggacgagacaaaaactgatctgatcaccggaaaaggtcctcagaatgtgccgaagtgtggcgattactcgtcggaaacagcaaaagttcgttcgttcgtctgttggcaatcggtcggcggcgataaacggccgaaaagcgacgtttaggcaaaggccggggaacgattgactgagaaaggcacacaatgttcgacaatattggcattagagtggccacaatgtgccaaaatccctctgagggattcatttacagaatttcgtcggtgctgggaaagccggggggactttggcacacgttcagcgactcggcaaggcccggctcaatgcaaagggacggcaaattcgacccattttgactcattctgtccacgatttgctgagcagtttggacacagcgtgtgaacggagaacagaaaatcaaatggatgggctcggctgcgagggcatcgccaacttcggaagcctggagaagcccacgggcgctgaaagaggggagaagagagagaaataaaaaagagaaaggaagagggagacaggaagagagaggggcggagaagagagggaaagagagtgagacagatagagagagagagaggggggggagaagagagggaaagagagtgagacagatagagagagagagaggggggggagaagagagggaaagagagtgagacagatagagagagagagaggggggggggagaagagagggaaagagagtgagacagatagagagaagagagagaggggaagggagggggagaagaggaacgataaacagagcgagataaagcgtgaccggaaaatggtcagtggaaaataatgacgaaatacggtagtaaggagatttgaaattttaagcatgattatatgggaataaatttacaataagcctaaaatagaacagtgttttacaaactttggtaatttttttaaattaaaatttttactaaatttttaaacctttcaaaaaactgaattgactaattcagaatgagttttttacatttttattacaatatttaatgctacagatgctttgtgaaatgtcccgaccaaactataaag

SEQ ID NO: 1085 - DNA, 6112 bp, Heterodera glycines
  unsure (1)..(6112): unsure at all n locations
ccccccccctntcccttcccttcccttcccatttgattcgtcncaatttcggatttccccccccccccgcccaattggcttttcttttccatgtccaccattgcatttctgattatcttcagccttttgctattcaatcgttcagtcgaagaacgaacgcgaaaggccagcaaaagcgcagttgaacaaatcaaaaagattttcaacgaaaaagcgacgcaacggtaaaaaagaagagaaaaggaaaaggaaaagcccactcgcctctattgaaatcggcagaatcattcgctttcagtgcctttgcacagaatgacgcggcactgatggcggatgagccccggcggggatttgtgccgagaagggacccaacggcaagaaggcaccacgacgaattggcggtgaacggagaggacggcgactattttgagggcgatttggaattggcggaatggcaggcggagagactgtggcacaaattgggagaagcgaaagcgaacgcaaaactgaagaggaggaggaggaagaagagaaaaatcgcaaaagtgaatgggaaaaggggaaagaataacgttttccaaaatttaataatggggaaattgaaatggaaaatccccgggaaaagtcaaaacgaaacgacgagcagagaatgggacggcatttcgctttaagtgatggcacagacaagagattgggtctgaatttccatgcttctcatcttggcccctttctcggctccatttaatctttgctttgcttttggaacccttctacaaacgatgggaccgacggcgaccgatcaattacgaaatggcggaaaatgtgccggaaaaggtgggcacggcaattaatgggcaaggccaaatggtcggccttctcacttcagacacggcagaaaatacggcttgcattggccatttggcagaacgcaacgtgccttcgcttcattgagggcgggccggacaccgatcggatcgaattttttgacggcggcggatgctcgagttttgtcgggagggcgggcggaacgcaagtgagtgatcgagcagagcagctagggaacgatttgcgcaatgaattatggcacttgcccagggcatttccatcgctacgcccggctgtgatttggtcggcataatcgcccacgaaatcggccacgccctgggcactttccatgagcaggcacggcccgaccagtcccagcacatcgctgtccattacagcaatatcccggccatccgatggaacaatttccaaccaattggcgacgaccaagcgcaaactttgggtctgccatatgacgcgggtcagtaagtgttcagtggcccgaccagcagaaggtcacttggaagtggggaaagaaacggcaccaccaaattcaattggccattcttggcacatttcctctctctctctctctctctttctcccatggcttacttcgtttggccattggcatggcatgggcaaaggcatttgttaaggctcagtgatgcattacggcccttttggctttgctgccgaccaatttaggccaacgatttcgacgttggacaaacattggttagtttttgattggcttatgctttctttgcctttgctttgtcaactttgggtcactctttcgttaattaaattcgattttctaattgcttttttgcccaattgtctgatcactgatcgattgtctgtcccttcctctctttcctttcttttccttcttttccccctttttggcagtttaccatcggtcagcgtgaggcgccttctttcctggacatcgaagcggtttctgtttttctcctttggaagcagcaattaaacccccggggcaggggacagtcccaggggaaaagcaaagcataaaaggggcccccgaagggataaaagcttaatcacctctcacagattaatcgtgcctacggctgcactggtcagtgcccaaccgatctgtggtgtttgcatggcggttacacggaccccaacgactgttcgcgctgcgtttgtccgatcggatttggcggcacattttgcggggaagtgcagccgtctccatgtggcggagtgatcaaagtatggggaggctgatcaaacggataaaggaagtcccaatcactcgttaaaatcattctcatcatggtcatgacaaataatcagttttcattccgatcggccactggtcaaattttgttcaaccattttagctccattttttgtaccgatcattcaccccattgattgctgcttttcattgatcaccccccacaggcttctcccatggttcaaaccgtcgcttctcccgacttcccccgcaattttccgtccgatttgttctgtgtttggctttttcgttcgcctccccagggccaccttttcattgaatttgtcgaggagtccttcggttatccatgcgaagatacttgtgacaaggctttcgtggaactgaaaatgggcccggactttcgtgttacgggttacaggttgaaaagttggaaaaattttgcttttttacttttaatttttcaattcgaccgttagattttgctgttcttcgcctccgttaatgacttttcaatcggttggcgaagaagcagtgatcattcactatggaggaacccaaacggagcaacgcgcgggtttcaggcaaggaaaaccaatcgattgggcttgtacagacggatcagcggtgctgatcagcgattttgatcagattgcgctttttcaatgatctatgcttttgatcactaacattgaccggtgtttaggttctgatcagaaatatattagcaagaacacagtcaaatatcagtcattcagtcaaaagaatcaattattggaagtgataattgccacgacccaagcttagggcacgcgtgtggagtgaaaagaaatggtcggtaacaacagaggaggaagaacaaatcagcaccgaaacaaaatggggaaatgcagtgaatggagccgaagtcagtggcacagaaagggcgagcacaacagaagcgacaatggcacagacaaacggagacggacagaacacgacgacgcgtgagaagccaatgccaacttcgcagccacccccagaagtgccaatgacatcttcgtcctcctccttcccttccgttatgccaatgccattctcttcctcctccccctccgttatgccaaggccattctcttcctcctccccctccgttatgccaatgccattctcttcctcctccccctccgttatgccaatgccattctcttcctcctccccctccgttatgccaatgccattctcctcctcctccccctccgttatgccaatgccattctcttcctcctccccctccgttatgccaatgccattctcttcctcctccccctccgttatgccaatgccattctcttcctcttccccaccgcctcctccttcctctaatgagtgctctttatgcctacaatggtccgaatggaatgactgttcccaaatgtgcggcggatgtggtcgtaagacgcgtcgtcggcactgtccttccgctgtttcatgccaaagggaggaaaagcggatttgcaatcgaatggcatgccccgaaggcaccaattttctgttcaataacggcgagttccacctgttgtggaagggctgctgtgtagggctgttcctgaacaacagcacggcaaagggtgatgggtgagtggggggggggggggggaggacaaacaaacgatggccggcgaacgagccgaaggatccgccaaaactcagcaaaatctcactgccaatcatttcatagtttcatggactaatattcccctctttttgagttcgtccgtccgcggagagtgcggtccgttggaaaacagtgaaaacccttttttacgaattatttcgtctctgctgagttcgcacgacggacaaaaagaaaagacgaaaagaaatggggggaaaagcaaaagtggtgaagacaaaaacggacaataatcaagcgcattttgttaattttattaatctctttgttactgtaaaataaaattgacgacttcaaaacaacatttgacagcggcgaaatcgcatcgtttctcaacggatttgcttttctcatcggattttgtccttttttaatttttaatggtaaagaattgcggtccctaatttaattttttattttggactcaaaatcagtttcaggggctcccatttaattaaagtcattaattttttaaaatttgttcgagatcaaaaaaattgccgcgaattcgcgcatttaaaactcaaaatttccaacttttaaacattcatttttttaaatcaaaaataattaaaatctcggtgcatacaaaatttgcgacgggactggatggaggggggggggggggtcagtgtccaaatttgcgaattccagttatgcaaaacgtggagagaaattgggggataaaccatacaaataagaaccaacaatgaagggataaattgtacaaaggataaaataggtaatttattcaaatgggctgtgttcaaatgcgaaggagttggagcagtatcagcacagttccctccctccctcccttcagagatttcgtccttttggcgtccgttgcgtttggcgttgtccgttctctctgcgcccattgccaatgttccgtttctctccctttcgccctcttttcctcgtttcgttttgtctccaccgttccgcccgggtgcccctcgggcagtgccgagtacatctccaggcatttgcggaattgcgcgtttttgaagcattggctggagcattgggcgcgcaaattggggttcacgtgggagaacattccgtggcacagttcacacaattggtccgccattatgcgcattatcgggtcgcgttcagcctgccattccccccattttccgtaatttttctcttttttctcaccaaacatttcttcgtcgtccgattgtgcagttttcccactgaattcgacctcacgcggtaaatccttcgggccgcgtcggttacgttcgcctgcccaaatgttaggacgcccaacaaaagcagaagagttgccaaattcaatttcttcggaatacctccaaaatttgctaaacatcggaacgaacctcgtagaatgggaaaagaatgtgtgacaaatggccttttgcatttgcacacggtgcacttacgacgaatggaattgggcgcgaccactgacaaaacgcaaattttgcttttgtttcatttttcaacattttgcaacgaaaagcgatggaccgagagaaatccgttgagggaaaggcgactgactgcggaggaatgaataataaggagaagggaaatgaaaggagccgaggcttttcgcctatttatgttccgttccgtccgcccgtccatcggtgccttattttttgtaattgccataaatgccaaattattattcatttctcaggcgcgtcgtccgtttcattcatttgcttttttaattgatgaatgagcgagcggtggtccatttccgagaatgaaaaagtcgcaaaaaggattgtttgtttgtgccagatcaaaagtgccaaaatcggcacaattcccatgacaatgactaaacatccatcgaatgagtgggaaaatcacaaaatgggaaaggaaaaaaactgttggcctcacttcgaagacaacaaatgaatgaatgaatgagtgcccccccccccttctgttacatttttttgtttgtttctaattttggcgaatgcacgtgaactctctctctatttgaaatgagaaatggagcgaaagatctttgttttggatgcctttggttggcacaaatttattttgagttgtagtgaattggtttcggctgtcagtgaaccacataatttgtcggtacttgtgtggtttaccggagaaagcgaaacgggtcagcacacgaacacagttgaaataaatattatgattccgtttcattgaggttaaaatgctttaaaaaaacaatgtaaaatgaatacatttataggcatttaaaaatctatgtggaattgctccggtaaaccacacaagtaccaatttgtcttcaaaatcagcgctttttgggtacttttggggccgcattttcaaattgtaaaaatttatctgctgatggatgcaccaaaaaa

SEQ ID NO: 1086 - DNA, 943 bp, Heterodera glycines
gatgttttgtcctccaacttttttctggacgaatgccccgctttactttcacaggtcgttaaaaattctttgacatcgtttttgttaattaattagtactttctatttgatgagctcctaccatttaggatttgataattaattgcattttgaaagttttccactcctgggtacttctgttccttgcccacaaacaggtgccggacagtttcgatttgggccgaacccgagttcggctgaattcgatcgctgcctctgctcggcacattgccatcggaagtgaatgcggcgctctttttctgttcaatcggagaattggccaaagtgtcaaaccgtaattcatttatttacatttttcacttttaaaaatcaaattcgatgtggcgattattttatttactataaacaatttgtaggttgagaaccgatcattgcgaagtgataagtgccatggagttttgtccggatagtaaagacggcactgaactgcttgcgatcgggcaccattctggcaaattggtcattctgtcattgccttgcgctgacgcagccaacccaaaggttgtgctagggcagtcagtggttttcggaaaaattactattttatcgaatgtgctttttcagcttttgcagcatgttcaggatcaggcccaccggcacagcgctgtccgctgcctttgttggagcttcgatgggcgaatgcttttttccggggatgagttcggcatggttttggcgactcatgtcgactttactaacgtcagtgatgcttcaaaaaggaaactgcattcggtctttttccatttaaaggaacaatttccaattggggtggtggagagcggcggagtcggaggagaaggaccaccgattgtccaaatgctttcttcaggaccgctctttgcctttgctaagggccaaaattgcaaagttttcaattggcaaa

SEQ ID NO: 1087 - DNA, 6365 bp, Heterodera glycines
ggggatctctagagtctgaattgggctcatttcctccgatattttccacggccgacaattgcgcattttgtctttctctgattgcgatgggccgagttgggcactttggacccaaaacgggcacattgaaaaatgttgtctgagtgcagaaggatttgcaggttgacaaattggcattggagggtcgcgtagaccaagtcggtgaaagggggggaggaacgggaaggggaggggggtgaaaaaaccatttttggatttctcacggttcttttcccacttgaggttatctctgtctgtgcttcctcctccgcttcatcttccccctcttcttcggatgagctgtttctcctctccgccccttccctccatcccctccaacaacgccgtcgcattttccgtctgtctcgtcgctcctccgcccatccttccctcaccatttgctcgcctcctcccaccaacggttattctcttctctttggttacctttacggcactgtcggaagggccgtggacgaattggggcgactaaaggacgccgctgcaggaagcgatggcattgagaagagtaaactgttgccaaaaagttcggaggaactgttaggtcgtctgaaccgggaattggatctttttctgatgggagatggagcgaaagaagtcgacgaagttggcgaatgtgagtttttccctaatgtcactgcattttgtccaacatattcctttttcccacaggtaaaactgccaacactttgacggattttctccccgaatttggctccgtttttcccgatggcactacaaaaattgcctcagggctccatcaaatgtttggccaattctatcaacagtcttccaacttatttccctcgtctgccgaagacaaaacatctcaaaatgaaaaggcaacagaaaatgagcgtttgtccgtgggaggaacttcttcttcccgagaaaacatttgccaaagatgggagcgaagggattcaccagcaaaaatggtctttctaaaaggggttttatgtgtattttaaaaatgttttcagtctcttccgctgaccgaattcagctgttccgtggagggcgacgaatttgcacatttggcggaccaatttgccaatggtaaaatggaggaggaaaaggggagggaaaaagtgcgagtggagcggaagagaatcgttgtacgacgcaaaaagctgaaaaacaatggtcgacggagaagggaccgcgaagaggaaaagggggaactaaagtgggaccaaaaaaaaacaaaaaaacaaaaacaatgctttaagaggaaaacgacggaagccatcggtggatgaagaaaaacggcacgaagaaagagacaacgaggacaacgcgacactgacagattgggaacagcagaggacgaccaattggacaacgccggagggcgtggggacggagggaaggggcggccgatggacgccgggggcagtgcccgacgagcgacagcagcagattctggaaggttggaaggagaagcgagaaagtctgctgccttagttcatgtgaccctttgtccgatttagtgttgggaattgtgccaaaatcgatggcatcttccgaaaacggctctaaagaaatgctaatacttcaaaaactgcaaaaccaaccaatgaaagacgacaatgaattggaggagggaccaaatggaagtcaaatgagtaaaaacgtaaatgaaaggacaaaggacggcgaaattgacagtgaaccattggccgatttgaaagtgcacaatgccaatgggtactctttcccgccggcaaaccgtggacaatttgtggaggacgaggtgggcagcagttactcgtaattcaatacaaaatgtacttacaattagtggatgaacaatttaacattgcaaatttattgtaatttccctggacagtttccgacaattgtgccctccgtgtctctcgccgatctgttcgctctcttcccttcgtcatccgttgcgcactcttccgtttctgccgcactttctcctcctccccctccgttctcttcctccccttccgtcactttctcttcctctgcttcgtcttcttcctcctctttttctgttcatccttccccgcactatcaaagccttctgcgtctttccccacccgaccaatgccaatggcgtcgtttggacgtgcctttcactgttagcgacttaacattgtgccgccattatttaattgcatgtcccggacacaaacggactaccaaaagcccatcggtggaaaagcagcggccccattatttgatggcaaatttgttggaagacaaaagggcaatggatgagtgggtcccactgagagtcaatgcatccgccgtggccgttaacggtcagtttcaccggctctattggctcttccaacgtattttgtcacttaagatgagggcacacttttatggcgaatctatgacggcgttgcgtattcgccatgctctacgcctgatccaatttgtccgtccgcaacgctttcccggacaacggcttggatggaaatgagcaaccaattcgagggcgacattgtccaaattgctttgaatagtcaaaattcgtggtttctcgccgacacgggcagaacaaagaaagagagaacggtgagtgacgggaaaacattgcctttcatctaaaaggatttcccccccccccaaaaaaaaaaaggtgtgggtccaaatgtttcttcctgaaatgggcatttttcaccgcgctgtagacgaggacaaccgccacttttttacccaattggccgtttctgaccatgcggtttggacactgagtggcggatttgttgtagcacgagttggcctcaagttggacttggctccgatgggtctcgactgggcggagtgagttgactcggataattttaattcgtttccttccattcgatttttgactcaaatgaagcttttgaaaacgcataaagaaattttctcgcgtaaaactgccaattttaagcatcgacggacaaccgcgcaaatttgtgtcaattgttcttcatgagcacacggggttcggacttgagcgtaacggaaatgtttggtttgtgcatggagtggcggagaacgcgcctttcggactcggtccctggttcaaagtaagtcttacaatcagtgcgtttgggttcacccgtctctcccctctctctttgggtctgttccccgcttggcgacccgtctctcggcctctccccttcttccgaatggcgtcttcgtgtcggcgcccccggcgttttcgttgttgtcggttccgctttgctccacacaaattctcctctgatcggcgattattttggccacgttgttcctgatcgacttgcactcaacgaccatttcacgctgatcaccgcctctggcttctgcggtctcgccaacggttgttgtttaaaaaaatatacataaaaataaacgttttccgccactcctcagaatgtctcttcctgtgtcaacctgcctccaatgaattgttctccttctctttgcgaaaacggcacttcacttctctgcctccgtactgctccaactcgtcggccaaagtcaaatgtctctccgccacttcaacgcatctttttgtgcttgacaatagcggcaaattatacgtccgaccggtgggaatccaagcggaagtaaacggaggacgaattcgccgtcaatggttgcgagtggcgatgccaagtgaaggtggcgattggcatgaaaagctgtcattgggaggggaattgtttcataatttcagacacttccactgaaatggaccgtgcctttgttggcctttcctcgcctttctctctcgtctctgtcgctgtctgctcctcttctgtttgggcggtctctgacgaaggctccgtttgggcttctcacagtttacattcggatcattcatctccatccgaaatcgatccaaacgatggaccaattgaaatgacttggattaaaattgaaggtcctacgcccgggaaggaagctgatctacaagtgggctgttcagttttattggctttcatgcacatgaattcagattcgagtttcgccctcaggaaattccctttggttgttctccaaatcgtctgggattggctggtttcgtaccgacctatcggagcacaatcggatgggtcggcgatggacgacttcgaaggtgggcaatcactggtgacaggggttcatggcacaccctccctcagaccattcaaagtatttacatcgacgaattggcggtgagcgatgtttccgtgtgggcacttgccaatgggacgggccaactccaccggcttttcccttttggctggcagccgatggatgttcgtcttaaggcgctttctgtcgatgccttcgagggtcgtctttgggcgttggacaacgaattccgaatcgtccgtcatgaagtaggccataccactccatgttaattaccttacgtgtaaaaactgttgttttttaaaatttacccaacaaatttcaatgtgataaaagaacggcactgcaataaagggaatcgagcaagttctggcttcaatttcgtatacaaatgttagtttggcgaaaagaattaaggcacattttaaaatggaaggtgaaggggaaaaatggatagatatattaactaaaaggaggaaaaacaatcgaatctggccgtggttcttcttcgtcaccctttggtcacttgatggcattggcattgcccagggaactcctcctgtacactaactgtcggtggctgttcaacgtgtccgagtcaccctcctctccctttacttccacgaccgttttcccagcatttccttcactgcaatttgatggaattgcattattttgggatttatcaaccaaaggctcttcaatgctgtacatttgatgtactaaataatttaaaatatgacaagaagcgtcattttgtaccaactttgtctcatttgtatgccgtacggtggtggcaattcactgggcattggtggcactggcggagggacgcccaattcgcgccggaagggctgccgtttttggctttcgtggtaattaggcggcaacatcgcaacaacagctccgctcgccttattattgggaagggtttgtttggtgccattcgtttaccatgggatgctgctgctccgcacgctctctccgggcatcgatggaatggtcgcggatcagtcggcggcatccgccttcgccacgtcggttgggcggtcccaacctggtcagcaacggctttcccactgctgcaaccgctaaaaggctacagtactcgaaaagaaagcaaaagacgggaaacgctgcctccgccgttcgaaattccaatgtcctccatcgtctgctgttggtcaacaaaatccgactgctgttgctgcgcaacgcccgcgaattgttcatgggcgcagtctccaccaaacgaattcgtcccgacaaaagtgctgctgcacattttgtcgccgccagtcacacgacgacgtgaagactcggagtattggtccagaaaaacgttattaactggtgagtggttgacagcggtagcactcacaaaataccgtctaaattttcgattttgcaatgataagatttttcaaaattttccggagggggaacgactactctactttttggtggacgaactggtggaagaagtggtgctcaatgacggttgacgttgctgctgttgttggggtgtcactgcgttcccatcgtcgtcggtcggagtcgagacaacatttgtcggatgttgcaacagttcttctgaggaaggggacaaatccaccaacattgttggctgatgagacggatggtcggtggaggaggaggaaagtgacggatgttgggaagggggggcaccggcgtggagctgttgttgttgcgggagttcagaagagggagtggtggcggaaattgattgctgctgattgtgagacagcgcaaagtcactgaaacaaaatgacactgacaccatgtgcaatgtcggatgccctggtgttgactgtgagactgacctcggcctggcgatgttcggcagttttggcccttccgcgcagctacttttctccgacgttttcatttgcgcccgtcgttccgccatcttccggcccaacccctccatcctggcaagcacatccaagccgcagccgtgtgacctatcctcataaagtgcagcaattcgtgcactggtgggtaattcggcggatgaacggtggcgaaggttttggtcgcgcatcgaagcgtaaggcgagttgcggtgttggtaaaggaggacagcgccaacacaacccctgtacggagaaacaacccccccagcgtccaaaaatgcgcctcccccgcccccttgaaatgggcaacaaactttgactgcccttgaaatg

SEQ ID NO: 1088 - DNA, 1500 bp, Heterodera glycines
cctccaaacggggccagcagatagaatttgttgctcaatagttgcttggttgcccttctgactgagtgtggtcaaatgatggagcaaaaagttggcggattccgtctttccggagccggacttaacaaaaaaaagcgataagtccataatatgaatttcgatttaatcaggaagaatgacattcaaatttctcctacaaatataaaatagtacttatttctaaggatgtgcttgaaaatcaataattcaatttcatccatggaatctacttgtatttaaatttttatgagctaataatgtatgcagcttgaagtttatttattttgtttgaagtttgtatttgtcagagattagcgccgtatagaaattttttacctctccagaaattacgaccacttgattttctttttgtttgatcagattatggtaggtgatgtcagcaatggcaaacactatttaaaataaaaaataatttaaattaaattttttaaaaaaatttcctatgtgtaccatgcggaggtaatatgcccaaacgtcgactctgacaatacagacgcgaatattttggattataaatagggaaaaagctgaacgggttgacagcaaccaaaattgggccaatgtaagtgtatattttacctataattatatttaaaaaataaattattgttaaaaaaaattaattataaataacatttaaatccaccagcattaattaattaccattattaaaacgatcacgcaaattctccagcaatgtctgctcagtgagttcaggcagcacacaaaggtccgcatattcacggtccttaatttaaaataaagtttaattttttttttcctttctttttacttgtggttgggcaagaaatttggcgagaaacctgaaatattcgtgatttattaatagaaaaaattcatataaattgtaattaaattaaatatgctttttaatatattaaaaataattaactttattgccctttaaaagcagtgtttatttgaaaaaagccaaaaacgtacgtgtcgatggccgatgccgtcgccattacaaccatggattggtccaccgagtggcgcttcttacttttcagaacgagccgattgcgcggcacggacgggtccgcgttggcgtcaacgtccgcagaaccgcgaggccacatcgtctgcacaatcaccgggtactctgttgagtctaaatgccatatacaataataatttggaataatttagtattaatttttccgattcacgggatttgcttttgagggggattaatcaaaacgaggtcagattatggcagggatcctatgccatggattatgggttgatacttttttgtttatccctctttagtttacaataccaaaaatgaatattgcccttttggtaggaatgattgataccgaattcttttttactcaatatcgacgatttatgacttctaacttctattctcgataccgtactgatgaccagaaaaaatttgcggtgtcgtgc

SEQ ID NO: 1089 - DNA, 1712 bp, Heterodera glycines
aaaagctaaaggcgtatgtgcgttcaacggtttttgctagctgcttctcctctttccagcaagcagatggagtgttgttactagagctttccccattgatagtgggtgatggggcggggggaggaaagcactcgtccgatcgatcttgatcaaccccattcattcttttctgcctaccctgcccaagtcgtaggctgctttttcaagagcgaagcggtgaaaaaaatgcggaaatttcaacgtgaatagagagagccatctactcaatcagcaaagtgaagggggcgcggggttccccgcttcttccaattgatatgggagggggggggggagggacaactaaaatcgaacacagattttttgttgtttttataatgacactacgggttgaaagtgaagccctggatttagattcgaagccaggttcgaaacaaagccaaaaaatttatgagggcatcaataaataaaaatttttgaaggtttttaaactataacccttcctgatcaaggtcgtggctctggatttaggcttaggtaattgcacattaagttcataaatataaaaaaacgcggatcttctaatatgaaatgttgcatcgttgccaacaccgaaagaatttaactccatcatcatttttaaccgttttagcacaaaaaatcagctgctgaacgtgaagcaatgatatggtttggaacagcgcctgcttctgttcttcctgatcacttgattagagcattcatttcctgtgttgatcgcattttctaaatctccccacccctcccagccattaatccatcacttttggcctcaaggaatgtgtggaaacctatttttagagaacttttgtttacacaaagttaaaattatcagaaaatgaaatggatttgtgtcaaattaaatttcaatttgtgagattttatgagaaaaaaaaaattattagtcattttcttcagaacaatggataaacaaatatgtaaatgttttattaataattgaaactcaatgataattcagaaatattttgtaaaaaaattcaattgtacaaattccattgtaccaaagtccattaaattaattaccgaagaaggttttcatttaaagatctaaaaattagtataaatacatttagtttacttcaaaaagtgattaaaattatatgtatacaacatttattaactacaaaaaatgcttaaaattatattcaattcgtttggcgttgaaaatttaaaaaaggttgaaaacttcgattttgaagctttgaaaaccctttaatttatgttcaatttatgtaatttaatccttcaattttatttgattaaattacatttataaaacgaggaacaaagtgcatttatttattattgtttaaaaatcgaattcttctttttgtgtcgagagttgcgctgttttcagtacaacaacagcaggagaggccttttgcaaatcaattaattaattacgcgtcgttatttgtgtgctcataatattatttcaccccaaaaattgtcgtttttctgataagaaatatttgtctgagtccatccatctcattcaatggtttcataagtataaagtacaaattacctcatttttatgtttttatgtagtcaattaggaattatacaaattaccttctaaatgtgaaattatctcggctctaatgcactttatgagtccaatcgacttttatgagtccaatcgacctttatga

SEQ ID NO: 1090 - DNA, 11924 bp, Heterodera glycines
aatgatttggagaatttttgcgattggcaaaatgtttgtcgattggtggaaccatcgtggcgcgtattttgtggccaagccacacatgcgtacggcactgttggaccggccagaatggaagcacaaatttatcaaattaaaagtgaattttttaaatatttattttgttattcccaatgacataatgttaatcaacagaaaggttaaatttcaaaaaattgattagaaaatttaaagaaatgtctctacgaatttttttaccacctcgaccccagccagtaggatgattttttttgtgaaaaatttcaattttagggatttatttttataaattttttcaagtcgatttttaggggtacaatttcaaaaaagtttcagctcaggccttaagggtgtttttttgtatttaataccgattacgacgaatttttgtaattaaattctccgtaattacggttacgggttttaataattgaaaaaatagttacgtcaagcactaatttgcaaactcttgaaaactccttcccgactccaaatcgttcggtaatcttacaaaaatcaatctgtccgatccgaggcaattttttaaaattatgtatacaaattatattttttaattgtagcacattcaactacatttcgttgaaatggtggaaggcggtgcgcatgagtcaaagccggtgatgcttttcctgcatggctttcccgagttttggtactcctggcgctttcaaatgcgacatttctgtgccaaatataggtactaaaaatttaggccaaaaatctcaaattttccgatcagcctattttgaatttaaaaatttcaatttttttagagtgatcgctgtcgatctgcgtggctacaacgactcagacaagcccatcggcatcgaggaatatgggctggaactgttgtcagctgacataatggagctgatcgaacggcttggcaaacaagtggtgctggtgggccatgattggggtggcgtgatcgcatggaacatctccatggaggtgggctgtactgtattaattgaaaactgtaactgggattttatgattgactttgattatcggagatagaaattatatgcaaataaatctcacaaaatcgaaaaactgattgtcttattcattttttagttagtcagaattttaaaactggaaagtttcacataaaaattttttcgtaaatttttaaatttttacaaaaaatgcaattttttaaagcgtttattaacatatgatttccagctctagcgaaccaggatagaaattgaagtttgatccaaatttgattggaaaaatctccttggtactcctaggctcggtgcgtcgagctaaccaccctagttttaatttgttcaaacgctttcaaaaatttgagtgatcgatcaattatcctttactgatcatcccatttggccttagcgccccgaactgctccagcgacttgttgtgatgaatgcgccacatccaaaggccgcaaccaaactgatccgtacacgcagctcacaactgcttaaatcatggcaagagcttttccaatttaaattttaaattcgaaaatgtgccgtgccgtccttttcaggtacattttcttcttccaatgcccttggatacccgaaatttttctgtgggcacgcgattatggctttgttgagacgtgctttttgggcaaacccatgggcttggttcatcgcgagaatttcacggcagaagatcttgaagcatggaagcatgtgttctcgaagccaagtaaaaaatatgcaaattttaaaccaaaaagttttttttttgccatttttaagattcactcactcctcctcttaattattaccgtgcctcaatgcgcgctgtctatcggagacaattctcagcggccgttcatcaggtgaaatgtttcagttttgaaaaaattaataaattaatttataaattagttttcaaaatttaaatactattttttatattcatttttcttgaaaaaaaaaccttttttaatttttgtattgatacaaaatatttcgaaaaccatgatggctaatttcatcaggtgtcacataaaattttgataaacataacggcataattgatttacatctgacaatgaggcatttttaggttttccaataatattttaaaatatttttagccaaaaacattgatcatctggggacagcaggacgctgctttggacctggaaggggccgaactgtcggcacgactgtgccgtgacgtcaaacttgaactgatcccggacgcgtcccattgggtgcaacaggacgtgcccgaacgtgtgaatgccgtcatggaagtgtggcttgctgattaagccagccccaaacattgactatatatttattaatgctaattatgtagtaaattatgctaatgcaatttaattatcgtcggacaatcaaatgattttagtcatttaggaaaaatactgtgaaaatcaaaatttattttattttattataaaattttgcacttttcttcggcagtttcattatccccaaaaattgaaggtcaacattttccttcctaatcattgaacaaaaaaattgggtcgaccttgacaaattatcgcaaaaactgggttacacaattgttaggtttattcgcccgtttgcggacatatcaactgatttattcaataaattctttttaattttttttataatttaaatttataaatttaattgaatttaaagaatgaaaatggatttccatttaccctgtgtcatcgtccatctcattctttgcgtttttgtgcttcctttttcatatagtcatcaacaacaatcaattggagataatcaagcagaaaaaactcttgagaatgcacttgggtaaacaaattcgattcaaattagtgttatacacagggttcgtagatgaaaattttcaaaagcctcatttggcaagcaaaaaagcctcattttgggtcaaaaagcctcattttcacaaatttattcaaaacacgtttaaaatgttcaaatgtgatatttttattgtccatgatcaattgcaattttttcttagaactaagcattttgtgaaattctgagcatgaaaaatcgaagttgatttttgcggcgctttttccaatttttttggggaacaggggggtccggcggtgcctatcggcaccaccaggaaaatttttgtaatttttaatgtgatttgtttaacagaatttgcccacaaaaatggccaaattttgcaattttatgcaaaaattttaagaaaatagaggatttttagggtccggcggtgccgatagggccgccgggggaaaaattgagaattttgaccatatttttagcagattttcattaaaaaattttttattttgtggttttttggaaaatttaacaaaaaaccacaaaaagcctcaaaatttctgaaaaaaccacaaaaagcctcaaagcctcatttcgaaaatttagcctcattgacctatctaaaaaccacaaaatgaggctaaagcctcagatctacgaaccctggttatacatatttaaaaataaaattattgataaaaattcttttgtaaatttgctaacgaaatcccatatcggtagatagtgggagatgttggttctattgcaatttaatgagtccaatcaatacaaaatctcagcgtttagacaattgccaaaaaagcatccaataaaaattgactggactcataaagatcgaatggactcataaaatgcaatataaccgtgatatgttaggataaacaaactttaaattacaattctaactagggttcggaccccgtgggcgggggtggcttttcgcgggggcgcgggatggcgggggtcagagtcgcgggggcggtggccgggtcacgacaattccgcccccgcagggatggggcgggggtttgatttgaattagctccaaaaaatttcaattccttttggcataaattgcacagattttgtctaaagaatgaccaaatttattgatttatgctaattttttaagaaaaaataggttttttggggggccggtggtgccgataggcgccgccgggggaaatttttttatgaattttgttagaaattagccaaatttttcagaaatttcattcttttgtatgaaaatacgctctaaaatcagaacatttcctagaaataagaacataaagaaaccctgcattaatcagataaaaataaattcaaatgaaaacgtcaaccggtgtcgaactcctaacaagaaatactgttagtgttgaagcactaaccactaaaacacaaatatattggaaattaacagcaaatatactttatttcataaaaaatttgtcaaagatggttaaaaattcaaatttgtataaattttttgccttttatcccacgatatgcaattcttagggggtgtattttcacccccgtgcccccgcgggggcgaaggtcgcgggggcgggggtcagagtcgcgggggcgggggttaggccaaaaaacttgtcctgcccccgtcggggacgggggtgacggggtccggaccctattctaaactaatgattacgttaaaaaaatcgtgggataactatttacataaaacttactaaattaaatctagtaatactgctgctaatcagccacgaaaacgaccaacaccgccgagttcgcctcctcgtgcatttgtggacgagtttgaaaaacggactgacaatggaccaagagcggaaaatgccgaaaatcaaccaaatcttttgaatttgaatcgtcatgagttcaaccagcttgacgaagttggcgcaacaacatttgaaccgttgatcagcagactgatcaactcggcccgttttgatttgccacaacaacttcaccaaaactcttccgctgctacagctaataatattagcatggtgttgcccattgcgcaggaaatgatgttcgaatttgtgccacactttgaacgggatttttacgagctgatggtgccccaggggtacaacgaggtgggatttgacaaatacgatttcaaattattgaaaaataaattaaattaatatcattttgacggaaacaaaaaaatcgagacggatgagaatcccgcttttatcccgttctcgtaaaaacccaatcccggcaaaaaagacgggaaacgagaacggcattcccggtttttcaagggaataccgttccagccggtctaattttctgcaatttctaatttaaaagaatgtaggaatcagaaaaaagagagtccaattactgatccaaaatgttcgatttttgtttcgaactaattaacaatgaatttatttccccataggctaccaaactgatcgctgttgtgtcattttttgacggacctttcacagtgtcaccacaatttgaagtggtcgaggacaaaaacaattggttcagtattggccacattattttaagccaggtaataagcactcaaaaaatttggataaaatttgtcaataagtgaatttttaaatttaaggaattaaattacaccctcagcgaagttcaaattctacttaaacctggaagcattgtgcagtgggaacagaatgagaatggtgactacaattttgagctacaggtagaagagtctcggtcatatacaatatttgtgtaaaaatttttttttaggcttcacatggccacataaaatttacatcgaaattacgcgcaaaggtgctgaagggtatgcgcgaaattacatcaatgtggacggaagaagctgaactgacaaaacctactgtaacgacactggttacggtaagtataaaaccaacaggaggaatggaagatactgtattctctaaaattgttcaaatcaatttacttactatgcgcttttttgtttaatgcatgcttttcaggaacccactaccgtatcatcggattcacaaccatttactgtatcgtttgacgattttactgatgagaaaagcgatagcagcagcagctacaatgaaactactgcttcctcttctgatgatgagccggctcaaatcatattggatttggatcacaatttgtacaatataaatactggttcatcaacagaaccaacaaaaacaattgaatcaaaagattccaaggatgaagcactgtttatgcttgatccaatcgagattgagctgaacaacagtttaaacagcattttgtcagcgtccagagagatcaaatggacaagaaggagggaagtgatgatgaaaatgaggagaaggaagtgaccaagacatcagtgaggacaaattttgtacagaatgaaatgggggaagatgaagcggaaaatgtggggatggaagggaaaaaagcggaggaagagaacaagaaaaaagaagagaggcaaaaagataaaggaaaggaagaagaagaagaggtagagaatgtgggaagagagcaggaaaaagaagaggaaggcaaagcggaaaagaaggacgaggaagtgggaaaagaagaaaagaatgggcaagagaagaaggaagaaacgaagagggaggaggaaaaggaagaaaaggcggaggccaaaaaagaagaaaatgaaaataaagaggaaaaagaaacaggcgaaaataaggaagagaaaaagcatcatcttcttgatgtgaacgactacattaaagccattcaaattgaactcgatgcacaattaatgggccaagacaatgacacaatttggcaaattgccgttccattcgcttcattgccttctttggcccataatccagttcccaatttggccatatcaattcctgaaagcaaaagccaacctattagccatgacgaaatggattatcttgtacggcttgaacttcattcatccaacgacactgtgttggacatgcgtcctcatcacattggaccaggagacagtgcacaattatggcttaacgaccaagaaaaagtggcaaatgagccactcgatttcacagtaagtaaaatatatctatcaccataatagggatatataaattattatggaattgggtatttggaagtgaattatctcggttgagtcattagtctcactcagtttgaaactactaaaagttgtttaggtttttgcgagtctcgaagactttggattttcaattcatattttaacatttaaattaaattttaaaataatattaaattagagttggaaagaaattaattcattttaaaaatataagaatatttccttttttacagttatttgcttccgttgttgattggaatgggcatcaaatcagtcaaccaatgagcatttttaaaggcaaatttgttgttgaggacccacccaagggaccaccaccacaaattcatcatcctgaagctttaacgggctatgaatttgtgattgatgaaaatgcaactgatgggacagaaattggacgcataaaattggaaaattccgatactaataatgcggatgaacatgccgaatttgagctgttcggccacggatcacatttgtatggacaaaaaacaaaatttaaaaaatcccgaaaatttccaagattcaaaattgactcgggtggcataatgaggctttactgtggtgccgaaaatggatggaaatctggcaatggtactcatcaatgcttggaccacagcatggtacaagtataccatctaattgtgaccgctatgcgcaaaaatggaggcattaaaattcaaaaagttaaaagttaagaaaataattcagggttccgatcattgccggaggcagtaactgttcgggtacgggacgtaaatgacaatccgccagaattgaaattgttctccgatgaaattgttgttgtgaatggacagttgagaggtgatgccccgtttatgatcggcatcagtgacaaagacaggcaagaaatggtcaaaaatcgaatttttaaagccctgatcagctgggcaagcccttcttcgatcagttatcccaaatcaaaaatcatgatatggtttaaagtgtcaggtcaatattttggtatagaaaaagcggattttgttttttaggttaggtcaaacacttaatttctaaaacggtctaaaatttttgtttgccttataatgaatcacatttggatgatcagaagatgatccacatattgatcactgatctgtcaacatttataaacagtttaaataaaatcacatacgatgatcaaatgttctacgtgttgatcactgatctgaaaaaaactaattgatttattattgtaaataaatttaacaaaatttaatttcagtgcacctgaaaaccgtttcaatgccctttcattggctggaaatttgtcaattttctttaaattggaacaatttgatgaaataaatggacttttcggcgtcatattaaaagacggggtcaaattaacggaagagggcacccatgaactgttgttggttgttgtggacggaagtggtcaaagtgacacgaaaattgtaccagtacgggttacggtacacattattctgtctgtaaacggtaacatttgtgcattaattattttcagaataatttgaagctataccatttcaagaaccaattatataacaaatcgatgccagcctaccgtatccataccggtaatttctttggttttacagtaatttaattttttggtttatttgaaggggtgccaattgtgcagttgcagttaaagcacccaccgccgagtactgttacagtaaactatttgatcagtgatggaaaccctggctggttgtcggtggagccattcattggcaatgtttttggtgccaatgttccaaagtcattaaaatcttgagttcggcatttttgatcctttttttatttagggaaggtgtcccaccaggcaattacagtattcaagtggttgctgtagaccaggaaaaacgacaggtaatgcatgaattttttttataggattatttcataattagcacttaattaagacgttttgaatataatgtgatcttaaaggttttggcggaatgtcaactgttgttggagctgacgggtgaaccagtcattgatgaacagctccaattcccatcgccatacgtctcgttaagcattgcccgattggacaacgatgatgaaaatgatgtcaattccaaaaaataataatttaaaatataaaaatgtgatttaagaaaatcgttgatttggtgccattcccagagggcgaatatctacggcacgctgagttcaattatggcgatttaagagcctgggatgaggctgaaaagccggcacaactgtcgaaggtgtccattcaaattggaaaattgattatttttttaatttaaaattttcagggagccttaactgtttttatgcccggaaatgggaccatccgtttggacatggcaaagttgcgcaatgtccgttcgcttcatctcaatttcacgataaaacccaatccaaattttattgccacaaatggaagcgaaagtatggaaagttttttagttttttttgaaaaaaaaatttatttagaaatcaacaatgtaactcttgtggccatcacacttcaatcggatgaaacaaaaacattggcattacaacgacagcgcgagaagccatgttttgccgctccatggacaaatgaatcggtgccaattcggcttcgaattaccgaagaattgccggtgaaccatcattaattactgtattttcacgggctacagtatttcttagatggggcaaataaaaaaacgaaattattatgaaaaataaaaaaataaacttaagattgaccatcccatcatcaaattgcctgcttacaacccaatgaacagcactgatcggctcaaaattttcatggatggtccttattcaaaattgttcaccattaatgatggtaaaatttaatgggaaaacaggcatggttaaggcaatgtttttctaaattaaattaatggcatttttaaatatttgaatttcattattaaaatagatttttattagaattattggatttccatatcatcccaagccttgaaaaatcaaattttcagatggtgtcattgctgtgaaagctcgacttgactttgaacaacttttactggatgatcatctaattgaaatcctattgcttgctacgtcaatgaaatcgccaccgcaaagcacgacagctcttgtacagattgaactgctcgatgttgatgacatggcaccggtcattcaactggtcaatggcatgctaaaagagccaaacaggtggtgaattggagcaaaatattttctggaaaaattgaacatcaattttactgggataattggattcttacagagaaaaatcgtcctgatttttttggagtagttttatgactcagaaattccgtaaaaaaaaaattaaaacggaaatatttgagaataaaagcattaaaaaaatactttaatgaataaaacacaaatttataatagaaatttgatcaattgagcttgaacattcaactgtaattaaataaatcgattaaatacaaaatttaattatttaaaaaattagagtgctagaggatgaccaaaatgctttgatcattgtggacatagaggaaaacagtggccatggcaagcttgaacttatgctgttgaatgtttctgatgttgattcgaaaaagcatcaatgtgaactgatcggaggcgaagggaaatttgcaatcgagaaaaaagtcaaattaataattaattaattgtaattaattaacaattaattttgttttataaataattagaatgcggcggagaatcagtggagtgtgaatgcaaaattgagtgaattggatcgcgagttacaagaccattatgcactggtgttcaggtgcaatgatgaaggtggtaacaacggcgaaattccggtagaattttaaaattaatttttaatcataatatttatttcacccaatttcgaatataattattattatcatgcttttgccatatttaataatttgtcctaatcatacatatttttggaaaatattttcagatccaattgaatgtgttggacaaaaatgacaatcgaccagtgatcacgtgggatcggcaggacacgcaaatccgcctgctggataatatgccggctggcagtgcggtgggacgctttttcgcccgggacaaagacgcgggggacaatggtcgcgttgaatttagtcttggacagcgacagcagccggctgccacgaaatgtgagatttgtaaatttattccattgtatttgttccgatgaccccgatggaattcgtcgcccttggattcaagggtgtcctttaaaataagtatcgaaatccaatggtatctatcctctccgtccctttttgacagaaatttttaagccctaaaaagttggatatgacaaatacccgagatccgagagtttcggatcatcaatcatgaatacaactgtcataactcaaatctgaatttaaatttcccagcagaacagcttttccaaatctgctggaaattaaatagtagggttcggacaccgtgggcgggggtggcttttcgcgggggctgcaaatttattgatttatgctaattttttaagaaaaaataggttttttggggggccggtggtaccgataggcgccgccgggggaaatttttttatgaattttgttagaaattagccaaatttttcagaaatttcattcttttggatgaaaatacgccctaaaatcagaacatttcttagaaataagaacataaagaaaccctgcattaatcagataaaaataaattcaaatgaaaacgtcaaccggtgtcgaactcctaacagaaatactgttagtgttgaacactagccactaaaaccaaatatattggaaattaacagcaaatatactttatttcataaaaaatttgtcaaaaatggttaaaaattcaatttggataaattttttgccttttatccccccaatatgaaattcttaaggggtggattttccccccccgggcccccggggggg

SEQ ID NO: 1091 - DNA, 9113 bp, Heterodera glycines
agaaaattcaaaccggggggatcgacccttcccctatttttacatgatttttaagagtcatgcccaactcatccatagcatgatgcggtcttagtcgtggcattttccattgtgcgatatgcttgtggcattttttgtgcgtggatgagttgggcatggatgaacccgatttataacaatatttgttcgttgaggggaccattctattatatctgatgcgagaagtacctgctcctctcgtccattttcttgagttctttgtggaagtatttcgtcttgacgtcaaagtccaacaatttggggaagtgtgtgagaatagcaaaggcacttccctccaggttctgcgtgttcccacgtaaaatttgattgagcaccgatcgatgtttttctgtaaaaaataaaaacagtgtaattaaaatcaattggcagcgaaaattctaacccgcaaaagtgaacatttccttctggtatcggcccagctcatcctcgccggagttgccgcccgcagaagaggaggccaactgaggtgaagaaccgccagttggtgcagtttcagggagtgcagatggagccaattgagcagtttgcggtatcaccaacgaataagagaggaaaaacgcctcggcagctgaagggaattttatctatttatctggtgcgttatttaaaagattaccattttgaagacacaaaaaccgccatgttggaatcttcggccttctcgagaagtgacaggcaattgctcagctcctcccaaagtggcgccagctcatcgaccatgttccggaccagtgttgcctcgtcactttcctccttcgcgtgtgtgtcggcttgaggtttcgatgtcgttgcctgctgctgttcctcggctccctccttctcagtgtcgtccttcttttttgtgagttgcgctttcttccgctgttcctccacctttttcaactggttgcacaaatattgaaactgaaaaacaccaaagatatataaataagttgtgataagtgatgcaatcgtaacaaagaaaaactcaccgtttccagcgacttcagaaatttgccgggaacactttctcgaccagaaacctctttcaacacgtgcaacaagctttgttgtccttaacgaaccatataaaaatgcacaaggcaccaaacacaccgtctccagattcagcagcacggcgtatcaaaactaattgggcattcaattgattcccatggtttgtgaccgattcgtaaattgctcgcagaatagcagagctttctgttggaattgcccgaaacatctcagccaacattgaacgaccatcacgcaaggcttctccggcgcagctgctcattaaagcctaaagctattttttaaacaatatcgtgtataaacgataaacacacatttgtgaagctcttcaagcgcatcccaagccaaagcttcgattcatcggacagcttttcatgaaagtctgatggaactgcttgcgcaagctataataaaaatagaaaataaaccataaaaaacaaaacaaaaattaccgatgaaataatgcgaacaatccgatccgaaatcgcacgactctcctttgataaattggaatccaacagactgaaaagttgtgccaacggcgatttctcgatggagtcagcgatcatttcttgcatcattttggcgtcttctttgcgagagtcatcaattggtcgcccatttatactaaacatcaaattcaaataagaaaatagaatggattacacctgcgaattgtattccaaaaaagggaggccgttgctggaggagagtccgtcatcacagttggcgcacgaatttgtgtgggcataaaattccgcgcaaagctctgagccaaatgtgccaaattgtcgattacgcgttgagctgccattgttcgaatttgattgttgatgaaaactaaatgtagaaaaaccaatagctactgaaataaaacaggatgggtttacctgagtttgaagtgaccagaaggaccctttcgggccgattcaaaacattctgtaaacgaagctcattgatccatccaaattggaatttgccgccatccgcaggtgcctcgtaaccgtccactgatttgaacttgtccagcccatcgaacattgacagcagtgcccaaatggtgaaatcgcaagtgcccggatctatgcagatcagtttcaacaatttctgaaaccaaagggaatactaattgtaagcaatgaatgctgagtagtcttctacctgaagacgcacagtgtcgaacttctcctgatccaacaggaacaggacgagaagtgtgcttatggattccttgtccagtagcggcacagtgcgctcgtcaaacgaagtgtcggcttcggcagaagtgggaagaagatcaggatcgattttttttattttatgacgatgcaattcggctccttcgggcggggcgaattcggccaaaaatgcggggtccattcctataaattattttgcatgtaaattgataattccaagtaatttgagtgccttcgggaatctccattcccattattgctgcgacccgtcccactggtggcacatcggcatccacccgagccgtggtggtttccgttgcggcagttgcttcaggcatggcgctcacttcttgctgctgtgcttggatctgtgccctccgctgacgggccatctcctgctgtcgttgatggtcacgaacaacttcgtggaaaatgtcgtcgggtagcgcagccaaaaatgcggggtccattcctataaattattttgcatgtaaattgataattccaagtaatttgagtgccttcgggaatctccattccttccactggtggcccatcggcatccactcgagcagtggtattgtccgcctgactgatctgctgctgaagtaaatgatctctgataacctataaaggtaaggaatcaaaaatgcatgtgattttcaaatttgcctcttgtctcatatcttcgggtagagcagccaaaaatgccgggtcgactccttcgggcacggtggcatcgttgggttgctgtgcattggtgttggaaacagcagtagtcatttgacccgcattgtcggaagcttcctgtgatgccaaatttgtcaggtcggcttcttcggacacggcggcttcattaggctgtggttgctgttgtgtattctgatcggaatcagtccctcgctccgaattttcaatggtttccgttacggctgttgcttcaggcatggcgctcagttcagtggtgagatgtgcagagacaatggcgcccatgacgaacatcgtttgcccttccacggttcgacaccattccgccattctgtcgacgaagcagggaagcgagcgatcttcggtcgatgactcacgaggcgcaaccggaccatacccagcctaaaaccaaagcaaatattagttgaggaacgtaacgagaaaggaagcaaaataccaaggatgagaagagttgattcaaagccgtgccgttttgaagaacaccaacttgaccggtgttaaatgcagccaaacgctcaatgtccaagaaattgcgcgccccagcacgaattcgaagaacagcaccgcggacattgttcggagcaagatgagcaaacacctgtgaatattttcaaattaatattcatcgttccttttctgcacctgttgtggtcgtatggttaaagcgttcgtatcaatattcagattgatccgccgtcgaatgtcgtgcatctgttgggcgagggcattaaagtccgtcacgtagtcaagcagagtgtcctaaacaaattattgcatttaagtgaacacaacagacatgacatacgtcaaaatcggccaactccccgcctccctcaacttcggtctcgtcttcttcgtcctcctcgccatcgtcgtcgtcatccatctcctcgaagtcatcatcagcgaccaagtgcgattgcagaacctgctcattggcgtcggctgcctcggaaatgtggtcgtcctccattgcgccctcgtgcaccgctggtctttgctgcgtcaattcttcaccggtgtccatgtcttcctcttccgagtcatgaggcgactcatcttcactctcccctccctcctcgttctcttcttgagtggtgtccaacatactgtcgataatatctcctcgcaagtgcccgggttcgcccatcgattcgtccaattgttccacgtctccatgttcgttaggaattgccacatgattttcttggtgcgcgttttggtcttctcggggagtcgaagcaatgggtgggtcaatgttggctgccggtcgacccatctcctcaaaggtagcacggcttagagtcaaatcatcgtcgtcgtaatattgaaatgagcgcgggtcataagagaaggatggcaacaaataagaacgtgcgcccattgctccgaattctgcgccgtttttggtcatcattccttcgagcagcttcagcaatgtgttcacagtgtcgatacccggcttctcgtgtaactaaaagcgatttttaacattcagatcaacaaaacattgatttaaagaaaactcaccggaattttccaaatgcctctgacaaaaacatttgccaagttcttcttgtgaatgcttttaacaataaacatgccctgctttgcattgtgttgattgttcacctgttcaaaaatattccatctcttttctttaccatttaattacgcgcacctgcaaacactccctcaaatgcattgtcagctttgccaaaatggtcactttgtccgcaaatttcacatatgcaccgttgttgctctcatcggaagttacaaccgtacagtcaaagtcgccacattcgatgagaagtgatttgatgttgcccacgacatgatcggtgatgcgctgacttgacgaatttgagacgagctcgctgaccacggttttggccaagtgggcggtgtcggacaaatcgttgacgggagcggagaggaggaaacgttcgatgatccagcgaagaaccgatttttcgcccagggattgctcgatgaaaattggaacagccacctttggataactgcgaagcacttcggcaattaatttgagcaggtttggaggctgcataagacgagtgtttttgtctgcgtccgcaaatgtgtcaaattgcgtcaactccgtcacgatttgactcagaagctaaaatggtgtaaagatgacgattacatattgattaggaatgaaaacaaccgcttgaagaaattggtctgaagccgccgctgcatttccattgcctttgacgtcagcgcgctgttctttgaccagaatttcgttttgtttgatgaccatgcatttcttcgccgcgtccatgtaaagtgagggcgaccgcaccgccaaagggaccaacatgcgcacaactctctgaaagcgagtgaattacattacagactttgaatgaaaattaacaaaccttaacatccttctgataacgcttcgttctcattgcatgtcggcgcgaagtgatttcctgcatcgaaattggctggccattgcaagttgcggtgatcatttgttcgaaggctgactgaagaagtgcgacgtccgagtcgatgcactggcgaagaatgagcgttgccaatgtgttcagtgttggaggcgttgtcgtgccatttgtcaccatttgtgccgaaattggattgcgcttcatctccaacagtgtcttcactccatcccccttaaaaagggaatgtttaaaatgaaaatacattagatagacttacattcagaaactcatgcgacatcccatccaatgaaacgaggcgaagcaacaatgtcagcgcgttgtgtgccaattcgttgtccaacggttgagtgctgctcgactttaccagtttcaggatgcctttgacaagcagtcggtgtcgttcagtgcccttcctaagttcactttccagcttgacaagcttctccatattgaagtctccgcgcagatttgcttttgcgtagattggcactgatgagtgaagcggatggaagccctgctgttgctggtcaggcaacaaacgcttggtcatctcgttcaggtcgatgaagtaaacgcgctgggcaaccgtcagacgaacagaagtcttcttctccctgacagctttgttcagctgcgcaaccgacagcggagtgaattcgcgccactcgcccacgcccgtgtaatggtcatccgctgtccagtagaaccactaaaacttggtttatgtgctgcactttccaaaaacaaaagacgcgacctgaaattgagttccgtccaatgcttcctgtaagagatcctgtcgtatgtctgcactccgctcctgctcgtacatgttgaagaacagcaacatcggcgtcagcaatttcctcgtcaatttttcgcaacaattgccattgatacgcgcttcgaagagattaaacattcgatcatatgtcgaacactccggagaagccataggtaacattgaaatgatctgcaaaaatatgattcactgatcaactgactaatctttagttttttatatctgataaaagctctaattcatgcaataactattattttttgataaaataatgcttcaaattgttattgggtaaaaatgcgcggtttacgccaaactttgaccgatttgaacgtatatttttgaaaaaaaatttcaactttttgttcgaattcgggtccggggttcggaattgggcaaatccgagttcggattcgtgatcagcaccctcgaaaacccctgtatacctatttttagctcaaaataaaaaagttaaatcgaaagtagaaaagctcgagttttcaattttttttgttagagttcggtaggaattggtcaaaattagtgttagagatcagcgatcccaaacccactatgactaaaaaattgcatatttgtaacccaaaagggtcctccccttttgacttttcaggggtcttaggccctaatacggaaaagtaccccaatttttggtatcattttaatgccgctttctctacataaatgataaaaaagaataaggtgaaagaagcttctttcaaagttgggtttttatagtcgagaagtgaaagaatcaaagaatccaattttctagagtgtagaggacagagtataactatctcattgtagtgttttatttctttatctttgttagtagagaaaaactgaagttacttcgtgatgtttaatttttttcccaatgttaaatctcgtggtgagtcgaaggaaaaaaagtgcaaaatttgctataaaacaattatatttttgtattcaccgatcttcagagtaagtggctaatgcccttctgtagatattttattgactgaataaaattaattttttaaaaattaacaatgtgttaaagacatgatatttaataacacatagaaaattttcattcgcttattttataaaatcttggcttcaaaatctttttttatctggcaagaacagtttcaatttaacacacagatattttccggagtgagagaaattgacacagatggatggactgtttttcgcatccattgcttttctaacaacagtgttttctgtgattggaatgtgagttcatttgtttaacagtttgacactgaattgcataaatgttcagtgccattgtgaagttgtggttagatgaaagaaattctcgcaaaagcaaagagactttggtggcaatggacgacagtgcaactgatggtttatcagctgacaattttcatttattatgacttatttacaatgtttttaggtaacatgcaaaacgaagtgatggacagtgatgaggacgaacaattgacagggaatggcgccgctgaggaagcgatgttggatcaaggcgagtggggtcatcaatcaactgaggaaaagtgcatttactacagcactattaatattcttcgtagttggacctcttttttgtatcaaaaatgaccttaaatttgtcttttttttcatttttaaatacaaattatttagaagggacgacattttccgaaaaaagaatcggaaagaaaaaattggcgaagcttcaggcaaaggcagaagcgaaggcactgcgagaacaggtaaaagcactggtaagtcattttaaaggcaatgaatggttttcaggaacaaacggaaagagaagagaggaaacaaagagaggaagaaattagaaaagaggaggagaaaaagcgacaattggaggaggaggaaaagaggaaacgggcagaaaagaggagactcgagaaggaggaaaaggaccgccgggagatggaggagtatttgaaagtgagggacggggcaaaaagggaaaagtgccaggctcttgcagagtttacccaatcttaaataatttaaatattcaaaaaaatttaacacgacaatagaagtccatttcacaccttgcatttttgaaaatttctaaaaaaaactcaaaaaatagtcagaacaaaaaagtgtaaacaattccaaaatatgtagaaaaagccgaattataaaaaatgcaaataaaattcccaactatcaaagcacatagaacccaaaaccggtttttaataaagaaaaataacaaacagtataattctatgttttctttcaaatgcttttgttgtttattacaaaatttttaaatatattattttgcagataaaaggtgcctttgaagtgcacgaacagggctttgactatgatgaaaatgaggacaatgccgacaaccttctcgagtcgtttgtcaattttgtgcgcaagaaaaaggtcattcgttgccttattggccttttttattgtcattctccgcaggttgtccacgtcgacgaattggcgtcaaactttaaaagtaaaccaactgacattgttgacagactgaagacactgctgcagcaaaagcgactcactgggctttttgacgacagaggtgtcctcggattccgtttatcccatcagctgtcccttcccttaaggactttttgtttctataacagaggaggaattgcttgacggtacgtccatgtctttttacttgttctcccattgaaaatttttacaatttggatgcaattactaacagattttgcctaacatacgacaaaattttgtgattttcatttagagaactaagtagaagagaatgaggggaactatgaaattttgaatatt

SEQ ID NO: 1092 - DNA, 1721 bp, Heterodera glycines
  unsure (1)..(1721): unsure at all n locations
ttaaatatanttattttgcagataaaaggtgcctttgaagtgcacgaacagggctttgactatgatgaaaatgaggacaatgccgacaaccttctcgagtcgtttgtcaattttgtgcgcaagaaaaaggtcatttgttgccttattggccttttttgtcattctccgcaggttgtccacgtcgacgaattggcgtcaaactttaaaagcaaaccaactgacattgttgacagactgaagacactgctgcagcaaaagcgactcactgggctttttgacgacagaggtgtcctcggattccgtttatcccatcagctgtcccttcccttaaggactttttgtttctataacagaggaggaattgcttgacggtacgtccatgtctttttacttgttctcccattgaaaatttttacaatttggatgcaattactaacagattttgcctaacatacgacaaaattttgtgatttcagttgagagaactaagtttcgagtgaggggaactatgaaattttgaatattttttagcagatattcaccaaaaaatcctattttatgtcaaatttagaaacttttttgaatccatttttaaattaaaggacaattgcggttccgcctaatttgaaaatttagaattgaaattcgttaatgaattttatttaaaaataaccaatttacgggtttatatgaattttaaaaatggtgatttggctagtacggtgtcgatatggcaccgccgggtgaaaagaaattaagttatttttaatagaaaaaaattcattttaagttgcgaagttcatcaaccaacgggggcgagtacaccttgcagaaatagttgaacaaagcaaaaatttaatttcattggagcctttgtgaattttttttttataaattttgatttttatttaattttatttttaactgtttaattcattataattatttatgtgctcttctaaattaatttatcgcaatacaagtttttcataaaacaaatggatattcattcggtgcaacaagccaaaaaagtggccgaacagctcgagcgggaaaagcgcattcgccgtcttccaatgtcggaaacaattaacgacttaattcggtgggactgagatcgaaaatgttattaaattcgctagttatgttactcatttgactactgaaattattttgttttttacaacattttgtgccctaataatgactttcgattgtttaatgtgcgttaatatttaggtacacccaggagatgcagaaagacgactgtaagtgttttgaagggattctaattacagacttggatggattaaactttgatttattcatccctccgaatcatgcaaaaagtttgcggtttaacttctgtaaacaatcaaaaaaatttttaattctgtaacatataacggtatatgacgtccctcccccataaactcacccattcctatgcttgaatttcccagtatatgattttagtatagatttgttcaatggtttcccaaccgacaagttgaacccgtaccgtcccaagtcaaattttcaatgtctcgtcatctgacggattttttccatgtttgatgaaaagaatgatttgtcatgatgtgccccacaatattataattttcgtagttttttttatgctttcaacaatttcttttgaatcatgttttggataaaaacgaatgctgcttcttttatcagaatagtgctataacactttt

SEQ ID NO: 1093 - DNA, 3364 bp, Heterodera glycines
  unsure (1)..(3364): unsure at all n locations
tctctcacaaaatgaaaaaaaattagaacgaattaacatccaccgtgctcataatgataatctgntatttttcgtctttttccattgcattcgccgnccttttccctcttccgttcctcccttttccgatttctcatcactttcctcngcctttttcttcgttatttgtctgtttgtcgtcactccctgctgcgcttcgccgggtgcctttgttttcgagtcttttgctaagctgaaagtttcaacgattttgctttaattaatgtttgctcacctntccaccgttttttcgtcctttttctgtcccaacaaatggcatttcgcttttcctcaatcgtccgtcgtttttcctgatcgttgcccccttttccgccttcccatccgtctccattatttgtgccacnttcctctgtccccaattcgccgttcgttttcctccgtctcgcccttttcgctttttccaattgcttccgcgatgccttcactttgaatgttttgagcgtttttgccattgctttgtactttcccatgtttcgcgtcacaaaaaaatattttctttgaatgactttctcagcaagtgagtggttaagtaacggaacggaagtgattgaaaatgaagcaaataatggagaaaaacaaaaccaaatcgaaagatttatcaacaacaataaacgatcaggaaaggctaaatgttagccaattgaagtcagacttttctccacttgatcgagcacttcctttcggtaatcgtcaaaatcgccatcaatttggtagattttctaaatttcacaatgcgaaggtgtttcctcctccccgtccacctgatcctccacaacccacaaacgacagtctgtggctctgataagccgttcgtcgtgagttaccatcacaacaccgccactgaagtcttcaatgccttcagccaaagcttggatggattcgatgtccaagttgttggttggttcgtccttaaccaacagattattgttagatttgtttgcatattatggaagaaatttcgatttattcgattggtactacgaaaaacaacgaatatgcacaaaataattttattttgtgtgattgcaaaggcccgcaaccaaaaaaatggagtgggaacccgaagactttttaccattgttcatgaaaagaaaggaggtagacccccccccactttttaaatgtatgcctttgttaattttcaaaaattatataaactaaaaaaaattcctgaaattttgtaaattttattcaatgtaacaccttggttttcattataatttttcttaagattttttagaattttttttgtctctgcgactttttttggggttcaccgattctcacgttattatgtaaataaatcccgagaaactttaccagtatcagaatgtccggctgctttagggacagctcggccaatgccacccgcgatttttgaccgccggacaaatttttgatgtgcacagtgtgcgcgtgagaggcgaggccgaccattcccaaatttttcctcgcgctcttaaaaattgccaaaagcaatgcaacgaataatcagcagcacctgctggtcgatttggtatttgaccatcagatagtccatggcggactgttcttggttcagtgcctcgttggagtgctggtcgaaccagccgatgcgcagctgtcgatgcattgtttgctctccgtttctctgttttgtttttcggttgatttaaagtgttagaaacggcttttccgaccggtttcagtttcccgctgagcagcttaagcagcgtggatttgcccactccgttcggcccgacaattgcaatgcgcgaatccatgtcaacgccaaaatcgagttccctgaataaagtgctgcgctcatcatagccgaaagtgacatcttaaaagaattgggaattgacgctttagcaacaattgttgggcccaccatggagtccaaggatggggggcgacattttggttgtgtctgggaatttgaatttcacattgtactccttgatcttctgcaacagttccggcgggggtgcgtcgtctgtaagttttgctttttaaattcgtttccgaattcgctttgccttcgtctccgatggtggcggatgagccgcccttcttgcccctctgctgtttgctctgttttgtcgccattctctgcttcatttcctccgtcgcttgtttcccactctttcctccctttttcatcgctgtcaattgcttctgctgattttcaaatgccttcgcgtgttcctttagcttttggtcgtacattttcttgaaagacgctaaataaattaaattaaaataaaattgttttttttttccatacaataatttcctctatagtaaaacaatttctgttggtccaagtgaataatatcagtgcaaatgttgtccaaaaaagattggtcgtgcgaaacaacgagaagagtctttttccatccctgaaggtatctgacgaaggaaaaaacaattgaaaaagtcctacgaaagaatgttttatttttgttttgccataatcgaatggaattattacgtgtccaaccaaataacggcattcaaatcgaggtgattggtcggctcgtcaagaagtaaaagagtgggctcgagaaaaagggccctggccaaagagacgcgcattcgccaccgaaaacggagaacgcgttgagggaattgtgacgaattccctcccgccgccctccgtgcgcttaccccccggaaaagtcttccaccgccttttcctgcatttgtttgttaaagccaagtccggccaaaattcgccgtgccctcggctccgccgcctcagcgccgatgttcttcagttcgctggtcacttcttgcagtttctcccccgcggaaatgtctcccgcttccaattgaattatcaatgccttttcgcgctccaaaagttccgtccgcactttgtccgagcgaaggaccgtctcaatggccgatgttttgtcagcttcgatctctgaagtgggatgtttcatataagggggtgggggggaaggctcactcgtccaccctcgcgtcacagatcctccaccgacattatggtgtgtacactgttatgttttatgtgtaatattttttctatttgttcactactgcagctacggattatgtgatgtatgagctatttgttgggaaaaagccatctattgcaatagagattgcacaaattttatcgaatggcaactaccaaaagctgacaggtgactatattaattaaaaataaaaacgagttgaaaagcattttatttttttgcaggatggaacagacatactttttgtttttgaatgcctttggccattttatcaacaaattgtcactttccgaattacgtccactattgggcac

SEQ ID NO: 1094 - DNA, 3914 bp, Heterodera glycines
  unsure (1)..(3914): unsure at all n locations
ccttatttttggcagtggctttaggtactgacgaaacggtcatttccttattgttttaaaaacaatncggaaaattacaattttcaaaataaaaaacccattaaaaattcccccccccctcaatatgtgatgcctctttaacttaccctgttcacaatataaaatgtcaatgtttggcggaattgccaatttgcgggcagcgatgtgtttgagcagcgtcgtcttgcccattccattgggtccgaccagcccataacgccttccgattgcgatagtgagcgaggctttgttaaacagttgacggccatcagcagaaatgtcgaaattttcgaccttaaattgatgccaatgagagcattttgtcaatggacgttgcgcctgactttgatgtccaccgcggtttccatcagactcagctgagcatccgtcttggtttgctgggaaacggtgaactgctcgcccaagtcaaccccaccaattcctcaaagtcagtgcgtcagttccgctgctttcccaacactaacctcgccgtacttcttggacgctctctttttcgacggtgttgtggtgtttggagccaagcgcctgcaatcccttctcatattcggcctttttctgctgctttttcaagtcctttcgggatactttcttcgtttcttaaaaagttcatacttttggtgaattgtaaagccatggcaattttttccaagttaagacattcttacaaatggtttattacaaaacgaaccttcatttttgacctgctgaacttcttcagccgaaccattatttgacatttcgtttaatttcttctttttaaaaaaatgataaggaattgtgaaaatattcgaatagaggttaaaccatgcataatatttacgaattaatttaaatttatataaagtatgacgaattcacaaaatgccatccagagcgttttgccttctttctttgaacagctctttccatcgtccgtttcttatttctgcgttttgtgacaactaaatttaaacaaatgactttttccacatttgtaaatgtcgaaaaataattttagaatttgattggatctgtaatttataagcaatccgaaaagtccgtaaataagtttcaaaaaaaatatattatatattgcagccaaaaaatgaaagtagtaagggtcctcctgtgatttgatgaggcccactaaaataaaaaagtgtcttcgtttgtcttaccaattcatgggccaatgtgaaacgagtgccgggctgacattgagcctctccctcaaacttttcgtttgtttctctgtgatgttgccgcgtgtccctttttgcttcgctttgtgctgtctttcgtcctttttcgagttcttttcccgcccaaattggtccaaacatcgcccggtcgtgttttgtcgcgttcgttttgcctttgtcattcattttttccaaggaattgttcttgaaaaaaacaattaaaaataaaacgctgttaataacttttcgggatgtgtcagcgtccgatttgaatgacgaaggtcggaagcccggctcttcaattcggtttatctcagcttgccttgcaaatgaatcagctacatctgtaaaacatcaattcgtatttctatgctttttagctaaatccggtttttttacttttgcacaaatttttaatttttgtttgagaaatggacaaacgttgaatgcattttaaaccacaaatgtctcactgaccatttgaacttgacatttctcttttgcctgtgttttgtttcgtcgattccgcttcaattgcagcatttaatgacgcttttaagcggtttttgacgctattaacagatcgcataattttatcagagtcagttcttcttatatgagaagacttccttaaagaatggccaattcaatcgaaataaaacaaaaaaagactcaccgatctttgctatcacattcttcgccactaaattttattaccgccgaacgatggtgggaagttttagaactccgttcatgatggtttctttccagagacttccgtccactcattaaatattaaaatctggatacaatttgtcttggctatctaataatcagagtggagattttgttgtttattttattttaatttctttaaataattattttcattaaataaatatctcattttaaatttccttctaaaataatgaattataaattcatttaatatttcaaataggtatttaatttttgttgattttgtgaggaattttaataaattagagaattaaatattttgacattttgggtttttggaaatttcttaaaaatgcagtaaaagcgaaaaatacatacccctagaattgagataaccaatttttttttctttataagtataatttgcctaaagatttttctatatttcagttaaagttcaaaatttttttattaattttttaaaaagttcggggcaaagataattgagtataaatttgtcgaaattttttggttagaattttttgtaaaaattttgtttaaatttttaattacttataattagggatgatatttttaggtttttcactattttttcctgagctccccgtaattttcacctattttggcgttttgcccaaaatttgttaacaaaaatgcaataaaaacgaaaaatacacccctaagaatcgacccgaaaattttcaaaaacacacccctgatgagaaatgaaaaatttctcaaaaattcatcttcaaaatttatttatttattttcttgttagaatttttgatatatctcattaatcatttggcataatatctttgctttttgaaggaaattttcaattttacacccctaattttggaactttttggcacctattttcccatttttagcacctattttgggggtttttagaacctaaaacctacctattttggcagtttttagcacctaaaaatatcatccctacttataatagaggaggacacctaaagctatcgctcaagatctttaatttgacaaagtttaagctaagttatgatttattattcagcaaataaaattaaaatattaattaatttaattattattatcattgatacttttttaggctcgacctaacaccgacccttttacaaaaatttccttgccgaaaatcgtatgagctttatctcaaaaggcttgaaatatactcaatttgcaactgcaacagttaattttttgaggtcatttttttcgcattttatttcaattagaagtagagttcggaccccgcccccgtcacccccgcccccgcgactctgacccccgcaatgaatttttaaccatctttgacaaattttttatgaaataaagtaaattttgctgttaacttccaatatatttgtggtttagtggttagtgcttcaacactaaccgtatttcttgttaggagttcgataccggttgacgttttcatttgaatttatttttatctgattaatgcagggtttctttatgttcttatttctaagaaatgttctgattttagggcgtattttcatccaaaagaatgaaatttctgaaaaattttgctaatttctaacaaaattcataaaaaaaaattcccccggcggcgcctatcggcaccaccggcccccaaaaaacctattttttcttaaaaaaattagcataaatcaataaatttggtcattctttagacaaaatctgtgtaatttatgccaaaaggaattgaatcgaggcgatacatcgactaaaggaatgtggagccaacacatcattcataaaaattaatttgtttgtgagattttttggagctaattcaaatcaaacccccgaacccgtccccgcgggggcggaattatcgtgccaccgcccccgcgactctgacccccgcatcccccgcctccgcgaaaagccacccccgcccacggggtccgaaccctaatt

SEQ ID NO: 1095 - DNA, 2665 bp, Heterodera glycines
aaaggaagcggatgggcaaatattttgtcacaaatttcatggggtttttactaggtgggcggttcaatcccaaaggaatttggccatttcagcccccgggttttttaatttttcaaggaattgttgccgcaaaaaatttttttggattctttcattacaggccgagagctatatattttgaccattttagtctccggccatatggccgatatttaccaaatagaaacattttaatcatataaaaatagtgacaattaattaattaaataattgataaatagttgattagtcaagaagagacgaacaaaaagcgatcctcccccccccctcccccgcccgaaatgaaaaattaaaaatttttacaggaaaaattgggactttaaaattttttttttgtcgatttttcttaataaaatcattaaaattaaaaaaaaatttgcccggcggcacctatcggcaccgccggaccacgatttactcgattttaccttattttttaaaattttgactacaaaatggcaaaaattagtctttttttggctaaaaatggttacaattcctgtttttgctgtccggcgatgaacttttttaaataacactaaataaattttaccaaaaaaattcttcggattccccccccccgtaatttttttctggctattaaaatgttgaaataattatatacatatacataaatccgattataatgatcagactttcaaaaaattttcaaaaatcaacccataaattcaaaaagatgatttgatcagacacaaaattataaattatttgtaaaatttaaataaaaaatgaagaaactccatcaagaaaatcagttttttgatttttattaatcactatttaaaaaattttttctaaaattctgacaaaaattgatttttaaaaattacggattacggattgtggattacgggaaattacggggtttttggacccccgtaattacggattacggatttccgtaactgaaaaaatcgccgtaattacggattacggatttccataattgcaaatccagttgcgtgcagccctgatccccatcctgtttttgatattacgagttaaaattttgttttcaaattattttccagccctcaaatttcagcatcatcatcaacataatcagctgcagcacaggcaacaaagtcctgctggtacggtagtgccaccattgtcgctgccattgttccccgctgctgctgctggcggcagtggccaccgtttggcatcgttttcggcaccttccgtcttagtgggtgttggcatggcacacagcaaacaacaacagcagccgagtacgacaacaagcagtacaacaacggcaaatattgtccacacatatggaggaagcggcggatcagcttcaacttcatcaacagcggcaaacgatggcggcggcaattcgtcggcatttcttggtgatcacctaacaggaccggaaacatgatcagaaactaaaaaagccttttcggcctcccttattttctgtaaaatatgttgtcctgctgatccatagaattttaactcaaatccttttatattactgattagcaaataatccccatcacctctttcattgaaatgttcgaattttggttaggcaaccttgagaaaaaattgtcaaaaaccccaagataattttgggattgaatttttggagaaacaccaatatgttacacataaaattaaaattttgcacgttgaggcctaaagagcgagtttttacaaccatatatatataccatgaaaatttttataatttttttaccgtattcaggcaaattggtgacgcgcacccattcacttctgcttaacggcacttttgatgggatggccaacgaatttgagcgccaaatcaagcagttgatcaccggctacaaggcgtggatgtttgatcagctgttccagcagcaggaggacaacgaggaggacgaggacggcactgatcaaacgctggtaggattttctacgggggacaacaacggcactgccgccgacggcaccgggttggcaagcagtagcagcaacacaacgacggcaccagcggcgggtgcaattaggacaaccaatttgagggctaataggccatcatcatcatcattagtagctggtgccaatgccaaacgtgcccggatgatgttccagtgatacagcaattgtttttgaattggagcctttttaatatttaatttaaatacacaaaataattgtaactgaataattgttttgttttaaatatgtcggaaagaattaaatttaccataaaaatgcaaattaaaaatatcgaaaagggccaatttgataaatattcaaaacttacgttaacactaagtattttttaaagaacataaataattttcgatttttaaaatttatttatgcaaattttgtatattttggagtttataaaatctgccagatgcaatatattggcataattttttataaaaatccttccatccaattcaatttttcaaacttcaaaaaaaacccgatacttagggggctgtaattttcgttttattaactttttcttataaaaaattcacattcacgcattgcatatttttttgtttttatattttaattcatattttaaaatttatttgtttaaaacaatcattttaaatatttttagtatcat

SEQ ID NO: 1096 - DNA, 1254 bp, Heterodera glycines
ctgtagtgcgggctctctcaaagtgcctgggaggcagagagtttctcattgcactgatgaaaaagtgcaatagaagggtgtaaagggcgccctgtgtagctcagtggttagagcattccacggaaaggaagggacgtgggttcgaatcccaccgcaggctgatcttttacacctccgccatccaccaaattcctacatatcaattttttagtcaaatttaaatgtgttcacctttataccaagatggaaaatgaaaaagtgacagcactcaatttgtccaaacaaaatgtgcccccagggcatggaattattatttttttgatttggcataatcttacataaaagtaacaaaattttacattctggcatcgttcggatatcccagattttctgtattagtttgcaaaatttttaaataatcaaattcatcttaagttatggcagaaataatattattttcatacaactttttcgaaagttgacccaatttttcagaaatcggaattcagatccaaaaaatgttacaaaaagggatcagtgccatctatattttacattattggtttcaccagcttataagggcaaaaagcccaaaaaatgctttggcacaaattaatataataacgaacaaaaaaacattaaatgaaaaataatttgttttaaataatttgtttaaatattggtgaaactcaataaaatttttgcctaagaaaattaaacttcaaaaaataaccaaggccatttcggcgccgacttttcggcgccaagtaaaaaataaaaatttccacgaattttcattttttacatttttaattttcaaaaaaagaccaagttaaaaaaaggttcgcctcaattttaagtagagatcggaattctcaaaaatgccggaccggaccggactggtattttcaaaaacaaccggattccggatccaatctctcataatccggtcaatccggtaatctggtcaatcagattttcaaattgccggatccggaaccggattccggattggtaaaatttaaattgttaatttgggaaaaaaacccttaaaatttcatctattatatgtagaaaattggtgcaccagaaaatgtcgccatagaaaagacaatgcgccgaaaaaaatatataaaatttcaatttttcaaaaaaaatttaaaaaataattttaaagtttttttatttttgaaaacctatgcctaaatggaaaaataataaaaaaaatttttgcggcgccccttttttccaaaa

SEQ ID NO: 1097 - DNA, 4693 bp, Heterodera glycines
  unsure (1)..(4693): unsure at all n locations
gccggaccggaccggantgccatttcaaaaatgaccggattccggatcggtctctcataatccgatcaatccggtaatccggtcaatccagattttttccaaaatgcgctggggctttttatgccatttcatgatggcaccccttctcttgagaatctcgcatacatttcagacgagcaaaaccaaaaattaactatacgaaaaaaatgacgcgctcgctgattaaatgattcatgtcatataattagctgcccactaattgatcaattagggtcgctaatttgtttttgctcattcattcgtttcgtttctttgcgcccgcccccttttggccgtataaatttgtcgcgcatgtgctcacaattcattcattcattcattatcgcaccacacgttcattttccattcccatcaattcatcatttctcttcccatctttaattacctttaattacccccccccccttctgccgatttttctgatgggccgtttcaaaaatatggcccgaccaaatcttttcattattacactaaaaatattttggaaatttaacaatgaaaaagaagtgaattttgttttagggtttaggaaatttaaatgtcgtgggtacgggaatggtaactcggatttggggtaggggatatttggaaagctggaagaagtcagggcttgggatatttggaaaagccgggtttcaaggcaatggatattttgaaggattttgaggctggggatatttggaaaagcgtttttggggcggaaaacattcaaaaacgggctagtttcgagaatcgggatccctaacatttgttcacttttagctctataacacataaatttcataaacattcatcattgaaaatgggcgagaaatttgttggcaaatggaatttggagtcgtccgaaaactttgacgacttccttaaagaggtgagcgtgtacttgcgcgcgggcggggcaaggacggcccaggattatgacttggttgggagcggatatattccttcatccacgtttttctcgaaccaagaccgagactcttgagcatgggacaatcattttgggccaacgtcccgcagtccgcggaggactttccctacttgtggccaaatcgggtttagtccatgatcaaagggctaaattttgcacttttttgaaattttctgaagaggggctctgaacttataaccatcgtccatgattagagtgccaaattgccaaaaaaaaacaatttgccatacatttgccggcaatttttcttctttgcccacagattggtgtcagttatttgacgcgaaaggctggcgcatgcatcaagccggtgctcgagtttgaagtgaacgggaacaagtggaagatgacgtccacttccacattcatcaccatctcatgggagttcgagttgggccaggagaaggaggtgaagacggccgacggacgcattgtaaaggtgagggggagagagagaaagagagagagagagagaaggggggggggggagagagaaagtgaggcgcaacacaacgccaagcaaacggagatgcgcaattgggcaccaaggattgtcaaaattccgattcccgattgacatacagtagccacgggtaggctcgagattgggtggcttaattctcgatagccatcggcaacgaaagcaaatcgaggggagagactgaagctctcgagattggatttagttcaaaaattcggtctcgagcattttgaagctcttgcatttggagtaattccttgaaaaatgacaaatatcgcttaaatatgtgccaagttcgaaaaagtgataaaattcttgagttcggtgtcaagactttatggggggaggcatgtttgtcattcattgataagttttggggctctgtgccattaatttggaaaagtttgccgaagtctccatttttgtgcttttcagacaaccttcacctttgtggacggcaaactcattgagaaccagaagaagaccaaggtgaaaaattggaaaattgaaaacaaaattttgtcattttaattgggataattaggcccaaatgtaaaagtatgtctcgcacggaatttttaacggccagaaatttttaaatttcttaccctttttttggttgaagtaattttaattgtttatcattcgagagctcttcacagattgttttttggtttcaaaaatttaaaaatttttttttccaattaaaaggttgaagataaaatttcctaaaattttatggcctttttttaatgttttctgcttgaaatttttaaatttttcaatcgctcaaaacggcttttaattttaaatatgcaaagctttccggtggtaatgctatttacctaattttataattttccaaacaaatttaaaagaaaacattttgataatttctttaattaatcatcaacccaaaaaattgtaaacgaaaaactctggggacaaatttatgacccaaaatttattttgttcaaaaatcaacgaccacttttttaaaacttccttctcccattaaaaccataattggacattgattttgggtttttgatcactttttaaatttccctttcgcgcacgtcaattaaattttgaaatgcaattttgccccttccaaaaaataaaaatggacaaatttgtgcgattttttcgataaaaaaaatttcctcgttaattttttgctctaaattttttttcaggcggaggaaaaggacagttactatgagcgttatgtggacgcggatggaaagctcatgatcgtacgatgaatttaattttttaattgaatttttggccccgataattacccccaaaattattacaatttttaaagaccatggactgcgacggagtgaaggccaaacgagtgtacatcaaggcatgattaaaaactaattgatgaggaggaagaatggacgaaaacggagggactgagagggacacaatgccaaacaaattgcgccaaaaataaatttaaaaaataattgttgtttgtttttgagaccaaatttgatagaccaaagaatgcctagatacaagttggatgattttgaattgttgtagttttttggagtgaaaaataaaacaatttaaaataatttcttttttttaaatcaaagattgactaatttttttggaatcaaaaaatccaaaaaaaattataataatttttttcatttttaaattaaaaaaaattttaaaatttaatgtctttaaaattgacattttccatttcatattgcaaatactttttgaacttcggaaatcaaataaaatttagggatttaatttttaaatgctaatcacattgaaacccattaaaaaattattgtaattattattacgggcaaggcaagtcataactcgctttatctccaattaaagtgcataattttggtatcattcgaaagctttgaaattggagaatatttttgtaagcaaatgaaaggcaattcgattcagttttgtatcctataaaccaaaattattagcttttgcagatttcgtgttttttcattggttagagataacgaaaatagtgcgccaaaagaagagaaaaaagaaatgcgaaattttcatcaatccctaatcattaaagacgactaaaaaggcaccaaaaatcgcgaaaaaggcactttaatagtcaccaaaaaattgaaaaaaaaagcatgaaaaggcacgaaaaatccgtaaaaggcatgaaaaaaagcttttaatgtttttattaaggatttttagggagcaaaacacgtaaacttataaaaacttaattttggtcatttaatgatttaattaaatattttagaatttttttcgaataaaagaaattataaccaaaaaaatttttatcaagaaaacaaattcagtttggtgattaattttgagtacatttttcaattcttaggggtgtattttctgaaattttttcgggtcatttcataggggtgtagttttccaattatattgcattttaatggatcttttcggaaaaaaatgccaaaaaaggcatttaaggcacgaaaatcccaaaaaaaagcataataaaagtcaacgtaaaagcctcaaaccaagcgcaaaatgtgttctttatgcttaatatatcggaactaatgcgcagaaaaaaggcatatgccccaaaagtcgggctctattcatcacaaaactcggcaaatgccaaaatattgatgtaaaatatggacaaaaataggaagaggcgaatggagggcacttaaaaatggtttacgacattgcactgaactaacttacatgttacttatctttatcaatatatgttccgtgggttccatggaaatagagctcgacattttgaaaaaagcctgggcctggattccatgttggacctaaaaaaaatccaggaaaactaagtccaggaaaaatccaagctcctcgagacctggatccagggcctctggacccggatttttaaaaatttgttttaaaaagcaaacaaaagtttgaaaaaatcaaataattgcttgggaacatctaaaaatatctaatttataataataatctgttttaaaatctatcgaatcattttttgataacttgaaaaaaacatcggtcacttgaaataataaattctaaaattttgtccaggaaatccatgttttttcgtgttttgcctggacctggatatttttttcacatttgacctggacaaaacccaggtccacgaa

SEQ ID NO: 1098 - DNA, 1176 bp, Heterodera glycines
tttgaccaaaacaatgtattttgataataatctgataaacaatatttaattgtgaacaaaaaaattaaattaaaatcgtgggattcgaactttttggggaaaaagtaaagccacaggcataaccactggccaccactgctcaccttgctttacctttctttgcaaaatataaaggaaaggaaaaaaggaaaagccgcataactcggcgcacacgtccattcagcaaaaacggtaaaaattcacataacaaaccggggtcaatctacccacccaccaagtttcatcccgaaactccacattcacttgggggcccctcctttgtgaggaaaaatcttgacttttaatgaaatttattaagaaaatttgttaattgtttcataaattttggaaatctttttgatgaaatagttatgaaaatgttactcaattatgtatgggtttggggtctttttaacagttgaaattgccccaaattttcaaaaatacaaagttctattttgaaaatttgaattaaagacatttcgccaaaaataataattatttatcaaattttgggcagtttcgctggtgaaatttaagcccgttttagcccggtcaaaatgaccgggcccgggctcgggcttcgacaattggccgggcccgggccgcccggtcaaaaaagcccgttttaccgggcgtcccgagcccgtttaaaaactataaaataaattttcaaaaaatcaatgccaatcccgcagaatcctgcacaaaaagtaaaatttgctgatcacgctgggggatttgaactccatcagttaatcggtcactgaataaaccaagtgcattgttaagcaatccgtcctttgtgcctttgtttgtgctaattctttttatttatttttttaccgcgtgggagaagaaatcagcaaattcaatttaatttttctacctaattctttaaaattcttttcttttttccaccaaaaaatggtgtttttcatttgcgaccaatgcggcgagaccatgaagaagaagcaggtgctgcagcacatccaccggtgccgaaacgcgcactattcgtgcatggactgccaagtggtgttcgacaaaaacagttaccaagggcacaccaaatgcatcacggaggaccaaaagtacggaggcgcgagacatgtgccaaaagggacaaggttaact

SEQ ID NO: 1099 - DNA, 1447 bp, Heterodera glycines
aattttgaaaaaatggagcgaaatttccgtttttttttttggctttcaaattacgttgatgccttaactaagttggcatatttttatttttttttggttcactggctttcccatttcttgaaaatctgactttctttttttaagatttgttactgacaatgagcccgattttcaaaaaaaaaaaatacaaacaaagttggaccggatcatttgtcttgtgctcattgtcagagaccctaaaaaggactacatataaaaaaataaaatactttgtaagccaaggaggtcacttcccgctttatttgtttaaatctcggtcaactgctctgatttatgtcgacccttttactctataaaagtgccgagatttttgttgcctgactttcatatggaataaaaacctttttaaaaaaatcctttttaaccacgccatcatactaattgtaaccgttcttcgctccctaaaacatatttttttcagtgtattgtttcgaaatttggcgacgcttttattttcgttttgtttttccatttctaactgatttttggtcccaaatttccaacgctttctctttttttgcagggtgaacaaaagcaggacgcctgggtgtcgcaagtgcgtgccgccatccgtcaggtggacgagccgcggctgaagaatttgttgcgctccgtccaatgccacaccaacataccgcgcaaggaggccaaatttgtcaactttttgcaaaattcgttgcgcattcgggaccgcgcgttgtgtgtggacgcgtggaatgcaatcaaacgggcggcggacgcggaggcggcaaaagcgaaacggacaacggcggaagacgccgttgtaacaacggcgacggaggagaaggagacggcggaacacaacggcgacgacgcggacaaaatcgcaaccggacgaacggacaatgcatcggcgactacagaaaacatggagggacaagcggaggaggaaaacatggaggatgagacagcgaaaaggtgtggttttattgaaaattttgtcaattttattggactggacatttcaaacctggacttagacccgtatttttttcaaatttcatatggacctgggtttcctggacaaaaatccaggcccaggaaaaatttaggtgaaattttgaaggatttcctagagaccggacggaacagagccatgccgaggtttaccgggatttccgttcctgattttttggtaatagttgcggtcagggacggtcccaggatttcggttttgatgggataccatccccggaggcgacagcttttttttaaattttcgcggaacaagaggggttccccaaaaatttgggcaccatcatcaaccattttttttaatttactcaaattttaagggcaaataaaatgcatcaagaactgtcacaagttgtgccaatgaagcggaagaaaggcacacacatcaaat

SEQ ID NO: 1100 - DNA, 1825 bp, Heterodera glycines
ctcatcattttctctaaattcttttcatctcgaggaactttttttctttattgaacaaattgactgaaaatttgttgggaaaatttatcaaatttagggcggacgggggcccttttagttcgcaaaatccaataaattttgcctgtttaaagcgggaaaaaaggacaaaaatcccctcggggcaaaaatttatttatttatttatttgccctcgggggccaattaaaagttgggcgggggcggaggctaatcaattgaattgcttcactccacttttcttctcgggaatggtggtttgccaatttgttttcattgccaaaccttctcaagtgggctgatgtcagctcctcaaaggctgtgaaatttttgaacattttgccaaaaaaaaatcgaaaatagcaattaaattatttttttgttttcggcaaattcttaaaattcgtccattttttaaatttaaatttatgctgctgttttctcaagtaaataaataaaaatttaagggagttaaaaaaatttgggcaccgggaaacttggccactgacattaatttaaaaattgaaaaactaaaaaaatacaaatataaattccactgaaatttcatccttaaatggcccaaactgtgctaaattttattttattttaaaagaaacattaaacaatcgagaaacatttaatttttattatttatttaattcttccagatgtttaaatgcaagttgaatttatgccagggggccctatccttgtttagaccagaataccaggtttatgtggcccggatatatcgaaacccgtaaaaattctatttaaaaacataaaattttgagtctccattcagcaaaataagtatggttaattgggttgacaattcttgaaaaaaaacttgcgatcccgagcttgattaaaagttagtatcttttaaaaattattacattttttacacatttaaatattttttaaattatatttttttgattttttaaattattatttttttattttttaaattattatcgtgcccaaatttctcacaatcagtaatttttctcgtctcgcaaaaatcccagaaattttttttctcttccgccccaattttattgccccgccgccgccggcgccggaagaatagctggcggacggctcttctctgctgctgcctcataattccctttgatgatgaagatgataatgatgatggcacattaaacactttttggccgctcctccggcggcggcgattccttcgccaatttttatttatttatttggcaccaccgccccttcgcctaccggtcgcgatgccgccaatgtatagtgccagctaaggatgctcgggagtctcgaatcgagaaaagtctcgggtttttgggtctcgaatcgaaaaattcccaggttttttgagtatctgtctcggatcgaaaaaagtcccgtcgcagttttttgggtttctgtctcgggtttcgggaccaagtctcggtttcgagaaatttttggtctcgagcatcactaattccagccctataaccaacaccatatgggatgtccaattttccgatacaaaatttcctatacccagtttcatgtgctcaattttcgggtgccaaattttcccaatttcccgagcacattttcctgtgcctaattcccgggggactctccctcccccctaaagccaatagtcacccaacccccaactaggcccaatcgatccgcacattcaccgccacaaagtgtcgatggattttgcttgccttgctgttgtcccacctcccctctccacccaccgccggagggcgtgtgtgtgtgtgactcatctttttta

SEQ ID NO: 1101 - DNA, 1404 bp, Heterodera glycines
accacccgtccccggaggccaaaatattactgcaccgccgccacaccgcagctacttaaatatataatattttttgagccgccgccatcggtcggtcctcaagagtctcgacagcacagaggacagagaccacactctagtcagtcggggtgtcggaatcgtcaaccgatgctgctgctgcttcatcctaaacccccaaacggggtccctctccgccgggtaaagcaatgggtgaatgtgtcccctgggaggaagcttcttcacacccctcccctccctgcccctcccctccccaatgcccacactttgttgcccccctcctccccgggggcggttttgtcattacatattattattagtcatagcagcaaagagagtggtggcacacagatacacaggtgccgaattttggggacacacttttgaaaagcagcaacaacagttgaagagcacagatgagagagatgtgctgcttctcgtcgtctcccccctggggggatgtaagccatgggagtgtgaggagcatagggaatagaggaagaatgagtaggagaagaatcaacttctgtcccctttaatgggggaagaccgcattccggtggcactaaagaaaccatttcttctccccgcccctcgaagaagaagccaccttaccttctcccacccctcatccttgaggggagaaggggagaagaagccgcttttctccactcccgtccccccgggggtgagggaggggaggaagaagccaccctctgataaagagagagagaaaaagccacatcacacatcgccacacccttttcaaattgacacaatgggtgcctaaactaaggctcaggaagggggggggggggtactgatatgctattgttataaatatgtatataccatggatggcacggaattccgatttccgaaattttggacgttggaattccgatttccgaaaatttttggggcctcggaatgccatccctggtacgtacacaatgttgacaaattgcgaaccctgtcggagaaaggcatttttagattgggtcgaaaatcgcgtttttcgttggctcccatgaggtaccctgaaattttttggcagaaatcatgtttttgggagccccgacatttgcggcctgacttttacggtcccgacatttgcgcctatgtttaaaatcggactcaaaattgaattttttcaaaccctgatagcctaaacagcattaaaattaagaaaacactgttttatagtttattagcaatattcattctgttgttcgaaaattttattattttttcaaaaattcattgacgatcaaatgatcggacacaagcaatttgaaacgcctatttaaagctgtttaggcgatcagcgatggaaaaaaacttaatttttaacccgattttgga

SEQ ID NO: 1102 - DNA, 3584 bp, Heterodera glycines
gtcacaataatgtgcgtcatgtttttgataaaacattagtgtttgttctgtgattagctaaatttaattatttaagcagagaagtgtgcaatgggtttattatttgatcgctcaaaagaatgaagaattttgttattgattaactgatcgtaaatcgtaaaatttaaataaaaaatcaatattattttatgaattattcatctgattttcatttcaataccttcaattttttgttttattttaaattaattaattttcagattttattattatggcttcaataaatgatttagattatgttcgagattatgactatgtttatgatttagattttgttcaagttgaagaatatgttgagatcatagaccaagagattgaaagagacattagaaactatgatgtgtttgaggagcataattatgctaagcggccaagatttgtggatgatggtcccagtcagggatcactgaatttagatgttgaggttgcggggccatcccgtatgagtgatagtcagtttgaagaacggagaattgagtatatgagaaaaagagagcgagagagaatgagaatgagacgagctaatgaatctcaaagccaaaaagctttgcgtttagaacagaatagaaatagaattatgagtcaaagatctgaagaaaatgcatttgagcgacagttacgtctagaacagcaaagaataagacagagagtgataagacaaggtgcggttaatgtttatgcagcaggatctcatgtgaatgctcatgaacatagacttggacctatgaatgttagatgtgagttttgtgatgctttgcattttgttgaagagaaaatgagtggccgaggcaattctttcaaggattgctgccactatggtaaagtttttgttcccgagattcctgagcaggaatttcctgaggaattaagggatttgttcatgaaatttgatgcgagacatgtgaatttttttgataatattagacatttgaatagtagtgtgtcgtttgcttctatgaatccgcttagatatagatatccaaataacagaggtccgtattgcttccgcatttacggtcaagtttatcatagaatgaatttggctttgaatccagaagatggcgatgatcctgcttatgggcagattttcatcgtagatactgagcatgcaatgagagcgccaatgtcgatattgaccctcaattgctgagaactgcttatgaagtgattagaaatgtgaatccgtttgctgaagcatatatgatgatgaaagaagaagaagatgaagaagttgaaagagcaagaaatgagaacagagagccagccgagatcaagcttttgtttgagaccggaaggcaattggacagacgcttggggtacaatgtacctcgagcgaatgaagttgctgcagtttatgtacctggggctgacggtgaagtacctaatgccaagattgtggtgagagaacgtggaaaggaattgaagattttgaagagtacagattcaatggtgactccaatgacttacccactgttttatccgcgtggtacgcttggttggcaccctgaaatgaagcatagaaatagtaatagaagagtaacgagattacaatatgtttcctatacagtcgcaattagagaaagagagtttaacccaattttgtacggtggaaagctctttcaacagtattgtgttgatgaatatgttaagattgaaggagacagaatgaattggataaagtgtaatcagaaaaagattttggctgatgcatataagaatgttgataatatgttaatgagaagagcagaagaaagaggtttgccactgggtaggaaggtcattcttcctccgagtatgacaaacagtccgagatatgttgagaagcattttcaagatgcgatggctgttgttagacggtttggtaaaccagatatgtttttgactatgacatgtaacccgcaatgggaagagatttcagagaatttgtttcatgaacaaaagtcaagtgatagaccagatttggttgtcagagtttttaatttaaaagttaaagctattatgaatgagatagtcaagaaaaaggtttttggagaagtgattgcatggatgtatccggtagagaaccaaggacggggactaccgcacatccatttgcttttgacattggcggagcaagacaaattgattaatggtgaagatgttgaaaagaaaggaattagtgcgagaataccggacaaggaattagaagcagaactgtttgatttggtgaaaaggtttatgatccatggcccatgtggtaatttgaacccaaattgcccatgcatggaagagtttgttgacaaaaatggtatgaaaggaaggaaatgctctaagggataccctaaagcatttcaagaagagacagttgttcttgaaaatggattggctttgtatgcaagaccaaatgatggaagaacagttcaaatatttgcaaatggaagaagacatgaattagacaacagatgggttgtcccgcacaacctgtacctgttgaaaatgttcaagtgccacattaatcttgaaaaggttaatagtgttagttcagtaaagtatttgcataagtatgtgcataagccaccagacagggcaagactggaactagaagagagaaatgatcatgatgaagttaaagagttcattgatgcgcggtatgtttgcccgcaagaagcagtgtggagaatttttgaattgcctatgtatgatagaagccattgtataatgtccttgcctgtacacctacaaggtgaacatatttgttattttgacgagaatatggaagaagaagagattcgtgaaagaattgcgaatggttctgagttgatggcatattttgaattgaataagacaaatgttttggcaaaaactatgttttatcaccagatacctgaaaagttttgttttaagaaaggaaaatggacagagagaaagacatattttaacacaattggccgaatggtgaaggtgtcaccggctgagccggaacgataccacctgaggctgttgttgttaaatgtgaagggagcatgctcctatgatgatttgaaatcagtttttgatactaatggcaatgcaaaagtttgtgaaactttttcagccgcatgtttagaaagaggtttgattagaaatgatgaagagtggaaaagagcattagaagaagcagagagttttgagatgccatggaaattgagagcgttttttgcattgattttagtccattgcaatccggccaaaccggaagagctttggaatatgtttaaagactcattgtctgaagattttagaaggaattttagaaaagaagtagcttatgctaaagcttatagagaaattgcacttagcattattaaggctggaaaaacgcttgccgattttccaaccatggaacagataaatgttgatgatgatgttgaacaaatgtttgacctagccgaagaattggatttgggacaaagaaatttatgcttgatgtatgacgaaacaaggaaaattagtgatgaaattttgcatagaatatggaatcctataaatgaaccctgcgtctactt

SEQ ID NO: 1103 - DNA, 4015 bp, Heterodera glycines
atattttaacaaattggtcgaatggtgaaagtgtcaccggctgagccggagcgataccacctgaggctgttgctgctgaatgtgaagggagcatgctcctatgatgatttgaaaacagttattgatatgaatggcattgtaaaagtttgtgaaactttttcagccgcgtcgtttagaaagaggtttgatcagaaatgatgaagagtggaaaagagctttagaagaagctgagagttttgagatgccatggaaattgcgagagttttttgcattgattttagtccattgcaacccggccaaaccggaggagctttggaatatgtttaaagactctttgtctgaagatttttgtaggagttttagaaaagaattggcttatgctaaagcatataaagagattgcacttagcattatgaaggctggaaaaacgcttgccgattttccaaccatggaacagataaatgttgatgatgatgttgagcaagtatttgatttagccgaagaattggatttgggacagagaaattatgctttgatgtatgatgaacagaggaaaattagtgatgaaattttgcatagaatatggaattctgtaaatgaacctgcgttctactttcttagtggaccgggtggaacaggaaaaacacatgtgaataagacaattgtacatatgctgagaggtcagaagaagaaagtttgtacaatggcttttactggcatcgcagcaactttgctgcctgctgggagaacattgcacaatagatttggactgactttggatatgagtaattcgagtattagtccgagatcaagagtttggcaagaattgaaggaaacagatttgtttatttgtgatgaggcgcctatgataaataagcgcgcaatgagaactttggatgagaaattgaaagagataatgaataatggaattgcatttggtggcaaggttttgctctggacgggagactttcgtcaaacccttccgattcagaaacatgccacgagagctgagatggttagttcaaccataaagagaagcgagtactggaggttggctaaaagatataaattgacgaagaatatgagagctcttgcaacagagcaagaatttacgagagatttgttagagattggcagtggaaaatggaataatgaaaacgatgagataattttgcccgacaattgtattagcaatggtgatttagcagaagagatttttggtcaatgcattgtcttagaaaattggaatgaaatggccaaaagtgccattttagcaccgaagaatgttgatgttagtgaaatgaataataaagttttagaaatgttgtctggagaagaagttgtgtataccagtatagacttagctcaagatgagaatagacaaagagccgatgattatttggatgagtatttgaatgctttaaacccttcagggtttccgcggcataagttgagactgaagaaaaatgcaattgttttgttaatgcgtaatttgaatatagaaatgggcctttgtaatggtgcgagaatgaaagttgagcaaatgcaaccgaatttgattgtgtgtaagattttgactggagacaaggcaggtcagactgtgtacattcctcggatcacgctttgctgttctgaagattacccttttgacctgcataggcaccaattcccgttggtgttggcttttgcaatgacaattaacaaagcccaaggtcaaacccttgagcaagttggaattgatctgaggaaagatgtgtttagccatggacaattgtatgtggctctttcgagagcaagagcttggaataagttgagaattagattagatgatggcaacttagagagaaaggtgaagaatgtcgtgtacagagagttattagataacagtgattagataatgtgttagactagcattggatttagatttagtatagtattagaattgattttgtatagacaaatctgttgttctttgggttgctcaagacagtacgaacacaattcaaagtaagtcattctttttaatttcatactttatcctttctccaaaaataattgttcataacacattcgtactacctagcgggggatgcgccgaaggcgctgaccccgctagttttataaaatagccattgtcaaatagatccggcggccatacgaacagcaaaaatgccaacttttttttttaacaaatgctttgaaatccggaacaatttctgtttaacataattttcggtgctgctcaaaaaagccaaaaaaaaaaggtgggaaaaagaatgggattgcaggcttttctcgcgggaatcccgttatcaccacgttctaatacaaaccaaatggtgctcccttatttttcataacacttttccatttgtaagtcaaattttatcttggatacatacctagatttgattcgttaattaattaacctttatttcatagcaaaaacttgttaaatgcttgagacaccacgaacaattcccgggtttcattcggcggggccgcgtcgactcagtttggccacgtctcactacagacagtttggaattgtcagttctccgttggcgacttcgtctccttctccgatgcttttctcgtctgctgctgctgccactctcccggatcgcttgccgttacgccgtccaaaaaagccaccgcaaaagttgcctcttttaatgccgcaattgcacctgcagtttccttcgagtcgaacgaacacaattcgcagcaccgatttgtcttccatttacacggtgcagccggaggaggcagcgttggacgagcgaaatgcagtaagtaagaggtctcatccttcaaatcagaacaaaaagggttttcttagaaaattgaatgtcggattcttttgtagccgtaagatttgctttctttctatttagcatttgcttcaatgtatccaaatgcaacaagaactcatcaatcaggccaccgctgcaattgcgctttgtcataaaaagttcaggttcagtgggactcttcaagaggtttgtgtagatggtacgacatgtttcatctaattcaaacatcgacaatttagctcagcgcacagcgacttcttttggtttctcaggagcgccttgcgttgctcaaccgtcaaatggaccaattgaacgaacagcgaattttgaccaatttgtccgtccagcagttggacgatattccggaaagtgtggacttcgacaatgaggacgaactggagagtgtcactcctttggcgcgctgcactctctacattgacaagatagtgatcttttgactaattttcgaatcccggacgcgaattcgagcaaaaaactcgaaaactcaaaattcacttttatgttcatagctgtacaaaaatttgggtccgggattcgaaattaggtagtcaaaattgaatgtcggattcgggttacccgacacataaaacccccatgaacatgttttcacgactttatagaacaaaaaaatttttcctcaaaaaagggggcctaccatctatagtattaccgcaaaaattgtctttttttggtgaaaatctgttaacaaatcaacgaaatacaaaaaattttccggcgacgcctatcggcaccgccggacccccttcccccgcccgttcacctaaagttttttgaaaaaatgcgccgcaaaaaattgttaaaaatctgattttttgatactgacaaatcagtgcacagctattcattgtttctggaataaaatgttcaaatcaaggcctagctaaaacaaaaaaatctgttaatgctgaagacatatatttatttgccggttggaaatgcgattgaagtgtgcaatgggttcttgtcaatgtttttttcataccattttatgtttactttagtgggaggagtttttcagtacggtactaaacaaaacacttaataattaggttgcggactggctcagttcggccccagcggctttttggctataacttttttcactgtcaaccaaattcaacattcttggtatcattcggaagcttttaacatgctct

SEQ ID NO: 1104 - DNA, 455 bp, Heterodera glycines
ctgaccccgctagttttatataaaaatgctaccaacccccttttttcaaatttttcccggcggcgcctatcgatacagccggccccaaaaacatttttttctttaaaaattgtcccaaaatcaagaaaattggtaatttttggtgaaaatctcttaacaaaatggactcaaattttcaaaattttttccaactcctgttcccaaaaaagttttttggaaaaagcctcaaaaaaacatttccattgcttatttttatttggaacaaaattttccaaaaagctgatttttgaccccaaatgaagatttttatcggccaaatgctgaatttgaaaattttcacgttggcagcttctgattttacttgaagaggggaattattttgtattatttttaaatatttctgacaatataattttaaaaaaaactaaataatttattgaatccatccataataa

SEQ ID NO: 1105 - DNA, 5412 bp, Heterodera glycines
  unsure (1)..(5412): unsure at all n locations
ttgtgacacnctttttcgaatttaacgaactctcccagtcgtcaagaaaacaaaataaaggaaaagccaaaagcatggaaaaaacggtcaaaggcgttaaggacgacggggaagaggccaattatatggaacggattaagtaatgaataaatatcagagaagtacttggccaaccccaatttcagagagcatcggtcactccaagaattggccaaattgaagggcgacacttttgacgaccccaatgacttccaaacactgtccaatgactgccgcatttcaaattccgtttggaacagactttacaggtcataaaaggaatgaaagtcgtcaataattgtctcttttgcttaaaagcgatgataaatatttttaagataccaaaaaaggggcgtccgatggctctacgaattgcattttcaatatgtcggagggtaatggatgagcaattgcgtttgcctttcccattggcacttttcagcattttggccgatgaaatgggactcggaaagaccatccaactttgcgtcttccttcgctctctctcggagagtcaaacaatttccaacattttcaggtgtgctttttgcatgcgttttcaatccctgtttttcctgtaggtataaaggccttggtccttctctgatcgtttgtcccgctacacttctccaccaatgggtcaaagagttgaatgcctggtttccgttatgcaaagtcgccgttttgcactcaagcggtgccttttccgggcccaaggccacgcttataaagcgaattggcgaacatcgggggttggtttttgtttgttttacattcgatgcgagcattttttattttggttttaggaatggatcaattctggtcacttcgtattcaacttttatgctgagctacgaacagatttctgcagtcaattggcactattttattctcgacgaaggccataaaattcgcaatcccgaggcaaaggtgttgtctttgtttctgctgcacttttcgatagcgtttctggcactttccagatcactttggcgttgaaagagcttcggacgccgcaccgtctgattttgagtgggtcgccgatgcaaaacaatttccgggagctttggtcgctcatcgacttcatttacccaggccgtctcggctcgctcaaagaattcatggagaagttttctgtgcccatcactcagggagggtacgcaaatgcgagcgctgtccaagtcagaaccgcgttcaaaaccgcgtgtgtgctgcgggacgcgatcagtccgtatttgttgcgacggatgaagaaggatgttcaaatggtgcttcagctgccagacaagtcggagcaggtcagttactcttaaactttttaatgttgttgctcgttttttccggggagagagggtattttaacacgagaaaacaaatgttgtggattaatcaaacattaccttcaattactttccattatggtaaaattcgtctgtgtttcgggtaatttcttttttctcctcccactaaaaaaagtctaccattttggctcctttcgcgatttttcttacaatatttcttgtacagattcttttctgtgacatcacaagtgaacagcgtcaactttatcttcagtacatcgagtccaaggcctgtgatgacattgtcaccggcaagcaaatgccattcgcgggtttaatgtttctgcgcaaattgtgtaaccatcccgacttggtgtccggaggacccaaccgatttggtaccaataataatttaaaaatattagcgattttaaatcgtcatttattcgttttgctttatttagccgactttaatgtcgaagatcggcaggacatggaatttggattttaccagcgcagtggcaaaatggttgttctccgtgagcttttgcgtctatggcgagaacagaatcacaaagtgttactgttttcacagagtcggcaaatgctttcgatcattgaaagttttgttatcattgaagggttggtaaatataacgcccaaaaaacctttaatttatttatattaccgtattattacagttattccttccttcgaatggacggcacaactccaattggcagtcgacaaactcttgtcgaacagttcaacaaagttagttattgctgcttttcctacaatcctcactttaattctaaggatcccgatctttttgtgtttttattgacgacaaaagtcggtggacttggcataaatttgaccggagcgaatcgcgttttgatttttgaccccgattggaacccgtccacagatgctcaggtcgatttggtccatatttttataaattaatttttccttttttttttgttttaggcccgtgagaggtcctggcgaattggacagcatagggcggtcacaatttacagattgtgcgtggcaaaactatcgcctaattaaacagtaattaaggttgacaagcggaacaattgaagagaaaatttaccaacggtgttgtttttcatcggttttcgttaattaatataaatttattcgtttaattattacctttaaggcaaatattcaaacactttttggccaatcgcattttggacaacccaaaacagcaacggttcttcaaaaccaacgaattgcacgaattgtttactttgggctcgtcaaaaagcgaccggaagtatggcacaggtaaaacaatctgtaaaaatctcatcaatttcactcccaaattttagaaacggcggttatttttgccgccaacggaagcgaagtgagcagaaaaaagttgaagaataacatggataaaagaagggatgaaaaggaggcggagaacaaagcgaaagcggcggaacggacggacgacggcggaaaaatgccctcggctgattttaatgacagtgcactttcggacgaggcccgggaaaggcttaaaatggtcgccaaacgattagcggcgtaaaataaataacaaaaaatgcttaaattaacaataatttttagaaattttggaaaaacggagacggacaaagcggaaaatgggcggcggaagagggacaaagtgttgtttgagggcaaatacaaagttccattgctgcggaaacaagtggaagtgatggaaaagaaagaggaagacaacgaagagacggcgccggaggggcattcgttgagcaacaaagaacaggtgaaggaggagcacacccagtggaagggaaaggcccaagcaaatgcccaatttttgttattttgttggaaaatacccaattggacgaggtactggaggtactttcccaatgttccgcctcccctggaacagtccatgccatggtttttaaaggggaaaatattacgacccaaaacaaacaaacaaaaataagcattgcgaatggatttggccaacaaattaattttatgagtgaattgtgttgatgattttatccctgtttcaggatgattatgtgttgagcaagttgctcagcaaaaaggtcggtgttcactctgcgcttcagcatgaccaaatcatcaaagagagttccgccgccgacattcagctgatcgaagacgaagcgaacgcagtggcaaaaagggcagccgatgtgttgaaacgatcgcgacggttggccaatttcttgtggaactttcattgtttcattcttctcaaggcgacacctcgaattcctgtcgaatgcgtccgaatttggcccaatacaaacaaaaaagtcattgttcggtcgcaaaagagtggccgggttcacaataataagcaatggaattgaaaagactgatggaaatgggggcagagacggagcgccaaaagaacggacagaaaaggaagaggacgacgaggaggaggaaggtgaaataagggaagaaacacgagtgggaaagggagttgtttgttcagggtgttcaaagcctttcgatgggagcgaaatgttagggcggaaaaagcgcggaaaatgcgatgcgagcggcgccgaattgctcaagtcgataagacagcgaaaggagcgccaattggacattgacggggagggcgaacttgcggaaggggaagaggacgaagttggtggacaaattcaaatatttctaaatttttgctttccatcgttgcaataagtaatttagagcaattacccatccatttctgcacaattgcggccacattcgcttccctttggtgacaaatacgaaaaacttgcggatgaaattcgaaatttcttggcggtaaataacggaagagcgaccaccagcgaaattctgtcgcgctttaaggtccattccgtcgcttgccggaataatccaattcaatttccactcctcagaaccgagtccatccctccgagtcgttcgtgttccgctccattctcaagcatttgtgcaaattccttccaaattcgcagtgggttttgcgcgacgaatttatttgaaacttttgagccgagtgaaatctcaactttttattttattgtattttacattcgcactcacatttcttgattaattttgaccaaaacgttttgttattttgatattctggtcagtgcaataaatgacatttatctgttagtttgtttttttccatttttatgtttttttggcccatttttatcgcaaatgtttaattgttctgtgatttacactgtgaataaaccaattcagcagttgttttgctttgttctgcgatggtcgcccaacattttcgcattcgcgcgaaaggctccgcgcgcgtcacaaaaggaaattggtgtgtatttttgttgttttgcaaaaaaggaaaggcatttttgcaagttctgccgcttccatcaaccccaaacgttctcggcatcgcgacgcggcgcgggcgcaacgaattgccgcggcgtgtccaatggttgcggtggacgatcgacagacaaaggccgaaaagacacttttggacaatgtgccaatggttgtttggtattcgttttctgcaacgcctaaactaatcgactttcagggaaacatttcgctcgaaacaaattgcaaaatattaggcactgccggcggaaaaggtgccaaaaatgccaccaaaaagagggatcccgttgcccctgccattccgaccattctcgaccaattgccaattgtttgtgccctccctccaatcaaaatgaaatgggatcagatctattttagggcactttgtcgttgttggaggacgaaaggccgacaattgaccacacagtcgccgtggatttgtttgaacagcttgagcggtcactgaacgtgcaaaatgccaaatcatggccaatgataattgaaaagctcaccacactaatggccaaggcggggcctacggttgcgagcggaacgccggcatttggacgagtgatgggcaccgtcgcgcagtttcgtgaccgcgacaattgtcctgtagcggaaagcatcgatcgagtacaattgcaaatccgaa

SEQ ID NO: 1106 - DNA, 2757 bp, Heterodera glycines
ttctcgacccctcccctttttatgtacaaataaactgcccataagctttcaattattatggaataattccccctttttagtgtctgattgccgatttgttggccgctctttcccgcaaggctgtgccccgcgatttggagtgcattttcgattttgttgagccatggctttgcggtcgatcgtctggaagagcccagaaaaaggcttacaggcaaagaaatgaatattttggtttacaattagttatttttaaccaatctcagaattttggccgaaatttaccgtcgaattggcgagcccgagcttgaaaccttatttgaagcaaaacgaacatttttacacgcgctcattggaaacggaacgaggggattgaatgggacggtgttccaatggcgaattgcaattttccgaagtgtgagtgccacacgtaaactcactttgtttaccatattttgcaggtgctttcttccttcactgaatttgaccaactcgctgaattctccgcttcgattagtgccgaaattgtcgccttcttaagccgtttgaacaatcgctccactcgccatcagtcggcactttgcctcagtgaaatgagttcggcactcatccgactcggactcaccggggacgaacagtgagtttttaatgcttttctctacgatgcctttgggcttcatagttccaataagccccgaacgatttgttgccaaacttgccatttttagagtctcggcctcttccgcgctccatccgctgctctccaatttgttcagcgagctcaaagccagcaaaaatggtgccgagccgtcctttcaatgttcgctgatcgctctgaacattttggcacaaaagcactgtcggctgatggacgcttctctcctcgcccaattcgtcgcctattcctcgtccgcccttcgcatttcgcccgccgctgtccgcccgttgcccatcagaattttgcgaattctttctgccaaaatggaacaatttatgttcgaccaatttaaggtcagaatgattattcgtacgtctgattgaactttttccaaatattttaatgtttaatcccgaaatttgacaataattccgctttgtttgaaccctccaggatttaatcatcgaatccgttttctcgcaagacactcgcacttcaacttctcggatgcggaaagccaacgcgcttctcctcgcccaattgcttgaacggctcgaattggaaactttgttgaaattcgctggcgacagattggtgtggcaaaaacagctgaaaaatattgagaaacgacgacgaaggcatcggagagacaaagcggagaaaggagaggaggaagacgacgatagtgggatgagagagcgagtgtcgcagagaagcggcagtggcgtcgaaacagaatccgcaatttcgtggacgaccgccggaggtcgtacggcgaaggccgactcaatcttcgatatattgagggacagcagtgacgaagaggaggagggagaaacgggcagtgacagcggagtgagagggagaagggtgagtcgagagaaaggcagagaaagagggaggcaaacgaaatagcgaaagagttacagaaaaagagtggacagcgcgaagtgaacgaaaaacgacggagaggcgcaagtgggggcggcatgtccactcatctttcggtggtcattgaggaggacgaaaacgaaatggtaaaaaaaaagtgaaaaagcattaacacaaaacccccactctcgggtaagctggatttgttggaccaacagtcaatgctacaaaaagtgacgttggttgggaatgagaaaagtgcgaacaaatcggagagaaagaaacccggaaaacgacagaaagggaaacgaggcgaaacggaaaagggagggaattcggaggacgaggagacggggccgttcaagacaaacaaggagggcaaactgctgattgccgacttggacaagaagcagcgaaaaagagggaacaccaaaagggacgccattcctaagaaaggggcgaaacggagaaagggaggagaggaggcaaagcatgacgaagacggagggggaaggaacagcgatggtgagtcatccgccggtggaagccaatgaacgaacaaacgaaccatcattgcgcttttgttgttgttatgtttattaaggaacaaataaatttataaacaatgttttagttttttaaatttgagtcttaccaactttccaaaattttgtggaatttgaatttaaataatataaaatgaagcatattagagttgcatttatttcgaatcatttaatgatcaaaatcacagtgacacatgaaaatgaaagaattcaaatcgatggaaattgacaaaaaaacaaacaaatgaatgaggtgtgaagtgtgggggaaagagcattcaattggtgaaacgcaaaacaaacataagaccatgtacatatacattttgtaattgactaggaaaagatgggattttgtcgcaattgaaaatcgggcaaaaaaatgcccaagcggtgacaattttaccatttaaatggtaattgatgcggcgaatcatcagaaaaacgatgggtcggacgattgctggaaggaattgttcataccgtaggcgagaaaactctgaaaaaataatgggggatttttaatagtgccattgtttaatgaatttattatttttaatatgggacaaattctttaaattaacaattaaatgcaaaagcgaattaaaactaacaaaacaaataaaataaaaatatatccatgga

SEQ ID NO: 1107 - DNA, 8977 bp, Heterodera glycines
  unsure (1)..(8977): unsure at all n locations
gtaaaaacgtgaattacaagttactagaaanaatttaaataaaatatacaccgtagataaataaatttattatttttttaactnttataaaaaatatgatggcatttttgttctgtaatggatcaacagtgtgaagaaaactcttttttgtgtggttatcaaaaaattcgtcgttatggcagcctcagtgactcaacattctctcgaccgaaataccaacggataattgtacataaagttatgccatcagatactcttcatggccttgaattacggttttaattaactatttaattacaagctgaaccaatatttagtttcaaaagttcaatgtatgaaatcaaacgcctgaacaaactttggtcagatcaaagtctttactgcaagccagaaattcttatcccaatttttgatgatctaaatgtgtccactcaaccaccgaatgaaaatattcgaaacgatggtagactttttattattaactttttaaattattgttcttgttagttcacaaatacaatggagaagaccttaatgaggaaagcattgatcagttgttccgaaggatcgatttgggtgtaaaacaaacgaaaaaaatggttaaaaaacgagtacaaatcaatgagatcggagattgattgctgtccagtcttttgttttatgcagaatcattaagaagacactctttattatatttcgaaagatataaataggggccctttggattctggcaatttttaccagaaagggtcatccttttggcaatcaaagggtgtctctaaggtgctgagtcgttatataaaaactatcaaatggaaattttcaacaaaaaactgcccataacttttgtcaaagtcaaccaaattaaacattcaatgttattattggatagccccaacatttctctacaagttcatctaaattacaaaaaatttggtcaagcttgagcaaagttatggccaaaagtacgcaaggtactaagatttcacacatttttggccataactttttttaactcaataaaattttttgaaatttttttcaggtcaaaatgggagggctaaacttgatttgtaaaaaaaagttcttctaaaaatgagtcaaagtaataataaattgttttttaccaatgttatcaaggaaaagagactcagtgatttgtttatgctttcttcgtttaaatgtgtaacaattaaagggataataatcgaacattataacttgaaaaggcagcaacaaacgtacaatatttacaaacaaaaaaaaaattcttaaatattaacacttattgctcatttaatcgcttttacgccgtctcttcgttccaatagcctctgaaaatggcaaaaataaacaaatgtaaaaaaaaatctttcagttccttaaaattacgaaaaatgttgccgaaaagattaaaattaaaaaagtcaacaatatgaactgtttagagttcaaatgttttggcaatcatctcttttcctggtcccgaacaaaatttcttagttttctgaaaatctaataacatatttctaggggtgttttgacgagctgagttcgaatccggcctcctttttggcgaatcgaacccttaacccggcttcgaacaattttcgaaaagtttttttggaatttaagtttttaattcaaagaatggtttaaatgatctatttattgaagcattgatggatgacattaatattttcaatattttaaccttttttaaattaaaaaaatgaaattcgaatgtactaattgcctcaattttacacggcgagtcaattttgggttcccagtgcaaataagtttattatttatttagtaatcagaatgccaaaactttgcaaaacttgaattttttttggattttcccttgtaaaaatagaagagccgatctcgagttcgagttaaaaacataacttccaaaaaataaaatagggattcgatagagtggcataaaatatggccctatgcaaaatttcaagaatagggaaaattttttttcaaggacaaacatttcaatacttttaattcttttttagccaagtgcgcaatttaagccaaaatcaaataaaacctacaatattctcctgaattttcccttcaaaatgagcacaaaatagttttatttggtctagtattgaccaagttataagctaaaaaaatttcataaaatctgtactattagttgatgctgtacgcagccaacgctttttgaatatgatttttatttttgacacgaaaacttttagtaataaaaaatgattcttcctttttctttaaacagaagaaattgaaattaacacacaacataagggggatttgaacctgagaccccctttttggtgactaactcacagaccacaccgacgaaaaatccaacttaattgcacttggagcccaaaattgactcgccgtgtttagtaaaaaaaagagtgaaagtttgtcagcggtgctgtaaaattttaaactaagcatattttacccaatttttaaattgggcctaccccctctaatttagattttttgcttcaaccgttctctttttatggaaaatgtaccacctcctaaccaaatccaaaaccaaatacatgcgcttaatgcgcaaatttttcgtctcagggagcgccgtgacaatgggtgaacatcaaattgcagattggaacgaacgcgagacgaactttttgagcaattgcacggaggacaagcggtaacggtatcaatagaaggaaagtgaaataaaaacttgcttttaaggcgccccctgctgggggtcgtcgtgctcacagtgagccgccaaggcgtcagtacggagacgatgacgacggagcaccatcgtttcttcaccgatcagcggaatgaggtttaacggggagacataaaaaaggaaaagtgggttgggttttaagtcacatggaagttattaaaaccaaaagactattatttgcagtcatgaatataacaccaatttcatcgtctctccctcatcattggttttttataagtttcgaaagagtccgcttttgacttttccttttttgcttcccttttggtctttttggcgtttcgttgcgttctttcgttcgcttgtgtgaagtgaccctttcatttgttcccctctctgcaggaatgggagcgtattgagcgtgaacgtcgccaatacgaggagacggagttggagaagcggcgcgaattggaactcgagcgggcggaggcactgagacgcgagcagcagtggttggagcagggacgggccgaacgggagcgactggaggttggccaagcgaactccatgccgaaaacagaccgccttttatacagattgaacgcattaagcgggagcagcgagaaaaggaggaacgcgccagagagcgtgcaaagcaagaagtggaacggttgccacgcgaccgggacgagttggaacggttggagcgcgagcgaatcgaactggagcgacaggccatggaactgctggtatccgttcaggcgacaaataaaatttaaaaaaatctgaatttcagccctcacaggtacaaaaggacgaaaatcggtacatgatcggcacagtgtcgcgagcttatccccgaattgtattcgtaagttcagagtaatttttagtgaattccaagggcgtagccaaacccttggcttcaggggggggaggggcctacgccctttctgtattcctttttccttttattaattttaattaactaaatccaattttgctcctttccttctccctttagccgtggctgccatggcacgtcgactcggagctgtacccgcacaagtgctatcccccatttgtgcaggtcaccttagcaaaatctgttcaataaccattttaatattcccaatttttcagggctccagtttcgtaatttcgcgtgcgctgctgcggaagtgcttcggcacgtgtgcgcctttcacggctttgccattcatctcgacgacattctgatgggactactcaccaactgtttgggcatttcgaacattcaccgagacgggtacacacaaaatgccaaataaaaattgcaaattttatttaaggttcgacgttgggcatagcctcgactccttcacagtgcttaattatcaggtgcttttggcatttgcccataatcactttttgccataattttgctagatttttaaatttcagttctctcgctattcctccttcgctttgtcggaaatgtttggcagggtccttcacatctgatgacagatccgtcaatttaccaatgaactcagacacaatgaaacaatcaattattgtcttaattaattaaatgcaatgttacaaagaaaaatgttttgaatgtgaccaaaagaaatttgataaagtttgaaaagtaatttgttttttcattattttaaatatttatttttactcgcgtacgatactccacggcataaacagccgactgaacgacattgacatggcaagggctttttgttgttgcatttgctgttgatcccttccgatggcattttaatcctcctctctttttaatttccccttttttaccgttcgtttccctctcagaaagtgtctcttttgttggaaatgttcacttcctccgctccctccaatcgcagcagtgccaacaatggtggcaactccgtccctcctccgccggtgccttcgtcctccgcccttttgctctctccgccgcccctttcgtccgccggctcttccgactccgtcgcctccgcaatggcaacggccgcgcaactcgcagcgatgctcagcggaataaaccccacggcacgtccaatgtttcctttattttaccgcaaatttttagggttttaatttcgcctaaatgggcgatgaattttatcattttaccatttcgcgttttaaggtttttgcttggcaaattctgcgcgagtcaatcaacgacgaagagctgaaaaacattcaaatttcgctacggacttttcacggtgaaaccgccgccaatttattggcccgccaattgccaaaggtaccgtaggaggaggagactgtagtaaatggcataataaaatacagtaaaacggcatgaaaaatctacgggcgctttcagatccgaattgtggtggaacaaacgatgagttacttcaaatgggacgaaatgccaaacgaagtgcaactgaccaaggccaaactgattctttcccacctgaagaacaatgccaaagtgcgcaattggaccctgagggagggaaggccgagcaggtgggaaaacggggcggagggggcgttaattagccaaccaattaattagtggggacattttgtacgaaaagggtttcagtttaatttgaccatttgagtgccactcctccatccattttttgacttcaaatgcccaaacaacttccatttcagttcttttgcttgtgataaattttgtcaccatctcttctctctccccccatcctttggtttaccgtattatttccccctcccccgccgcctaacactttaatggttacattttgcgtttgcgcaattcaccgatggctgagaggggtggggtgggggggagtgtttgcggcgtccgtctgttgtgcatgtttagtgcgcgaaagggaacagagaaagataggggggggggaagggattcggttgcatgattatcggggggggggggaacgattggtcgcgttttgttgtggcggagtgagtgaatttgggggaggtaataaccgctgttgtaacagcagtgttcattgtcattatgtgggcttttattgtgaatgctctctctctctctctctctctctctttcttttcttctctcctctcctattctctctctctctctatttctttctttctctctctccctcactttcgctgcgtttgttttgccttttcttttgttcattttttcaaagttatgtgtggtgtgatatgtttcttttcctttctgctgagtctgttgcggcgtttggaatttaatgcaaaacgctttttcaattttttccagaatttttttgaatctatgaataatttgatgatttaattttatgtacaatatgtacctgtatatgggtttcatttgcctataatcgttttgtgaagaatcaacaaaatttagtgaagagagagagagaggcgagaaaccggttgtacgcattttcattcgtccggtaataaatgcgcaaaaagaagaagaagagacccatcccttcaattttttatcacattttgttggaacgagcaaaatatgagcagggcaaaaattgaaatatttttaaatttagttttggcagatgaggggaccaataaacaaaaaccattacgcttaattgattaattagtgttttgttgctcagattggctaacatcagcatggcttcgaatggcaaggcaacggaagcgtcgtcagaagaagtgcgttgttcgtcgggtgctgccgccgcgtccaccgcttcgtttgtgccgtcgtcggattcgccgcacaatcagccggggtcgcatgccatcgactggaagacgtacgccgctttgttatcctcgccatcgggcgccgatttgatggcagcgatgttttcttccgctgctgcgcttggaccgacgaaagcacacggagaggaggaggaggaagaaagcgaaagaggggagggacaagagaatgttggagaggaagagacgacgaggaagggacggacgacgaaacgaactgtgaaagacgaagagacggaagaagcggagggagaagagcgggagggaaagcggatggaactctaattgaactgtcattaactgaggagagggataatagatgattatttgtgaggagtgaccatgaccagccagtagaacacacttttgctttatttcctcagatatttttgtttaacaattctacttcattctctttattttctcggcattttaatttatgtgctctctttgaagcgggagattaagcgggcactgtccgctttcactattaatgacttgctctgatgattattttaattgtaagtaggcaaagaattgaccgtttcgtcgtccgttaattgcccgcggctgttgcattttcactttgtctacccaattgaaaaactaattatatgtataaattcttttctttactttgtgattctccttttacatattcctgttttcctaaatttacccattacattttatatttcgacatgaaaagattttgatggaatacgaacaccaacaaaaaatttgtcgcctttttagaaagttagctaattaaactttagtatcttagaaaatcgaatatcaaaatgtctttttttattaagtgtatgatgctcatattcacaatgctaaggataaaaatccgcatatacctagctgtagctatggtagctgcagatcgattaatctacggcttgaaacccgtattctcaactctgaatacgactggggatagttcgatccccagctacctatccaaaagatacggataagccactacttttccctttgttagtgtattctatgtctagtggtttgtgctttggacgaaaaagcgtctgtgggttcgaatcctttaggggctaatgtagtttgttagttttctaacaatatctatgcacctctaagaattgaaaaattttctcaaaaatgaattccctaaaatacattttttttcttgataaacttttgttaaaattttcttattcataaaaaattttaataattgcatttacaattgaaataaaccaaaattaagttttttacgtattttgcttcctaaaaagtgttataagaaattttatttgcctatttttcgatttatctgcagctagcgaattatctgcggatagttagcattgtgaatatgagcatctgttgtttgtttaacatttcactctgaaatctgcaaaagaaatgtttccaaaattaaacaaattttgactcaaatttcttgggcaacgtttcttctctcaacgtgtccccatacatttgtgcctatgtcagaaatcgggttttaattgaatttttttaatcctagaggttaatcataaacatcattaaagtgatagaagtgattgggttcgaaatttggtcgtcagtaattccattttattttattttactttacatttcatattgttgtattttttgacattatttattttgattttttttttatgcgccacataagagcactaatgtgcctgtggtttgctcaataaatataattataataatgttcctaatcaaccggaagacaatttttctcatttttttcaaacagtctaagaaaaaatgcattttaattgtctaaatgaacggctaaattaaactaagaaagtttcttttccttttaattggttgcaaattttccgaaaatttttttggcactctttgttccgttgtcctccccctcagggcatttttttaaataatttaaatgtaatttaattgttttcatttttaattgtcattgtgctgctttgcgtgatcattgtccgaatgtttaaaaacacacaatgttacgacaaagacaacgacaaaccgaccgcggcgacagttgcgcacattgaaatttaattttggaaaaatgtttataattaaaaagcattgcaccaaaccgggaccgaaagcactcaaaaagttgcgggaaaataaacccagcggtgtaaaagccaaaaaaatttcatcgttaattatggtttttttttctcgactctcggctgcggagtcaattgcccgtggcaacttgttttagcaatgaatgacccgccgcgggcaattaaattgcaaatgactcgccgcaggcattttcaactaaagaatgaataaatggtaaaatgtttgcatggactaaaaacgataattgagtttaaaaaatttaattaaaaaacatccaagtatggattaatgcggattacaataatagggttgtggtttttttgattggttgcatttttggcaccggggggagacaaaatatgcacaaaaantgtgcaaantatgattttt

SEQ ID NO: 1108 - DNA, 3424 bp, Heterodera glycines
  unsure (1)..(3424): unsure at all n locations
gcgaaaaaactgaaaagaccgagcggatgnagataaaaaaatgaatgctaaagatttttggatatacgataaaatgagattttaattagtttttttttgtacaataagaaaatacgaactaaaaagttgtctagcaaaagcgccaaaaaattaaaaaaccaacaatatgaatgattttttttttattcctttaaatatagcacttaattttttaagttagttttaaaaaccaaatatttttaaaataaaaatttttcttatttttggatgtttcttttaaaaaattcaaaagttttattctcaagttcattttttggcaatctttgtcatttgcgcaactgtaatttgtccctctaatgatctgccccagggcaaaaattctttaatgaattcattataatttatttacgaatttgttctgattttttatcagcatagctcattttctttttgaatctctttctcgattctcaacaaaattatgttcaattgccaaatgcattttttctattaataatccgcctgaggctattttttgataatgacttgcctcaggccatttttttactaattgcccgcttttatgtattacttgcaattttctgttccatatattttgtattaatttaacgctattttttggagttatctcattctcgactcattaaattcggtgattgccgaaggcattttatttactaatgaacctctccccggggcaaatattatattactaattgctaccggtgcttttctttcattcgtttcttatttattttctcaactacattttttaaattcccctttttcagttttgtttttctcggtgattaatattatttcgcccaattatgcctttttctcccactaatcacttcctaatttgtcacttttttgctccgttcgcattcccgacgatccgacgacgcccaattttttgcaaattgtttttttgtttattgcgcatttttttcagctttactaattgtatctcgagattcccgactacaatttcccctcaaatttgtcgtcatcattttttcatccattcattcgtcctccgcaaattatttgtccttcatcgtcgccactttcgccccacacctttctccaattacttgtgcgtcattgcaatttgggtaattaaaatgaatggtgtgcggcaagcggcgaaaaatcggcaaaaaagtcaattgaggaaggaatgtgtgcccttcggcgagtcaaatgcaaatgatgaatttgttggtaaataaatcggaaaaacgatcagaatcaatcaataagctggggtggacaagaaatttaaacaaaaactgatcagtgggggagcacacaaagtgaccaaaatgagtcaatgatattgatcacaaaggcgaggaaatcaacaaagatcaagcgaactgatcagtaaatggcccaaagtgatcaatcaatatgagtgatttaaaataaatcaaattgaactattgatgaaatgaacaaccagatcaataatgaaactgatcagagataaagcactcaatggaaaatgatcagagctttcctcatgacgatgaccaacccaaacaaatacagaaatcatataaaattttcatctgttgattcaaatgaattttatctgactgttttccaatcattttgatcaatccatttttgggtttagtcggctaattgatttgttatgcaatttgtgataagcttcacccgaaaacaaaacaaaaagcaccaccaaaagcagcagcagtggcttctcaccagcagcccatcaaccaaattgatcagaagcagtgaaagtgtcgtaaaaggaaacgggtgaagaaagaaaagcacaggggagccgaggagaggtggagtttgatctaaattttaaccgaaaatcttttcgttaaaagcttttattttcccgtgccgttaaaatgtgacttttcgggtcattggacgcccaaataattgttgctattgcttttcagatggttgtaaagtctcaactacttctctgatcattaactaattacaccaaaatgccctcttggttgttaaaacaataattatgtcaaattaacattttccgatcatttaaatctttctgatcatatccaaagtgtacgttaatccaacacaaataatttccgatcacaaaatgccccaaaaaatgatataatttaattttgattattgcaaaaattggtcaccaatttttttgatcataaacacccaaaaatgattctcttacttcctaaacattgtctttttataatcaacctgatcagtcaccaaatgtccaggttaagaaggttttctgatcactcattgtcaaaaattgaacaatttaattccaattagtgctaattggcaattctttctttactcacattatcaaaactttcttctctgatcacacccaaatgtcccgttaaaaatgactttctgttgatcatttaatttgtcttcccctcctccaaatccgttcttccttccccacttttcttctcgtccattctcgccctaatcaattgcacttttttcgcttgaaggcgcgggagaattaaaatgcttgaataaataaatgtatgaataatgtgtgcccatcaattccttttgactttttccatttgccgaccacagaaaaatggacattttctttaaatttacaacattcatttattttattttttgcaatttcaatttaatttttactccgatccaaaaataattaaattccccgaaattataataattgttaagccctttatttttgaatttacgttgattaaaataatcggttgaattactcctccttctgagatgggtaaatttcttttttgggtttcctcatatatacaaaaacatttaattttaaattttcgtcttactaattactttttaatttctacattaaaccaataaagcatttctgatcagcaaaaccagcttactgctaaatgaacctcctgctaataaaagtcattattatttttttatttcgctcattaaagtgacccattataatatcaattgatgataatgtgatgatgatgataagcatttggtaaaaattgcttttgtttgtattggactcagctggggacaaaagcgggggccagcagcgatcagatggccggccactttcccaccaccaccacccgcttcttcgtccaatgctttccccctccttaattagacaaacaaaaccgaataaaaaataaataatattattattgcacgggttggggtgacgatgggacggatggacggacacatgagaagcacaggaagaagcctcacagctgctgcggctaatgaagcctggggctgttatggctctgatcatcagcagaagcagcaaaagtagagacggctaaaaacattgatcgatgcattcgcggatcgccccggggcaaaatggggcgcgcgcgcaaag

SEQ ID NO: 1109 - DNA, 1530 bp, Heterodera glycines
ttggggaccaaattttaacaattaaaacttgaaaaaatttcgtaaaaaaacccctcggtttgtcatgttatttctgtcgaggagggctaaaagttcgggtgaatccgaagggaaaaatggcaccaaaacacaaagtggactaagcttaagaaaccaggatgaaagcttgaattgtaaaatctaatgttgcaaaaataaaattaaaaatttcgattttttcaatttaaatttataattcaaagaattttttcacttacgttgctcaattacgggtgctcaatttgctcattaggctgtcgttctactgaagacaaaatcaaagacaatgagtgcgcttgtttcaaatatattttcttaatagtgtaataaatcttgaaatatataatataattattaataatataatttcggatgggacggctgaaaataggagggaagcccccgggggaagcctgatttaagttgaccctccgcagggaagagaagaaagtggcaaataaaattataaaattaaaaagtcacacgcaaaaaatgggtgcggcaacgcgtcatggggcgatcgccgggcggaggtgggacaaaaagcaatcggcgtcggcgacacgcaatttgcaacttccgccgtcgctaccaccgccccacccggccggccgcccgtcgcgcaaaagtttggcgaccaagcggaactcgccgttgcagacagacaatgcccacatccacacatagaacacagtgtcccagcaggacgattgataaggtggtgattgtggcgttgctgtcaccaccaactccatcaccgtgatcactgatcagtcagaggtatgatggtcagtaatcgccccacccccgccggtgatcactcaatcactgtgcacagaaaaatgaccgagaattttgcggcggtgcaatgcatcgccactgatcaccgccaatatcacttttctatattatcaaagctgcgatctgagtaatttattatataatcaatgttttatggctattttagtgggcatttttatacgctgatcacttcgtacgctaatcccttcgtttgctgatcagaattaggaccacaattcgggtatcttaattttaatttttaatttggtaacaatgatgacaatagcactccgattcgagttatacgaatcataaatcacgccaactgaaatttttgtttctgatcacattcttgctgaattaacctttatacaaaaattcagctgggtaaaaaaaaaatgggtcgttctttattaatgaagtcatcataagaccgtcatattctaatatggtccctcaaattcatatgataacaattcctctacggaataacattcttcatttggcgatgtttgatcattatagcttgatcatgttcactaaatgatcatgctgcttgacgaatggctttttgctctgatcagcagccgcattttgcacattctcccggcacccgcatgaccatttttgcagagatgctaatgcattttggcggtgttcatggtcagcagatcagcatcatgatcattt

SEQ ID NO: 1110 - DNA, 1428 bp, Heterodera glycines
ttatggcgaaatgtctttaattcaaaatttcaagataaaactttggatttttgaaaaattatataatttaattcaacagagatttagaaaacctcgaaaatcctttatggcctcggaccaatgattcctagaatttataaaatttaatccataaaaatttttagaaatgaatgcatcagtctggaaaataggtctttttgaaaaattaaaagatggcaaaatggcggagtgccgcgaatgcaaagcaaatggaagagccaaatatgaatttggcctgccagacttcagcaccaaatcgctcaaaaatcatcttttttcaacaatccatgcaaattcggaattgatatttttgaacaaggccatcccaatgttggactacaaatactgatttaattttgttggatgataaaaagttcataaaattttccataaaattttggtttagaacaaagaaaagaaattacgcaattttttttatatttataaatgcatttttaaaatttgaaaaaagcccggtcccgtacgggcgcccggtcaaaattttggaccgggcccgggacgcccggtaaaacgggctttttttgaacgggcggcccgccccggtcaattttcgaagcccggtcccggtcccggtactttcaaaattccggtctctagtaaataacattggatagagagagaaataacgcattaataagagggtgctgaaattcagtaccggtcatacaaaagcatttttgatgaagaagaatagagaaaaaaagcaaattcaacagagagtgttataggaaaagatttaaggacatcgagagaataaaatggtggcgaagcgtacgttaataattaaataaatatcatcagggattctttttttatgtaagaaaaatcgcgaaatatgtaaataaaatatgtataaaaatgctaaaatatgtatgaaatatgtacaaaaactcccaaatatgtacgaaaatatgtaaataaaaattttctaacggttatttttttttggaaaaattcttcgtaaagggtgaaataggcataaaatgcaataaaaatgacccaaataggcctagaatcacattttagtactttaaaaattaatttttgttatctgtttttgaaaaaaaattgattttttagaggtatatttctcaaaaaaagaaatttctataaattctcaaaatatgaaaaaaaatgaaaatatgtacgaaaaattgctaaattttggattttttggggcatttaaaaatcctcaaaaattgcaaaatatgttggaaaaaatgacgaaaagtccaaaatatgtaaaaatatgtaaataaaagtcccgatttttgttcgcaaacacaaaaagaaagtgtttttcctactaattaggctatggagaatccaggaaaaaaacatgtatttacataaaaaaagaatccctga

SEQ ID NO: 1111 - DNA, 2027 bp, Heterodera glycines
cattaaagttttaaagttgggtaaattctcgatttcagcgtcataaatgagatggaattggattggaacttttggggaaaacaaatggtgggggggggcaatcaatcttcaaaaagattgcctaatttgtaaaagaaataatttctaaaaaatatttttagtggtaagttttttgttgttgaaaaagtttgaaaaatatcaaccaaaattttaattaaaatttcaaaaatcttttttggacaaaatctattaacaaatcctacctccgtgttagtctgtacaccttaagattattttttatatttcattttttcgtagcatatatttaactattattatcagggcccggatttttatgtgctaaaatcccgaaataggtacctaaatagttgctaaaaattggaagataattatttcatcaaaaatgcgaaaatttctcaaaaatatcataatggtgaacttttggggaaacatgggttcggcggtgccaataggcgccgccagggaaaaaaattgtttatttttttaaaaacattttttaaaacaagtcaaaaaagttgtttaaaagtttcataagcgaaaagttgaaaatagtttctaaaaatttgcgctaaatcgaaaattgatcgaaaaaatgtttttttttttgcttttgtctcaccatatgctttctgcaaaaaataggtgaaaacctaaaaatccgggccctgattattatgtctgtattattctatatcacaaaggggtattcacttatgttaacctaccaaatttcaaaaaagagggtttataaacattaagttgagcatcgaaatcaaaaaatttacaagcccaagaatttaattaatacaattaaaaaacagatcactgtattaatgctatatcactttcatccgtatcttcatcgcccttgttaattcgtcgtatcaatgtgcccaattttttgctgagctttttcttttcttcagtatagccactttctaccatttcgcatacatttagatacagtatgttaagcgtaccatcgacggcataaatttgccgaacaattttttgggacacatattgcttctcatattgtatttcaattctaaacaaatggatatttcacatacccattaatttaatgagcatgattaaagcaaaattttgaatcgcaattctaacggtttaaacattctaaatgcttatttttaggttcgtcaatttttgcgattattcatactttattctggcattttgaggcttatttcaactgcttatattaacattttcgtttatttattttttcttttttcttataaatggtccataaatctctgtcaggaaattttgtcctcaaattttgcaccgcctgttcactcccatgcgaaaccttgtcgaaatcccctttctggtccgtaatcctttaataatttttttatagggtgcaatcatgtccatcaggtttaggtttttctcaaaaatcccgattccgaaattttctcaaattaaatttttaggttttcgagtcaaccatcatggaattagtttaattaattttaaaatgtgatgcctctgctgttccgtttgttcttcagaattgttttgataagttaaagcggcaaatttggcctccatttttctcaattggtcaatttttttgtcgtataaaatcaaattttgttttgcttcttctaccgttctggcgtgtgctgccaaatcgtattttttggtcacataaacttttttgccagcctgtttttctaatttttcgagcatttcgggagaataaattgctgcgtcaacgtaagggccttcgtccaattgttttttcttattattacctgaaaaaatagaaaaaaaatgtttttctaaagaaaacattaagctttttgataatttcaccttttgttaaagctcgagcaatttttagattgcattgattttttggtggacgacggatctttttccggtctattacaattgctttgttttgtacgggtctcatcattttcaaatatttcaaaaaatttttttgtcttttt

SEQ ID NO: 1112 - DNA, 3159 bp, Heterodera glycines
  unsure (1)..(3159): unsure at all n locations
atgatggaggtgtgccgcggaatgtgttgttcattgtgtcaaggcgtctccttcgcgtttcgtcccattcgctttttgttggcgacaccgatcgagaataatccgggctcaattctcgcgcattgattttgatctgcttcttcttcttcacctcggcatcccattggtccaatcggcttctgatcgttgtgatggcattttgtatgcccaactcgcattctttgtatcttcgccatcccccataatcttcttcagtcaactgcttttcgctgtcgccggaggacttgcgtccaaacaatttattgaatgaaaggcctagaaaggtttatttaatttgtaattaattaataaaagtcaagaatccttggccgaggtatgaaaatatattaaaatgtattttaataggtaccaatttttgtaattaatcactgtagcccttttcccaattagtttttaaagttcattttaaaaagcccactaattcacttttctttgtttttcgcatctttgtattcggagaactgcttggacttgttgccgacgattttggcattgttggtgatgacggcgccgagctagcagcggaattggaccctcgcccatcattatacactggcggaccttgccaggaggaccttcttggtgaaattggtgaactgtttgaagtgcttggcatgaagtgcgtaattggcgaagatggtgccgttcttgcttctgatttaaatacacgagggttgttaggggaaggactttgccaggctcgtccaaagtcaaatgaaaaatcatcttggtcataatttgacgagctcggctctaatgggtcgtggtgatcagcagaattgaatatttgtttcatacgattttgtcctgatggctccgataaatttttgccacgcgcttaatgaaaattggttttatttgttttagatgtgtttttagtagagatcggaacgggctcgcttttgccaagcaatgttaaaatgagaggtatttttgagaatttttttttaaatatttcattgagaatttgttgagtttgagaaaaaagcctatctcaataccaacgaacccgtcccggcctctggtttttaggtgtagaattgaaatattccaagtaaaaataatcaaaaagcttaaaaatatttggcttacggaaaaaagatttggcgaaaaaaatttacttttataaaaaaaataaaaaattccattaaacctctttttcttttgtcttgcaaattttccaattcttttgagtttggtgaaggcttaaaattttgttcaatgattcgttcttcgtttcttggaatgcttaatctaaatgtgggtataatttaataaaattgttttatgaatttcaaaaattgaccttgaatttcggtcataatcagacaatatttcatgaatttcatcatcgcttatttctaaattaaattcgcaaaatcaaaatgttatttttttagtttttttaccagcgccaatttctctataaatttcttcgtcataaaatgaatgatgcgcttcgtcgcctcttattcttcaaaattaaaatttttaataggtatttttattttatcttttatcattttatttaaaaattttggaaattgataataaaaatgtattttttaaaaacgaattcctatcgcattttagttggcccaaaatgaatgaaagattataaaaaaaattaaaaaaattaattaagcaaagattttgaggcttcccttgtctaaataaagtcaattttttttatgaacaatttgggtatttttggatttgtcttgataaacggcttaatcaaaattaaaattttttttaaatttacctgatatttgcaagctttttgagtttgcccaagtcttcatcacttatccgagctgtgaaattaaaaatttatttttcttatcattttgtttgttaccttgattctcaattttataatcaattagttctcttgacttttcctttttcacaattagcctaaattttcgagagtttctcattatagaaataaatattattttttataattaaattaatcccattaattaccgtgggggtgtgtccttttttatcgttccaattaattcgtcaatttcttcatttgacaaatctaaataacttttagatgttttattattctgtatttatatttttaactttgagttgatgaatcacttttgcacattttgcctttcatcttcttgtcctcattttctctctgacttgattcttaaaaatattttatcatttatttctaaacttttttataaatttttcattgttttttatttatttttcgaatttttttatatttttaccattttcttctcgaaataattgtgccaatgtccttcgggggcttttcgacggcgacgacacatttgatgttctgcatgagttaatttcgccactttcagcgattaaattgatcagcgtttgatacacaaaaataattaaaggaaaaaattttacatttgcgatcattctgataaaaatactgaaaaaattattttcattaactatattaatgaattaattttttaataaaaatagtcaggaccataattgtggaaaagcctgacatgaacttatttttaggtacaaataacacgcaatataggcaaatgaacaggaacaaaaaatctcaaaaagacattaaatggacaatcaaactaggcttgaaaaaatttaaaagaggtaaataagtttttttaagtttatgagattttgaaaatcataaatttaggctgggaatttaaattgacaatttggtaattaggcaaaaaaaaaaaagaaaaaatagcaaaataggcattataatagttatcctataaaccccataccaagctaaaattgcgttttttatatttatttcaatgtattaagtaatcgcagcaaagaattaagacatttgcccaaatctcgttattgatgatttaataaaacaaatatgaaaattttttttaagatggttaattgcataagcaaaaacgcgattaatgttggtggaaataatattaaatgcttttgttaatcacatgtatttaatttgataaaataataataatattttttaattttacgagcgattaatttattaattaaaaataaattgtcattatatttgttcacanaaattacagaccataaataaag

SEQ ID NO: 1113 - DNA, 8008 bp, Heterodera glycines
  unsure (1)..(8008): unsure at all n locations
aattagaaaattatttttgttttgcaatattnaattcgttgtcagcgacgctaagaacggcgccaccttctaatttttgtgaagagtcggaagcttaaaaaatatttatttattttttaattttcatatttttacgtggctttgcttccacatttgcatcccattcaattcctgctccagccaaattatcataatcttgctcatgttctgctggagtttcggttgttgtagaagtcttcaaaaataatttaataaatctcattaattgctcgagaatgcctaattcgtggaaaaaaattccaaattatgcgcgcactcacagttttcatcgtaatcctcgtcgtttttggcatcgtttttgttgtcaattttttggcagttgtccgtcgtgttgatgccgcaatctgtgcaacagttggcacttgctcatacaaatcccgtggatcaaatgcggctgaacgttgcaacacttgcacattgttctccaaaatagtgcgcacattttctttgaaatcaacctttagaaaaaaataataattaaaaatataaaattataaatggcataatattgaaaatattataaaatataggaatcttgttaacataaaaaatataaagtatatttaatcaaaaatatattttttattattaaattttttttttttgatttgtttaaagaaatttaatttagtgagattaaaataattttttttgtagtttatattggataaaagcaatataaataaagcatttttaataaatagggtttaccttttttaattgacctccgttatgtggaaaatatgccattctcttaagaacatttgagcacccgataacccatttttcactcgaatttgtccgatatcgcgcaatttgccaatccaaatattcaacggctttttctgggttttttattgtgtcagatatcggcacaaactcaaatctaaaaaaagatttattataataatttatgatatcttttaaatattaacatgggcttttgataaaacttaagggtttttttcaaaattggaaaaaatacaaatatttgcaataaattttatattatgaataggcagctaatgtaaaaacataatttacaaagcaaaaaatttattaaaatacttgacatagcaatattatcgaatatatttttcttgtccatgattcttagcgaaaatttaatatactctttttcacaacaaaacagacaaaaaggattttggcattatctataaaaaatttaaaaccaaaagtaaaaattaatgaatttcacaaaataaaaagtattaagaatattggaatattttcaaattaaagtaaaagacgttatttgaatagctaaaaaagcaattttgttatatttgatttgtaaacgaagttattttaattatcaaaaaatattagaataaggacaattttaaatgaaactttctgtcatcaattttttaaaaagttttcagtttttagggtgtttttctgaatttttagggtcgattcttggggttttacttctttttttaaggaattttccgaaaatcccataaataggcacccaaaatagcgaaatgtgcaaaaaaaaaatgcgacaggtaaaaacttcgtttttgtctttttctgagcgtatcaagggcataaaaatagaatgttagatatttgcctagaaatataattcctaataattgtaaacatattttctatcattacggatttaacgtggcattccgtttgttggataaaacccggaaactgccacaaatttttacacttttattttgataagcatccgcaaatgtgccacagtattgtgtgccacgctcatcaaccccatccgaatacacactgccatacgcttcatgataatttttctcggagcttatcctaaaatgaaaaaaaggttaatttattattcaattaatttccatattttcattttttgaattatgaatattattatcataaataatatgctttggatttattataattttttttttttcaaaaaatttgtttgattgaggaattttcattagcatgttctcgaattttcctgatatagtaatttttttttgatttttggaatttttattaaataaaaattcagagataatttaaaaaataaataaataaaaatttaaaatatattttatttagaatttatttcaaaatatttctcctaccaatatccaatgtacatatgtttggaatttggaaaggtaataaattgctcattggatcttccaggctcaatgtgcccattccgataaattgttgtccaataatcagggattaactttaaataaaatagaattaatttgaaaaattaagaaacaaacccaaaatcctgttactgggcaaaagttaattatacaaattattattataaataaaatcataatattgctaaatcaataatttttattattaaattggttatgcaattaaatttaaaggataaaatatttttttcatttccctaaaatttatttaatgaagaaaatgctctttctaaccatcattgtaaaagacaaatagtaaacggcagaaaattgtgcaaatggctaattgtttgctttattaaattagtcgacggacttgattcatcatcgtcaatttatggacctcactaaccgtttttacgattttttatgtcctgataaaatatttttgtgtcgaaaacaatttatagcaaaaattgtttattattggaaaccatctgtttaatcaacaaatgtttttgtaatcaaaaattgtatgattaatttaattttattgtttgaagatttttaaggttatccataccaagaatctatgccttggaccaaaacttaaaaataccattttgaaaatcattattttataattaaaatatttatgtgacgtagaggagactcgaaccttaaccattaatataaaaagaaccgtaaaagaaatatttttcgaagcttttgcaaagcaattggacgcatttgaaaaaatgtcatagattgtaaaaatccaagaaaggatctttctttgtctaccgccggatggaatctgaaaccaatgttagacaaaaatgatagtgttaaaatttcaaaaaccaggtatactgtggtccggaaatatgataagaaaacttgcaaaattttcaaaaatactgaaaaaggcatgaaaaaaggcaccaaaaagttaaaaaaaaattctttttttctcgaaggaaatttaaaataaaccaattaaaggaaacattaatttttattactaataagaatatacaaatatacggcttaaaaatgtttaataaatattcggtcaatatattctaaagtttgtttgactggttcaaattttgcccagaaaacaatttgtaatttcttgccgataatattcggtaagctgttccgcatttaaaaacaccgattcggtcagatggactaattcggcatgacgaaatgcccccgccatgttgccgcagttggtgcacaaatggtgcatcaacagattggagtaatgttcggacaaatgttgcaaagtgcgacgaccagcagcagagagaccagcagtaactgctgaacaattagaacattgtcacgatttattgtaaaaataacccaaaatttgtcaaaaaaaactaatttttattttgtaattcgttttcaattatttaattgttgcctgaatttgacgatgtcaatgcgcagaccaaaaaaaattcttcctccgaaagttgtaatctgaatttaaaaataaaatatgaaaaaatgatttagagagaattatttttaaatttaacaaaatcatacataaaaaaattataaaaataaggaaaattataaaaattgtttacgttttaacagtggccgcatggaataatgggttaaatttgttgttatttgtgataatttctgagttcgtttttaatggattaaaacgggcattcattgcaatcaaaggaattgtaacaaaactcaaaagaatcacctaaaaggtaaaaaataaattttaaatttaattaaattattaaatgttaaagcataattggaattttacttgatcagttggctctaacatttcgaagtgtggcattgtacgcaacagctgaatcactgatccaatttctgaaaacaatgggtttttagtttttaccagatgattaatggatgtaccagagaatccatcagccttaaactcctagaataaaagtaaatttccaaattttttctaatttaacaaataatttctgcgtgaaaggaagttaaattcatgttttttcttaaaagtaggttaaataattgttatattaaatttactattcgattaaaaaatagtgataatgctaaagtgccaaccctaatcatttcaaaaacatattccgttactttttttaataaaaaattgaccgaaatgccaaataatttagccactgtctatgaactgaccttgttttatcttttcaaattggccattttcattttcatcttcatcatttacatttgcgccgctttcctaaaatgatttaaaaattgaagaagttactgtatttgtgtaagaaattaccgtttccatgtgacaatttttttcttctttctccttcagctgctgttgaagaaattcacggctttgtaaagcgattggatgaattggcttagttcctcactttgttcagcttccaccagagttgggtccatgccttccaacaaacacttgtcaagacggcacgagcgacaggtctttatttcttatttcgaattttaatttttattaaactttttatttttaattaaaattatatttacatatgtgaaaaagctacctttatttatggggcataaatttgatttcggacaaatgaatgttctctgagcaacgattgtacgacgaaaaaattgcttacaagctaaaaaaataataatttaatttctctaattaattgctttaaaaataattatgtaatttgttctattagggcaataaacttttcattttgtttatgtttttggcttaccatcacagctctgtattttgtaatacttgaaaagtgtagccctttcacaaattttgcattcttgcgcagtttttggactctttttgtatttcttttttacttgtttaattttcccattttccatttcattgctttcggaagaattcattttaattttatgaattaaaaaataataaatgtcaattttttatgttattaatggtttgtatctctctatcgtctttaatgtttgtaatggttttggtctttttctgcttttaattttggtatggatcatttatacaaaaattgaataactaaaaacataaaatcaggacatttatttttcaattagaaagactcgggcaattaagaacgtaaagaaaaaagagatccagaccatattatggtaaaaaattcatttatgttttaagttttaatttataaattatttattattttatctatttttatttgatattttgctttatttttagtcattttatgaagtttttcggatccaagttggaatgaatgaccaatttgtccaaattccgtctttcaggcatcttggacatgtcgtagtgagtaaggttgttgatcggtctgcagcaacccctttgctttggtgaatgctttttcaatttgtatttaaatattttggcatttttgataaatatctttccgttccttactaatcatatggtcaggtcattcgaaaactttaaatgtttagaagttatttctaaactattgactgccattagacaatgacaattattaaagagttgtaatcgaaaattgcaaaaagtcaaaatttttgaaatttttcttaataattttttttacagctcagaaaatctttttgatttttgtaaggcgaatagagcatgtgaagtttcgaatgataccaagaatgttagatttgagcgagaaagaaaaaagttagaacccaaaaactcgggctggcgcaaaaacgattgcgcgaaaatctggtccaaatttttgcatggttttaggtcagctttgaaatcttagggagaattttgtgggccggcatcgctgacatgaacaatttttcggatttttaatgaattttgttaagaaaaaggcttttgctggagaaaaaaaaaatttaaaaaatagcatccgtcaagctttgctttggcaattatgatcgcatcatgccttttcattctgttttgattggactgctcagaaattgtgttgaagtgatttgagaaagattgcaaaggcgttttttggaaatgataaaacttttttcatcttggcttttttgtttatttttgtataattagtttaaaataatatttttgccggtttttcactattaaaaacattagcgtcggtaagagcaatgaaagtgacgcaacaaaaaattttaaaaaaagtattttaatataaaaaggatccggaaagaataatagtctaacttaaataatcaatcttataaattaatatttaaccagaattattattttttattcaaaaataccatatttttgataattctaaaaacagctaagaaaaattgtaaaactaaaactatttagtgaaactccgtttttggttgtgccattgaaaactaattgtttgactttgatttgcttcacttgtacattctgtttcaaaattacagacccagggaaattttgtgtttcatctggcttggaatagggaaatttttttacaaacttttagaggtctggacggagtatggagtatatgtctaagatgcttccccgaagatcaaaaaaactatatgccatatttgaatttcaaattttataatattatccacttttgaagctcggcgccaatatttgggttttgaaatagcatcttattttataactttgaccaaatttaatattttgggattttaaatgaaaaaataaatgtataatgaaatttgaccctttaaattgaagttaacattcaaaaattacacaactgattgaaaaatattcaattagaattttatccaaaaaaattcttcaaaatatctgtttttttctgaaatttccggcgaccatttaaaaacgacgatgattttctccttaattgaaaaaattctgtctatcattcaataatttagtgtaataacttacgcagtttcaattgccttttccaatcataaatttccttccgtttcatgccaaaacctctagcaacattttcttcaatttgagttaatgtttcgctatttttatgtttcgatttatcgttttttatatgttgatattttttcttttttaaagcattgaaacgatttattatatcgcgcttccgtttataatctttgtcatcatcatcatcatcatcatctaattgttctgtttttcatataaaaagtgttaaaaaaaattccaaaatcatttattgtcaaaatttttttcttatttatcactcattttaatctttttagtatattgtagtgctgttcgagactctcggtctcgagtctcgactcgagaaaagtctcgggtttttttggtctcggtctcgagtctcggtctcgggtttttaagtctcggtctcgattttcgagactcgagaccgagacttttttacacccctaatgattggctttttgcaaatttaaaattaatatatttttggtaattttttgcttcattttgtttgctcgtaggtgtggtccggtgggttgttctcctggttatgttcttcattttagcgttggatcagttcccctccaagtaaatgttttttcttctaatttttcaaaattattcctttttcgataggaattcaatcaaaattttaacatttaaaatcataaaatattgtcatttttggactaaatctattaacaaagtgcactaaaatttcaagattttccccagcggcgcctatcggtaccgccggcacccaaaacggtattttttttaaaaaattggctaaaaaccgcaaaggtttggacattttttggacagaatcttaaaaattgcactcaaattttaaaatttttccccggcggcgactatcggcaccgcc

SEQ ID NO: 1114 - DNA, 1177 bp, Heterodera glycines
  unsure (1)..(1177): unsure at all n locations
tggatttggcaaattaatgctggcaaatgggccatttatattagcaacaattgcacgaaatcattttcatgtgctatttcaatgccttacttcaaatatttatttaaaattaaattttcaattcctttttttttacaaaaattacattcaaaaaataattctgctcggtgttaatttgtataatgaaaaaagaggcgttaattcattgaatggcatccaaatattttgctaattttttctggtttttttagatgtttttgcttaaattatcaatactttttgcacattatttcattaatgtgcaattagccgaggaacaaaaatgtggggaatattcaatcggagaacttgtaaaaagaactaaatacagatcatataaaaacaggaagcagccaaaggaggttaaaacaagcggaaatgatgactttagcggctcttttggagaggtaaatttgcgacaatgcccaagccccgaaatgatcaattagtcctaattagtacagaatccaatgtttcacattaaccgtcattagggatggttaaatttcactaattgccatgattggccaaatattgtccaatcagctttttcccttctctctgttcactttgtttgactttggttttcctaagatttcggttggatttatcgtctatgagaaccaaaagcaatgtgtggcggttaaattctttaaaaacgaaaaggacgaaaaggaaacggacgaaagcggcaatttgaaattgcacacgaaggcaatcgaagtggccaaacgcattacgaaatgcctggaggaaaaggaacgacggcatctgatcgaaatgatcgacgcgtaagcgaagagattgccacaaacttggacaaatgcttgatttttgcaaaacgaaaacaaattgaaaatggtgccatgccaactcggacaaaaggcaactcgtacaattttttaggttaagcctatgctttaggtttaggcttaggcttgctcgggcctaggcttaggcataggctttattttgtaaaatttgagttgctttttatacgagttgcctttgtacaacagtgtacgagttgccttttgtactagttgccatcgacccttgaaaatgatgtanaaattcttttnaaatgtgctttttcagtggctctgtgacggatggcacggacaanctgataataata

SEQ ID NO: 1115 - DNA, 2204 bp, Heterodera glycines
gactcgcagaataaaaatggcacaatatttgtcgatgacgcggtgttcacggagcaatactgtgccccggaatttgatggtgacaaccatttggtaaagaaataaaatggttacggtaatcaagttgaaattttattagatttctcgaaaatttgacatttggtcactcggaatgataattcatgaagcatttgttgacaagctccgccaggaaaacggcaaagaaacgttggaattggtaaagcatattttgggttttaataaaaaatatttcctttattcttatatcaattataaattggctcattttttaggaagatcgggagcgatttatgacagaaatgagaaatttgtacgactatgaaagcttcagcaaaagttacattatgaaaatgctgaacaagtcgtcaaatattacgtcaatcgaccaatttgacgccaaaacgtgggagaggaacaacaatttggtcgaaattgtgctcgaattttggcaacgatacccaaagacggcacttttggtgacggtaaaaattatcaaaaatgaatgtttttaagaaaatctttttacgtggttggccattcacaaaaagtgcaaatttggtcctttacaaaaaagtgcaaaaatcaaaaatctgttttttcctataattttttaatcgattttttaaattagataaataatattcttctaaaagtttttttgtatctcgtataaaaataaaaaaaattactaaatattaaataattgattactaaaattttaaagcttaaatggcgcctttaaattttacaaaataaagcctaagcataggcctaggcccaagcaatttagcttgagttgaagtggatacatttcaacataaatatttccatttttatatattttatttaagttcatttttacttttatcccatttgtaattacacttctatgtatataaaaaattcaaagtaatctggctaatgattttatttaattaggtaaattaaattatttttattcgagatccaagaaaaacttttagaagaatatgtattaagcatcaatttaattaaattttaacattaaaaaatcataggaaaaatcagacttttgattttgattttgtgaagcgtccaaattgcatttttgtgaaatgacctagaaccatcttttcagaatatgctgcacccgacttggcaacagcgactgacggccaaaggcattttggactttgtcgccggaaagtgttacctgcgcgagttcaaatgggcacgaaaggcaaaaaacttgcgcctttttaattactttaaatttggcgaattgaaacaaatgatagtgcgaaaacagcgaatggttcgagttcaattttggaagaaaaatcgaaagcaaatgcaagagaaatttgggaatttgaaaagaaaagtggccgaaataatggagcagcagcagaaggaaatggccgagataagcaaaatgagcacgaactgtgaaaacgaatgagtgagaagcaatattgggatcgcatttttaaacgcatttaaatttgcatttattgtaaaattgaactttttattttatttaaaaaggaactatttaaacgaatattaggtacaatagccaaatgataattagttggccatgttaaaatgcaaagtgccaaatacaacaacaaaatggattaaactacttagcatttctcaatttatggaatgtatctcaacaattagttgtaagcgaataaaagaaaagattaattctaggctaataaaaattatttgcaattaatttaatgagttaaaatgaaaagtgccgaattaaataaaaagttgaccaatgcgatttcggcattttcaaaaatgcaaaaaacagcaattagtgaatgccctttattcgtgtgggaaatgcgctggtgaacacaaattccgacaacaacttccacccaattatgatcatcttcagcttcgctttcgcgtcggtcctttgtctttcggttctcttctccctgcgcttgtcgcttatgctttcttggctgccgccatcttctttttgactgccaacacggaagagcggggcgggcacggacagtagccgctgtccttgccgggatgtcccggtgctccgggctgtccaggctggccagaggttccaggctggccgggctgaccgggcgcgccaagaggtccgggcggtccttggcctcctggctgtcctggatgacctt

SEQ ID NO: 1116 - DNA, 7018 bp, Heterodera glycines
aaaaaggagattttttttacaaaatatgtaaaagcagcaggagtctccttttgtcggcagtcctctatgttgtatttgataagaaataatggttttaatgacaattttcgttaagttttttcaaaataatcatgaaatttatgaaaaattttggcaccctcccatagcctgctagccttgcatttcatcatcagcatgctccccagaaaattctcttctccttcattagtgttatagaattgatgagcgtaaatatgttatacacatgtacatagtagccacattattactataattgcaataattaattaagtaataattatcaaaacgtggaaaggcggggaaaggcccgctgagcacgcccaaccgcagttgtaatgcgcctggttttcattttcgggacacgtttgtgcaatttgtttcaattaagggacgtttcaggaaaaaacaacaaccaaaaaacgaagttcgttccactgggccctctctttttttctccgctgccgacgccccaaaaatctgggcgggacaaatttttcgatggtttcgcgcaaagaaattaattaataaaaaataaaaatgaaaggcaaaatcaaacaagacaaaacggaaaattgaaatgacttacgaaggtgaaaaagaagggaaaaaggcaaaggaggagagaaatgggggaggggggacacgtcccccaggggggacaaacagcgcaaaggcacaaaagtgtacgaaaatgcccgagggcaaaatgggccatgcgacttaaggaaaatggggtgatagaagaaaaaagtggcaaaatattcacatataaaagggggcagcaattctcgactccaccaactcagcagcattcattctctcatctgctgaaaattaaacagcttttcttcagtctttccaaaatgtgccttttatttatcaaaaactgaaattaattaactaaaaaactttcaattttttcggcattttaaattcattagttccaatgaaatcccttccctatccccctcaaaaaattggttttgtcttttggaatttcaaatttttagcgctaaaatgcaagagactcacattgttctcgggattgcctcggtgtgctctctgttggctatcatcgccacagtcgtcactctgccatctctgtactcggagatgagccaaatgaacagcaaagtgcgcgacggagttgaggtactcagccggccgcactcagacaaaaaacacaccgaaatttgccaatttttccaggccttccgcgtcaacaccgactcggcctggactgacttgatggacgtgcaagtggtcgtgacgccgccgtcgaagccccgtgataaccccttcaactccatcttccgtgccaaacgtcaactgcccggacactgccagtgcgctggcctccaacagccaagctgtccccctggtccgcccggcccgtccggaccgcctggacagcccggacagcctggaggcgcaggacagcccggacagcctggacagcctggccaacccggtgggcattttttgactaaccctatgctaatcagccccttccattgcagctcctccttgcccgccccagaacatcccctgcccacgctgccctgctggcccgcccggccgccccggaggacagggaccgcccggacagcaaggagcccctggacaacctggtacgcccgctcaaggtggaggacctggaacgcctggcgcgcccggaccccaaggacagcctggacagcccggacgccccggagccgctggccaacccggacagcctggagcgaacggagttgtctcgtaagcactttaatcatggcttttaagttaaaacccggttccactcgttcagacgcccaattcctggcccgaagggaccgcctggagcgcctggccagaacggaaaccccggaggccaaggtcagccaggacagccaggaggccaaggaccgcccggacctcctggcgcgcccggtcagcccggccagcctggaaactctggccagcctggacagcccggagcaccgggacagcccggcaaggacagcggctactgtccgtgcccgccccgctcttccgtgttggcagtcaaaaagaagatggcggcagccaagaaagcataagcgacaagcgcagggagaagagaaccgaaagacaaaggaccgacgcgaaagcgaagctgaagatgatcataattgggtggaagttgttgtcggaatttgtgttcaccagcgcatttcccacacgaataaagggcattcactaattgctgttttttgcatttttgaaaatgccgaaatcgcattgtcaactttttatttaattcggcacttttcattttaactcgttaaattaattgcaaataatttttattagcctagaattaatcttttcttttattcgcttacaactaattgttgagataacattccataaattgagaaaatgctaagtagtttaatccattttgttgttgtatttggcactttgcattttaacatggtcaactaattatcatttggctattgtacctaatattcgttaaatagttcctttttaaataaaataaaaagttcaattttaaatgcaaatttaaaatgcgatttaattctttcttctctctcatcgttctgtaacatttggattcaattcataaattttaaaacctaaaagatttgggtactcattcggtttgggtcctatattttggtcaaattttttcaattttttttattattattatcagaattgcttcagaattgcttttaaatgacaaataaaagtgattatgtgtttattgggtacaattcagcgatttgtgaccacaaattaaaaaaaatatccggtcccccaaatcaaaaagaaaacagcaaacatccggaaaatacaaatgtaaaagaaacacaaattcctggaaagtacaaatggaaaacacataaaccgtgaaatacaaatgcaatcggaaaatagaaacacaaaagtaccacgaaatgcagtagaaaatagaaacgggatacacaaaaatgtagaaacggaaaaattgaaaaaaaaatcacgttgaaaatacaaaacacaaaacacccaggaaaaacacaaatgtaaaaaaacacaaaaaacatcaccaaggggcggacaaaattacgaactttccggaggaaaagcgaaagattccggattgtaacctgaaaagtaaaaattaaagaaaatcgaggtaaatactgtgctttttacagttctaaacgtattaatttctaatggatagttatcgaatttgttattcctttttttaaactgtaaaatgataataaaatttttaattaatcagtagttctaccaagaactgtttgaaaggtctgtttccataaaagataaattttgaaattaacaccaagatcattttatccagagatttgtctgttttgtcgaatttgcttttatctaattagcagcaataaaatatcatttcggcttacaaattagcacttttctttaattccactactcatttttggcaaaggcatttcattaaaaaaacaacaaaatgaaaaaaagtcatttgcgtgtgggtgcacgtgggtgtgtttacaaattagcaatattctgagagccacagagatccttttctcatcctccctttgcttttgcttgtccaaaccagcgatttccccgcgagggtttcggaaggaataattaatttttgtgtggttccgccgcgtcccacgtcccacccgtcgctgaagcaaactcaaagttcacgaagcgtccgtcacaatttgtcgctgtgttctcaagcgtaccattccgccgtcctatcactttccctccggcgcaatttgccccattcatctgctgctgctgctgctgctgctgatgttcccattccttttcattgtccgtccgtctgtctcccgctaatgatcggccaatgattgatcgggccaaaagaggttccgcttctccccccgcccccccaccgcttttccctcgcttcttcgcctccctttttaccttccttttcttctttccttctgcttactgatgctgtcaaaaagggtgtccaacgtggaaaatgggaacgactcgacccgacccgacaccccaacccaattcaattccatttccaatttttcttttcttttcgctttgccccccccccccccgctcccctcgcgcgacttccgttgtccattatttttatttattgtctttttggccacagaaacaataaaaatttctaacaacttttttgcgccatttattgtgaccccgtgggggccaaacaatgggaataatacgtggacggagcgggcgcagcagagtcgagcagcacaatcgggaacaaaaacaacagcagcagcagaagcaacgcccaccgccccccagcggaagacagaaaccgcaactgatcagcagcagaagaagtgcggccgttgacccgcaaaccccattattctcatcattctcctccgcctgtcccattccctccacaaattggccccatttttgttgcttttggtgtccaacaattggccaatatgttcagcctttgctgttggctccgcttctcacttctcccgccgctgattttgccgcttgtttttggcccggcattggccagcggtggtggcccaaattcttcgcagagacatccatcgcatcatcaacagcagcagctgcacagtgaaccgcttcaactccttcactcatcagctgaaacggtggtgaacatgagcagcactaacggacaacgggcggcagacgccgccacacttggcaaaagtgggccggaagggccgccccctggcaaatggttgggctgcgaagacgcgccggacgaatggcgaagacgaacctgcattaaagtaggacgaagcaagcacacatagaggagtgactcattcataaaaatcctattcaattctggcacaaaacgaaaattcagttgcgacagattgaccgcaaggcacggcaagcgttgacccgtcgcgtcaagcagatggtctcgccaccgtcgatgcccggctcgccggcgtggttgaagccactcccggtcccagtgaaccatcggggccaaatcgcgtcgcatccctttgagtgcatgacccttcgctgcctttgccccttcttcaaagtgattggattaaaacaaaaataggtaaatttaattcccaattcctccaagggcaaaatgcgtcgtgatggcctttgttatttgcccagcggaaagccgctttcgatggcctaccgtaaggagtaccgtatgctcagtgatgaggaacggcgccgtttccatgtcgcaatgaatgagctgaaacgccaaggcatttatcgctttttcggcactcagcaccgccgggtggccaccggtggggcccactcgggacccgcttttttgccgtggcaccgcgaatttgtgaagcgcttagagattgccctgcgtttgctcgacccgtcgctggcggtgccctattgggactcgggtggaaagcacaatttcaaaaattaaattaacaaaaaaaaaattgtttatttcccggcattaagtgatggacaattatttgccggacccgcgcgactcaatttttttctcgccaatgtttgccggcgacacggacccgaacggatatgtggtcaacggaccgtttgccttttggcgaacattggagggacgggcagccattctgaggtttaaaattggggcattaaaaaaacatttttaattggcaccatttaaaaacaaattaattaattttacaccgtttttagggatttgggaaaggacgcgcagcttttcaccgaaagacagctcttagcggtggcaaacgagcgcaacatttggaacgttctctcctacaccgtccccttccgcggctgtcccattccgacaaattttgacgcgttggaatattcgcacacaaacgttgtatgattttttaaaattatttttaaattattaaatgcaactttttttttagcatttttgggttggtggcgatttggccacgcccgaactgtcggcaaatgacccaatcttttacatggtaattaatcattttttgacaaaattttcacccaatttatttagcaccattcttttgtcgaccttatttttgaaatttggcgtcagatgcaacaatcgcggcaagaacaaaaaacaaaaatatttttaagtgtaattaatttattaattagtttttcatttttagttctgaaagagaaaacatttacaccgcaagtaattctattgtaatttttgaaaattagcttaagaaaaacagatttgaaaagctgtgccaatgaatttcatttctcccattcgctgatggcaccgttcaacacactgacaaacattgacggtcagtggaagcgaaattaatgagagagtccagcagaatttggggggaggaagggtcgtaggaattagcttggaaatgattcgaaaaatcgaaaatttaaaaaaaaaattattttcattaattacagaatattcgagttttattttatttattttttatcttgtaaattaaaaactctctgtttccaattaaaggtctttcaaatgcgtacactgatcagctgtaccgttatgccctgcggccggtgtgcactcgcaaaaggcccacctgcgactcgaggcatattagcccccctcacccattaatcaagactaattgccatctcaatttatttattttgggtatttattctgcgatctcgaccacggcgtgccccattgtgtgtcaaaggtcaaattgggcggcaattgccgcgggtttgagggcaaagatgcctgtttcaatgggctgtgtctgtttgggctgtgccaaccgggcccaaccccaccggcaagacaaattgcttaatttatttttaaatttcaatttgccgtttaacgaacctccgatttgctgcttccgtttagccatggagtccgccgtctcccacggcgccgccgcgtctccagccaatgtcttcgctgccgtcttcagctccctcccccagaagccttagacttttc

SEQ ID NO: 1117 - DNA, 2145 bp, Heterodera glycines
ggggaattgttggcccaaatttttaaaaaaagtaaactttttattagttttccaagcttaaaactttaaaaaatcccccaaagttttatcaatgtccactgtgaatattggttcctgtttaaaaggtcaatatttgcgattttgggctgcattttcaagaaaattaaaaaatgttggggcttcttagtacaaagttgaaaagcaattgctatgagacacaaactttcttcatgagggtaaatgagcgggccatttcccattaaaaggtcaatcggcgtgccatttctgcgaagcggcgtataaccgatcggatgagtgtcaggacagacatctcagctgcgagcaatgggcttcggacggcgagtgcggaggacaatcacagtgagagcagtcaattataattaataggataattaactttttatcttttttagtctctttttggaggaaaattgccgcgaaagttgcggactttgcgcactcaataaatttgacggttcttgctcaatgtttttgaacgcagctgcaaattttacgcacaacagatgagaacctttccatatttattgttatattgatttcaattttaattagcaataataaaatagactttattatccggatattaaaactaaaagcactaaaataatgttgcagaattaatggtaaataacaaacacaaaattgacataatttggcgacttttttttttttgcttttcataaccggttttttttgcgacgcgctttttcaaaaaaacttttgggaaatagaaaaggatgggcggtggtgccgttagacgccgctagaaaaatttttgaaaattgtgaaatttgttaacagaatttgcccaaaaaataaaatttttgcgcgagacaattttttagagaaattaggagtttttgggggccgacggtgccgatagaagccgccggaaagtttatgggattaactggtcaatatttcacataacacatgtaaaaagcataaaataattgtatttgtttttacgaattttttttatcatctcttcaacgcaaaatgcgttttttgagaaacatctccataaatgtatttttaaaaataatgctttttggccttttccatatatttggttcccactcagtggaagaaatagtaagaaatagtgtgtgtttggtgagagacactctctgctgctcgcttttcccattcgcttatagtcaattaattcctcacccgagggtcgtggcgggcccttgtggcccagcgagtagggggcgaaggcggacgaggggcgggcgtgcgccgagtggccgcaagggagcaggcaaaatctcccgcgcggtcacagtggctccgaccgcacacgagagcatcgccatccaaacgcccaccgccaagctttttgccgcgctaaaaatgtgggcagtgaaaacaatcagatgaatttatcaattggcattctcaattcatttcctcaatgtgaccgccttttccgtttcatcatctaaccccggctgttactgttcaaaaactgtttgatttcgctttctgtccaatgcttttatctgcttctaaaataaaaattttaattccgtccaactacttatttattggctttttttttaccaatttgtcttccaacattttcgtcacacgttcttcacattcggccattttttgtggaataagtcaaatttattttgattttctggttcgggcgtgaaaaacagatggaaagtgaaaacgcaattaaacttgggtgcagggatgcgcgacttttttgactgagcgactttatttaaattatttaaatttatttaaatttaattttaaattattttaaacgtcttaaaggtcaaagatgttgaatttaaaatcatttaaaattcatcaaaaattccccgcaccgagcggatccgagaactccagagggggcggccagactgacgcactaaccactcggccacattggcaacggatgacaaacattaatttgctctcataaagggaaaaaatgacgtcaccggcagggaaaggggggcgagagcaggcagcagcgagtggcagtgggggcgagagtaggcagcagcgagtggcaggggggcgagagtctggcgagagtgcaatgcaacgagaaaaatggcgagaaattgctcggca

SEQ ID NO: 1118 - DNA, 2181 bp, Heterodera glycines
  unsure (1)..(2181): unsure at all n locations
aagctaaaattaaaaaatgcatataaattaaaaaaatatctggntntattaaagggtgaaccgtgccagagtcgaacagctatgccgacccttttaaacgaatactgtttaccaaactaaaagtgcaatgctgctatccgattcggttttaccgattaattgcaaattttctaaaaatggcctcgaatttaaaaaaaattatctcgttaatgggtaaatcgtgccagagtcgaacagagctatgccgatccttttaaatgaatattgtattaccaaactataagagcaatgcagaaattcgattcaatttttacccagttattttaaaattaaaattaattatttttttgtcatttaatttgtgtaaatctttaagatgtaaccaatttaacccaattctttaatccatatttgttttgaacattataatggtaaatttttaagctaaaattaaaaatggctaagaatttaaaaaaaattatttcgtttattaaacggtaaatgtgccagagtcgtaccaagcaatgccgacccttttaaatgaatactgtattaccaaactataagagcaatgcagaaattcgattcaatttttaccgagttattttaaaattaaaattaattatttttttgtcatttaatttgtgtaaatctttaagatgtaaccaatttaacccaattctttaatccatatttgttttgaacattataatggtaaatttttaagctaaaattaaaaatggctaagaatttaaaaaaaattatttcgtttattaaacggtaaatgtgccagagtcgtaccaagcaatgccgacccttttaaatgaatactgtattaccaaattaaaagaccaatgcagctatctaatttggtttttaccgattaattgcgaattttcaagttaaaatttttttacatttaacttatgtaaatttttcaaatgtaaccaatcctagccgaattctttagtcaatatcttttttgggtacattgttaagctaaaattaaaaaatgcatataaattaaaaaaataatctggtttattaaagggtaaatcgtgccagagtcgaacagagctatgccgacccttttaaacgaatactgttttaccaaactaaaagtgcaatgctgctatccgattcggtttttaccgattaattgcaaattttctaaaaatggcctcgaatttaaaaaaaattatctcgttaatgggtaaatcgtgccagagtcgaacagagctatgccgatccttttaaatgaatattgtattaccaaactataagagcaatgcagaaattcgattcaatttttaccgagttattttaaaattaaaattaattatttttttgttatttaatttgtgtaaatctttaagatgtaaccaatttaacccaattctttaatccatatttgttttgaacattataatggtaaatttttaagctaaaattaaaaatggcttagaatttaaaaaaaattatttcgtttattaaacggtaaatgtgccagagtcgtaccaagcaatgccgacccttttaaatgaatactgtattaccaaattaaaagaccaatgcagctatctaatttggtttttaccgattaattgcgaattttcaagttaaaatttttttacatttaacttatgtaaatttttcaaatgtaaccaatcctagccgaattctttagtcaatatcttttttgggtacattgttaagctaaaattaaaaaatgcatataaattaaaaaaataatctggtttattaaagggtgaaccgtgccagagtcgaacagctatgccgacccttttaaacgaatactgttttaccaaactaaaagtgcaatgctgctatccgattcggtttttaccgattaattgcaaattttctaaaaatggcctcgaatttaaaaaaaattatctcgttaatgggtaaatcgtgccagagtcgaacagagctatgccgatccttttaaatgaatattgtattaccaaactataagagcaatgcagaaattcgattcaatttttaccgagttattttaaaattaaaattaattatttttttgtcatttaatttgtgtaaatctttaagatgtaaccaatttaacccaattctttaatccatatttgttttgaacattataatggtaaatttttaagctaaaattaaaaatggcttaga

SEQ ID NO: 1119 - DNA, 8955 bp, Heterodera glycines
caatcagttccttgtgtacaccttgtgaacgaagagtacgaaaatcagcctgttgttgtagaaggaacacttgatctgataggcgatctgttcttttcaacatgttatcccaagaagagacaggggatcgattggtaaaaattttaattattatttaaatgttgatttaattctttttatttattcaggagcgaacctctgtatgcggaattgaaggatctgatggtttgtccgggcgatttgcggaaatgtctgtcacacttcggacatcggaaggatcagcgcaacttggtcgtcgacgagctggattggcacgacgacgacgacgacgacgacgacataacagaaggagcttggtgaaagagctatgcttgtttaataaatgtcgaccggaatatctcgcgatgatgcttcgaagaaggaagaaggaaaatatcaaatttataggcgatcggaaaatcgaaactgtacatcttcgacagaatttacaaatttatccggaatcatttactctttttggtgctaatcgtatgtacgcctatcgtggtatgcttggtgtcacggtagagcaacatttatacgctaagcatcgtgtccgtctaaaatttcccaacctcccatgtgttgtacaagatggcggcaacggccatcaaagttatttcccacttgaacttttgaaaatatcttcgttagctatgcaagatgaaactgcttaattatttgttgtattttttaatggctgcaattataaagaaattaaatagtaaactgaaaattttatacattcaaaaagatcattcatatccaaacggtaaaacctcaagggtttgattaataatgcctttctgacagacaggtaaatattttttattttgtttcctagttataattcgattatcttttgtcggctgtattttattataattgaagactactgcattctcctgctcatcctctttcccgtagttgatcactttgcgtacaaaatgctcaaactgaagctcctgagaattgttgacgtcgaatgtaatgcctcgaatcttttgcacaaatttaactgcttttgtctgtttatgcaccattttcattgcatattgtttcgctccgccacatgcaaaagttaaaatgtcgtaatcggcgtattcttcgctcatttgacccaaatactcgcccgtgtgaactggaacaaggtctcgcttatgccgaacaattacactgtctgtgtcagtgtatagtaactcggtgcccggtgtattataacattgcagcatatagtcaagcagtttcagcctagctcgactcgttgtccaaaggcttaggacaatattgcttgatgtatgttctacgatgaagtttttcttcggcttatacagcactcgaatagctgcatcggatatggggattattgacgatatttccttaatttttaaaaataactcaatatatgtagaaaaaacctaaccattctatggtttagcactagatcataaaactcctgcggtctcgttatcactttgttcgagccaagctgatttctcatgctgaattttcccctaaaaaatataaactaaaatgccaaacaaaaattttttaaactgaccatagactattaagcattaattttgcgatgaatcgtagtcctggattctttttaatactcccaaattctaaatcaactccgtatatgcgccggtactcgcggatatattgatgcttttcttctaacgtttccacgccatctggaaatccgcttgattccacctgtgaaaataattttgaataaaatatttgttgaatgacggaccttaagcctgatgaattggcgaacatatcctttgaacacctgatcactccattcatcataatgccatgctctccaaaatcgatcgatgacgtagcccatttccaacgctttttccaattcaatatgagtgaaatttccagtgaaggctctctgctgttccgaatgttcgcatttgtgtgcacagcgtgtcacacttttacgaaacaaagccgcacatcgatggcaacagctgaacagcagtctctcatcaattttcatcggtagaactggtattcgtagaccacgaggagggatgacacgaactcgataaagaccctggtaacttagatgttcaggtttggtccagttgactatcatctcctccgcgctaggacgaataattgtaggaacaccaattggataagccgtgtcgtagttgacccatgggtatagtgagacaatgtcgaatacggaaattttttcatccgcggacgcttcagcaaaaagtcgtaatggacccgttcgtccaccgcaatatgcaagtctagggtctaaagggccacgttcgtttgccaagtcatcgaaaaacactttcatctcgtggtttttcttcagctggtcgtttatttcgcattcccatatttcttcaacctgtagactgcgcccatccgtgtcaggctcgcgaagttgacgaagtcggtcttgcgtcatttcattcagctcttgacacgtcttttcgtcaacgagctgctcgtcaggtttgaaacatcgatcacacccgtgccaatagcagccgatcacttcaatgcatcgttgctgactttcaatccacccgtcaagtttaaattttttccattgtttttcccgtccgttgcccgcatgttgtatatcaatcccttcgctttttgctctccaatccaaatatttgatcgcaattacgctggctctatcgttacgttcatatccaagttcggggaccattgctagctgatcctcttgcataaattgtgccttgaagatgttcatacaggcactgtaaattaacggaatataaatacaaatgttgtgtatgattgattaacctggctattgtacaacttatcggtagaacatcaaacccttgggtgattttattaattaaaatatggcgaaatttcaccaaggctttgagcaaaatttcggtgtcgttatgacaataggttcggagttgttcaggcaagaaaaaaggagtgtcttcattttcgctgtaccattttttaaacttttcatatttgtccgccttcattgagccgggttcatacattttctgatcaggaagtttctccagtcgtatacaataattctccctcctgttgaacgcgtacgggaagaacggtttgtcttcgcagtcaaggttgaaagtcgtctttaaatcagcgagcggaatcggcataatcagacatgagtcacgccatattaacattgaatgctttggactatgtcgaacacgaaactcgtatatcttgagtccattcataacgacatcaggtcgcctaacggttttgcagatataatttagcgcaaaatggccatcaaatcttgaggcgttatgagcctaataatttataaaattttaaaaataattttttttcaccctaacccatatgtaggttttgtattgattgttccacgcccttaaaatccattcgacaaaagcggcaacaggttgctcatcgccatcagcttcactcctatttgaattttggtaatgaaaaataaatttactcaatttactcaaccattctttggttcgttcaaacgtcccattggtctggcaacaaatttcacaatctgtttctaactctgatgcgtcacagcaatcggtacaagtaatgcgtgctgaaagaaagttgaccacgtgtatacactgcccttcgtcctcaagtttttcaagtctcgtttcagtgtcccatacgatgatacgataggtctgttcttcttcaggcattttgatctttttaatgaaacagctcgcctttttgtcatgataaacctgaatatattatacacatttcctccgatttcagtcatttaaactttgcatcgtttgcagtagcttgtgtcacatttatgtctctgatctttatccgagcgataaatcctattacagagcgaacaccgtttatagagtttacatgataggccaagatgaccattatagcaaggcgacgaaaaaaagtaacggttacattctgaacagaaaatacgaacaccgtcctgtttcgggcacggatgtagaggcccaactaaaatatcggtcatttcaaaatgttcatgaaaaagcaaacctttagaacattgatgacatctactcctacaacttattgtatgtttagcatccacagtgtacgtacactcgcaatcaacacagtatttccggccaagtttgaagaaacagtgaatcttttttatcacatcatagtgattgttagagagaaaaagcgtgacgttaaaacgatgtccccctgctcctttccataagggacggggtaactcttctggccggtcttcaaataacactatacggtacattccaggaaaaacgctatcctgaagcacattcattaaattttcagcacaaaatattaaaattgtagacaaaaattacccagtattgctgaacaggtagcagatggtcaattccataagaatcttggccaataatgatgcctgagttcttcatcagatcttcaactacagattccattcgcccggtgtttgataatagacggttatacgcttcataatccttgcaaaagtctgttctattctttatagctgcaaaaagtggagcttggttatctggtggactgcgactggagcgaaaaatttcataatcatgataagctcggcctgcagcaagagcataaaacaaacaatagttgtctttgttgaatatacggatcatttgcgtttgattgtagccccaattctgatgcggaaaaaatcgtggtgctgatcctgccggaatagttaaacatgtaacgacgatctccactggctcgctgagtagcaaagtttttttgttaactcctccttcatctccctcgctttggcccagtttgtccatctcggccattacaacgtcaatattgttttgtgctggaggcctcaaaggcagcactaccggatcagttaatccttttccagccaccattattcctaattttgaaacagtgcgtccgttttgcttttccgcattttgtacagctctattgacgagttggtgtaacgcatgacggagcgcttcatccggctgttcatgttgagcattaagcacaaattcagtgacatggcgttgcacagagaaacgctccatattgtgtatatgattggtgatttctacgtataacggattctgttcctgtcctacatcggcatttgttgataaactgtgttggcccgtgcctgtttgacggttgccaactgttgaatgttgtgttggcacattttcttccatttgggactcggtcggatattgttcaaaataggccattgatcggaaattccatttcggctgattgggatgcggctgactctgtccgcagctgttttccgtaattttcgctttttttctttcagaagccatgtcgctgaatatattagttacagaacatcggatttggtttaattctttgatgtattaacagggtaataataccctaaatagttgaagattgaagataacatttgttatatttatccggaatcatgatcgttagcattacatatgatcatttctacactaagattagacatcagcaggtcttctttgctttccaagcttaaacttgttattttccgacaggcttcatgacgatgctccttcggttttctgtttttcaccgtcatcatcagcgtatgcatcagtagttggtacaaatacggatgaaatgacccaatcatattgtggcaagctgctggcttcacctccccaattggcgtctttttccttaatataatttatatgttgtaagtaagcgacaagataaatttagtcgtttataatatagagtataagtaataccttaataatagagcataattaattctttaataatagaacataattaataccttaataactattttggctacaatcttcttgcccacgaaggaatctaaaagcttagcaaacccttccccgtctccgtccagttccatcatccgcatttcgcttgctttgcggccgattagcttttgagaagtattggtgaacatcgttgtgttttggcggcactctttatccataatatcttgaagttcgagtcgcaaaagtatagcatccgttggatttttaacaacaagagcacagctcgaacatagtctctgatcggacagcttacggttgcataatagcccatttttagctacggttgggcaagcctaaggggtgacaatacagactgttgcccgttgcattacagagatgaactcacttcatacagtttatactgtaagttgagtatgtgagcttgtacaataaatgtaccagcccccgccgaattgtttaacgtctgtgacgtttttcggggtaaacaattgcccatcagcatcgcgtttgtatgtagattttatttggaagcgggaaagcatttttaatatgagtatatctatgattttacataaaaagttagaaattgtttagtttagcagggcgcagcgttgggcaaattcatgaaaaagacatacaacgcaaaataaaacacacaaaaaaagtgaaaaaatgtgaaccgaaaatgcaaaattggcccaatgtaaatttgccagagtgggttatatacggatatacataatgggcggaagcatagcttaagcctcggctttgtcctaagcgaaagtcggaaaaaatagctaaaccaaagctgggctaggcttatgcaaacgtctgggatatggtaaatatttgcgtgacattacgacatttaataattttttaatgtataagacttttcatgctttcatttaccaatgctaatttagcaaagttatgtatttattaccagtgaacggatttttaggttttcacctattttttacggatagcatatgctgagataagcgcaaaaatcccatttacttcgatcacttttcaattttgagcgactttttagcaactattgtcaactattttcgcttaataaattttttaacaactatttttggcttgtgaaatttttaaaaaactattttttcaactatttctgcttttcaacaaaaaattattatgaaaaatgcaattaaaaaaaacaaaaaatgcacctctgagaattgacgttaatttttttcaaaatacatccttttttttcaaaaaggcactcttaagaatcgacttttttccaattttggcaacttttttagcaactattttagccttttttgtttttggcaactattttggcagttttttatcaaatatttaggtacctatttcgcgatttttagcatctaaaaatccgtccctgtttattactgatcaaaacaaaacgacatactgggcactactgtattatcccatcgtccttatatttgttataataaatagagacgggaaaaaatacgcaaaaatagttttataaaaaagctgattttctaattcggggcagtgacataacgtataggttcgaaattttgaagaaaaaatacttttgcacaaggcctactcttctgcaaaatttcaaattttcgactggtattaaaattctgcatataaaatcgcatagccagaaaaatcccgcctgaaatacgtcatttttgtaaaatggtcttaaggctacagccaaaaattttcaaatttacccgaaaataaattttaaaaataagaattataaaaactaaatactacagagactttttttttgtttatgaatttatttgtattttatcaaacttgaaaccataaacaaaagattaacccaaaatttttaggaagctatttgatatataaatgaaaataatttcagcgtcaaaaagaggccaaatattctttcttgttatttaattgtatttatccaaataattaatctcaatcgttcagtgtacctgtcattgttgtgccaaattacattgatatgtgaaaacaacaatatttaagcgttctccttaagcaaaaccaaaaatgaattaagaatttttaataaattgcaatattatttcattgtaaatcatttaaattaacagaaaaatatagaaaaatggaatgaggtcaaaaatagatcaggaataaaaaagaccaattgttatttgatctcaatgtaaaaaaactgccgaaatataacataaaaggcaaaaaaaacccaatgattaatttatttttaaacaacagcaacaaattttcaatcacaaaatttttgctggaaaatatttgaaaaataattaataattttaatccatttttttggcaaaaaaaaacttgttatgaatttgtacagaatgccaaaaaaagactaatatgtcaattgatcttaatgtataaactgccgaaaatataaccgaaaatgcaaaaaaacccatgattaatttgttttttaagcaacagtaaattttttattttaaattattcacaaaatttttcaggaaaatagtgaaaaaataataattttattttaatatattttttgccaaaaaaaaacttgttatgaatttgtacaaaatgtcaaaaaaaagactaatatgtcaattgatcttgatgtataaactgccgaaaatataaccgaaaatgcaaaaaaacccatgattaatttggttttttaagcagcagtaaattttttattttaaattattcacaaaatttttcaggaaaatattgaaaaaataataattttattttaatatattttttgccaaaaaaaacttgttatgaattttaaagttatttaaaaactgattctttatgaattttaaagttatttaaaaactgattctttggatgtatttttcatgaatatacccaaatagaacataaaaatgtacaaaaatgtcaaaatatatgcaaccatttaaattatattatttaaatgtggaaagatccaatgaaaattagaaataattataaaatgaagagcagttgtacatgcactcccttttatatgggaaaagaagtgcaacacgataaatatttggactttgcgaaa

SEQ ID NO: 1120 - DNA, 3767 bp, Heterodera glycines
ggtcttgaataatccctaaaacttgtaataaatagaccaaattaatactgccaaatatttgaggctttattgaaaataatttataattggggttatgcatgcaattttgatggcacaatgtttaagaaatgctgagaaatgcaaaagaactgtatgttctacttataaaaaggttggcatctgtccatttacttttgaaattataattataattttaaaaataaattaaaatgtgaaattattttaagaaattcttattttctttccttttttttgattggaaaacaaatatgttaatcctaaattgtgtatctttttacggatgaaatgcgtgttttttgggcaattaaatgctagaattgcgaatgatcatttttttagggtaagctgacaattaatccgccatttcatctctcgtcaccaaaaagcgtgagttttttttgctgaaaaacagacatataatccgtcaaattgcgattttacttaaaaaaaatattttaaaaataaattaaaagtgaaagcattttaagatattcttattttctttacactcataaaaaactaaacttttttggctggaaaacaaatatcttaatcctaaattgtgtatcttttagcggaagaaatgtggtttttttttgggggcaatcaaatgttagaattgcgaatgatcattttttagggtaagctgacaattaatccaccatttcatcgctccccacaaaaaaagcgggagttttttttgctgaaaaaacagacatataatccgtcaaattgcgattttccttaaattcaactgaaaaaacgtctggcttttttgggcagatttggcgaccaggcacataaatggggctatttaaaggtatccaattcaagttgaaatcatttaacaaatgagggctaatcgacctgaaaaaaaagcggaaattcgtcgctgcgcctcctcaccccaaattggcgcagcaattcctgaaagggctgaacgtctttttaacagaatgttcgatgcccttggtggacaaggaagtcgccggaagcgaaaagcctcaactccccacccaaatctttttgatcacgcaccatataaccctttgggtgtgtttgtgttttttttgttgccagtatgccacacatttccggttttttttgggtgtggaattccgattatattatatcctagaaaattatttggtttcggaagtccgatttccgaatagttttcaccatcagtgttcctattttttaaatcagaaatcagtggcatgaaaacaaagatctccgatctttggaagggatataaaaatgatcgtcagaaaataaaaaataaatatactacggaaataggtaattggtgaaaaataataaaatatattaaatttttgatttgaaaaaatattttaattaatttgtatttgagttttttcgtttttaattattatgattttttctccaaatttaactcatacatttaatttaaaaattttttaagaagttttgcaaaacggattggtgccatcgactagcgccgccgcttgggttgggcacgaggaaattggtgataatttggatgattttccatcaaaaattaattttaaaaatataaaaatttaaaaaagataatttgaaaaaattttaaaactttttaaaaactgcctagttggacatcaaccgtcaagtggcgcgcgttattcgccaatatcacccaattattttgaaaaagaataacaacaatttgcggcaatattggcgtcgatgtgatcaatttaatatgtaatgtttcccaatttaatgtgataattagtattttaatatgtgattttttcaatttagtatggtattttagataacttaatgtttaataaacatggtaatggtgtcggtgattgattatatgcataggtaaatgatgtaaataaaattttgtttttacggcttctttaataatagggatacggttattaggcttaaaaattgttaaaatggcgtcagtaaaaatggagaataaccattaaaaccatcaaatttagagggcgtaaaacggtaaattcgaaaagtaaaaaataagccaattctttttgacatatataatttttaaaatcgaaaatataagagaaaagtagctcaacaaacatcaaattaaaaaaacttgtttttcgtatgtttctatttaattgactcattatataaatcggactttttatttatttttattatagccaaaaattataaaatatttgattgattgagaaatgataaaaaaaaatttttaaatatcatttcactggctcgaaaaaacatgggagagctcgaacggtgccgtgattgtcggaggcgcgggtctcggggcggccatttttttgaaaactgaaaattttataaaaatttttattttgttttttttttaattttgttaccgaaaacgatgaaaatggtcaacccgatcaaccagaaaaaaaaaatggcaaggacggaccagttgatcagcaataaactatggaaaatatttttttattattcattttattaaaattttttattttttacatacatttttttatcggaccaatggtggtcctcggctatgtccggccactgatctgttaagttgagatcgtaatcggccttgagacagatcagtggccggacataaccgatcggtttccaacatttggaaccggccgcggtacaattggcgcggcgagcatttgtgaccacttcccacttgtcctccgcgccaatagtagggaggaatagaagaaaagcgacggcgaaaaacaaataaaaaagagtgttgcacattttaggagtaaagattaggggcagaatgtggtgaaataagcggaaaaagggaaaaagtgcgaattaaaaaaagaaaaagccatttacaaagttattttataaatgaaaaaaaactttgaaatgcttcaaattttattaattgcttctaccggtcggccgatcaatgttagacgtgggaataatccgaacggaggaaaaatggcgcggcagaagggggattgaagtgattaaaacgatgatgaagaagagggggcaggggtccgggagagggggaggggtttccggggagaggggcaggggtccgatcatcgccgccgccttggggcaggatcgggaggaaaattatcggcacatatccaacatttgctccgatcatttcaaccgcctccgtggccgagtggttagagctcccgtttccaagggttcgagtcccccaccccgcggcgaatttaatttttattaaaattctcccgcatttaaataatttaaaaaactgcgcgagattcctgaggaggatggctaattggattaggtttgtggtaaagccctggacccctgcccctgtaacccattactactcttgtagcttaaaggttattgactcattaaataatttttggctgtcattattaaatatttcaaatttacataattgatcattcgtttgagtaaaaaatgaatgaattatatgaaaatattttaaaaagccattctttaatgtttaatgtgtcgcaatttggaacaatttctgtaaaaaattcttctgcaaatttttccatccgttgaagcaaattgtagccaaaattgctaatgatgcattccaatcggttgggcttttcagaaagatgctttaaggtcaaattttctttaatttcttttgtctcatatttgaacagatataaaatgatttgtcgccagactcgactatgataatcggatcagtgtccaaattagtaatggtcagccca

SEQ ID NO: 1121 - DNA, 1977 bp, Heterodera glycines
ctaaaaactaccaaaataattagtttttagtttctaaaatacccccccaaaatagttgctaaaaatgggtaaatagttgctaaaaactttcaatttagtgatgtaaaatgacaaaatttattcaaaaaagtaaaaaaattaggccaaatcattattgagctaaataatttttaaaatcacaattttttgtcaagaaataaatatttaaattttggagattgatttttgaaaaatttcatttattagggatgcatttttgaaaattttcgcgtcgattcttaagggtgtatattaaaaccgccacctctattacagcgcccttttgaccaataatgactgaaaaattttcaaaaaatttcagttttttaggtattttctcgattaataaaaatgaaactttttaaaaaattggaaatttatgccaaaaataatttcaacaatggaaaatttttgatattttactccaaaatcaatttttattttgtattttttcttcaaaatgcttttttaaaccatatttaactattttcgaaagcataaattgctaaaaataaaaaactttaagcccacaatgtctgccgctgcttccggctcattgttcaactcaagtgcttcatgggttgcttcatgcatgtccgatggacgatatttgcttaatgatccgatttgtatgaacaaatgcgtcaaaattgaatataatggaaaaaggtaagatttgtgtggcttatcgtcccagggctttctcgataatccgccaaaattgaggatttttctaaaatgaatgaaatttcccagactaatcgggagaatagaacgttatcgaattattctattaatttattttcgaaattttaaaaagtttatagatatataccgtattctttggcctctgcccgacttggttacatttttttcatttctaagtttgactgtgccaatcaacaatcaatgcccggaatgtgaagtgaaccatgtggatttgtcaaccgaagcatttttatggttggaaccagccggtggaacggttggagtggcgactggtaataacaattttaatatttcaattgcaatattcatttcaggtgccaccattacatatttggaatgtgcctaaagaaattgggttagaggaagaaatgcacaggcgatggaacagatgaaaaccgagcaaaaaatattaaaatgttaatactccttaaatttatttaaatgatacggaatattgggctgcactttaagttttatgcatataaatttgctaattcggttcagctttttcagttttgtttgaatttgtacattttgtttcacgtttataaagattaaggcaattaaattgacaagaccaagctcttttcgtaaccaattccaaaaaagtttaaccagtaataaaccttatataatttgcagttaaataattgctaaattaagaactcttttgcatgttcaacgcaattttttgtgttggattatcggtgcagtgccccgttaattttctaaaagatgtaaaatgatcagattcaattagccaagtcaccaaataactaatggtttcattcaaacaaaaagttaaatatgtaaaatatcaacttaaaattgagaaaaaaatttagtaaaaaaattgagagttcgcccagggaaaatttataaaaggaaaaatgaatctggatttttcaaaataacaagaataacaaaagtataaaaatctttataaaaattttgtatcaaaaacggaaacatgtcaaatcatcagctggcaatcattttcttttagttttcctccaatctttcaagcttatttaggcttgaatgtaaagtgccaacaatttttgttcacttgatggttttttcttgtgtgaatcggagaaaaccaaacggacctcaatttttgacaagtgaaaaaattataaaaaaaaattatttaaaaaactaaattttctaaatttataaaaaaaattaacttctagaattaaagga

SEQ ID NO: 1122 - DNA, 3728 bp, Heterodera glycines
agattttaatctagttgagggtattactacccttcaagaaaatgaaaaacaaaaaaggaatgccaaagtagacttctctccacttgagacagatagcctcgagcaagactacttatattaacttcacttcattttttcaatttaaaaaaatatatctattcaatttatccgcaaacgaaatttcggtccgtaaaagtcggtccgcaaatgtcgcactacgatagatccacaccagattttatatttactggtaatctttctatgaattcgttttacccaaagatatattgggcacaaaaaaaaaaacaaaatgtcatggctaatgtggactaattaaggaaattgtggaccgctgaatgccagggacgcggcgtctcacatctcggtacctcaatgagttcctcgaaaaagttgtaccctttgttagcgttcaggtccggataattgacacttttgcccattttgatttttgtgcaaaaagcggcaccctcgctgatgaaatggatgaaagcgcctgaatagagcgggttggaaagctccaatttgtcgctgtccacttgcagctcacacgcctcgttcagtgacaaagaggctcgcttatacaccataatttgactatcaatcctgaaaaatatgcaattccaaaagaacaaaactttagtataaatttagtaggcggagaattaagagggaagaattgggtagcacgtgaccgggaccaagctaggaattcccggtcttcagtaggttcaggcgtgactgaaaattggaagtggacaatccacattgaggacaatccgcagaggtggacgatcggacagggacaacccaacagtaaaatacacaaaaagataaattccgtccccaaatgggtgccttatcaagaaaaaacaaaaataggaaataaaaaaatggtgaatacagtctaaaacattgtttcgttgcaaattattttgaatttgccattttgtaagcgacggttgcacatttgttgaaaccatcaatttatttacctattttcagtctccttcggcaacgccattttcttatcgtttggtccagatcccggtatttaaaaatcccaggtaccgatcccgatagggtgaccggaaacgggaaaataaaactattatgattgaaagtttttagtggaaatcagtagaaaatccatccgaaaaattataattttgtgcaagatcataaaatttgcgaaattttcgctttaattgcaaggtttataaatttatgtctacggataccgtcgaatttcttgcgagattgcctctttgtctttggtcaaatgttcattttccgcatgatagtttggactcttctcagtcgatttgtcattgatcagatcactgattgcctttatatgctcgattttttcaataattttaatgtaaaaattttcaatggtaatttgaattcgtgtttgacatattttcagcgattttttctccttgctaaaaaacattaaaataggaataacatcaacaattaaattattcaacattttaaatttaaaaacttaaggaaagccgaaaataattttgcattaaaatgaaaatttcataaataatgaaaaaattttaaatttagctaaaggtgcatttaattaagaaaaaataaaggctaaatgtatatgtaaaaagtggtatgaactgcgcgaattccctaatttgtaagattacttgccaaatgcctcactgcttaaattatttaaaaattaaataaggacattattttgagatttgcaaggacagcctctgctgaattatgcatgcaaattattattacttacctcaacaaattttccaaactggcaattttcatctggtgcttgcccataaatggattggttgcactggcaacattttggccattttgttggagaaatattatatttaaggaccaaaatattgcgaaaatattcatcattttatatatttttattatatttttgagtgaatttgtatgaataccttggcaaaaggtaataaaataatttcttttcgcgattttacacgtataaatcaatatgtaattctaagcatttttacaaagaaaaataaatgcaaaaaaaaaaaaaaaaatttaatccggattttctttattgttaaatacaagtagtataaggctccaaaagattgcgggtagcaaagggaccccaccagctcggtggtgtgcgaaaaccaaaaaaataattttaaagcgggtgtggctttaggatgttaattttttttaaagtcttaaaataaaagttgcaatagacaccgccggaatattttcgctattgaatttttaccaaaaaattccaaaatgtttgctaaaaattccaaagtagtcaaaatacgaaataaaaattgttcggagaaaatgttatttttgggcttcctcgccataactaagccgcagaaaaatatgtaaaaacataaaaatccgaactctagtaaatatgaaacttaattttgatcttggacgacaaccaaatttgctcttgaataattaggaggtcatttgtagtgtctaccgtaacagtgataatttttcattattgcctcatcttacatacaatctgaatatgcaattgaatatttttttttgcaacttttaattactttgattataaaactctgcaagaattatgtattgatctattatatgtaaaaatcagcgcaaataaattaaattattacatttttgctttatagatatgtagcgtaaaacatgttttagtccctccattttgctaattgatttcatttaacgaatattaagcctttcctatttaatgctgatatccgtaataattaataaaataattaatgaaaattgtttaataatatttgaacttataattatgtattaattaatatttaataccagttttttctgtaatttaggcattaattaatattaaatgtattttaatttattaacaacaatatttaccatttctttttaaattttcattttgtcaaaatgcgatgcccggaaatattaattaaaaaatgctaaaatcatatgaatgttttcatcgattttgattcatttttcttttttttctcatataaaataataattaattaggcttaatattattttattattatttcataggttttgcaatttttcagtttgcaaaatttgtcgcaatgaatgttctgctaacattatttgttcttcatcaattttattcaactgcttattctattccgtttttgaaaagtaataaaaaggaataaaaaatattttttaataaacaaaagcattaaatcttatggaataagtataaagttgctttatgtgatccatcaacagggaggggcatttgggactttttgagtgtccgtaattaattaatcatcccgcccattaaaaaggcacttttatttggtgacaaaaaatattatcacttaattcaaatctcgagtcctcaactgtcgggattatccgcaaatttcggggaggcggttttaggcaaaagcggatttaccttcactgatggattcatccctccgaatttagaactctgttcatggtacaatgtgtgccgcttttctaataacccaattggcggggcacagcacattttgctggacaatgtgtacatggattattttctggcccattcatcagctgaacaatgtgcaaatgagtcaaaaattgcaattttcaccatatattgtatatgctaacatggaaagttgaacaaaaccaaaaag

SEQ ID NO: 1123 - DNA, 1916 bp, Heterodera glycines
agccagaactttacggtcttcagttgatggagccgaagtatttggcaaaaattcctgcaatggaattgatcggtttgctgcttttgccgctttctggtgttttccagttttttgatgatgagaaatggcagctttcccaatggaaaggaggttaatatcatcgttgcaaacgacacaaagggcaaattcttcgccttttcgactcttctttatgtgccggaattctttttcgtagctctccaaatagatatttttacgttttgggggcattttgggcatttaaaattaacgaatttacactaaagaaaaataaaaatgaaattttttacaaaaacgaattaattcaaatattcgcttcaataaaaaacaatatgtaattaaaaaaatattaaatttttgcatttttattttcaaatccatgaataagcacaaagcaaggaggtcgtgccaaaataaggacaaatcttacaaataaggacatttttaatttctaagatttggcacctccaaataaggacaaatcttacaaataaggacacttggccgccctgattaaaaccgataattttctttttactccataaattaatcattaaactatgatttattttcattcaatgggaacggagaagaagaaattttatatttaactgaagaaaaaaaaattttttttttgaacttgcgcaattttatttattatttttagttcgaaaaaatattatcggcgggccggggaaatttttatagattttgatgtgatttgttaacagattttgaccgaaaagctgcctttagcagaattttaaaagataaatttcttaaatccataaaaatttgtcttcatcttttttaataagtctgtcttattcccaaaaaattaagttacgatgttttacaataaggaaaaatgctaaaaacaagcaaagaatatatttttgtttcggtgatttttataattttttattcattgttgtctaccagactatctttagggtgtattttctcctgcggagatgggctgcggggatccccgttttcagtaataggaaaaacgaggaaaggggaccggcgggatgaaaatcacggggatccccggccccgccccccccccccccccggcttggaccttaatatataaattatatttttaaataggaacctccatctgttttctttgaaaatgggcccgaagatgcgcaactctttcgcgcattaacaatttgtacaaaagaaacgtttgaagaggaggaacaaaaaactaacaaaataaccagtggggaaaaaattggcgatgatttatttcacattgttaaaactcaaacgagttttttgcaatgcctttggaaaaatgtgcaaaaaaacgcccgaagggatgaaattttgccaaaattgcatttggaaaagattatggaccttttggagcaagaagaatgtgataacgccaaattgttatgcggtattagaaaaatgtttacagaacatagtaattgtttatttgtaaaattaaattaaaaaaatcaaatatatgataatatatttttgaaatcaatattaaaatcatttaaaatttattttgaatttattatgtattcaacaattttaattagattaatttattaccatttgaatatttaaatatttttctttatttttcatccaaaccttcttttatatgaatttttaatttaattaagacatttaaacattaaatttatttttttaagaggattcgctaaaaacaatattggatcccgaaggaattataaaaatggacgaaattttaaataaggttaacatttttagaaaattattgaactaatttataaatttaacattttagaattttgagtatttttccagcgtcgaaaattttacatcagaatcatccgatgatgaatattgtttttcggacgcaa

SEQ ID NO: 1124 - DNA, 2569 bp, Heterodera glycines
  unsure (1)..(2569): unsure at all n locations
tcaaacgatgaagatttaaatttaaataccgatcagcaatattcactcaaaatgtgcaagcaatgaaaattgtggtggagcagcaaaaaattggtaaaataatccactatttgaaaatcatttataaaattaattgtttcttgctaagaaaaaaaattggcatttaaatttattttttacagagacttctttaatttctgctgaatatgctcaatacaatttgataagaacaaatccaacaaatcgtgagctcgattttaagcagtcggaagaagtaaaaataattatcttttctccttactctatttctctaatatgtataatttccgttttcaatttctttctttctctctttgccgtccttctcttattcacttctctctctctctctccctctctctttctctgaccttctttctctctctctctctctaacgttctttctttctcactcactcctctctcattcaaacactcactgtttctttctctctctctctctactcctctaacaactctctcactctctctttttcattttcattttttagattagcaatttaataaaaccattctgtgccaacgaaaacaaaataactctgatcaataaaatcaaaaagcaaatatattcaaatttaaagcaatgggtgaaaatagcgactaattttgaacgtacatttatttgtttaaacatataattaatattaatattttttattgacaataaaaattaaaaatttgaaaatgttacagatcccttgctgttaacaaacggttcccatatgatgaatgctgaattggacagctccgatttggatttgctgtgcattgtgcccgcacaaatcaatttgaacaattttttataccaacttaacattagtttcttttcaatgcttaaaaaagtaaattttttaattaaaattagagcttgggctttaggatttttagctcgtttcttttgtatatgggtcagggtaatttcgtttttactgcattttataaagaaatttttggaaaaatcaaaatttacttcgaaattattacttttgcaaaattttatcttaaaattatcatacaaaaaatcacttaagacccccgaaaatagcataacaacagaacttaaaagcaattctttcgtatattttagaccaagaagtcctaatgcgaaaatattagtgaaataaaaagaaaaacatcttgaataaattctatttaagtaattattttccattttataaattaaagttttatgaaattattgaatgttgcccaatttactgttcagaatttaacgaaagcaaaagttagcagtgtgtccggcagagtgccattgatacgaattgagcaaaaccaaattgaatttgatgttttgttcgttcctgtcccattacaatatttggtagaaggtgttaatttggaaagtgatcaactgatcagagaattgggcactgctgaggcgctttattcattggcaggtaaacacgctggaaaatattgtaaattttaatattcaaaccaattttaattaaaaatagttttagttaatttaaaatatgaatctttcctaagcttttatttttcatttcggttttgataattgcaaatgctccttttaataccaatgttttcggactttaattgaagattgcatttcgtaattttaatgaatcatttttataacttttaaggctacagatccggcaaatttcaattgtcacttgtcaaggacagagaaaccttttcacaatttttgagagccattaaactttgggctaaaagtgagcaaattttattgaaaaaattcataataataatttaagattaacattaatttttagatcgtttaatttattctggattatttggctattttaatggagcaactttgtcagttatggccactaaaatttgcgctttgtttccatttgcacccttggcttatttattgtaccaattcttcagcatttactncaattggtaattatagaaaaacattaataattatgcatataaagatttttacgaagttttaattaaaaattgcattacgaatcacttaacaaagtatattctaatatttttctgtatgtttaataaaaaaaattttccaaaattccctcttcttaataaaataattgtaatcattaaatatcaaggaattgggcatctgaacctgtaatgattgaaaaactgagtgaatttccgccacaaagcactctgaagccgccaaaaattgctgaaaattcaatgacagtgatcacgccaaggtttccagaacaaaatgcctcattcaatgtcaacaaatttaccattcggacaattgttgaagaaattggcatcggtaaaatttttattatttaaataattgtttaagaatttataatccttaaaattaaaaaaaaattggaataaaataagtaaataggtagcctctaaacgatattatttttttatatttagcgaataaaattttaactgaaaacccatcaaaatgggcacaaatatttgaagaaattaatttcatgaataaatttgcccattttgcgctgatttgggtgctcgacatcaa

SEQ ID NO: 1125 - DNA, 3017 bp, Heterodera glycines
  unsure (1)..(3017): unsure at all n locations
atattttaggctctaaaactgccaaaataggtaggctttcggctctaaaaaacacctaaaataggcaataaaaagcctcaaatntagggggtagaaaatggcaaattttattaaacaaagcaacaaaattaagccaaatcagtactgagataaaataattcttaaaatgacatttattttcaccaatctgaattctgaacccaaatttaagaaaaaatcaaattcggaattaggcaatagtcaaaattggtttcagattcgttgtcagcgaccctgaaaacaccgagcaacttttcacaatcagacatcgtcttacaaaaaatttgtgtaaacaatagggcccccacttacagctttaaaaaaataacaggtgatttatcacttttgttatgaataggcggactcattctttcgtcggtttgtattagatacagataagaaggcttattttctttccgtttttttgttttcatgatttttttccaaatcctagtggaagttttttaaaccttacccattaattttcgataatttttcagtcgtgcttccttgtcttttggcgtttcgtacccccagccggtgtatgagggcgacaaagaattgccattgtttggatgtgtgacataatggtgtgtttgaaggcggatataattcacagtgccaactttgtcaccatgttccttggcaatggttgcactaatgacagtgaaaaaggcacagaataccatcaaaaaaagaatgccatggggacaatttcgattgtatttcatttttaaaattctaaaaattttaatatttttttctcatttaatgaaatttattttttgaaagtggtaaaaaatattaattcttatgacgtctaaacaatattaatactttatagctcgtccgtcaattgaattgattttaatgtctacaatatttaatgctgcgtcgtctcatctcgagaaattgaaataataaaaaacaaatttaccttaaccaagagtagatcagataaggagttccggtcggttttttcgataaaaaatagaaaaaggtcaaaatcgaaaaagaatgataatttttcttcgatttttcaatcgttttccttaaaagaaataattttatattatttgaaagtccagggagcacaattttaattgggaattttttaatgaaattaaaaaattaagtaaaattttcaaatggaaatgtattaaatcatttgcaataaaagtaaaaaagcggattttggggtgctgacatataaaggcggggtcagagtaatattacctggggcctattcaaattagcatcgtatcaacgatgcgatgatacgatgtgatggctcatcatagccccgatgcccgttcaaattaaaatcgtctcccgcatacgatttatcacaccaagtcatcacatgtacgttcaaattcatcgtatcatcgcatctacgatgcgatcgtcacatcgcacgtaaaatcgtctgcggcagacgattatttgtacgatatgtcgtatgtgcgttcaaattaaaacatttctacatacgacgagcccatcatacgatgagcctccctctatgaaaatcgtatgtagacatacatggaaggaaccagcgattttcctacatcgtatgtaggaaaaaaattcgtaaaaaattcgggagacttttaaataaataatatttgtatatttcttatagattaaagtctcagctattttttcatataaattttaaatttttagtaccaataaaagccagtcaaattattaaaaacataaaacattcaaaagaacgcatttttcctttaatttgaaaactaattaactgctgcttcttgtagtgactggttgttaatgccgctgatttacaaatcaaatattattaacagttttaaataattgaaaaactctccgaatcatttcatttcgaagcattggattttcaataattgggtgtaaatgggcaaaagatagtttatttgcattgcccgctgtcgatagaaaaaatttggaatatttctgctgctgagaatggtactaactgctgctgactatggcgttgaataaaaatatttgtttcatttccatcacatcatcacatttgagtatttcgtctcatattaacacttctttttaaacaaaaaacaaaacacaaaaagaaggatcagcagctaccttattaggtttgtataaattatttggagaaaataacagcgaatattaaaagtaagaaaataacagcgaatattaaaagtaattatttttattaaattttgtcgaatttaaaattattttaaaattgccaatggaaatatttttaagacataaaatgatttgtggtaaacatcgtattcattcatcgtatcatatcatcacatcttatccataaaattaatttgaacagccatacgatcgtatgatgagaacgtacgattggatcatcgtacgatctcatcgtatgatgagctgcaaacgacagctcatcatatgacgaaagtctttaatttgaacacgcatatgatcatcgtatcatcgcatcgttgatacgatgctaatttgaataggcccctgaaatccgggaaattttcgaaaaaaattcttaaggggcggagaaaatttttcatcgaagacgattatgattgacagaaagagcactaaattggtgtaccgacatttcgccaacttgacatctcgccaactgacatctcgccaactgacatttagccaactcagccaaaaacattcatttcgcctactaagccaaaatctgacatttcgccaactgacatttcgccaaatagttaaaaaaattaaagaaaaaaaactaaaaagagtaaaaaaaaatgctgtgttaatatcaaatacagccctattccagtttacacgtccaatcagagtgaccatcatcatttcttatgtcctaacttttttcatatttgttcgttccaaccatttttggatcaatcaaagcttaagaattcctttcacttttttataatttcgtttctagcgtaattcagattctagca

SEQ ID NO: 1126 - DNA, 3295 bp, Heterodera glycines
tagcttctcaatttggacccagtacatctcatctagtacacggtagcgcatgatcagaggatcggattcgtgatcagcgaccctaaaagcgccttaaacatgttttcgttaatttcaaaaacacatttacagtcatcgggaagtgtatgtgaaaaatagcctgtaaactcttagaaaagtaccatattgccttaagaatgtgagcatcgataaaagtataaaaaatcaaagcaaaagaaatattacaatttaaaatatttaaatcaaatgcaaaataccaaaaaccaaacgtcattttcaaggattcttatttatttaattttaaataatttttattatagcctttttcattattttttctatctttataataaccaggactcccagctaacttttaaaagcctcatttggctggcaaaaatagttagtcgactaacatctaaggacagccgcaactgtatgaaaaacaatttcaaaaatctcaaaaatcttcctaaatatcttaaaaactaaataaataccttttctgatgattgctcgcaaaataaatttaaaaataattaatatatagaagagaaaacatcatttttcaaatagttttttatacggactgtcaaaaatccttcaccgtttcctttcgctgtcgaaaaaagatgattagcgctagcattaagaatttggatttttctgcagctacaccaatccgtatatccttagaactatccttagctcatgaataccaactctttttttttgctcttctatcataaaattcgagaaaatttatgattatgccttttattaataagagatttgtccaaaaattacaaattttaatttttatcacaaaatgaataatgaatataaaaatccgttctctacttactttatctcttttattttattcatttttattctttcctctcttttttgattgcatttttatttaatcgatttcttcaattttgctgaataattaaatatatttaaaaaatattttatgtatacatataaaaatatattaacgggttgggaaagcttttgagttaaaaaaaggtcacgtaggaccctgtatttgcgaaaaaatggttgtttactgaaacccaatttaaaaaccaaaattcatgaaaccatttttcaataaatatttaaattttaaaataaatttgtaagcagcagatacatacaatgaaaaattgtgctcctttttgcttaatcgacgcatcaatcttctttgctcaatttgggctgacctattgatcagatcaatgtgtgaagaggaggccgatggtatgccaccaaaaatgctgccatcgtcgacctcaatttcccccgaagtgccatctccattggcattttcagtccacattccctttgatttgccgccatttccgccctcattttccatccaagttttaatagacaaatcattttcactgtcactttcactttcatcacttttgtgtgacagttcaacttttgtactgtcattgtcagtgtcatattcttcattcaaatttgaatgcgtttgtttgcatagcattttatgtgccattgagttgcataggtcgggcatagatggaattttggatagtttcggaatgggcggcattttgcatgggctgggaagagaaagcattttgtatggcttggttaattttggcatttccattattggtttcccctctaaaaaggtgtataaaaattagcggataaataagctgtaattttttgctgctaaattattttactgctaaatatctttatgattcgtcattgttttaccaaaaaaaaattagttttagtttatattctaaacatttttctaaattgattttaccgtggaaattaaataaattttataaaaaaagagatttttttgatctgaatattgtgtggaagaagctggctgggcgattaaaatgcatttgcccaaatttattaacaaaatgaatgaaaaaaacgaaaaatacacccctaagaatcgaccgacccttaactaactttctttgaaagaataaaattatttgttatttttcatttttacccaatagttttttgtagtatttttgtcttgccgctttgtctttcttcgtttcgtattcccaacccgtcacatatgatgacgatgctgatgggtttgatgatgtcaattttggtggcactgttgaagcattggcattttcttcctcgttgccagaatcggcttttttcataatgtcgctgataatgttgcctgcattagtgcgcgtaaaaattgtcgaaaatgccattgaaatgatgccgaaaatgttaaaagttttattgaatttcattttacaaattaattctaagaaaaattaccaatttaattttttttattactgaaaaaattatatatatatcaaaagaaaagcattcatttttatatttttgagtgtcatataaaatccggaaggaagacacatgaataaattatgatttaattaatacttaagtgcactaattaattggattttgtggcatttattgatttaataggcattctcggatacatttaaatattttttatacatattatttacaaagaagtagttattttttagagaaaataataaatgtaaaatgttttcgctgtaagctttcaaagggcctaaactatcgccaaaactcccataattttggcttgaatttttataaattaatgtttttttcgcgtcccaacatttgcggacatttaaagaaatggagtaaatttcgttgctagtcaatttcttggaacaactttggtatgttttttttgacaaaaactctgccttcctttggtcttaaaaacaatcaaattagacattcagggtattattctaaatttttaagccaaacaaaaatttagttcaaaattcgcagacagtttgtaatatcgaatgatataaaaatttgattgcttataaatgagaaagtttatgctgactttttaatttgaaaatttttttgaaattttcacttcggcgcctgctagaaccgcggactcacctctctccagaaaattttggaaactaactcggcaaatatttttttcctactatcaaactttatgcatctttttgacactattttgaaaatttttgccatcattttaagcactgtaccgctgcaaccttttgggctttcggttgcatctcataccattgggttatccgcaagttccgtccacaaattccgttatataatcaggttataaaattaaaataagatttggaaatcattttacgctaggggggacaatcccattaaaaatgttttgttttttaaataa

SEQ ID NO: 1127 - DNA, 1858 bp, Heterodera glycines
  unsure (1)..(1858): unsure at all n locations
aagtttttgtgatcaattgaaacaaaacaaagtgagtcattatcaaataaaatgaaaaagttccctaaaactatcaagaaatgttgcaataaatntattatcncatgctatnnttgtcagttaatccaattcggtaggtgcttggttaatttttgcatttgatttcgccttcttctcctgctttatcgtnttagttgctgctttnttctctttttttcttatatgtttttctaaaaagggagcaaacaatatatagaaaaaataatatttaaaataaataccaattaattacttaaattcaaaaattctaagtcgtgagagcttatttttcttggatccaggtccaattcaggtccaagcaattttttggcaacctgtgtttttcctgcgattgaatttcggggatttttacccagaaagtattggttcagcaaagataataggaaaccaggcttaatttttcaaaatacgaattatttattcatctcaaaaatgtatgcatggatatgacatgccctgttcccgttcaaagacgcgtcgccgctcttccatacaatccgtgccggccaatccaaaagcatttggtgaacaaccaatgccgtcttctcccatcgcagtgaagttcaagcaaatggcagaaaatgtcataaaaaatatcaaaaaagcggaacaaagttatatcgcatttttaattaaaaaaaaaataagattttgcttcagctagaatttttgcaactccaataatcattcatttttatatctatccacttaattccacttaattcacatgaaaaacatttgaatcacatattttttcaatcattacttttaaattggagtatggtggcatttattgaacattgcacaatttttgtttgtaattttttcagtagccacgttggcaaacaatgccaaaataacttatgaggtgtataattcattaaaataatgtaattatttgtcaaaataatgaagaaaatatagatccgaagattatgttcaggaaggttggaaccggttccgttactagcgcaccttttgatgaaactcttagaataaatcaggaattttacttgtcaataaattgtattttttataagaatttttattcctgattaatcagaaatcagcacaaccagcccctaaggtcacttttaattatacaaaatttttctttatttttacattaataatagatttttcaacaatataaaataaaaataattataattttggacaaatttgttaacaaatttgacctaaattgcttatttgtagtcttctattttagcttgggattaagataagcaatgcaacaccttttttgtttgttttcaaagcacttttttacgggtctgtttagcttcggcgcaaacgtttcggtgccagcccgagtttttggattgtaactttttcattttcaaaatttccaaaaaaaatttcacaacccctaggaatttttttcgaaaattttcccgattttcactgtattttggggtgtcccgatcactatgaaggagtgatctgataaagttgctgtaaaagacttttttgatcaacatcaaaagttagcttagcacgaatttttttcagaattttggccacaaaatatttagtttaagagaaataaaatttttgtccataaacatatgaccacctaaaatgggcactatgcctattcactcacgagtcattttgttaataattattatttcagaaattgatttataggtttagaaagcccatgaaaaagctacaaaaaatgacaaaacattagttcgtttcagatttattcaaagcaaagggcaactattttcctcgatttatcatttgtccataaacatatgaccatgactgt

SEQ ID NO: 1128 - DNA, 3183 bp, Heterodera glycines
ccttcctcttttcttctcctgttcctctttccctttctcttcctctttgccttctattcctcttcgtcttctgtcttcctctttcccttcctcttcgcctccctttatcttatcttctcctcctgttcctctttcccttctattcctcttcgtcttctgtcttctcctcctgttcctctccccctttctcttccccttcctcttttccccttctatccccctcatgttctttttctctttgcttttgttccacttctgcttctcttcctcttttgggattgatcttttggataattgaataatcattttcataatgcataaaaaacattaattcctaagttaaaaaaatttttaattcatgcggtatttacttcaaaagttaatgcatttaaacaatccatcatgttacatcgacggcattattgccggttgcacacaaaattggtttggccatcatcatcatcgtcctcatcctctgctgccgtgggcggtaaaattccgtaatgagccgtgtcaacgattgccgccgccgccgccgccgtccattgtgacgttcatccttctgtttgcccaaaaatacaatttcatcatccccgtcggtgcctgaaaataggggaaaatgtaaatttaaaaaaaaaaatttatttacaaaaataaatcttcccctcttctcttcaccgaaattcttgtttaaaaacagagcgaaaaaatggtgaaggcgcagtggttaaagcaaaaaaaaaaaaagtttgtcagtaccccctacccacagccgaaatagtgactatcattgccgaacagtcagataattacagtatactaatatagtacttttaatttaaaagaaaaaaaaggaacaaaatatttacaaatttttcaaatttctaacaagggaacatatcgaacctgctctattcaatggtatattatcatttatatgcattttccgactcaaagtgccaaaaatatttgttggaacatttttgaaaagtaattcaaacaaaaaattttggaaaatttttgtattggaatttcttacaaaaaaaactatgatttttgttcttgaaatttttttttttagtaaaaacaaattttcccaagcgaggaagggttggcgggtcgaccccccccctttttcatatatatgatgcagcaaccaaaaaattgtccaaaaaagcatcccaaatgtttaccatcattagcgggctgttgcgcctcactgttgctgcatgccgccgcctcctgctgctgctcaacattgtcgtcctcccgccgttgggcattgccaccgccgtcgcattcctttggcaaattcatttcagccaaaaagataacgtcatcgtcttcatcatcgccattgcctggagggatttaaaaattttaacggaacaggacaaaacacagccgcccaaaacacagccgggaataaattttcaaaaaaaaatcgccgaagatttcttgaaattttttttttctcatagaattttcaaagaaaactttttctaagatttttttcttgaaaaatttctatttgaaaatttttttaaaagtttattcccggctgtgttatgtctcggctgtgttttcggcggctgtgttttggggtgtaccgaaattttaatgtggaatatttttgaaaaaattgagacgatacctcgagaaatttgtgcaaaataattttttaaatttgtttaaaaaattaagattaaaaaaaaactttttctttgacaattcgaaaaaaagaacatttaaacaagaaaaaagatttaaaaatttattaaaaaaaccccataaatttaaaaaattaaaagtttttaattttttcagatgcgaaaaaccaaatcagtttttaattatttatttcgggtgggaggggggtgggggaactgttgaaagcgttcattttattatgattaggtatttattatttgtttttaattgtactaattttgccaaaaccaacctgaacattgttgttggccatcacattcaacacccaaggcttttttgtggaagaattcggtgatgcgtctggtgggcagccggcgatcaacaagttcaaaacgactcgcggacatgtaaatgcaactgacatgcggatacctgacgaatttgttgttgttttttcaattattgcaatcaaaaaaaaattgcccaaaattttgctaggggtgccagagaccccataaatttttttcgagtgggccaaaaagcaaaaaaataaataaataaataatttaatattcgcggatttccagtccagaaatttttttctgttcttacgaagcctggtacgtgttcgtaggactgcccttgtcgtcttcaccccgccccctcctcctgttgttcgacctgtacccgtaccacgaatggccgtccttctcacgattgaatgggcgcatgaagttccagcatgcctgttggatgcccgccgttgtgtagttgggcaagtgcattgtgcggacattgtgatcgcttagcccggcggagaagccgaccaccaatgtttgagcaatgcgaccatactgcaaaacaaaaatggggtagaaaaatcaaaaaaaaaaaaaaataattccaatcaatttaaaattcaagagacaaaaaaaaattgagggtggaaattttaaaaaatgataattattattccaatgaaaatttatgtaaaacactcaaaaaattaattctcgaaatttcaagacatatagatttaaaattaaaatatttttgtttgttaattatttgattaaaatttaaaatattttattttttgaaaaaaatcttgtactgtaaattatagtacaagattttttttcaaaaaatgaaaaaacaaaaaaaaaattcgcttcgcctgccttatcatcgtcggccaccaaacgctttgacagttcgttggacagcgcgtggacccattttttgacctccgcgaccgttgcaagcattgagacaccagcaaattgcttggatgtgccgagcgattttggctgcaaatttgagcagaccggctcatcattatgccctgaaattaaaaaaaaaatttggtagacggagtggttttcaatggtgacggcaaaataactaataactaatttcaaatgtcgcgtcgctcggaaaagaaaaaatatttttaaaaataattttggctaaattagggcggtgcaccccaaaactcagccgagacataat

SEQ ID NO: 1129 - DNA, 3402 bp, Heterodera glycines
aaaaaatttcgcttcgcttgccttatcatcgtcggccaccaaacgctttgacagttcgttggacagcgcgtggacccattttttgacctccgcgaccgttgcaagcattgaggcaccagcaaattgcttggatgtgccgagcgattttggctgcaaatttgagcagaccggctcatcattatgccctgagatttaaaaaaaaatttggtagacggagtggttttcaatggtgacggcaaaataactaataactaatttcaaatgtcgcgtcgctcggaaaagaataaatatttttaaaaatgattttggctaaattagggcggtgcaccccaaaactcagccgagacataattcagccgtgaataaatttttaaaaaattttcaaacttagaaatttttcaagaaaaaaatcttagaaaattctatgagaaaaattttttttaaagaattttcagcgatttttttgaaaattttttgaaatttcttagaattattcattaaattttgaaaaaatcgcctgaaaaattttttaaatttttttttccatagaattttctaagaaaaatttttctaagatttttttcttggaaaatttctaggtttgaaaattttttaaaaatttattcacggctgaattatgtctcggctgagtttcggcggctgttttgtcctactccgaaattagggtacctaaccacttaaaaatacatatttattttctaataattatttggtaaaatgagagggctaccaattataaaatttcaaatcgctccgaaatttttttttattgtcccgtgacatttcgtcgctggcgagacatttcgggtggcaactttttgggatggatcgcccaataattttttttaatttcccagaaggatgggatgacacaatattaccttcaagcaaccgtgtcaaccagtcaacatttttagggtgaaaatgttgcagcaaaacgccgcgtggaatgccccgaagttcggccatcatctacaaaaaaaaaattgataatttttaatgaattttcgattggacgggcacccatcacccgttccacaattttttttttttgaaaaaacgcgcaacaaaaaagcggcggcttgaaaaggaagaaagcatcaatttgcagtgcacacccccccccctgcccccttccgtcacctccgcattgaattggcgcttcagtcgcttgccaaattttccgcccaaattccacaccgaattgattggcgtctgtccgtacagttttgcaatgtgttttggcacaatcacactctgacaattcggtttatgccttgaaagaaagaaaaaaaattttataaccaaataattttaagaaaattaaaaaaatttcagcaatttttgtcaaaaaaagaaggaaagtttctattttttacgccccataactgtttaatttcgtgctatgggtggggggggggtaaaatgaaaaaagtcacaataaatgtaaaaactccttaattttccgttaaaattcacccaaaaaggtggaaaatttggtaattatgttatattatgactgaaaccagaaaccacacaacaaaccttgcacaaacaagcttggcaagaatctaaaaaaattaatacaaaaaaaaaattatgaaaaaattagaaaaatttggcactttgttgtgtgaaatgccggccgaacatcggaattgggtgacctccttgacgcgtttgcgaatccgttcaacaaccgtcgcaccgatggcaatggccaactgttaaaaaaatacaacaaaatgaaataattttttttttttttgaaaatttatcagcaaaaaccaaaaattttcacagggtccccaaccacaattcagaaaaaaatttttttttttaaatttattgttaacaaatttaaaaatttgtttcgtcaattggagcctggccctaaaattaaaattttccggacaaatgacaatacgggtcccgtcatgttacccaatctttttttttcttttgcaaaaaaacgcacccacccatttttcatgttatgcacccgccctacctgttgcctggagacgcgacagtcgttgctcaaccactccttcaagctgttcaaccgttcctccgcgatcactgtctgttgtttgtcgctttcgttgaccaaaaaagtgttcgggaacagctgcgcaatgtcatcgttcagctaaaatgatttttttttttttttgttggtaaaaattgtacaaaaaaatttccagtatttttggtgtaagaattgcgatttacgacattttttggggaacccattgggaccgtccctcgacacaatacccgtaaatctcaaaaagactacttttgaattttttggttcattttttgagtttttcggtcataaatttttgtcaaatccacttttttgcaaaaaacatagaaatttcagctaaaaaaagatattaacaatgagtaccttttgaaccaattcctccattggttggctgtttaattccatctcacagtgcgcagtcaaatccaaaaatgcctttaaaaaaataaaagaaaaatttttttgccaaaaatggtccgacctcgtcaactgacgccttttccaccacaatttgatccgaaaaatcgaccagcactttgaagatttcaccacttgcgtccctgtaaaattacataaattacagaatttgattatttttcgcgaatttttgataaattttcattaatttttgaaaaaattcttagaaaacgtccattttgggaatcaaatttgattgcaaaaattttttcccaactatttttgagtaatttagctcggatttgagagcggttgctttatctagtattttgcacttaaaaaataccaaattgattcgtaaatggcggaaatttacaagggaatgaaattttctacccccatcaaaaaaaaaattctcaccggtatttgctgatgtctcccttctccacgccttcaattgcaggcacacggcacaaatggatgatcggacaaagatggcgcatcgaaaaaatgaaatttaataaacaaaaatttattgaaaaatggggttcattttttattcaaaagaccccccgtatttgtccgaattagatgaatttgatgtcattccatagcccaatggtttctctatttaattacaaaatttacacttaatgctatcgaatggtacctaatgggtccggtttgtaaaactatgaacggagttatatataatccgctccgagtaaaatagtgaaattaatgcgcaaaatttcatccgtttttttacaccaccggcactttttcggtaccattaaaggcaatcctgcagtttactggtcccgtttttttttagggtactgagcacgaatccgaccttatttttgacaaattctgaaccccgaacccggaatcgatcatttttcatatta

SEQ ID NO: 1130 - DNA, 2022 bp, Heterodera glycines
acagcaatcggcacagctgtgatcagcacaagctgttatttttgttatcaacataggcgagtgcgtcggtgatcagattggcttttcgtgtacggtaggagaatcttatgatgataaatgggaatgaattggtcttatggtcattgaaaatgggatgagtgatttgtttgacatattaatttggagacagaatgttttgtgtattttaacataaagatggtgtttctatgatatttggttatgatgcttagcgacagttgtttgccctatatatgcttctatgctcggttgtgaacaacataatcaagtaatgtataaaatttcataatttatgagttttagttttattaagggggaaaaattcagtttatcagttattgtgtaagacgaacgagaaatattggtatttttgcatatttaaacgaaatagggcaatcatgtaataatatgatagtttcgcgattactagagaattggtgattcaggagtgacattgagattagagcatggagcggaccattcatataaatcacttttgttggctgcgttaatgcaaaaaaaaagtttttgttgtgaaaaatgttcgattccgggttcggggttcagaatttgtcaaaaataaggtcggattcgtgctcagtacaataaaatagccctagaaaagttttcccagaattttacaaaaaaaaaaaaacgggaccagtaaactgcaggattgccaccattaaattgaatttggtgattgttgaaactcaaacctcgttgctgtccattccccgtttgattccgaaggctcgggctggatagttgacggcaatggccctgaaaaacaatggaggcttaaattttaaaaaaaaaatcaaaaaattcgagagacgatgttgtgagcgctaggtgcaaaaggacggatttagaaaaacaaaataataattcaaaaactagaaatatttgcttactgtcccgtgatggttgtaccgcgactgaacggaacgacggccaacgctcggccgcggagatggggctgttcacgctcctccacttgggtgtaaaaggcatctacaaagtttggcaaaaaatttcctcaaattcggcaggggtatgtatgcctatgaaatgaaaaatcaaaaaaaaaaatggtttaatttcattaaaattagcaaaatttctcaaacgtggaaaccccgccctttttaaaaaaaaaaaattcttggtgtcaatcgaaggcttaaagtctatagatttttttttctatataattaaattctttgttaaatgcaattgacaaaaaaaattattcaatgaatataccggaaaaacaccaaattttgtgtttgttttttagacattgattgaccaagcaggaatattatggccaaaaggaaattgaggacgcgtaaacagtgattgaatgcataaattggaaaaaagccaaaaaaatgctttcccttccttacccatatcaatcaaagcgatcacccgaattgactcccccatttcaagggttatgtgtagaagaattgttaatatgtaatacaacagaagagaaaaaaaaatgtgcaatatgtaaaattggattaagccttgttaaattatatttttagaaaaacaaaggcaagaatgacgccgatggtaaaccacccttaaatttttagaaattataaaagatgtggaaattttttttaagggttttagggatcgctgatcacgaatacagtaccaatttcatccgccaattcaatcccaggtccgaatttgaacaaaaaaaatagaaactttaatttttcaaataacacatttttggttcaaacggcttatgtaaatacatggaaaaaattgaaagtcaccaatgaaatttgaagtctcaattttttggagggtccgggaacagaaatggtcgaaattttcttagcatcggaatggaatagcatgtacaaaacaaatcgataccaaattgaccaaaacgagtgaatgatttacggctctctcatagggcagagacgtatgtgaccagtgaacattcac

SEQ ID NO: 1131 - DNA, 4315 bp, Heterodera glycines
tttgtattttttattttgatctaccataactcgcttccttttcaactaaactgaacaaatttggtatctaaaaaaagattttgaaaaggggaatctttttctaagcgaatgttaagtaatttgtcatctcagaaaaaagttgtcggaatttcaaacttttatcatgttataactcaagtcctaggccgccgtttctaacaaaaatggtaaaattaatcattttttattgattctaaatgtccatagtgtttttgtacctttacaatcaagattattataatttgtgaatttctatttttcatgtgttagagacatgaaaatagtacgccaaaaagagagaaaaagaaattcacaaaatttttcaccaaataacttttgagtgagccttatttttgtattaaatttctattaatcgatgtagattttttttctctatcgatatgcaaaatttggctggccgtgattgaatttccaatcacggaaatccgtgagccgtgatcacggggctttaaaaaaaatccgtgacccgtgaaccgtgatcacggcaccccaaaatccccgtgatttccgtgatccgtgattataaaaaaaatttctaatgattttttatttaaatttatttaaaaaacggaatttaatcgcgggaaaaattcccaaaaaatgttttaaagaaaccaaaacatataaaccgctttttttgcggcgaccttttccaaaaatgactaagtttacgatttttggcaatttttttaggaaaattagagctttttgtagaaatctccaaggaaaagtttttatttttaactaatttattaagaaaatttttcaaatttttcttaaatttaaccaaaaatctatttatgtagagaaaaaatttcttctactttgtaagctaacttttgatgctgaaaaaatcttttggaccaacatgctcagtccttcatgacgatctgaacaccccaaaagatactgaaagtcgggaaaattttagaaaaaattcttagagggttgggaaaattttctgaaaattttgattaggcctgtcgttttaaatttaagcgacggagagaaaaaatagggtttttagcagtttatatgccaaaaatggtaatttttctgccattttggggttacaatttcaaaaatacggtaaaatggggaaccggaaaattttgaaattttgagtgaatttgttgacagattttgtccaaaatatgtccaatcattggttaatttattggtctatggtcgttttaaaaaataaagaaaaataattttcaatgttatgaaatttcttgttaattaaatttcaattaaaattatcaaaacaaaatatataaattgtcctttcccaatggggaattgaacccaagggacagacaacgaaagacagaaggcttaaccaccagactacatatatatgtctactttctaatttgtaaacggaaaagaatttatttatttttctcaaaaaattcttcacaccactttcctattttcgtctcaataaaaattccctatataaaatgccaatcacggatcaaaatcacggaaaatttgaaaaaatccgtgacccgtgatccgagatcacggcaccccaaaaaccccgtgatttccgtgatccgtgatcacggccagccctggtccgaaccctaaatcaaaccaattaaaaatgaaattaaaatattttccaatttcttaaataaataaagaaatattgctttattatcattttataaaatttaattctgaaaaatcgttattattttagattaaacaaataaatatgcaaatataataattgaaagaaattaagaatgtttgttaaaaatatattaaaattgaagcataaaaaaaaataaaaccaaagaatttaaataataataaatcaaaataaatggtgagcagaaaactggcaaaaggaggcctttacttttacgagtaaagcgccacacggccaaaactcaaaacaattttttccataggatagtaaaaaatggaacaatcttccggtggtagcgatgcaaattaataaggcaaagaaattcgggggtttctgagtaggttccacgtgacaaatttatattcaatatttaatacctgtgatttttatatttttgattttgtattattctttgattaattttatttgtttgttttctttttggcgccatgtaagagcactaatgttcctttggtttgctcgataaattaaatcaaattaaaaaatttttaaatagaaattaatgtgtttacatattattttcttttaaaataataaaatattttttatatggttttattaaaattctagggcttcaataaatgtaaatttactctctcatcaatttcataattagtattcactcagtgagctagtgattattaaaatattttaatttattcaaataaatcaatataaaaggaatcttgcgtaaaaaaaaggagtataaaaatattgtttctaatcaacctttaaatatgaaaaaaatgttatcttatataagataaacaatttaatgaagaaagctaaaaataccacctgaaacaaaaaattgcattaaaaataataattgttggataaatttctccattaaaatttattatttgatcactattagtaggcttataagttgtatgcactaaaaagtgccaaatatgcgcataaaatatgactaaaattcccacaaatatgccctaaaaacccgaaaaaacataaatatgcactaaaatatgcattaataaaactgcaaaaaattggctttgaaccttcaaaaatgcaaaaaattgtgtaaaaattcagaattgactttaaactccaaaactatggctaagtgttttttagacaattacaaaaagttttaattttcaaactttatatatgcaatttcgaatttttaatttttattttatgctaaaatcaaaattgcttttttatatttacaaatttttttcaaaaattctcagaaaaaaaaatttaaaatctttagttttaggggagcaaaaaagtcaattcttaggggtgtgttttacgaaaggacaacggtggaaaacatattataattttagtcattgaacaaaatgcatataaagattatcataacaagtgtttaagagaattattactaaattctaagaaataaaaaaaactattaatttacttattgttaaaacaatatattgatttttaatttctttataaattcattacatattctgttaattcactgaattaaatcaacgagataaattagtatcaaaaattatggctattaacaatgcattcagatggccgctcacgagaaattaagtcaaatgcaaaaccttaaaaaataaaaacaaacctattcatatatttaataaagtacatttaaattttaaaatttttaattttcattactatcaaatttaagaattctttatgaataaaaaataagtgttcagattttggaaaatataataaaagaaattatttttggatgtatcttagattaatcattatttaaattatttaacaaaaaaaaaattttttcgtaatttactttaagacagaataaataaaaatatataacataagaaaaagatcaaacagattaatggaattcaaacaatattttaaaaatgagtcaaacaatttataagataatctttcggtataaaaaaaaatcaaaaatattcaaaaaaatacatgagaaccgaaatatttaaaaaataataatatttaagtcaagaagatattatagatatttaactcaagtcgaaacaacaattaataaaactaatgattataatagagaaattgacttatgaatcagcaaacgcataaacaaacaatgaaattatcaatatttaatatctttatgggcagttgccaataaatgtattatttttacagatgagagcatatgatttcatcaccgaggctcgacataaagttgtggtacaagcgctacggcaagcagtaattaatatttagttattcacaaaaataatgataacataattaagaaataaaataaacgattcaaaaattaaatttaaagatttaaaattaaattgaaatttgtcttggattattaatgcaacaatttccaaaagaaataaaagtgagcgccatggcactcctaaaaaactataaaaatttatatccatgagtgatggtagggttcggaatatgcatatctttttttctgaactgtgggaggcctgaaacgtacgaaaaacatgtttttagattttttgaagcttctagctatatttccatatgcatattttgcatatttgtgcatatttcgcgattttatatgcatatttg

SEQ ID NO: 1132 - DNA, 1515 bp, Heterodera glycines
  unsure (1)..(1515): unsure at all n locations
ttccacacgtgaacgaagctgctctccattcgtcctgcgggactgtggttctctgtcactttgctcctttggccttatgntgggttctattgatgtttgaccatcgttgagggaggattttgncagtggggcatgtatgcttacatctccgtgtattgtagaaagacggtctttaaacacatctgcgtgcgtttncgattggtccttagcatcactgaactgagtctgagcttccaatgattcgtttactggtgatttttgttgagattgaacttcattttcagtttttcttaatcgcttccccagctgttcgccacgtgtaagagcttgggctcgaggttcatcgtgttgttgttgttgtcgttgtgctgaggggtttgatgggggtgttatttctgaatttttcaatgttgtatcagatgctgatgtttttgtatctatgactgcttctccatctttgccatcatttttattatcgttttccgtaacaatcggctttatgcgcttacacttggtcagccttcctatcttacggcactctaccgcattattgtcttgctgcactctttcaccttcatcattagatgaatcgtcatctttaggtaggtccttactgctactctcttgattctgttcttcctcaggtgcaattggtgtaatccgcttgcatttggtcagcttcccaatctttatacactctactccacggttatcttgtggtactctttcgccttcatcatttatctccatagtaccagttttgctttctttttccgtctcttcccgtgattgctgttgtccttgatccacgcttcttttggaccgtttaatggaaggagtttgaccatcttcagtgcttttgcggcttagagcggtcgttagtgtaccgttcaaatggcgctgtagtccttctgtgttctgttgtgatgattttggtagatgaacacgtagcaatcttccatcaatgtaatgaatgtcaatccattgatcctccacagttccgattgtagaagcccatgagtgagggtactgtattgagtacagtccacagacccatgagccacggaattgaactggtttcggtaggtgcacacgatattttgacgtggagttgtccacgtaatcagtaacattgctaggcaatacaacaaagaagtagttgttgttagagtcatcagccatttttaatatgcagtttattgttccgtgaaaagtaaaactgataatatacaaatttgtgaaaaggtggtctatttatacaaattctgtctcatcaatccaacggggtttttctgggtcaccgaggtattttacataatatctcttcgtcccatccttctgtctcttagtgcgtaacacgtgtacgcgatatgtcgtttttgcgtctttgcgcacgcgtgccaaatccggttcatagaaccatcccctcaacatctcaccgtgctcgtctttcaccttatagcgaacaggcgttgtgttgggtttcacctctgcattttgtagaatttcgtccga

SEQ ID NO: 1133 - DNA, 5666 bp, Heterodera glycines
tgctcgtctttaccttatagcgaacaggcgttgtgcttacaaaacctctgcaatttgtagaatttcgtccgaccatctttggaaggtacccgcgtgcgaacgtccctttgtttttgctcatcctcacaaaatctccctcacgaaagcgtggtgctctacgtccctcgtcatccgcatatagttccgggtgtatgaatcgttctcttggtccatacaatcggtcccacacctgctgagcattatgaaatccaatatccataggacgcattccgtgtgttcggcttctggactcgttaattcctttgacaatttggggcaacacctcggtccatgagagagtgtgatgctcagaaaagtaccgatacatccgctgtttcagtgtccttattgcacgctcacatatgctagctttcacggtggatgaggcaggacgatgcttctccacttcctcctctgcgaaaaaatcccgcacttcacgtgcctcaaattcctttcccttgtcggagaacacacgatgggggtgcatctccatttgagagaacagacgtctcagcgattcgatcatgtcgcgcgcggacttagaacgtgtgcgcgttgcaaacattctcttgctgagcacatcaatagcaactagcgcatattttgcacccgcgttatggcgcgctaacttttgaaagtcggccaaatccatttgcacatcggtcatgtagcctgctggtatggttcgtgagcgacggaagtgcacccttcgcgggcggtgcagggtgtaggtgcgatgatgctcaagccattcacggacctgatctcgcgtgattcccggcatggccttacgtgcctcactgaacagcacatcaacccctgcaaaggcagccgatgatttagcagggtcattatacagctcgctcagtctttgtccgtatatttccataatttagggtcaaattttgctacttcttcctttcctattagcggtcgtgatgacgatcccttttgtttttgttggtgcccttgttgttgttgaggttgtggtaaataggcacggagaagacgttctctctcgaatatttgctcaatctgtgaagtgcctgggggccttttggtggtcgctcgagttccaacattgaagatccattcaagcgaacgacgaatattactgtttgcaattcgagcaccctgttgatttcgaattccaccatctgccgaaacgccatacttgcccggatttgccatgaacagcacaccgaattcatttatccatttcgatcgttgctcaggcgttgcggtctttgttgcagaagaaacttctgattcggctcgtagagtaccggttgtttcggcacttttagcactcgtccatgaagaatccgcggtgtcaattttactacccgaatctgtttctgcgcctccattttcctcaatgtccgtagagaaagagacctctccgttactggtgctactacgccgtgatgtcgctggtgttgatgaggataatttgttccttccacgtcggtctactatagaacgtttggcgcgtttcttttgtgagggtgttacaacgggtatttcagactgttgaacgggtgcggaagcattgtcaattgagactttaacaggtcgttcgtcatatgctttcttcaagtgaaggtagcgacgcagttcttgattgtaatgagcgttttttgttgtaggatcagcgtgctctctcttaacttcatcaagagcacgtcgtgtaaagtccaaattagggtccccggaggtggctgttgcggtcagacccttgtaaatttcctctggtacaagaacaaagcgatttgcatacatacgtatttattctttagtacggcttaggatacgtgacaactcgagaatgataggggtcaataatgcgggaaataaatgcatgctgaatccagaccccttttgtactatcaattgacgggctcctctctctgttcgcgcacgactgagacgacgaataaagtccgcatatggcatcattcttttcttttgacgcgtggtgagcgcgaaacggccccgcacaatgtttaaagatatctctgcgagagcaagcagttgctcggagcttatagacctcagaatgcgtcgtcgttttctgacggatttggtttttgatagtctacagagaaaaggaaactgctgacacactgtttgattgatttgcactcctttttgtaacgattctctgtgcatcctgttcaaatgcctgctttaggaagaaaaatcgtctgttgaatagcggtgtcggaattgtcttctttaaatatgttggtccgtagacgtagcaatgggtccgacgatgggtgcagatcgatgagtagatatgagtatttttgacgtgttgcttgtcgataagcatccaagaaaaagtccaattgtcgagggaacagttggacgcccaaattccggatggccaatgcggagtttggagcacgtagtaggacgatgtacatcgaattttgacgaaccactttaagcttacgatcgaacaggtcttgactgatgaacacgaccccgaaattttggtggtgtgcttttttggtaaatagttctgctaggtagcgttcatctatagagtacaaaaggtcgtcgagaatgatcatcgcgggctttgtcaaagaactaatcatttctgcatccggaactccggcatgaagttgcacgttggttatacgatgctgaagatctgttaatgatggactatactccccataacagaacaaaatcgatttgggtgcagggtcgattatatgttccgcttgttcgataagtttgcaaatgaaggtgcttttgccgctcgaactaggcccggacacgagacatccgaatgggagacaaaattttagctctttactctcaaaccgctgcgcgtcaatcataacgagtttattgaacaataatgatataattagggtttttatacaaataaaacatgcgtatcgctttaaacatctttttcttccttgatggtgtctagattagaaataaatttatttgttctgaatttaggtgtattttccattgtgtttgcttcgtccattagttgtacttgcgacagatccattttgtctgtccgtatcatcccatctgttgctttctctcccacatttaattcatccgtccgattggtaagttctggtttctcatcttcgccatttttcgtagtaatgtcgcgcgagtctgagtcaaatctcgcttttttccgctcaacattgtcgatgagagggttttcagtcgttgatgtaacagttgacgacattgccttttctagtggagaatccgagaaaatatagggtactttaaatattcggcgcgaccgtacgcgaaacgcacaaaaacgcggcaggtcatacactcggtcgaatggtacaaatttttcggtcccttttagtcggctcgaatgaatgtagactccatccttactgatcagatagtccaaatccatattatatcggcattgtctgcaaatggtaccatcatcattgaaaaacactacacgcggagtgtccaatcggtcactgtgaacagtcactccctgagttgtgaccaaaaaattgactgtaggaagtagttgacttgtgagagatttgttatccattttttgggtcaatattttagaaatgattcattaaaatgacgagaatctaacattatactgtccctaataatgggcggggcttaaatacataatttacacactcgtagtgtcatcattatttaaatttagtgcactcatatacatccgatgcacacggacgaggatctgtctgacgacggcactgaatcatatacatttcgctctctgatttactacgaaaagaaacaatgctccaaatgtaagaagcttcgtaagtggtacatcgtggaatttcacatgccaaatccgatcattacaaattggggactgtgtcgctatttaatagacgaagcctgtttagacaatgtatgaaacatttaaaaagtaaaataaattctcatattacagtccggattcgctcttggaattttatgggaaaaaatcacccaattggcgtcgagcggtcttgacattctgtcattgtccaaccgcatgttttatgactcttaataagctttattaaatacattttttcatgcagttgtgctcaaatggagggccccgatgaagacgaatttactattgtagggtgggacccggaaaagaaagtcgtaatggacctcgtttgtttaaaaaacttaaagtgtaatttttcgataaattttaggaagccgccattcactctgctcaaacaatggaacgttcattcacacttaggacaaaaaacggaatggtggaacacaatggacacactgttgacactgaaattggcgcaatggaaaccgttcaaacatcatcaatcgatacatccccattgttcaacacacaacccgtccgtcaatctttgcccccaatttctctccttctgtccaacatcccccaaccagtgaaaagcgttttaaataatataaataataattctaaatgtgaaataccgttttatgaataacataataatacgaaaatgattttcacagagcgcctttcaaccctgctttcctcgcctcacctgcgataccaagcacgtaagacagttgcacactgcccttcaccaatcaaatgctgacggtgaaagcagcagcaacaacaatcggtgttcaagtgctatgtcaatggcgtcctcctcatcatcctcgtcaaattccgggcgaaagcgtccacccacaacagaaacggatttcagaaaaatagcaaaaattcaaaaacacaattaccgttgtgacgacggaaatgggtgccctgagtgtgaccgaattcatacacagaaattacccataaattttaacaccttttaaattcataacacatcatcaaattttccattttttatttgttaaaattcataaaattttccattttgtcatttgttatacattcataaaatttccacaccgccaaattttccgtcttttcatttgttagacattctgacctcccaaaatcgctcaataggcacgagacaataaacgaaatagccctataggcagagaaaaaagcaagcccaaatttgaattcgaatttttgaattcaaatttagcgccacgaccggcgccgcaactcggtcgctggcctggtttaaaacataaattattcaattttcaacatcatcaattcccgtagaaaaaaaatttctcattccgatacaaaagccgaaaacaattaaaaaatttcctgtttctaggagaataaaaaattttgttatttacaaaaataatagtacaatattttaaaacataaattattcaattttcaacactttcaggaattttgaatttaaatttggcgccaaagcgcctcatttccactgacatcaccccaaaaccattcaataggtgtacgacgaaaaacgaaacagtctttctgacagagaaaaaaagaaaattttaaattctaaacttggcgccaaacacgtcccacaccttctgacctcccaaaaccgctcaataggcacgagccaataaacgaaatagccctataggcagagaaaaaaagcaagcccaaatttgaattcaaatttttgaattcaaatttagcgccaaaagtgggaccctggcccccttgtaactactaa

SEQ ID NO: 1134 - DNA, 1596 bp, Heterodera glycines
  unsure (1)..(1596): unsure at all n locations
cctgagtgtgaccgaattcatacacagaaattacccataaatnttacaccttntaaattcatgacacatcatcaaattttccattttttatttgttaaaattcataaaattttccattttgtcatttgttatacattcataaaatttccacaccgccaaatntttccgtcttttcatttgttagacattctgacctcccaaaatcgctcaataggcacgagacaataaacgaaatagccctataagaagagaaaaaagcaagcccaaatttgaattcgaatttatgaattcaaatttagcgccacgaccggcgccgcaactcggtcgctggcctggtttaaaacataaattattcaattttcaacactttcaggaattttgaatttaaatttggcgccaaagcgcctcatttccactgacatcacccaaaaccattcaataggtgtacgaagaaaacgaaacagtctttctgacagagaaaaaaagaaaattttaaattctaaacttggcgccaaacacgtcccacaccttctgacctcccaaaacccctcaataggcacgagccaataaacgaaatagccctataggcagagaaaaaaagcaagcccaaatttgaattcaaatttagcgccaaaagtgggaccctggcccccttgtaactactcacgtgcactacaaatcaataattttcactctctcctaaattttcttatataccttcctaacaaataagttgttttctttctctctctctctctttctcatttcgctgtttctcttgctttctcttttcgctctcgcttattctcctttctttcgctcatactttctctctgtctctctgtctcacctttctcgtgtttctcttctcttacctttttacttctcttccgtcgcacgtccttttcctaaacaatttaacaaaacaaataaacaaaagttgaacaattcccagttccccatacatacattccaacacttaaataataatgcgccgtcccccttcttgggcttcctcctcaaaaacactttattcatccgacgacaccgatgaacttcgccgttcctccccgctctgatcacttcccatccattcagacgctggcagcgtgtccaatactttataattttgtttttattttagagaaaaggctttttcttattttgtttgtcactgtttacataattacctttttttgattagttaagttttttgtgccgcgaattttgaggccaacaaataaatataatcaagaagacgggctgttaaattttacattttattaataaaaaaaaatctaaatttggtgtttaaagggcaattaagttttgtttttctaaaaaggatcaaattaaaaggacccgatttcgataatcactttaaattcttttggtaattctttttaaatttatagtattatgtaacgtgaccggacatttggacagtggacatctggacagtggacattacgacagtggacatttggacagtgaagtcatttggacagaaccggacaattggacagtggacattacgacagaaagtgaatttttttactattaaaaatggctttagcagcaataaaaaatatattt

SEQ ID NO: 1135 - DNA, 1133 bp, Heterodera glycines
  unsure (1)..(1133): unsure at all n locations
ttgtggaaagtcaatcaaatttatgcactgccgctcaattgcccgtttggccaagtgaatgatcgaaaaagcctaccatccttttgtggctgttggcattgatcaatcccncaattttgcacaaatttccattcagaagaggggatttggatgccaccattgtgcaaggcgaacaagcaattgccgcggcagtcacagcatgtttggacaagctggaggaggacatcctgcggtttaccatcactgccgaacctcaagtggaatatggagcggaagccgacactgccataatcaccattcgacatcgcttagacaacaagcaggaaatggttgacatgtcgaaaattctggactgaagaccagccaatccatgtgcgtgtggcagccaaaggggccaaaccatgtgccaccggcttcatcatgaatgttgaacgacaggaatcggaaacgggactcagcattgtcgccaaactcttcctagcgtaccaagaagccaagaactacgattgtgaggaggcatgggaccgaataatggatggggaattgaccgaaattgagcctttgcattctaggaaaatcctaatgcaaagggccgaaaaattttcagttaatttattcactgaaatggcgaaaaacacaacgacaggactcggcacaattatgtccattctaatggcacgccaaggggaacgaacgcctccacaaaattcatgggatgagctattcgtagctaaacaaccagcattaaatgatttgattggatgacagcgagagacggctaggctaatgcttgattcagtcccccgcgtcgtgttcatgcaggcaccacccggcacaggcaaaacaaaagtgtctgttgacataatcgccgcccatctgcgcaccaatccggacgcacatgtgctttttgtggctccgctgaacgttgccgttgtgaaagcagtcgaagagatggccaaaacgatggaacgaatgggatggcgagaggacatgttggccttattttcaggatccggcaaaaagaaatacatgctggagctgaacaaaattggccctcatttgttggctgcagcgttgcgcgcaccccaattgtttgaagagctgaaggatgataagaaacgcacagtgctccg

SEQ ID NO: 1136 - DNA, 3480 bp, Heterodera glycines
accaaattccaactcctcttcggtattcatctccgatctgccctaagtggtcctctattagcacgtaaaatttcgaaaaatttcactaagattcaaaaaagttattatcaatatcgttcagaaatctggttttttgaataccaaatctaataatcttgctaatagaggacacttagagctatcgatcatatcaagattgttggttgatttggttgacaatgaaaaaagaaaacgaccccgactcattgtcagaatttttaatgtcaaatttcagcatttatgccgcaaagcattgacgcgctgaaattcgccgatgagatggaccaggaggaggagcagctgatcagttcgtccgtcaacgcccttctgaagaattggcgccgtcagctgcgctcgggccaacagaacactttcattccgttgcttccgttcggcgtttgatgagaaggaaaaaaccaatttaaaacaatgatttttgatttttcaaatatttcatttattcagtgcattttttcaaaaattttacaaagattttaatgcccacaggacagccaaaatcagtgttaattgttccgacagaaggggtacgctattaaaaaacaccaaaaagagccatttccaccagtccatgattttttggggcggcatttgtgccatcggtaagattcccctggtgttaatcaaaaaaaacaccaagataaactcggcagtcgatcagaacaccatcctaagggacgtagtgtatcctggggcataagggcactttagaaaaaaataattcgtccttcaacaggattggacaccggcgcacgagccgaaaacatcaattcagctgagtgaaatctgtttcatggattttgggggccagacatttggccctcaatttgcaaatttgaatccacttgacatttccttttggtcgtttatggaccagagtctgaacaagcgattgcaccaaattaggcgctgaaggaggcttttcaccgtacctgggacgaaattgccgaaaaaataggtgcggacattttggttaattttcggaagcgtttggacgcatgtatctcagcccatagtggctactttggacttttgatgtaattttctaataactaagaccctattaaataaaattgccaaattatatgattttctttttaatttgaaatggaattttccatggaaaggcaggttgcagaacttatgccgcaccctgtaaacccagaaaatccacctatgtgtaaaacttggtaaaatccgcctatttgtaaagcttaacacagtaaaaaataatacaaaaattcgcttgtttgtgaaacttgacgcacggattataaaattaaaataaaaacccgcctgtttgtaaaacttgacacactaaaaaatttgtaaaacttgacgcaataaaaaaaatacaaaaatttgcctatttgtaaaacttgacacactaaaaaaataatacaaaatccatctgtttgtgaaacttgacgcacgcattatcaatggcgtaaccaaaatttgcggccccatataaacccagaattatgtagcactttttcacccggcgacgctccaatttttctcttaaaaataggctcaaaagcgcaaaattttgccattttttgactaaatctgttaaaaattataaactgccctgagcataaatggtgtaatttcatctgattttacataaaaaatcaatttgattcacgggataataatgggcaattaattgaatttaaatattaattaaacatattatcatttcatttttgctttaacttttggatttaaaaaggaaaatttaatttaaaacagtccggcggatgtttcgacgcggtaatatccgcaacgcgtaaaagcagtgccaaatggaaatgccggcgcagcagggggaggtgagagacaggcggagtaaaattttcaattaatctttttaattgggatggatacattttgggttttaaatatattttaattggtaaattcgtttttcccgtgccattctcagagacggtgttttactacgtctcctcctcctcctcttccaccgccaatttccatcggcgccctttgccccgccttttttctccccacccgcgccgtctcagtttcacttcgatggcaattttcacagtgattgccatcatcatcatgttcttctccttcaaaatgcactccaaattcaatcaacagtttcaacaaaggcacaatgcccaccaaaattcattggcattgccaaaaaatggggagaagcaatgagagaaaaagcggttgctaattgagttccactttcgagactcaaatgctgcccggaaaccgagtcccgtcaaaacaaagcaaacaattggggaatggaacttgagagattgtcactgggatttgcttcaattttatcaacatctcacccaattaaatctcaaattttgacacttctaacattcaatttgtgccacttattacatttattggttttatcagagagtgtaaattaattttatttttttcttttttttttgcttaaattattccttttgattgtattccttttgacatcttttccgtctaaactggttcttatttacttaaaaatgaaattatttttttaaatactttaagacaaattcttctctcatttttgttttgtctgttctttccaattaatttatggattgaatttatccttttttaactcttgtcatttcattttgattgttttgttaattttactatttttaaatgtaaataaaaaaaacattttgaacaataaaaattcgttttccagtctcttttctcttctctgtgtttgcttttttctttcatcatttctgctattttgtgctcaatctccgccattgttctgtttttggtttcgggcagtgcgccgtacaaataaattccaatcgctgccaatggcggcacggtgatgtgacatttgcgccgcagacacttgcgccgcccagccaaaatgacacttgcgccgccgacatttgcgccgcccccccccccccccctattttgatataagcgaaacaaacatatactaatttttaacaacgcaacaaaattaatattttcaacaatattctaatcccatccttcgaatcccttcatccccacacggtattgcaatgcatgaatatgtcggatcaaatcatcgtcatttttttcttctttcgcgtcataagcaattaccaattgcctaatagctgagtcattttcgatgtattttttaagacgtggtcgatcggcaatgccccttgtctgatcaatttcgaaaggccgaacacgattgttttgatattcctcttcatctttcattgcctttatgaatctgacataataattttaagtgggattttccgaaaatttatctaattaaatttaatataaaattcgatagttaataacctattccgaattgatcagaccattcaaaattgatttaaaagccggaaaaattgaaattgagttcattaaaaa

SEQ ID NO: 1137 - DNA, 3529 bp, Heterodera glycines
tctcgttgctcaacttttggagcccgaacagttcgccaattccgaggttttcttcaccaatttggccaatgccaaacggaggagcaagtgcaaaagttgcaggagatactcaaaccgatgatgctccgacggttgaaggaggacgtggagaaggaactgcagcccaaggaggaaacaatcattgaggcatgtgccagcggtgccaatgccaatgtagttacaaccgcattccggcacttttcgctttagacgggatcaggatcccatgggagtttctcgggatccttcccgatcctttttttccttctacggcattaatcgggaccggatttcatcgggatccctctcgatctttttcaaaaactatgtatatataccggcattctggcatttttaggctatgttaggggtgtatccatccgaattaaggcacgttgttggtgtgccaagggtatatccacctgaattaaggcactttttgggtgtgtcaagggtgtacccacccacatttcgacagtttttaaaaaatttttggcaaaatgcgcaacttcggtaccacatttgatgtgtgggtgccacaaagacaatggcactactctgcaattttttgtgatgaaatcccctctaattttaaggtccaactctccaacatccagaaaaaatattaccgcgcagttttggagcgcaatttcacccatctgatgaagggctcaaccccgtcactgatcagcctgaacaacacgatgatgcaactgcgtaaatgctgcaagtgtgtgatcgttttttgtctctttttgtatagtcctatggactgtttggcgtcggaaatttttggcgccagtaaattttgcgccgggttaacatagatttgctaactgtgcgccaatgcactaacatcatgccaattaggcaccattacatacaattctgtctaagtaccctttggcgccaaaaattgtgcacccgcacggagaatctaggcgccatcacaatggcgaactggtgatgtgacatttgcgccgcagacacttgcgccgcccagccaaagtgacacttgcgccgccgacacttgcgccgctgccatttgcgccgcagacacttgcgccgccgacacttgcgccgcagacatttgcgccgccccccccccccctattttgacataagcgaaacaaacatatactaatttttaacaacgcaacaaaattaatattttcaacaatattctaatcccatccttcgaatcccttcatccccacacggtattgcaatgcatgaatatgtcggatcaaatcatcgtcatttttttcttctttcgcgtcataagcaattaccaattgcctaatagctgagtcattttcgatgtattttttaagacgtggtcgatcggcaatgccccttgtctgatcaatttcgaaaggccgaacacgattgttttgatattcctcttcatctttcattgcctttatgaatctgacataatattttaagtgggattttccgaaaatttatctaattgagtttaatataaaattcgatagttaataacctattccgaattgatcagaccattcaaaattgtgtttaaaagccggaaaaattgaaattgagttcattaaaaaaataatcaaaaatgaaaatatttcttttttatttcttgctactctcggcagtgaagaagaaaaaaacttgtcattgctcttactgtatgcgttgaccaaagacaaaaaattaagtgtttacctttgtgattagtgatttattgttgtgtttttttaattagttgtcattttgcgtttaatttatagttttagtaaaatttgttgataattacctaatgttgaattttatttaaaatgtaattggaatggaagttttaattccgaatgctacattaactttaaacattaaaattgattgagaaaattatctttaaataatcaaaatgggggggggggcggcgcaaatgtcggcgggcaagtgtcattttggctggtcggcgcaagtgtctgcggcgcaaacttgtcgcggcgcaagtgtcggcggcgcaaatggcagcggcgcaaatgtcggcggcgcaagtgtcattttggctgggcggcgcaagtgtctgcggcgcaactgtcgcggcgcaaatgtctgcggcgcaaatgtcggccaatcggcggcacaaaaaacagtgcgtaagccttcggagcaatcaatggatttaattaatgacttttaatgtctatcgaaaagagctctacaaagaatcccggcaaatctttgcgatttcacaaagcggaggaatggagcacaacaaccaaaaccaaaggggaaataaacgccacaggcgtttctggctcccaaaattccactaacattgctaaatttgacccaaaatcaacaacatgtccactaaaattactatttatttaaaaagtaaattgaaagaagcttatggagattttggtgccgaggtgatagccgacgaaaattttaaagaccacgattatgacaaatagaaaatgtttatttataaaataaatatttttcatgaatatatttaatatttttgatgtatatgtagctattatttcatgaaaaaaattatttgagaaaaaatgaaaattttttgaattttttcaggacccgttactcggactcggtttaaaaacttggacccggacccggcttttctggacccggcaataccccggacccaatttttgcccaaatacccggacccggccaaccctagttaagattggatcttacaaaatataatcacattatacaaaatagtgaatttttttaaattattttttaatttatatttaaaaatttaatcgtattattaaattcattaacataaattaatttatttatttttttaaatcaattgagttccatattccaatatcattaaaaaagtatgcataaaatacatatgtattataggaacttttgtttacgcttaagcattccaatcaatagaaaatgaatgatgatttttggggtcaaagattaaatgcatttggagggagggaaagggcaatggttggagagattggtcgatattttgccttcattttgtgagttgatgttttttgttgccattttatgtagcagattaacctttctaaaaaggcgtatccaaaatgactgaagcagaggaggaggagaagggggtaattaagaggagggaacaattcaaagagagccaattttgagagggcatttcatgttgaattgttaaattaccctcttgaatttgtcaaatttcaccagcagatgtgccgaattgcgctgccccatatttgtctgtatgtgcttctctgtttgtatttgttggccggcgcgtgggccttcgcgtgcattgaacacaacgcggaacgcgcggaacaggccaaaaaattggaacgcattggttggtgacgggttacgatatttactgatttaccacacttgctcgattataacccccggggactctattgttcaacccccctcaaaaggcgggctttattcgagaggagggggttctaat

SEQ ID NO: 1138 - DNA, 6160 bp, Heterodera glycines
atttcacacgagaaatgttcgaagtgaagtcctgacgatcgggcgtcgccaattgagccggttaattgctcaaacaattatttgtggaagtcgaacaccaaataaatttattaacacaaatggaaaataaataacaaataaatatttgtcggagggacggagcaaattggggagcaccaaaaataggaaggaaaataacacaatgaatgaggatggacgaagggaagggcatgaatgaatggggaaaaaatcaataaggggtcaaagagcccaagagagggaattacaaatatttgaattatttgcctctctaacacctccccttttaagtccaactgatcagtgccatgatcagtcacacataggacgatcggctggggtcgatttgaaggcggtcaacaggccggcgatttcgaatcggataacggcggactggcggtgattgattggctggcgggacttctgccaaattttggtcccttaatggaattgggaggccaaaagtgccattgatcacatcgagcgggtcttcgatgtcctcatccggaatttgacgtgcgcggatttggttggcatgaaatcggccgcgagaattgtttggcaattcgacggtgtaaattacaccctttttgtcgatgattttgccgtgtcgccattccgctgaattgtgccgacgtgtgaaaaccaattgtccgatttcaaatgatcggaattttgcgccgtgtttgcgattgaattggtcctccattttattgtccttgacaattggaattgacagcggaggccggaggaggtcgaggcctattcgaggctttcggccaagaaataattcggccgggcattttccatccagagtttctgatggcgtggtgcgataggtgagtagaaaagtgtcgagcacattaccgtcaactccctccccttttattttcgcgaatgccctcttaaaagtgtcgaccatccgctcagcttgaccatttgactgtggcatgtacggcgctgtaaaaatgtgttcaattccgttcgatttaacgaaattttggaattggtggctttggaattgagtgccgttgtcggaaacaattgtttccgggatgccgtagtgcgcgatcaatgagcgcatttttgaaattgtggccatggcatttgtagaattcatttcaaaaatctccggatattttgaaaatgagtctacgacgatcaaatacatttttccatgaaatggtccggcgtaatcgatgtgaatgcgcttccatgggccatcagattttggccatgactgcagtgtcgtcttgattggatttttggcgacagctgcgcatgaagtgcatttttggacgaacgtttcgatttctgcgtccatcattggccagtagacatgcattcgggccaaagatttcattcgcttgactcccggatgtccttgatgaagcatcttgagaatttgcttctgcagtgatttggggatgactgtccggtcgccgaacatcaggcagtccttgacgattgaaatttcgtcgcggcgccgataaaattgaatgaatttggcttcgtccagcccttcaattggctgaaaatttttaggttctggccaaatatttttgacaaattgacgaatttgttgaagtgcctgatcatttgccgtttcttgggccaaatttttgaaggtgatcggcaattggttgacattgttgatcaaatttctgtccaatgccgattccacttcgaatgaggcaataatgacttcgtcgtcgtcggattttgacttttggacggaaattaggcgagataatgcatctgcctgtccaaatttgtctgttttgacgtattgtatttcaaagtcgtaagccgtcaaaatgagtgaccaacggacgagacggttgtgggagtgctttgggacaccatctttattgccaaaaattttcttgagtggctggtgatccgtcagcaatgtgaatttcctgccgaagatcattttatgaaagcgtttgacggcttccaccaatgccagggcttctttttctatttgcccgtaattttgctcagccggtgtgagtgatcgtgagaaatgcgacacggcttttattgagccattggcaaatttgtgtgatatgacgccgccgatgccatgttgtgaagcgtcggctgcgacgatgatcggcagatttggatcaaaatgcgtcaatgccagctcagattgtagcattgaaataattttggtgaacgcattttgacatttgggtgaccaatcccatttggcatccttcttcagcagttcgtcaaggggctgtcgaataaaccggaaatttcgcacaaattcctggtaataattgaccatgcccaaatatgatcgcaattcgctgacattcgaagggatgcgcatttccgcaattgctgtgattttgcttgggtccggccgacgtccactttgatcaatgatcacgcccaaatatttgatttcatttttgaaaaatgaacatttgtccattcggactttgaacccccattctgaaattcgggtgaaaatttggttcaaatgttggcagtgttgatcaaatgtcgcgctgacgatgatgacgtcgtccaaataagccaatgcgaatgggaaatcggagaacatattgtccatcaccgattgaaaaatcccgggggcggatttcactccaaatggcagccgctcatattggtagtgtccccggtgtgtagcaattgtacacaatttctttgaagtgccgtccagttcgatttgcagatatgcatccgacaaatccaattttgtgaagaattttccgccattcagtgtggcgaaaatgtcggctggcaatggcagaggatgctggtttaattggagagagtcgttgagcccggtggagaaatcagcgcacagacgagcagttccgttcgctttcttgaccaccaaaattggggctgaccagttagtgtgttcgactggtgtgacgacgttcattttctccaaccgatccaattctgcattgattattggcagcgtagaatatggcactggacgggcgcgcttgaacgttggatttgcgccttccttgagcaccagattggctttcattttggagcagtagccaaggccatctgagaatatttgctcatatttttgcggcaatatttcgacgaattgttggattttgtccgcatcatttgacgaaatttgattgatttgggcgggattgatcattcgccgtatttcttccagaaatccaaacgcttccattgccggtgtgcccaaaagattcaatgatcccgatttggcaacataaaacggctgaattgtctgaattccgttgaattggaaggtggcggtcccgcgtccgatgaatttgcaccgctttccgtcgaaaaagcgtgcttcctctgaacatatttgaattggtggtcggcccattgcgttgtaatcatcttcattgatgatgatgatttccgcaccgctgtccaggatgaaaccaattgttgtgccgttcacattgatcggtgctttaagcagatttgatgaatggacggaattgatgtaagccgcggggagcatcaccgtatttgtgttgaaatttctgcccttattttggtgaaatgctcgaattttgtcgcattgccgattgatgtggcctctgcgattgcatttgctgcatatattttccttctttgggcaatcctgtgcccaatgcaattctccgcaacgatagcagttgctcggcggtattttggcctttgatttgcccgtgaatttttgatttgggcgaccgtttccgcgattttggtgcttatttggcgatgatttgccatgctgaattgcgtttattttgggctttggctgctccaaaatttttgcttccgcctccgtttttagctgtgtatttaagtcctcgatgactttgtcgaataatttggacgtttttgtcgtctttgtgccctctgctgtgagacgcgcgaggatatgttggcgtaattttgcgtcgcttggtgacttaagcgacgtaagaagaaccaggcatttgaattcctcttcgtttaattccgaaaaacggaatttgcggagggctgccttaattcggttcacaaaaatttcaaattgttcgccgtcctctctgcacactcgcaggcatttgtagcgatcgattgctaacgaaggaggatgagaaaataatttgatcagacgagttttggtgtccgtaaagtcaaatttggtgatttcctccggcaggcagtagcgcttgtattcgccgaaggcggacgggttgagcttagtcatcagcaatttgagtttggcttcgtccgccatatttgccaccgcgcaatcaaatgcaaattggaagcgctccaaccactcctcaaattcttcggcattatctgttgaaaatgggtgaatgtccggcaaagtgatgttttgtgccggctgagttgcggtggatgtcgacgcgctctgctgcttgatcgcttgcgtcaatttttccaaaatttcggcgagcgttttgtccatggttgatttggaggatggacttagaagaagaaactgcacatagcagaaccgcacacaaaattagtgattggttttttgaagaattctgcgaaatccaaaaatcaacacgagatttttgaatttccactttcgaacaatttcaacacgagaaaatgttcgaattgttgaggttctgtagaacaggcgtcgccaatgttgagccggttaattgctcaaacaattatttgtgatgtcgaacaccaaaatatttatttaacacaaatggaaaaataatacaaaaaatatttgtcggagggacggagcaaattggggagcaccaaaaataggaaggaaaataacagaatgactgtgggatggacgaagggaagggcatgaataaatggggaaaaccaatatttgaggtcaaagttcacaagagagaaaattacaaacatttgaatgttcgcctctctaacacctccccttttaagtccaactgatcagtgccatgatcagtcacacataggacgatcggcttgggtcgatttgaaggcgatcaacgggccggcgatttcgtgtcggatatcggcgggctggcggtggatcattggctggtgggatttcttccaaattattttcccttaatggaataggaaggccaaaagtgccattgatcacgtcaatcggatcttcgatgtcctcgtcaggaatttgacgtgcgcggatctgatttacatgaaatcgaccgcgagaactgttcggcaattcgacggtgtaaattacaccctttttgtcgatgattttgccgggtcgccaatccgctgtattgtgccggcgtgtgaagaccaattgtctaatgtcaaatgatcggaatttggcgccgtgtttcctgttgaattggtcctccattttaccgtcctttatgattggaattgacggcggaggccggagaaggtcgaggccaattcgaggctttcggccaagaaataattcggccgggcattttccgtcaagagtttctgatggcgtggtgcgataggtgagtagaaaagtgtcgagcacattgccatcgactccctccccttttattttcgcgaatgccctcttaaaagtgtcgaccatccgctcggcttgaccatttgactgtggcatacggcgctgtgaaaatgtgttcaattccgttcgatttgacgaaatctttggattggtgactttgaaattgagtgccgttgtcggaaacaattttttccgggatgccgtaatgcgcgatcaatgaatgcatttgtatttttttcaaaaaatataaaatgttttttaattatattttttcttatcgatagcaaaagcctgttttaacagcaaacataataaattcggtgctattgacgaaatacgacaaaatgcaaatgattaaaatgcaatggaattaaaataaataagaaaataaaatataattaattcataattattaataaacaaatattttaatgggttcattaatctcagcgttcatcagattcttcacttatttcaaatgcaccgtctccgacggttaaattttcccgcgcttttgaaatgccacaatttgaattgcgtaacatattacagcctccttcgtagcgcgaatttgcacaaagaaggtcgcaataattcaaaatattcgtgtaaacttctgaa

SEQ ID NO: 1139 - DNA, 1557 bp, Heterodera glycines
  unsure (1)..(1557): unsure at all n locations
aaaaaactatgaggaatcatattttctttataggaaacccataagaatacaaaaaaaaattgaaaataatatgatttctgtcctttggattgaaccaggggaaagaagaagggacagtcaaggagactagccattaggccatttgcacacttgggcattgttacttttaaagaatatattaattattattttttatttttccctttgactccaattttcttcactaatttttcactcagaccccattcttaccagtgcttgtttttcccggttcccggttgccctaccgggacctgagcttttcaaaacccgggaccgggaaccgggacctcggatgaccgggaattcccggcccggtcccgtggcactctagataggagtaataaatattttacgaaggtgatgacaataaatattgtaaataaactgttacaaacaacagtccctccccccccccccccaggggctgccctctcattgttaattaatttattaatgagggtgaaggggagggggcggaggttgggggttaattaattgttgacggattgggggtgcttacctaatgagtcttctgataaaaattgtttgcagtgtatgtcgagaggagagagagagcctatcattttcttccgtcctccaactctcgacaattctgtcaaaaaacaccactgataacagagtggttaattaattgataaaatgataagagtgattagggcggggaagggaggagttcccccgggaatggtcgttccggcgccgacgtttcggcgccagctcagtttttgggctataactcctttcatagttgtcttaattgaatgaatttggtaccattagatagccctacgtattgtctacttgcctatgaaatctcgaaaaatttggctaagttttgaaaaagttagtaccagaaaacttcaaaaaactggttttccaacctttttggtcctaacttttttgaaacttaaaccaaattttttgaaatttcgtagtaaaatagtgaataggtaaggctattgaatgacatcaaattcattcaattaggacaattattgaaggagttataccctaaaaactaagctggcgctcatttggtcggcgcccatttgagccccacaaattccatccccccccccggcgaacacaaaaatatgctgacacaacgggtcaacaacaacaagaggaaaataatgggcataatggccagttttgtcaatgacagcaaataaaatgattgtgctgttttgttcagaagaatttaaaaaaaaaaaaatttttttttgactcgaaaaaatccgggaaaaattaacgctcgagaaaaatttgatatcttttttttagaaattttggcgctaatttaaaagtggttggtgttaatttgggaaatctaattcgaattcgaatttattgtccaaatggatggggcagattcgtgccaattgtaagcgtattccacaaaaatgcagcatgaaaaaacggtttcatgatcagatatcatcatcatcattatcttcacacttttatgaagcgccganaatttttgaaattttt

SEQ ID NO: 1140 - DNA, 2414 bp, Heterodera glycines
aaaagcctcattttgtgtcaaaaagcctcattttgtgtcaaaaagcctcatttttataaagtttattaaataaaacacgcttaaaattttcaaatgattttttttgattgtccatgatcaatttgagcaattttttgttcgaaataaacattttgtgaaattctaagcatgaaaaacgaagttgatttttttgcggcgcttttttcaaaaaacttttggggcggaaggggggccggcggtgccgataggcgccgggaaaaattttgtgatttttaatacgatttgttaacagatttgtcgacaaatatggccaaaaacattatgccaatttatcaaaattaatcaaaatttaaaaaaatctgacgaattttccccaaaaatcttcaaaatttctcaaaaaaccacaaaaagcctcaaagcctcattttgaaaatttagcctcattgacctatcaaaaaaccacaaaatgaggctaaagcctcagatctgggaaccctggtatttaggtatacatgagggaaatgaagtgtttgctggggccatattgttaagaatggccaaacaaaaagcaaaaaaatttaggtcaaaagctcccgccccgccaatcttgtgggcgctataattaacgaaatttaaaatagtgccaaaaaatgaaattccgaaaaatttaattggtggcaccaaaaaaaaagattaattattttttcattttgtttgtttttaaataaaaacaataattcattcgttcggttttttcatcaaaaacgcaaaatgactaataatttgttggagtcggcggaagggggagggagaaggaaggaagagacggcacagaaaagaatgattagaaagaaaaattaaacaaaaaaagggggggagggaatggaaaaagtgtaagaaaaagagagagaaagagaaatagaggaagagaaagaaagaagggaggaagagattgagtgaaaagagagaaaaagcggcttttgctcaacgggagaaaaggtggaaaagaaaggaaatagagagggaggaacacacagagagagagagagagaaacagagagagagagcgaggagaaaatgaaagggagggagagaagtgaggtgacggattaaagcagacaacaacaaaaaaatcggatgcgattaagccaacaaagaaaagggaacaagaagagagagtgataaaaaaaagaaatggagacaaagagagagaaaaagagagagagcaggagagagaaaaaagaggaaaagagagagaggagagggagagggagagagagaaaaaaaggaaaggcggctttttctttgaccacagaaaaagagacggaaagtaaggttgtttgtgtacaacgcctattactggggatgaagcagcagaacatcaaatgtgtaaaaagcggggggggggggggggagaaaagcgttcacattccaaagtcaacattaataaacacatatccatcccccatccggattaagagcaaaagtggatggatggatatattacactcacatttcattattattgcaaaaaggggacgacgcaattagtgccctcaaataaatacataattattaataattaaaaatgaaaccccggcggaattccgtgcaattttaaatttaaaaaacaaacaaaaaaagtcacttccgtttgtgttttcagccccctcatgaatttaatttaggcgcctgaacactcgaaaatttacttgaattttcaagtgcaaaaataaatattttttttcgaaacaaaataaattaaaaattgaaaaatttttatttaagaagaatgagagggcgttgcttttgtattataactttttgtccattgaaaaataaatacacacttaatctgtaactgtgacgtgacatctgtgatgttaaaaaatgaaaaaatgtgcatttattcaattgggggtcaattttttttgaaattcccatttttactttcatccaataaatctcaaaattgcgcttacaacgaacgctctaacacttagaaaaatttgttgaaaaagggtgaaaaaatagtaaaaggacagccaaaaaacagttttaaatcgggcgagggggggggggggtaaaaaggtgaatattgtaatattgttgatgaccacagcagtttagagaagaaattgcaggggatgagagaatgcgcgtgtcaagagagagagtcgggcaaaaaaagctcgaaagaaaccccgagaaattcatacgcctcacacgagagagagaggccaaccaacaaagatcagcaagtggccgagaggaggtcgagactgaaattctcgtgcacaaaatggcggggggggggacggaacggaaaaggatgaatgaataatgatgatgggtattttgtgttgcatttgcaacgatcggcggagtaaatggggggcaaggggaaattcagg

SEQ ID NO: 1141 - DNA, 4966 bp, Heterodera glycines
  unsure (1)..(4966): unsure at all n locations
cgggcttcctgaaaattaaaaatgtgtattaaatanagcttattaaaacagatttgtattttttntagaatatgtatcattgtgtatcgtattttctttttgattgaataattttcttccctatcattgacatactgtagcggatatcaaataatcttcggctgatccccttattttttattatgccatcatttttcttgtccaattttaaaaattccccggtggatatatatatggcggacatcgcaagttttggcaaaaattataataggaccctcaaaattttagttttagctgtgcgccatcatccaccgccgtcggttgtttgtctcacacccgcaccaggagtcttaaacatattccccccccccattaattgccttaattggcaaaaattttcacccccccccctttaaataagtgttgtgccaatgccaacccgataagtgatggtcatcactggtgcccccattgctgctgctgtgctccccgccatgctcatcgaacattgtgaagtgccgttgctacagtttcgggtgccaggtgttgccgatgacatcgccataaaacttgttgcgcttgttgctggcgtagtcggtgtgttgtcgcaatgccgttgctggtgaggcgggtgttgttgttgttggactgcttgaagttttgccgcgggctgtgaagcaatgctaaaaatagttaaaatatattccccagttcaaaatgagaaagagactagatttctatttttttattgttgatttggtacaagtaaatcaatcatttttcgtaaaatgcagtatcaaaccaggtcataatttttttaattttccaaaatttctggggcggtgcctgccggcaccactatacactaattgtcctctaatttttaaaaaatgtgctcaaaaaccgtatcctaccagtccacactaaattttattatatgaaatttgtttgaaatgtcgacaaatgaataaatttttgggtacaaattaattgttggattttttaaataaaaaaatgcttttcatatgaataaaccattttttgttcgtagaatataaatcttttatgcatttttatttgccttagggtatggtccttaattaattccttaatttttgtttgggtttttgtgggttttttaaagcagtgaatcaacaaagctgtatttattaacccgataatgattgatcagaattgagatgagtttcctttgcatctctcatttctttgctttctttctctcatggtctcttccctctttttgccatcctgtgcatcataatctctaactgctgctgttgttctttctaaggaaaagaaaaagacagcgtgcaaaagagtgcataatattttatccaagtgacagacgagcatgggaaggaaaaagcacacgtatcattgtgaaaagagacgagtagtcattgggagagagtacccattcatccctttttctatccatctctccccatctttccaccccgtctccccttcccctcttttacggcctgtcctttggacttgctgctgctctttaaacttacctggctggggagttcctgcgatcaccaaggcagggctcctgtggcgaggctccaccattgcactttcggtcggggctgacccgcagggcggtcccgaactgggataggcccacagctaaatttttgagtgcgggggacggcgttcgcgcctcccctttaactttgcttcatctatttgctgttttaaacattgccgtttatcctttccaatatctccgagtgccgtgccgtgttgatgaattgtcgccaaaagcttcgtttatttgctgtttttgcagcgtatgacaatatttcatactaatgaattgaagcgcttctctaattttggatgacaaaaagtcgccgaaaaatttgtaaaatgaaaaggcgaaatgccaatttttgggacgggggcattttttgtcccttaaatttgttcattggcactgttatttgaattttcgacagtgttgacatatgtatttggatgccatttacgtactttgaaccgtgctgagtcgaacaaaaaactcagtgatcgataaaataattaaatttaattattcgattctctaaattcatataattattatattcatcaattattgaagattttttaattttaaaatttaaaaaaatgaataatttatttacttcgaggttattcttggacaagcaaaatcttaattaggttggacttattaatattttttcagaatcattaaaataataaatttattaaaatggcaaatttttatattattccttttttaatttataattaaattataatcgtatacttaaattcattgacaccgatcaatcactgagttttttttggatcgacctagcactttttgaaataggccctaatgcttagaaattttcaaatttgatttatttccaagattgtacttggaatcagcaattttctgaaaaaggacaaaaattataattaaaagtcattgtaacagtaaattataaaactcggagaccgaaatgatttgaatacgttgtaatgtttatttaatttattatttatttttagcacattttttgttttttttttaatttcattatgacttcaaacaaaagaaaaaattttccaatccgaattgggaaaataaataaaccagcgcctgaaggcacataaaaactttcccctctatacctcgagatgttcaagagtcttcttggtcttagtcttgaattattagggattgtttttttctcagtctcagctttgagtcacctttggcgccgaaatggctgtggtgctgaaaattgtctacaccgaatgtgtgattgattctcagccgatgattcatcaaatttcataaaactgatttttccgtaaaataacagaaaaacaaatcgaaaaattccacaaaaatgaatcattttgtaaataaccattaaataaatatttctgttcacttcaaaagatcaaattaatttccaatggctctctcaccgccaaatttgcctattgaactgctccgtcttctgctcctcctcctctttgtcttcacttcaactgtctgtggtaaaaataatttcgacggaaaattattgtggggcataagttagctgggaaattcttaaaaactgtcacattttggcattgttcggtcggtagccatgagtttcctctattaaacaaattttgaaataatttataatttaccaatgctaattgagaaaaataacaaaatttgcatgctcttcagcaagttttgtaaattttttttgcagaaaaacgatcaaattggctttttttgttgttaaccaaatccagcagtcttggtatcaatcgaaagcttaacatgtttagaagatatttctaagctattgcttcgcgattagacaattaccaaaaaagttataacatgaaattccaaaaaagtcgaaatttttgagtttttttcttaataacttttttagaagctaaaatttttgtttgttttttgtaaggctaatagagcttctgaagggctttcgaatgataccaagattgttagatttggtcaacaagaaaaaaagttataataaaaaaactgaggctggcgccaaaacgtcggcgccaaaacgacccagtaattttaggcacaaattttgtccccaaatgacctggacggacttgagcgatcaattgacgatttcaaagtgtttttggcagagcaggaccggatgagtgcctttctctcaaagaaacccaaggcccatcttctactcttccactttgtgccatttgcacgacaacatcaattcattggccttttggatgagcagggtgaaaaataaattgcttaattagcacaaacttttaatattttcaaggtgatgaagcgcttcattcggtgtggcgaagactcgaacaatggtggaaatgtatgcctgacgcggaacaaattttgcaacaattggagcaccatttcgtcaacaattggctgctggacaccggaaggattgacgaattgaagcgggtttgttttttcaaaaggtttcccttttctgaattctcatctttagaattatgaagaaaggaagggcgaggatgacacggatgaagaagcggcggaagaaattgattacgaatgccaaattgatgtaatttaacaaatttggattaaaggatgattttcaaaaaaaaagtgaagaaacaaaatgttttatcatttttgtttatttttcagaatatttatttgccattttacaagtcttcttttgcttaaaatcaccaaaaacgtccgttaacatgcatcggattcgaacctggaaccccccttttggtgactagcacatataccactgagacaaaaattcaaatctttttggaactgggaggcaaaaactgaaacggtgtgtgtagcagaatccgcaaattgcaaacccttctacaaatgtatatgagcctgtgcttatcatttaaattttcaaaatttaacgagacttatacagagttttaccctttgtccttatttgtaagaattgtccttattttgaggtagagagaaacttagattttaaatgatatttttgaaagaaatgtttttgaagcgaattaatagccaaagtcttactttttgcctcatttatttactcatatgcgtggtccagtgggttgtgatcttggttatgctcttcattttatcgttggatcagttcccctccaagcaatactttttcttctaatttttcaaaattattccttttttatgggaattcaatcataattttaacatttaaaatcataaaatattgtcatttgtggactaaatctattaacaaagtgcactaaaatttcaaaattttccccggcggcgcctatcggcaccgccggcacccaaaaccctattccttaaaaaattggctaaaaaccgcaaaaatttggacatttttttgacaaaatctgttaaaaattgcacttaaatttgaaaagtttt

SEQ ID NO: 1142 - DNA, 1097 bp, Heterodera glycines
ccccccccccccccccaaatcccttaaaccccccaatttataataaaaatgtgcccaatagtggctttttccgagcagttttaaagcgtcttcccctgtcccaagcgcagaagcactttagaaggagtgagggggagaagcccaaaaaagaggcaaaccaaaaaatgggacgtcgcgcgggggaggaggagaagccgacgaaaagccacccgctttttggagggggaatgatatgctttacgactttcccctcctcttcgttactagcaattagtcttccataaaacttaatgaccacaagcgccaattttagaaaaaagaaataaattaagtgaaattcaaaatgggagagcggcggggggatggggtggaagaagccgacgaaaagccgccggttttcagagggggatggtatgattaacaattcttcaacccaccaataaccatcctccataatcccccccccagcgtaaaatttagtaacaaaaagtaaaaatgaaatttaaaatgggaaagagaaggagagggagaggggagaagccgacgaaaagccgtcgcttttcggagggcaaagatatgcttaacatttcctcctgctcttgtctaacaccaattatcatcctccataatccccccagcgtcaaatttagtaacaaaaagtaaaaattaaatttgggggggggggagagtggtggaagaagccgacgaaaagcagcggccgcttttcggatggggaaggaaaagatacactttacatttcttcctctgctcttccttaacaccaacaatcatcatccacataatcgtcacaatttagtaacaaaaaattcataaaaataaaattgaataatactctgagaagagggtagtggggagaagcggacgaaaagcagtcgcagtgcttttcgtagggataaaatgggattgataaacgttctctttacgctgcttcctccttccctcctcctctttatcatcaattaggctattatccccttatcccccatataatcgccataagcgtcaaatttagtaacaaaaagcaaaaaaagtcagcgacccgtcacttctcctcactctctgatcactttcaaatg

SEQ ID NO: 1143 - DNA, 4558 bp, Heterodera glycines
tttcagttttttgttcaaagagcaccgctttgacgagccgttggacggcgcgcactttcaatggacagccatttacgacgacgacagcccattttttggccatgggtttggtgactgtgtatggtttaggtgttaggaccttgagaaggagaacatgttcaaatcggactacgtgcgaccagcgggaattaagcccaggggccgacccaaacaacaaatgccaaatttattgctgtaacaatgccaattctgtagtaacagtacaccaccgtctgctcgtacttttccgttttggggatctgctgatcggcgcccttattcggacaaattcatttttacggtggccatttttgtcggtaattaattaattaattaatcagtggtaattaactcattagccattcattattcattgctaattttaagcactcgttgccagttggcactgaatgattgacagaaaagaagcaattgttgtgatgataattttggttgaagtttcgaaaataaatttgtgtggaatcattatgtttttttaaatgtcataacattatcactggcatattaaatcttttaataaggaccagagctttatttttcaataaattacaccgtaaatttgaatctggggtcggattttccgacttctatgtaactaccgaaaaattttggggcctcggaatttggcgtttgctgctggaggatttttgcattaaaatttgctccccactgtaattgtctgcgcagaaaacggaagagcacgaccattctgagcatgagaagcatggagaagaagcagttgcagaacagcagatatgtgccaaaacccacaaaatatgctaaaaacccaaaaaggcctaaatatgggtcaaaattgatacaaaactgcttaaaaaatcttattctccagccattttgatagcataattgcaaatcaaaatcatttcaatcatcatgaacttttgaaattggtttagttactggcgccgaaatccacaaaatgacaattttggtaaaataaaataacaaacgaatattttcaaagtttcctgacttcgataaattaaggaattttaaacaacttgaaaaaagaataaatttaaacttcacatttttatgaatcgagaaaaacttgggaatttgaaaattccttttgaactttcgaatttctttgtgcttcagagttataaaataaatacaaaagaacaagcaaataaaagaagcaaagcttttaaaggggaggcgcgaacgccgtcccccgcactcaaaaatttagctgtgggcctatcccagttcgggaccgccctgcgggtcagccccgcccgaaagtgcaatggtggagcctcgccacaggagccctgccttggtgatcgcaggaactccccagccaggtaagtttaaagaacagcagccagtccgaggaaaggaacgatggaaggatgagggggagatggggtggaaaaagggggagagatggacagaaaaagagcgatgagaaggcactctttccacaggcacactcttttctttacccaatgatgctacgctatttcctttccatgctcgtctgtctcttttggatgaaatgttcttcactcttttcacgccgactttttccttccctccacaaaagcagcagttagacaaatacactactcttctgtgaaaaagagggaagagacaaaggagagtgaagaaggcaaagaaataggagaggagattcaaagagagagtgtatggaaaagaaaaagagtaaacgaaaagagcgcagcagagggccgttgtgcctttcctcttttagaacccatcaaaaattttactcaaaattttcttccatcatatataagaaatgtccctcacgccgctttcgttcattccaaatggacatatactaaaattggaacaatacagagaagattagcatggcccctgcgcaaggatgacacgcaaattcgtgaagcgttccaaattttttgcctttttttaatgcaatgtcaaaatgaaatgttttaattaatgttttttttgacagagaagaatggatccagaatagatttcaattataatcttttgatttttatataataattctccaaaaatgtagtaaaggcatttttagcctgaaattctcattttatttcgcctactagacatctcgcctactgacacttcgcctactggacatttcgcctactaagccaaaatcggacgtttcgcctactaagccaacatttgacatttcgcctacgaatttttttacctactgaaaaaatgctaaagaaaagaaaaaaagagagtgaaagagtagaaatgctttatttttcgatcaaataagttcgtgaaatacttacgagtcttaaaaagccaataaaaagccccgcattcattgaaatgaagacagtgtactgaatctgagagtgcagccaaagaagcaaatggaaaatgtttcagacaacaacgatttgaacttagccaaaatgcggatcagggatggcacggaattccgattttcgacatttttgaccaccggtattccgattttcgaaaatttttggggcctcggaatgccatccctggtgcgggtccttgacgagaccgattttgaattggacgaaggattagcaaacaccttgcacctgatcggactcgttttcagacctttatggaggggcttcagatccatggaacgtccgcacacccctgacacatgccaacgaattggccggttggcaacaattttggcagtttgcgtttggattgaccacttgtttaacaaagctcgttttgtgcttaagactgacacaaaaaaacgcatcaaaattaactcgagactcgagattaaaaaccaagactcttgaacaaccaaattcccaatgagcaaatggattactcattggcacgttacggcccacaaaaacggcggcgccggtcgaggacggcacaaacactcaatttttcgttttgttttccggtcggttttgagcaatttttcggccaatcactgattgattgccagggatggaaaattcctaaactttaagttggttttcttatcagttcatagaatccgcttttttctaaacctgaaaaaagtggtaaagttttcaatcatttccaaaatttttcaaatatttccaaaatatttgttgggccaaaatttaaaaaagtgttggccccatatgacacatgccaacgagttggccaagttggcatgtaacacctctgggaggccatggcacactttcacatcagacaggtggaccaaatgccatcatttgcatgcgcagcaaaaggaccgtttatagatgtgttggggagggggaattgaacccggacgagcaaagcgaaaagagacaaacgcacagaccaatcggccatggagcagtgaaaagaatagagatataagaattgaaattggaaaacatttgcatccatttgcttcagttaaaaattttttttaaattaatttgagttatttgtgtattgttaccccttaaccttaacatataattattgtattaattacaaattattaactacattctaattatttagttactacaaaaaatttttcaaattaattttattgaccaaacaatgaaaaaaactctcacgaaaaattcattggttttaaacaaaaaatccttcattacgtcatattcattttctattttatagagattttgtcaattttcttttaatttaatgtcaattgaatttctccaagagacaacaaatcaaattaaatcattagcaatggaaaaaatcataaaaatattttaaatcgaaaaataaaacaaaaaatcacaaaaattgtgagaaaaaaccatttgataaattcaatatgattgatcaattcagtccgattctgataaagtccggcactcggccacaatttggccaaaaaatatgggcaatgggctgtcgtcgtcgtaaatggctgtccattgaaagtgcgcgccgtccaacggctcgtcaaagcggtgttctttgaacaaaaaactgaaaataaaactaatttgtttcaattaaagattaattaacagattaacatcagtgaaaaagagtgaaacggcgagagagtatggggaaataagagggtagacaattaatgaagtaacgagagatggttggcccccgcctcgttaattaggaataattgggcgattagtgtccagcaatagaaaagaatagcaaaaatcgtataatttctcaaaaacaaaaagaaataataaattcctaaaaatttattgttcgaaatttgtgtttgttgctgactgggtgagaaaggggtgggggagagcgagacaggtgctggaaaacaacaaattgctgctttctgatcaggcctggtcctgctcaaaaattcgttcgaatgatttggctttaaatttgcccaaatcattcgaataaaaattcatgaaaggatgatcaaaatgagacctaattgacttattgctgagcttccgatcagttgatccgagaaaaaatgataaattattacataatcatgacaaccgtaaaatgggggaagcaatcgccacggaacgccccgaaa

SEQ ID NO: 1144 - DNA, 1242 bp, Heterodera glycines
  unsure (1)..(1242): unsure at all n locations
tgggaaaattctgatcaggattcggactcctacattttaatgctgatcactgatcagcttaatacctactcaaaagtgggccaaaattgacgcttctgttggcactcacaaactgttttattgtcatattaaattaatgaatgataaacggcctttctaatcagtcaatttgtacaaacgcttatagtggaattctgaattttggacaaggattttttaaactttgtcacaattggccaacgatcactcagaggccggagtatcttggctacactgatcagcaattagtcctcccagtcttgatcactgtgatttgtttatgatcgaacccactgctaaaagcagatcatttttggatcattctgatcaaaatgtctgagcgcaaaaaatcgatggaaacaattaattaattggccaattaaggcactgatgactgaccggtgagcccgctgtaggcacttgcgaattgcatccacgcgcacatgcgttcgggcgtcaccgacgcttccgcgcccgcggcgtcgcacgcgtcctcgtcacattctgccgcttcagttgtctgcccctccgccgttttgtatgccaatgcgtccaatttgtgcaccaattggagcgcaaacgcgcggcactctgcttctttgccgccgccgcactctccctcttgtccgctctctcgctgctggtgctgctctgccatctgtcgttgtacgctatctcctccgtgccgcttctctgcccccctcgcggcgccgcgcatcatcgcgtattgcatgtgctcatgcgtcagacatgcccacgcgtgcggtgcgcacgcgtcgaagaagttttcacacatcggctcgcgctgtagacgctccgtgcgctcggcgcgcaaggcaggcggaagaaattcgcagcagccactgtggggactgaaatggggcggtggtgaaaaatgcaaaacaaggcaatggtatacggtagcgcaaaatcacagagtttggctcaagtgaatacggtaatgtcggatgggcaaaaaaaaatttgtgacctattttagaatttttaatagaaaaagtgttgtaaaagacagattaaattttaaaaacattcacaaaaataaattgagaaattgaaaatttaattaattaaatatatttatctttaaaaaatcaggaaaaataaacccaaaaagataaatacgtctttaatctagaatttgccaaactttgtaaaggttttttaagaaaaaanttatgaaaa

SEQ ID NO: 1145 - DNA, 1831 bp, Heterodera glycines
tctcgagcatgatagagagagcgctgcgcaatgtataatatattgcacagagaatttgtgtcatctgaggaattccagaaaaatggatatctatttttctgaaaaattttataccgcacaaatgctctcaagcatgatagggagagcggtgcgcaatggttattatattgcccagagaatttttggcttctaagaggaattccagaaaaatggctatctatttttctgaaaaattttataccgcacaaatgctctcaagcatgatagggagagcggtgcgcaatggatattatattgcccagagaattttaggcttctaagaggaattccagaaaaatggctatctatttttctgaaaaattttataccgcacaaatgctctcaagcatgatagggagagcggtgcgcaatggatattatattgcccagagaatttttggcttctaagaggaattccagaaaaatggctatctatttttctgaaaaattttataacgcacaaatgctctcaagcatgatagggagagcggtgcgcaatggatattatattgcccagagaatttttggcttctaatatctatttttctgaaaaattttataccgcacaaatgctctcaagcatgatagggagagcggtgcgcaatggatattatattgcccagagaatttttggcttctaagaggaattccagaaaaatggctatctatttttctgaaaaattttataccgcacaaatgctctcaagcatgatagggagagcggtgcgcaatggatattatattgcccagagaatttttggcttctaagaggaattccagaaaaatggctatctatttttctgaaaaattttataccgcacaaatgctctcaagcatgatagggagagcggtgcgcaatggatattatattgcccagagaatttttggcttctaagaggaattccagaaaaatggctatctatttttctgaaaaattttataccgcacaaatgctctcaagcatgatagggagagcggtgcgcaatggatattatattgcccagagaatttttggcttctaagaggaattccagaaaaatggctatctatttttctgaaaaattttataccgcacaaatgctctcaagcatgatagggagagcggtgcgcaatggatattatattgcccagagaatttttggcttctaagaggaattccagaaaaatggctatctatttttctgaaaaattttataccgcacaaatgctctcaagcatgatagggagagcggtgcgcaatggatattatattgcccagagaatttttggcttctaagaggaattccagaaaaatggctatctatttttctgaaaaattttataccgcacaaatgctctcaagcatgatagggagagcggtgcgcaatggatattatattgcccagagaatttttggcttctaagaggaattccagaaaaatggctatctatttttctgaaaaattttataccgcacaaatgctctcaagcatgatagggagagcggtgcgcaatggatattatattgcccagagaatttttggcttctaagaggaattccagaaaaatggctatctatttttctgaaaaattttataccgcacaaatgctctcaagcatgatagggagagcggtgcgcaatggatattatattgcccagagaatttttggcttctaagaggaattccagaaaaatggctatctatttttctgaaaaattttataccgcacaaatgctctcaagcatgatagggagagcggtgcgcaatggatattatattgccccagagaatttttggcttctaagaggaat

SEQ ID NO: 1146 - DNA, 1267 bp, Heterodera glycines
tattatattgccagagatttttggcttctatgacgttttcggaaaaatggctatctttttctgaaaaattttataccgcacaaatgatctcaagcatgatagggagagcggtgcgcaatggatattatattgcccagagaatttttggcttctatgaggaatttcagaaaaatggctatctttttctgaaaaattttataccgcacaaatgatctcaagcatgatagggagagcggtgcgcaatggatattatatttcccagagaatttttggcttctaagaggaattccagaaaaatggctatctatttttctgaaaaattttataccgcacaaatgctctcaagcatgatagggagagcggtgcgcaatggatattatattgcccagagaatttttggcttctaagaggaattccagaaaaatggctatctatttttctgaaaaattttataccgcacaaatgctctcaagcatgatagggagagcggtgcgcaatggatattatattgcccagagaatttttggcttctaagaggaattccagaaaaatggctatcatttttctgaaaaattttataccgcacaaatgatctcaagcatgatagggagagcggtgcgcaatggatattatattgcccagagaatttttggcttctaagaggaattccagaaaaatggctatctatttttctgaaaaattttataccgcacaaatgctctcaagcatgatagggagagcggtgcgcaatggatattatattgcccagagaatttttggcttctaagaggaattccagaaaaatggctatctatttttctgaaaaattttataccgcacaaatgctctcaagcatgatagggagagcggtgcgcaatggatattatattgcccagagaatttttggcttctaagaggaattccagaaaaatggctatctatttttctgaaaaattttataccgcacaaatgctctcaagcatgatagggagagcggtgcgcaatggatattatattgcccagagaatttttggcttctaagaggaattccagaaaaatggctatctatttttctgaaaaattttataccgcacaaatgctctcaagcatgatagggagagcggtgtgcaatggatattatattgcccagagaatttttggcttctgaggaattccagaaaaatggctatctatttttctgaaaaattttataccgcacaaatgcatgggcaagccatgatagggagagcggtgcgcaatggatatt

SEQ ID NO: 1147 - DNA, 5521 bp, Heterodera glycines
gattgatctcaaaaacgacgattgaagacgacgaaagtgatcgtggcccaatttgatgaatgtggaaacggaacttttgaatgctgttgtaaagcaatttccgttgaattccgatcaattaattgttgagattggaaaagatgaagtgctaaaaaaggtcatgaagtaccttcgcactcaatggcccacttcaaagaatatgtctttagaaatcattccatttcaccgcaggcgagaagccttatcaattgagaatggatgtattatttatgctgaccgggtggtgatccccgcatcacttcagaaggaagtcttgcagcaattgcaccagggacacccgggaatgaaacgcatgaaaaatctggccaggcaatatgtttattggcctggaatggaccagcaaatcgaagactccgttcgatcttgccaagcttgcgctgaagaagcaaaagcacctgttaaaactcttcttcactcttggccaaaagaagacggcccatggaaacgagtgcatattgactatgcagggcctttctttggaaaaatgtatttaatttgtgtggacgcattttccaaatggccagaagtctttgagatgagttccaccggatcagcagcgacgattgacaaaattcgttatctgtgctctcggcatggacttcccgaaacacttgttaccgacaatgggacacaattcacttcaaatgaatttaaggaattcacgaggaagaatggaatttcccatctgttttcggcaccgtactgcccgatgtcgaatggacaggcagagcggtttgtcgacactttcaaacggacgtttcgaaagttgaaaaaggagggggtagcgaataggttggatacgtttttgacaacctatcgtaccactcctaatgagtcgctggctggaaacaagagccctgcagaaatgtttatgcagcgcaaaatccgaacgactttggatcttctgcggccgaaacggcgcccaatcatcgaacgtgacgaaacgatggaaaggagtttcaatcgccgtcacggggcacaaccaagagaattcatggtcaatggcaaagtttttgcccgacatcgaatttctcaaccatggaaagccggacgtgtcactcaaaagaaaggagtaatttatgacgtgtcattttccgacggatcgtctagtaggttccatgcgaaccaaatgttggttcgtcacacgccggactatgaggaagaccccttggatatgcttaatgatgcatttgggcttcctctggccccatcggtggtagaaaaccctgatggacaggctgaagttcaacttcccatgcgtgccgacacaccggagccactgaacgatggaccactcgacgaagatgtaccaagtatccccgaaggacggccgaaaagaaacagacgccctcctcagcgcttttcgccgggatgatggacaaaccgattctttttgatggaggaggtgttaggacgggtcatatttaaattgtatttggcattctgtcccctttgccacgtcatcattttgaccccattccaattgtccttaaatatcctcccatttctctcccctcgttgttcatcaccactcattcattttttttgtcatttcccttcacttgaccccaatcaatattatttgtgtgccttgtcctatttaatttggaataaatatttattatttattctctcggactcatcggcataacattggcgacgcccgtcgacgactttacaattgttttgtcttcaaattgtgcggcttttccgctgtttttgttgtgtgattgttcaacaacattcgccactcaatcattttgttgtttgatttttttttttcaacaacaaattttcgtcgactcaatttgaattttgtttgtgaacaaaatttcttcaacttcaattttgttttctcaaacaaatggcactgaccgtagaacagcttttgcaggcaatcgcacagcaaaatcaaaacccgtcactttcaggcattgacttgtttgaattgggcgatgaaagcaccaacattgaggattggttgcagcaattctgcttcgcgttggactgctcagcgccaaatatcaaagatgagcagaaggtcaaacttctgatgacgaaattgagcaaggcggcattcagcgagtacaagaagtcgtgcctaccgaaggatgtgactgactacaatttcgccaaaacggaggagcaactcaaggcattgtttgccaaaccacagtcggtgtggatcgacaggtatgagtgcctccgggctttcaagagcgaggatgagaacttccgctcattcatcaatcggcacaagcgccttctccgggattttgagttcaaaaaactcaatgaagagcaattttattgcttaatgctgttaacagctttgaaatccccgaaggatggcgaacttcgaaagagaattttgggcaaattggcggctgatggcgacagggcaaaatacgataaggtcgtggaggacctacaaatgtatttgtccacaattgctgaagctaaatgcatcgagcagcagccagccccgccaaagcagattttggctgtaaagcaaaattgtgcagtgagaaccaaaggctttgaagcacgtggtcaagtgcaacagcagctgaaggtgtgctggcgctgtgggcgaagctcacattttccaagtgtatgtccgcacattaaagttgcgtgccggaagtgcagcaaagtgggacatttggaagcgcagtgcaaccaacaccaagcatggctgataaggcaagggaaaatgcaaagccgtaagcaaggcaacctcaagcttggaggtgtgctgatcaattcgatgaaccaaccgaaacggctgattgaatgccctattaaaatgaatggaaattttgtggaattcgcgctggactcaggtgctgaggttgtagtggtcaatgaagagacacatgaagcgatcggaaaaccgaagctaagtccatgcaatgttgaagcgaaataccacgacggaacaaaatgcacccttattggaaaaggggaagctgagttcgaattcggagggataatccgaaaagggcaattttacgttgaggcaatccgaaggatgcccattccaaccaatgtgtccactctccgatcatttttgggaatggttaaccactaccaacaattcgtaaagaatttgcggtttattcgccaaccgttggacgaccttttgaagcaggacacggtctggaattggtccagcgaatgtcagaaagcctttgatcaggtcattggcacgcttcagtcggaccaactgctcacacattatgacccatcacaagaaataattgtgtccgctgatgcctctgagcatggtatcggagcagttatttcccatcgttatgcggatggaagcatcaaggccatcgcgcatgcatcgcattcgttggctccggcagaaaggaattatgcccaaattgagaaggaaggcttagccttaatttatgccgtgcaaaaattccacaaatacctttatggaaggcattttatcctgcaaacggatcataaacctttgctgtcaatttttggcaacaaaaaaggaattaaatcctgcaccgccaatcgattgcaacgttgggcattgattttgctcgcttatgattttgatattgagtatcaaaacacatcggagttcggacaagcagacgctttgtctcgattgatctcaaaaacgacgattgaagacgacgaagtgatcgtggccaatttgatgaatgtggaaacggaacttttgaatgctgttgtaaagcaatttccgttgaattccgatcaaataattgttgagattggaaaagatgaagtgctaaaaaaggtcatgaagtaccttcgcactcaatggcccacttcaaagaatatgtctttagaaatcattccatttcaccgcaggcgagaagccttatcaattgagaatggatgtattatttatgctgaccgggtggtgatccccgcatcacttcagaaggaagtcttgcagcaattgcaccagggacacccgggaatgaaacgcatgaaaaatctggccaggcaatatgtttattggcctggaatggaccagcaaatcgaagactccgttcgatcttgccaagcttgcgctgaagaagcaaaagcaccagttaaaactcttcttcactcttggccaaaagaagacggcccatggaaacgagtgcatatggactatgcagggcctttctttggaaaaatgtatttgatttgtgtagacgcattttccaagtggccagaagtctttgagatgagttccaccggatcagcagcgacgattgacaaaattcgttatctgtgctctcggcatggacttcccgaaacacttgttaccgataatgggacacaattcacttcaaatgaatttaaggaattcacgaggaagaatggaatttcccatctgttttcggcaccgtactgcccgatgtcgaatggacaggcagagcggtttgtcgacactttcaaacggacgtttcgaaagttgaaaaaggagggggtagcgaataggttggatacgtttttgacaacctatcgtaccactcctaatgagtcgctggctggaaacaagagccctgcagaaatgtttatgcagcgcaaaatccgaacgactttggatcttctgcggccgaaacgacgcccaatcatcgaacgtgacgaagcgatggaaaggagtttcaatcgccgtcacggggcacaaccaagagaattcatggtcaatggtaaagtttttgcccgacatcgaatttctcaaccatggaaagccggacgtgtcactcaaaagaaaggagtaatttatgacgtgtcattttccgacggatcgtctggtaggttccatgcgaaccaaatgttggttcatcacacgccggactatgaggaagaccccttggatatgcttaatgatgcatttgggcttcctctggccccatcggtggtagaagaccctgacggacaggctgaagttcaacttcccatgcgcgccgacacaccggagccactgaacgatcgaccactcgacgaagatgtgccaagaatccccgaaggacggcccaaaagaaacagacgccctcctcagcgcttttcgccgggatgatggacaaaccgattctttttgatgggggaggtgttaggacgggtcatatttaaattgtagttggcattctgtcccctttgccacgtcatcattttgaccccactccatttgtccttaaatatcctcccatttctctcccctcgttgttcatcaccattcattcatttatttgtcatttcccttcgcttgaccccaatcaatattatttgtgtgccttgtcctttttaatttggaataaatatttattatttattctctcggactcatcggcataacattggcgacgcccgtcgacgactttacaattgttttgtcttcaaattgtgcggcttttccgctgtttttgttgtgtgattgttcaacaacattcgccactcaatcattttgttgtttgat

SEQ ID NO: 1148 - DNA, 5399 bp, Heterodera glycines
  unsure (1)..(5399): unsure at all n locations
tacgncggcgggattttggtcggttctgacgaaatggaaagtggtgtgctgcccttgtcggatctcgacgagtcttctctgttcaaattgggccttgggttcgtcggacttcacccatgagagcgcaatttgggagtcagaccataagtgtcgcccgttgatcgggcgccggagctctttctcggcgaaacgcatggcgcgaattccgacgaggatggcgaggagttcgagtcgagggatggtgaagcgctggttcgcggttcgtggccggaggcggtttttggcgaagattaggttcgcttcggagctatcggcagtctcgcttcggatgtagacggcagcggcaaatgtgtgttcagaggcgtcacaaaacacgtggagttgtaggcgactttgcttgccgagaatggagtgccaagggatgactattgtttggttttgccaaagagaaagggtttggctccacgtcgccgcctcggtgtcggggaggggggcatcccaggcggttccttctccccatagccgttggaagagccgtttggcgggcagaagacatggcccgactagaccaagagggtcgaacgtgctggcgatgatgctcaggactgaacgccgtgtagcagtggcgtctgtgtctttcggcagactgaaagtgacgcagtcgcttggggtgtcccaggtcaggcccaaaactttggccggcgttttgtcgagtcggtcgtcctcgggaatttgcttcatgacgtttggggagtggctgaggaactccctgaggttcatgtcggcgtctttgaggatttgtttggcgattgatgacttgtcgattgcttcctcctccgtctcgcactcgatgaggagattgtcgacgtacatattcgcggccaacgcttgggcgaatgggtgctcgtgcttgtcgaagtgttggaggagaacagcggcgaggataaagggagaacatgtcgcgccgaaaactagccgtttgtagcggtagatcaagagattgtcgcctgagacaggacgggcagggtttttcagccaatgcattttgcaaaagcgcctgtcctcgggttcgacttcgatggcatgaaaggcgccctgaacgtcggccaacacaggaattgtcgctgaacggaagcggaggagaatcccgcaaaggtcggggagcaacactggcccgcggtgaagacagtcgttgaggcttggggtgcccttggcatgagcactggcgtcaatgacgatcctcagtttctttgggttgatgacggcgtggtgaggcaaaaaatgctcgtcgttgtttcgcccggtcagctcaataatgtcggcgtccatttgccgtgtcagttcggcggagtaacggtcgagaagctcaggagagcattgcagacgcttggtcgttgagaggagccggcgatatgcgatggcccaattcgaggggaggggaggccgaggttcccgccaagtgaggcgaacggagtaacggccagacggcaattggcggacggtattgctaaattgctgcatggcaacctggtcgtcgttctgattggggtcgtcggtgattccaatcgcctcgagactccaaaagtcattgaccgtgcggaacgaggggaatgactcgacgttactggggtgagacgtcagcatggcaattgtcggggtgtgccgtggggtctcgggaaactccgcttcaccaccaaccattgggccgaaaattgtttggatgaggtgaagcccggagtgaagcgttgaacggccaataaagaattgccaaaattcccggatgccgatcaaaatgtccggcgccttttcgacgaccttgaggacggcatttggggggaggggtccatcggtggtgtctcactggagggccttgattttggtcgtgatctcgtcgattacgttgagctcgagggtctcccagcctccgtccaggcgctgcagttgaatggcgaattttgctgatcggacggtcttagggcgggagtctccgaaggtgtgaattcggaggaggtgctctgagagtcgagggggtcggagcttctctgtcattgcccggcttatgtagccggactggctgccagggtcgtggaagacaaaagcaggaattccgtcgggtgggcccccttggcatgacgccttaagggtctgagtcatcaaatgagctactctcgtcgatttggggacgggaaaactgccgctgtcgacggggagggggtcaaaggcggcggcgcataccgcctcgggaatgctttcgccctcgtcgcacacgagcagtgcggttgtggtgggagtcgctctcggtcggaccggttcggcgttggctcccgtggcacgactgacgttgcgggacgcatttccattccgctcttgattctcttgtcgatggtttgttcgccccggggggtcgattgacgggcagaggaggaagtgatggtcgttcgcctgacatttcgaacatcgatcttgacgagagcaatcgcgagtgatgtggtcttgacggagaacgcaggcagcgcccctgttcctcaagtcgtcgccggcgttgaatgacggtggtgtatcgctggcacgcactcggacggtgtccctcctgctcacaaagggagcaactgatgccattggcagagacgggttgggcgagagcaggaaaggcccgagtgttctccaaataacgtcgctccggcgctggtggtggtggtcgaaaagaacgaccacccggacgagagggagcccgttcgggaggacgttcgcggggctggatgtccatgtcctggaatgtgcggacgcacaagtccacctgctctttgtcggtgacgattgtcgcaaatccctcacgccaatttcgagccgtccaggaagtgtagctctcgcgctccattcggatcaggtcaagcagtaccggtggtggaagtttgcttttgatgagattggtgaccagcgagctgttggcgattggcgagagctccccctcgggctcgagactgcaaagttgggtgcagatccgctcgatctcttgctggagttggcgcaactccttgaggttgttccgggcgggtttgaggtggagaagctgggcattgagttggtcccgtcggttgccgacatcgccgtagcggtctcgtagaatgctcacgactgtgctgtaattggcgtctgacggtgggtaaccttcaatcatccgtcggggtggcgatcccttctcaaggtactgtaggaggaggaggtgcttttggaaggcggggtattggcgcgagtggacggcaaagtcgaaggcggcccaaaatgtgacccattcttctgccgatccgctgaacctcgggatttcgattcggctgacccggagtgcgtcgtcgtcattggtcgactgtcggaagtggccatggtgaggttccgatcgatgggtggggcgattcgatgctcggggaaatgtgaggttaagcgggaatgccggggttcgctggttgaatagggtttgatcggctctagccgaattggacggctgatgtgcattcgctggctgtgcctgagtcggtgggtcggtggattgccgttggcggtggatccggttttcgtcgtcggccccgtgatcagaaacacgactgctgctgcgagaagagatggcgtccgtcgtgtcgaatcgagcctcgatgtagacttggaggccgtcgaggatgagctgggctttagagagaagagtgatgactggccattcttcgacatttgggtcggcttgctcgtcgtcgaaggtcgggagtacggccagaaggtcctcctccgcctgcttcagaaacgggtcgcctagcagctgaatatggtcaaaacattctcgtagcatgccattgacgcggtcgatgcttctctgtagcaattgtcggtcagttcgtacgcccttggcgagtttggtctcctcggcgagcgggatttcctctggcgccatcctggtgaattcagtgagcctcccgaccctttgtcggaggcgcttgacgaggtccgaaagggttcggacttcggcggtgagacgttgacgaatgagttccgacatttccgaaagtctaggattggcggctggacgcaagagtcgggcttggttggtcgagagcctagagaaggcggctgtcggttggtgggttgagtggagattagccgagagcccgagagggacggctgacgataagagttgagtggtgaaagccgggagcctaaagggtcggtttaagaggacggctgacgactcaattgagggcttgtcggaagcctaaaggggggctggcggcaaagagttgagtgatgaaagccgggagcctgaaagggcggctggcggctgggagaagagtgatgaatggtcgaaagcctgaaatgggcggctgacgactcggtgagggtttgtcgggagcctaaaagggcggctggcgacttgatttgagtgatgagtgccggaggcctaagatggtcggcggacagcgaagggttgagttgccgggagcctaaagggtcggctggcggcagagagaagagtgatggatggtcgaaagtgaattgaagggcgaagggttcgtggtcccgggtcgtggcaccaaaaagtttgtcgaggaaggggggacaaactgggggagggattgggtcaattgaagaggacgacaagactcgccacactgggcggcgacgctgaaggcgagagagtggcgaggcgagaggagaggggggggggcagacggaatgccgttctcgcggtgtgagtgacgagaggggggtgtgttcctcccgtctctaccgtccctgatcccaccaacacatcgaccaacaacaatttatttgacacgagaggaaagggccgagggggttaatgcaatcggcattgaagatggaaaaattggggagaagaggagcagtgattatataaagtgtgtgtatgtgggggggggggagccccaggcttaagtaaacagacacagagggggcgggcgacagaagtaccatagaaaaatgggaaaaaaacgatttgcagatgtgaacaaaaattggccaaagggagacaaagaagaaagaagaagggggaggaaaaaggctgagaaaagcgacggcacatttgaataaaaggagagaggcgaaaaaacgcaggagaaggacggggagagacaaagagaaaaagtgttaaaaagggggtgtttggacaacttgcccccgggggggggggggttacaagtccaattacaaaaacatgaggcagagtgaaaagtgacaaatgaaaaaaggaaaaaagggggaacaaaggatcggtcaacaaaatgtggaaggagaaggagaaaaggagagaaataagaaacaaaaagggggggggaaagcaaaaggaaaatgcccaatttgatctctttcgaatttgatcattcccctcgtcgcat

SEQ ID NO: 1149 - DNA, 9959 bp, Heterodera glycines
aattgattggaattgaattgctaaaataattaaacttaagtattttataaataaattttgaaatggtgcggccaacgaaaggcactattcaaaaacgcaatgccgcggcggcgggacgcgccgttatagaggcgcaaaaggcaaggatggccgctttgaacgaaatgctagctaggaatgtgccggcgaagaatggtgatccggcattcttcgagatttgccagcaaatctgggcaattctcggccaattcttgggtaagtttgtcttatttggtatggggaaggcggaagatggggaaagaaaaacggccaaatgcaaaaatgaatgattgtaaggatggaaaagggaaaaaatgggaaagaaaaattgcgagatgactatcagtggatcggtgtaatggccgagaaagccattaggggaggggcataaatgtatgcaattaatgtgtttttatttaaaatgattaaaaatgattttaaatatatatatttatttatttgaggaaaagtttcgaaattataatcaaattaaattaattgtttgggtttaaattgtacttgaaatgtccttaaataattggctaaaggaaaagttgaaaaaaatggaggttactgtaggttattttaccggtccggctttaaggggaattgtggccagtgactttcggctatttgaccaagccagaggaactcgcaacggcatgggcaagcagtctgccggcgcaagtcggcctgcacccgctgcaccattcgctgccaatgaggcgactcgtgtcgtctttggcgcacgagggcctgcacatcctggaattccaacagggaaggcagtggccgagggctggcaccagcacgaagcacgatcatgggccattttttcgtgccaaatgtgccgaattgattgagatttccggtggactgatccagccggaatgcaaagagtttgaccatttgtgaattttggttatttttattattataaatttgttaactttgattttattatttataagaatataattaaaaatatttaaactcataatttaatagaaaattggaaaatatacaaaaattaattattattatttattttttttttaaatttttggtcaaaagtttaagacataataatttttcaaaaccaaaaaattttaaaattctggtcgtgtaggattgttcatgggactctctgctatcgaatgaactataaaagaaatctgtatgataagtctgagtaaagttattacgacttttatgtcacgggttttattccactaatggatttcctacattctttaaattaaattaacacattttcaatctgagaagcgtttcggtcgttgtattgtcgttctatctcttaaacgccttgatttctctgctgtttcatcatttctgttgttgtccaatgtttcttggttagtgtcttccacgtctgattgggctttttcgttgttttctttttgttgttcggacgtattttcctgaggccgatgagaatacccgggcatgttggtgagctcttcagcttccgctttgtcaagggcttgatgttcatcttctgtaagagttggcttggtacaggcaggtcctggtaattcaaaacaaagttttaattggttaatgtggacttttcgtgggtttgcctgaggggaaagacaggaaacgattatggcatgaatgccatccaaacttacgacacggaaaatgcctttccatggcaaatgcagcttttttgaagtgccaggctttccggcataattacgcaaaaggactctatcgcctaccgtaatttttgacgggcgaacagatctgtcgtactgtagtttcatccgcaattgtgcttcttcatttgcttctgcagcacatttccaagcagttcttaaagtggtgaccaatttttgcttaaattccattgaatcatccaacgctaccgggtctctaattgtcggaaatagaatttggtcaacactaaatattgggtccctcccaaaaatgaggaaaaatggagattcttttgttgatgtgtgaacggatgtgttataacaaaaatttgccatttcaataaattcatcaaaatcggggtcatttttgttgatatattttgccaaaatattgtgaaaagttctgaaagttcgctcagttatggcatttccttgggaccaatgaggtgttgcgtatttttgtccaatgtaaagcaggctgcatagttctcgaaagaactcactcgtaaatgaggttgcttggtccgttaccaattcggtacaccctccaaattttaaataacaattagtcagaaatgcgcgagcaatagtccttgctttggcatccggtaatgggactgatatcacgtatttcgtgaaccaacatacaatatttaataaatatttattacctctaatcgttaatggaaagggtccagctaaatctaacccaactttagcaaagagtgtattaaccggggtgatggacatttcagctctataagcaggtgttggattgtttctgagctgacaagtaacacatgcttttgtccaaattgctatgtcctggtgcatttttggccaaaagtaccgtgtccggcattttttaacagttttgttggtgctcatgtgaccgcctcccagtggcgaattatgaaaagattcaaatactaacaatcgaagagaaattgggatgtaaattcggggtttaagtccatgaggtttaaagtacagtataccagaatttaaacataaattaattgcgaaaatggtcatttgctctttttcattctcatcaaaacctcccggaaattcacctgattccaaaaatttaatataagcggacgcttccgggtctttgtgttgttcctgtaacaaatcaacttggtaagaggtaccatcatcatgtcgtaaggtcagtgagccaatgaaagggtccaatacaattcgtgagttcattgaaagtgagaggcaaattgggaattcaacaatgtcgtccatttctggtagttgtgccacctcctgaattggcacatcttcagcagaacgagaaagcgcatcggcgagggtattttgtttccctgaaatatgtacaattttaatttggtaattttgtaattcgatcagccaacgggctaaatgaggatgtgtatcagacttttttaacaaaaatgctaacggtttatggtcagtatgtaattcgatatcacttaaaaaaataaatggtttaaattgccgtaaagcataaataattgcgcataattcaatttgtaccggaggccaacggcgttctgatgcagagagggtccggctacagtaagaaatggccgaaaatgtgcctgattcatttttttgcattaagactgcaccaagcccgaccattgaagcatctgaaaatatgtgaaatgtttttgaataatcaggaaagaccaaatttggtgcttgggacagtaattcttttatatggttaaatgtcttatcatgttcagcactccattcaaacgggacgtctcgtctcgagagacgtaataatggttcaactaccgtagcaaaattaggaatatgccttctgtaaaatcctatttttccgagtactcttttaacatctttaagatttttaggagttgacatttcttgaattatttcaattcgactcatgctcggcttgtacccttgggtgtttaatgtgaaacccaaaaacatcatttcttgggtggcaaatacacactttttaggactcagtttcaaattgtaaagcctaaatttttcaaaaactcgtctgagggagcttaggtggtcccaaaaagtaccgtccttggtgtagactaaaacatcatcaacatatgacagagagcagtcttctaaaccacttaataccactgccatggctctcgaaaatgccgcagtcgcattttttaaaccaaaaggcatgtatcgcatttgatacacattgtcctccgttaagacgccacatttccatgatgtgtcatcactgagtttgatttgcatacatcctgaggataagtccaagctactgtagaatttgcaacttccgactttttccataattgaggctaatctcgggagtgggtatctgtcgggtatcattacctcgtttaattttcgaaaatctaaacatggtctaattccaccatcctttttctgtatgtctcagattcaaccattactcctttattaagcaattgttcaatatgcttctttaattcatctctgtatttatatggcattcgtcttggcggcgaagaaattggagcttcggttgtcgtgtcaaaatgatgttcgccacctgaaaatgagcctaaatcatattgactttttgaaaatatgtccttaaattcttctaaaagatttttaagtgcttctctttctctttcattaatgtcagattttgagaggtcaattttgaatgatggatcagttaatccatttgggtcaggattcccgcttttaattttctcctggtctgattcgtagaaaattccatcattttcgactatttcgtttaaataggctaaatgcatgcctttgaataaaatcttaggatcatttgatggattaattattgtcaacgggatatcctccacaaatggagccgacacacttggtacaatcccaaggtcattgtttagcaaatttaaatcgggcttatccacaactaagctgtgttttggctgtaaggcagttttaatgtttgctctgatcattacttggcttgaaggtggaattgtgtaattttcggcagcaaaggctcgaatattgttcattaattcataatttttggagcctaagcttatccattgtgttccaatttgaattttgtttttgtctatatttacggtaaaagggccaaaatgtcggagtgagtcacatccgagaattaattgataatctcggttgcagacggatttttgttcatttacaaaataaatagtaattgggacacaaatgtctgccacttttagcattacctttgctttttcacgaaatgaaattatgtgaccacttgcgctgattgcgtcctcatgtgatggtaccgttttgcagcccaagatgtcaatcagtgcccttgacgccaccgtgacacttgaaccggtgtccacaagacatctgacaatttgtgaattaattatggttgaaattacagcagtgttagataatgacatcattgacagcaattcagaattagctcctatctgagttaaagcatttacattaccaatgattgttcgatttgttgccgtttcggtttttcttcttaatttaaatgaaactcttcgggttttgttccttaggggtgctttctcaatttctgataacggcctgatcggggtgtattctggtctctcatttacaaaaccggatcgttcgaatgattgggatgacccaggcctatcatcaatgtgtgtgttattgttccgcttctctgtgttactacgtcccaaatttatgtactggtttctcaaaataaaataaaaacgaaggattaaatcagctgtgttgataaaaactaaaattgttaaaattttccagaaaatcccatcccagtcaccaataagaaaatgtttgaattccttgcctgttttagtccattgttcgtcgggcacaattgaagttcctttattctgaaaatgaattcgaaaagcaatttgtgactctttgatcatgttacttgtataagaatgggtaagaatatcagttacatttgttaggaccaattggtgaaatgaaaatggctggagaattggggtggtcaattgattgaaactcaaatttccaatttctttaattttaattctggaaactgaagctgatttttgatcaacttccaaaatttcattatcaattacaatcatttgtttctgattgcttgagcacggtgcctttttcgatgatggatttatgatcattgttgttggatcgacaaacgccatttggtggattcctctcatctcgattttgattggaagaaattcaaaacattcatttgtcacaggatttgattcctcgagaggataaaatgagtactgattcggctccaatggcacacatggccaaattttaataattcccggggccaaatttttagcaaccaaatttgggttcttgaaagttatacgggcaaaagtaattggttcagaaatcgaggcggaaataacccatcgccttgtttgttccatgtattcacaaattgagtgagtggtatgttgaaatgaaaatgacatggtatttgaaatgttccagttaaggaaggataattctgaggctaattgggaggaggttattaacccatccgtggtgcgtgtaactcgggttctcttccttcccctaagacttactgtgtctgctgcaaaaccttgttgtgaaattgtgagattcctgtcgcagtctaaaattgttttggcattatgagaaaattccaacattaggggctcattggacgaaatccaatgctgacccatcatttcgcctttccaatttccaatgctttggaattcacagtttgtttcgttttctggggtccaaacaattaatgaattgtcctgagttaaacaagtgcctttttcgtatggacaatttagctcttcaaaattttgaatggatactgtatttcctccaaaatgggatgtgatatttgttgggattaaataacaattatcaataaaaactgtttcccatttccatgagccaattaaccaatggcgaggtgagttgtcaattttcaaatcagtatgccataagcccgagtcttcaatcagtacccccaatttacacttacggtggcgaatcatttgccagcattcatctgaactaatttcgagcggaattggttcaagcatctctgaaatgggaacatttgtaagacttgtatatttcttgattgattttcttatttttctgcatgaccaagccggggtttgatgttcgaaaacatttggagtgtacaatcgaagtgacttaattttgggattttccaaataatccaatgagaactttgggcagcttgacaaattaggaatttgccaaagtactccatcttttatcatttggcataccatggggtgtttgggaatagtattagcggtagtggtgttaatgagaccggtaatgagtaacatgaatgctgtaagaaccatgaaatacttggacaattttggtccaatcccttcccactgtgagattttctgctggtcacttggttcacatggattaacctgagttttacctgttccttggtaagcaacttcagcaactcttgggtgatctgcaggcattgtgctaatggcattcattgatgcagattcatttccacctcttgaagacgggccttgagtgttcataacactgaatgctctaagcaattcattgatgtccaatgtgacatttgatgattgacgatttgcatcctggtgaaattcgggagagtcgtgaatggcatttaggtttggtcctgaatttggggtgaattgtctttgagaaaattggtttttcctctgaaagcaattgtatgccatatgacctgtcctcttacaaaaagtacagtacggtcgttgattccagctgcggtcggccatgttgtttggtcctcgccaatttcctcggcctctttgtctttggttgaaagtgccgccaccacgtccttgtccatatcttccacgatttgggctgtttgaaaaattgcggtatgaatttgatggtcccgcttcatttgaattgtagttctgtcgtcggtcccgttcacggcttggcgtccatggattttgttggacggcatgaactgtttggagaattgggtcgggaatttgtcctttatgagttttaagaagcagttcaagctcttcagcttgggctttgactatgtctaactcttttccttttgagagccctgtgagtctaattaaaaatgctaagtcaggtctcaaacggtcaattaattcctcactcaagcgctctttaagctgatccgggtccaggtttgaataagcaacttccactaatggggccaaacgccttaaaaatattcccaccggttcatcatcccgttgtttgcacagtgccaaatttcttttggccaattctttgcgttgtggtgagtcgagtttttctcttaaaaatttgagagctcgcaatactgtcgttgtttctgccggggtgagtgtgtcgtacaagtcgcgtggtacgtcgtctaaggcgaggcgaaggcggtccaatttttcagcttcatccaaatttttgcctactacttgaatgtaatccctaaatcgtctcgaccatttgtcaaatgccgttactgattcttgagagaaaatttctagacccgttactccggttaatgtattcacttcattgttattgtcaggattctgttccacgaatggatctactcgaattaatgaggtattttgttggccatttcctcctgtaaaattcacagaattccccccttgagagtctgttccatctttgtgttccaatttgaaaaggtccattctatctgagagtgatataatttgggcctcacatgtctgtagatttgtgttcacttcagcagcggcgcgattgatggcatcataatttgctttgacaagtctattaatgtgcctaagtgagcggttcactccgtcttggaaagagacgaggtcattgttggccttttccatgtctgctactgtaacttttgtttttcccgcccaaaattgtcggtctatggctacgacttccacccgcgcatcatcattattttgtccgaattccatgtttatttgcgggttaatagactctaaagtctctgacgagttgaagatttgtggccgtaaaggtgaaagaaacgtaaatttataaaagttcggggattgagggcgagagtgattgattttgaatagaaatgataattttgttttgtctaaatttgtttaatgactaatgattattttgaattgaaaaaatttgactgctttaacttgtgttttttttttaatttaatgagttattgtcagtcataataataattattagcattttattccaaagtgattaatgcgaaaggtcggttctccgattgtgctttggcggaagtcatatcatgtttattaatcgcaataaagaatgagcgctgtgaattttcattaaattgaaatttgttcgccgtatcgtgagaaaaacggaataagtaatctctttttttaaatctgattatgaatcggcttttaatcgtgagaaaaattttgcaattttgcgtttttaattgttaaaaagatattgaatttgaattttgaatatcgaaaataattaaattttatgtttgtgaaatgattgaaattttggagaattggtctatttttaaatttggcaatttggcaggagtttggttaaattgatttgcataattttgaattgttgctttatctttttttttgagttaattatttaaatgtttttctattaataattcgtaatactgtcaggattttaatactcgaaagcatcttgcgcagtgtagacattggaccagtacagtttgaataacagttgaattgagttgtttgtgagttataacgtttttttttttttgtgtttgaatgatttttgaatgtgtgatttctttctctctctttttttttttgactgattttgacaattttgtttttgactattttttgaatgaataatttcttttactgattttttttttttttttttgaatgttttgatttttttttttaactaaatttaacggccgggttataatgctcgaaagcatattgcgcaatgtagaattaaagctgcagcttgagccagtcggatttcatcccctcgctggatcgtctttccttcgactcgaaagtcgaaccatccggtgctaccagtaagacgtgaggatccatgccagagcgggatgggaggagacggattgtcccaggactgaagggtcttaatcttaggaatcgggccctgatcccc

SEQ ID NO: 1150 - DNA, 4760 bp, Heterodera glycines
tgcaaggagaggggcgactggtgtggtcgacttggcccgtctcaaccaatgccaatcgtgtcgctttcgcaaatgtttggccgttcaaatgaatcgcaacggtcagtcagtccattgattggtcaaccgacaaatcagtgagcagaaacatttgctgctgcagatctaccaaccaattgtttggcataagccaatatttaaatgcaaaattaattggtcataattagtccattttcgattgatccgtcggctgatcggacaaatcgaaagattttttccgtcgtttgcccattcattcatttttttgttttttttcagctgtccaaaatgaacgttctgcattgcccaaagttgcgcagtccgtcctttgctgcgacgcttcgcaaaaggcgagggaatttccgccgccgatcattcggtcggtttttgtccactaattaattaatcgtttattgttttttgcgctttctttgatcaacacaaaattaagtcgcagctccatcccttgctcaatggtggtggccccttctccgttcttcagcgcagtctctgctgacaatgagaacgaacattcgcaaaactttgcactttcgaaagagggtaatgggaacacaacagaatgatcagttggggaataatcagatctgagcaggaaaaattaaagagactgatcagcagaacagaccattttagggagggaaacagaggtagaaaaggatttatggatcaacggaggcaagaaatcatccggcccaccccatagtttttcgtaaaagctcagctcgctcatatattcaaaaaagagtctgatcaggtccattttgggaacttggtcagaactgatcacttttgtggagagtttcacttctgatcgagaagggactgtcacttctgtgattagagagagtcttgccatggctgtgatcagtgtggtcactccccccccccctcccacaggtggtctccccactttaaccactcaaatgaactgtgccacacgtcagtcgagtgtggtgagtgccaacaaccagatgatccaaccgggcccttctgcgcttcgttttgatcagtccaatggcttttccatcgcccgccttttgccctcttcgccgccttttcattttccctcttcccaccgatcgttcgctttcctttccgttctgatcacttcgctgcatgccttcccgccctttcgcgacctcatttctaagcagtgcatggattctctgttcagcgacggatggcatcgctttttcctcgcccatttgcctcaacttttcgcacaaagttcgttcatttttttgatttttgctgttccgcagtgacttttccacgacagttcccctccaaaatgtgtgccacaataattcgtcgcccttcaccaatttgtgccaacaattggcccaacttcggctcaatgcctttgagcaatggcttttcggctgtgccgcccttttccatcaaataaacaaaagtcggtcggctgtaacaaaaaccgattcatttatacatacaaagctcaaaactttcttcagccgtacttcagcaggatgagttggaacttcgtgccgttgccacacttatcgactgttgcctcggtgtgcaaatgccgtcgccaacactttttggcacggcacagtttcgcttggccagactttttacactgctggcacatattttcacgactgaagcggacaccgttctcaaccattttttcccgcgacattctgtcgaacaaatccgcagattgtgggagcaaaataaatgagcaaaaaacgcagaaaagaacggctctttaaattaccttcaaatcaatcatataaaatcagagtccgattgctatatttttattttgacaaagttgaatttttatgtgtgaaaggttttgtaaaaattaaacaaaaaaagcaaaatatacataatgaaaaataataatttaatttaaacattttgtgattttatctagaaatgtttgaaattaggcccgaaattttcggcaatcgaatcccccggcgtttccagaacgagaaacggaaacaactctccttgcataaattcaccagtgatcgtatggacgttactttctgttgtaaatgaatgggttaatgattcgttttttcgcacaaaccgaaaattatttttccatttttaaagatcaataatttctgcattcggaaatcaacacaacagcccatgagatcgccacttcccaaagtcgagtttccggggtgcccttctgtatttttcaaaaaggttccgttgctgctgtacgtgcatccaattgtaactgattttttacgcacaaaaccaaatgagaaatagctaaatatataaattatgaaaaattgaacaatacaaattataagtattgtaagtaccctgacaacacattgatttgtatttcatattgaaaacaatccacgtcgttaggcactgcgtgttgtgcgtaaacaaatcgtttatctttaaaaaagtatattggttattaattaaagctcatttgcagttaattagtgctggattatcaatggccgttaattaggtcatttggtcctcctcccgccccaaaagccaaggttcacccttttatgtgcacacatttctcacatttctttcctatgttaacagacaaattgtcgccatcaaataataaatctttgtgacagccaatgaaactgtttctgctcgaattgggcgtcgtcttctgctgggaaaacaatttaataataacactaaactcaactgatttccatactttcgtgacggaattttgcgccgtaacccctaaaaatgggggttatcaatagggatgaaatttatataaatgtccatttttttctcaaaccgtttgattttcttatccgaatcatatttatttgttacataagtaatttaaaattgcttgccaatttttcccaatggcgtgactttcgatttggtcatcctttgctgctgttccaagtcgaaaattcttttgtccattcggtcgacctccgtccccattcctgcaatggtcgtccccatcctcgccaattctccagcgacttttgcttcgaattcgtccgatcgtttctcaaacttcgcttccaattcgtccgatcgtttctcaaacttcgcttccaattcgtccgatcgtttctcaaacttcgcttccaattggtcagatcgcgtgtcaatggtcgtcctcagcgatgccaattcagcacagagcatccccattatctcgtgctgtgaaaactgggtaatggtggagatcattggtcccataataaaagggaaaaaagcccgattttaatgattttgcacttcattcgggggttatcgagggtgctgagcaagaatatgccatcagatttgtcatctgacgacgtcaaatctttgatttttcgccatgtctatgatttttcgtcaagtatttttttccacttttaactcaattatttagctcaaaaatgagctcagcttgtttattgcacgaaaaatgcacgatatttaagcattgacaacataaaactgaccaatatggtcaaaaatattttcgaacgccaaaagcgtttttttcccataaaaggtctttaggggtgtatttttcgttttttttcatttttcttgtgaaaatttccaaaaaatggccaaaatatggactaaaaacccaaaaatggcgaaatatggatttattcccgaaaacccccaaaatatggatttatatggactaaaaaccttcaccaaatcaaaaaattttaacgcagaaatgctatttttaagcccctttcttcatagcatatgcgcagaaaaaatatgttaatccatataatttacaaccctaataatgatgaaactccaataaattctgtcgaaatcaatatttcgaaaaattttgccgcaactattgaaaattgcaaaaatgtttttgctgttccaaatacaagccatattatgaccaaaaatttaatgatcgattgggttcacaatgttttggtcccagttttacgccctggagaacaatcattattgttggtggatagttggaatggttggaatgattttcgactcccggataatgttaaattaaaagtgaagcaaatcccaaaacatgcaactggaatatgccaaccattagatgtttacatttttcggtagttttgtattcatcgtcccgatgtcgtatatacgatcatcgtaacatcatggaaaaaacgtccgatgtcgtatattttgtttcaattaacaaccgaccatcgtatatccgacatcatatatacgatgaaactaagggaagaaatcgtaaattcatccgtggtgcaacccatgtatttggttcatgatgtcggatacgcgatttttgacatcacatcatgcaaattgaattgaaacagaattacatcatattcacgatttttcgtcgtatttacgatttttctcccatcttataaaagatgatcctaaatacgatgagacgtcgtgaaatgatgggaattgaaacaaaattttacacgatatgacataatatcggagatacgacgggaattgaaatagacaccgcaagtgtttttcttttccgctgtttaagaaattccccccccccctcagggacggtcccaggggggggggggggtacgtaccctcccaaggcccctccacactcgaaatttttaaggaaaaagttgtattttttggtgaaaaatttcgattttccttactgataccccctccaagaactacctcacaaaagaatttttaagtaaataaaaggatatttt

SEQ ID NO: 1151 - DNA, 6252 bp, Heterodera glycines
  unsure (1)..(6252): unsure at all n locations
cgtccctgccccccccccctaccattccctccctccctactgtctgtccacttcatgccatttctcatctcctaccgtttcctctccgttccgcagcactcaaagcaaacaccgagtgatgatgctgtgtctgaattgtagacattcttagatagcacagattctgctgctgctgattgacactcatttgtctcttagctactctctcaacgaaaaaggcaattaataaaaagaaaattcagttattaaaataggtatttcggtatggaatgacatgtaatgaaggaacacagtaaacaacaacaacaaagaaacacagttttacggaatacggtgcgctgggcaatcctttctttttgtttgcgaaaatgatttcttctctcaaactctgttagttaaatggtgggctttttttgctccgagcaaacatatgaccgcaattgagaagggagtgagtgaccaatccaaaaaggacagcggcaaatggacgccgaacggacgaacgaatgccctcgaaattattgttttaatctccattaatttatttattgaaagccttttataggctaaatcctcaaggtgaataaaaatgggtgaataaaaacggctggaatcactcaaaaagccgaccctttgtgttcgagcgttggggcggcgattaaagggacaaacgctgttcgactttaaatcggggttttatgaaagtcgtcaattgcacttcaaataatggaaatgtccttaaatgagtttttaagacttttttgttcaggaactttttcttttatcttttttcgactttttatgaaaatttcgccccctgacaaagctgtctgcccccgacatttttaaatttcttcagccaccccagacaaatttagtcggggaattttcaccccgaaccccgacttttccaaccccgacgtcggggtcacaaccctaatttttacatttggtatttgcatgttgcacttcagcagcagcagcaatttttgtaattggagagattggtcggtcgttcggtctttgatcagaatctcttttccattttattcggtctttgatcttttccattttaatcacaggagataattatccgtgccttacgatattccgattattgattccgcaattctttggctgattgtgaaagagaatggacggaatatttgagaaagcgatcaaatttcaaatagagagaaatggaaggcacaatggtaaagcggagagtggacagacagacaaaggaaaaagaataggtatttgggagagagcagcgagacaatgagtggaaagtgccgaggccaatggaatcatttgcattgtctctttctgtgcggtcattgcttcatcatccgtcggttgcgcggcagtggcggcacccgcggcccctctttgtccttccgcgttttgggcggcaccggagggggcggaaagggcggcgaaatgtgtaaagggtgagaagcattggacgagcggagcggaccgacacgcggcgcagcggtagggaaaacggtagcggaggaacagtcgccggaggcgacgtttttcggcggggcaaacatttggggagaacaatcgtcctgagaaaacatttgattgataggaatgggaaagataaggtgattaatgacttgatccgttctaatgacaatggcacttataatcagttgatcgaagtcccaaccaaaattgggttgaccgatcactctgatcacctctcccccccccccccctctctctctttcctcatttcctctcactttctgtcagattatctctctctctctctcacacacacactctgtcactttgttgtctctgtctccctatctccgctctctctctctctctatatctctctctctctctctatatcctccttcccccatgtcactcatttcacaccccctcgttgctgctgctcgcgcacattccgctgtcccatccgccggcgccgttctgtccattggccatgctattggttgtgggcaggccaaaagagacggaggcgatgtcgggcgacggcacggaaggcggcaaaggcgggtggccaagtcggagagtggtgggacggcactgttcggagacggacatcgaaaaatctgacgagagagaaaggaagtctgaaaatattcgaaattcctcgcccaccgaccattgaatgcccccggcaatccctccgctgccatttccgctcggttcagtaccggcgcctgcgaagttgggcagcgcaatgaaatgtcttccgtccctccgccgtttttcttcgcactttccgcccgtggcattgccattggcctttttgtccgttcttcttgctgttgtgctgcaaattgaggtgctggcgaagcggccaaatgagtgacttttgcggtcgggatcagcttaatgaaatttgttaattgactgtcaaaaatgagaaatgccaatacaaatttgatgctttggttttcctgcattggcacataggaaggattagtgatggacccatcgacggggacggggtgacggcgcaaaaggtcagccaaatcgttgggggacagcggcttcctgcattttaatacaactgtaacatgccgtactccttcaattggaggagtaaaaaaccgctaaatcgttacccagcggggctgtctgatgagcgcgacctttggtgccaatggggaaaagcggcatgctcaggggacaacagaaaaggcgaaacattggcattgttggcatggagaggaatggttgcattaagcagggacgacgaaccgcgaggcgattgcgcggaacgggcgggagacaaagctgcgcaacggaacactgatcagtgtggcatttgattattgttaattagcgagcgatctatggtcactgcgcattgatcgacccgatcaataagaatgtcatttcgtgatcagtaaccctgcagaaacccgggaaggtgttttgacgaaatcaacccactcacaacacataaagaattagtttattcatttttaataaatatatgtaggaaatgtacaatagtgagtcgcaataacatacaaaatacacagagaggcaactcagggccaagtgatatatgcatatacaattatacatggaggcaacttgggccaaatgatttacaaacatcctcttttaatacatcaggcagcatcggaggtgtgcacgaatcgccatcacattcattcctgcgcgtcgcggtatctccaggcgtcggtcggcgtaccagtcccaacgcgttgaaaatggcgcggcctccactggggtctccgttgttctttgcgtcgcctgtcctcgtcccgctggtgttgctcgatgaagcgcttgactgaaaacaaggggaaaactaattaattcttaatccaaattcctccctcccctcccaccttggttcgccatttttgtgtcgttgaagtacagagcagcggtgagatgacgccacaattttcggctttcgttgttcttctggtccagcaccctgacacattcctgtggaaattagaaatgggtgcattaaagttcatttttatttgggcattttctaacctttgtcacgtcgcacttcgcccgcacatttgtaaagggttcgaaggctctgcgggcacttcgcttcaggacaatttcgcctcgccagtcgcctttcagttgcatcaccgccacctccctgtggtagacttggccatgaatttggtgcgcacttccgaagaacatgggccgcgcctggaactcgattttggcactgtatccggtttgcaagcagctgagttcaacctgtgtggaaaaattttgtttgctgaaaaagcaaaatcgagcgaaatggacccacttttccagcgagttcaaaccacggccttccgaagacgttgcgcgcgaaggcatctgggaaggtggccatgtacgtctcattgtgctgaaaatggggaacaaacgattaaaaccataaaacaaatggcacaaaaaattacaaaactcacgttttggagtcgaacagtcgcccggccgatgttgcggacgcccagtgatgtaagcccagcgaagtgtgactcggtgtaaatgtgcgatgtgcaggtcacgccggattccggatgttcgacgtaaaaggcggagatgggcggatgatggctgacttgctcgccgatgaacgtcatctgaaatgtgggaacagatttaggtttctcaatgagtgacgaggctatcactcaaactggacctggttggttgctgagcccgggaacggtccaccggcggttcggcttgcggacaacggcacgccaggcagggtccaacggcaacggaacacttcgcccaggatcggattgtacggcttcttcgcggcgtcggttttgcgtgcaggatagaaggagttcaagtagtatttgaggacggcaaggaatctgaaaaattgttgattcaaaagcgttgtcgtcaaccaatcgggaccgtttctcagccgtattctcgtaggcgccggcgatcagttcatcaggatgagctgaaatgagataagattgaacttggaaaaattttaaaaagcaatgtattcaccgaagaagtcggcgtacatttcgaggagagagcgtcgttccagcacgaaggtgggcagcgccaaattctgcagagtctgagtggtgccgagctgaaaagagaatttctattaaaacaattcatcgaacaacgcgtcgtctacctgggtcactaaatgtctgaacacgccggcctgctcgctgttccagttgtcccgttcgtccgagttgttgtagatgtagtcgtagtcggttccgttggtgtcgtagttgccccaatctggcgcttgcattttgaaatccgctgccgctaaaattgaaggggaaaggaaatcatagattgaggaaacatatatgaacaaaaacaactaaaaaaagaaaaaaattttacgaagaggaattgtggaggtggagagaagaaatcaacacttttatacagaaaatccgactgaactcacaaaggaaggtccccaggtgtcccgtgggatttccaaatgaaatttggtggngtgtatagagcacccatgggttcttaagaaaagtgtttttattttctgcgaaatgagtctgagtgccgagttatgacgtgccaaacttttttttattgcaataaattaaatatacatttgcatgttttgtgttgttcggtggtgcggaggttgtgctcctgacttttgtttttgcccccataggttcgaatccctcttatgtaattttattttcctcattttatatttgccttttatgcaaattaatcgccattgaaatcaattccatcgggtcaaaaatttttattcctcctccaagtgattcctaaatatgtccgtaaatccccaaaatattattgtccttttaaaaaaatatttttccaaatataatgattagggttgtaaattatatggactaaaaaacgcgaaatatggacattaaatatggtctaaaaaagcccgaaatatggactaaaaaggccaaaaatggccaaatatggaccaaaatatggataaaaaatgccaaaatatatgttgtaaacccccaaaaatcccaaaaaaggtgtgcatatttaatatttgcttaaataaacctaaaaagtacaataaacaaccaaaaaatggggtttaaaacttaaaaatgcatattttttattgttgttcgttgtatcaaaaacacctccaagtttgccaaatttcgaaaaaattctcattaaaaaaaaagaaatgttcgcaaaaaaatgacgaaaatatttattgaaaatgccaaaatgacgacgaaaactcaaatttttcgtgttttgtggggtgtaatttttaaaaatttccaaaaagttgatctttaggggtgtatttttcgtttttttttcatttttcttgtgaaaatttccaaaaaatggccaaaatatggactaaaaacccaaaaatggcgaaatatggatttattcccgaaaaccccaaaatatggatttatatggactaaaaaccttcaccaaatcaaaaaattttaacgcagaaatgctatttttaagcccctttcttcatagcatatgcgcagaaaaaatatgttaatccatataatttacaaccctaataatgatgaaactccaataaattctgtcgaaatcaatatttcgaaaaattttgccgcaactattgaaaaagggaaaaatgtttttgctgttccggatgcggagccatattaaagggaaaaatttaatgatcgattgggttcacagatgttttgg

SEQ ID NO: 1152 - DNA, 748 bp, Heterodera glycines
tcagtctcttggatcaccgtttattccacggttcacctccctagctgattgttgcctctgatcaaacaacccacaattgttatactgttgaattaattgcattacacagtgtttttttaattaattattttttgtgtcccattgcccgtgatgtgtgtgtacttttttttcttcgttttaaacaacaacaccatcattttggagcagtacaacaacaacaaaaagaacaaccgcctcattaaactactcaaaaatccattcattgttctttaattatcgtccgttccacaattatgtgttgtcatcccccgtttaccgtacactcccgaaaaattattgttgtttttttttacaaatttttagccctttttggatttaattatgaataatgaatgatgttcaaagcttattgttagaatttcatgccgttccgttgttattgtcgctgttctttttttttaatacatttattaaatccacagcaataaatgtgtgtgggtgaataaaaaagttgtgcctctggtaggggtcagttgcgtctgagccaagcataaagcaccataacttttttctttgtttgtcaaattttataaatttggcatcattcgaaagctctacattttgaagcttttgataagatattgctaagcgattgaacaacttataaaaaagttgcaacatgaacactaccaaaaagtcagaatttttgcatattttaatttataacttttttatatgtggtatgtct

SEQ ID NO: 1153 - DNA, 9660 bp, Heterodera glycines
atactgtttgctctttcgttttgaaatgaatttgtgggatttgtttttccaaaatttttcaacggatttttttttgtaaacgctttttttatgaaaaacatttaaattgtcaaacaatttgcagagcagcataagttaataagtttttgagaaaaaatgtcttccgcacttaaacagaaacaacaaaatccgtgcgcacaatttttgttgtccggcggcgacgcggtgcccatcccggacagtctgttcatctacagtgcctttctgcgtgactacaaaaaggcgatgctgcgcggcgacatggacaacctgtgaggagcaggctgaatttgtgtggcacttggagggattaggatttagaattcccgaatcttggcagtcgggcaacagtatgccaaaaaccccggttttatgggatttggaattttataaatttgtttaaaattatcgggttttgttcatttttggcgagcccttataataaggtagatatttttgggtaaatttttcatattttccgcccggtgggactcgaactcatggcctttccacactttggaatttcatacaacaagtttctagtccttagccacaattggcacttttgtccccctcccccccattaatttttgtgctccgtttcagtgaaaatatgactattccgttgccggttgtctccggcaaacagccgttcaccaagcagcatttgaccgtcatgactcagtttttcgacctgtgcgtatagtgcttcttaaattttacaaaacctatctcttcccagcctaattacagtaccccttttcccagttacacgcgtcacaattacggtgcgggcagttccagtgccaaaaaagtgccctccacggtggacttgcagggcaaatgcggccccggcgcggcggcacacaccaaagcgacgccacggggcgtaaacaaaacggcggcgccaccggcggggggaaacagcgtcgtcggcaacggacgcgtaagagcgggggcgaatttgaacgatcagaaatttttagaatgatcagaaaatttttatcaattttcacccccccccttccctaatcgaattcgacacttttaaaggacatggtcgagtcggtcagcagcgagacgaacattgtcgaaatggaggccaaatcggacgccaaagtgagacggaaaatttaaaaaaaattgcgaaaattaacgaattcgttgaatttgcattcccataccgtacccctttgcgttagcgtacatctaccgtatctatctcacttttttacagactcccggcctgcccgactgggcgcacggcttcttctcggcgctggacaagaatttgctgattcagaccgccaatgtggccaactttttgtccgccacccaatttgtggagcacttggccaatttcatcgcgttgaaggtgggcacagcaccagcagcacaccatcgggaattcaaactcccgattggtccgtccatatatccgggcttatttgcctattttttggactttggtctcgagccttgaccattttgaataacgttttcgtgaaaattcactcgaacgcattatatttttttgagtctcattctcgagatttcgattctctaataccccctattgttatattatttttggcattttttgaacgaaaatataattttgcgttccatcatgcgcagtgccgtgagatggactcgtcggctgagatcatggagttcctcaatgtcggcaccgacgacttggaaggcgaggagttgcgcaaggagttgtacaaccactgatcgaccatccgtctcggtcaattgatcgggaggaaagagacccagctaattgatttattgtggcaaaatttctgatcaccccccaaaatcttgtgccctttggctttgtgtattgtatatcaaaaataaattgtgtattttttggcacatttcctctcttttataaatttaaataatttattttaaaatttcctgaatcttttaataaaatggtaggaaacgtgagaaaagaaagggaaaggaacaaaataaaagtggaggaaaaatcactgttaaaaaaggaataaacaaattgaatcattttaagtcgaaacattgccgaagatacacaaaatcatttaatatgtgtagcaaaaaatgtcatcccgacaaaatttaaactaaaataaaaaaaagtttcattaaaaaagaatttctaaaaattccatttaaaaaaaaaaaaaattaaattttgtcggttcgcccgaggctttttgtccatgcgccaaattgcatacgattggttgtacagcagtaggggagagatcggagcggaaagtgaaaaggaaccccaatttaagagtgccgacccttggggcagtagtgcaactcgagagtttccggtctcgactcaagaaaagtctcgggtttttgtttagaggtttagaatcctaagaccgaatctcgagtcatgagttcaagactttgaatcgaggccacacctcgagaccgaatcgtggagtcgaacctcggatattgcagtcgaacaattgttagtattgagtcttggcgccgagtcttgaaaacgaatccctagtttcgatactgagtcttagaaataagtttttcgattctcgaggagggggtcgtatctcgatcccgagtcttgacccaacatcataattctcggcctgcctcgaacattatcacaacccgcagtgatcaaaaaagtgttgtgggggggcaccggcagggtcggacgttgcaaggacaataaaaaaaaatagcgatgcccccgggccatggattaattaattagttaattgctcttttcttgcgccacaaattacgtttgttcttccttcacacatccgccgacacactggcaccaccagcgccggcaaaactgctgttcaacgaatcggcgacgacggccgtgccgccggcgacgggcgaacggcgcaactgttgctgctgggggccaaggtggggcaacggttggaagcgcggggggctcagtgcttctgtgggaggaaaattgtgaattttcaaattttttttttaaatttcagtccgccaagaatgtaatcagagcccttgtctttcctaggacggactctaatcggtttgatcagcagattggtgatcaactcgatggtttagagcactaattaattaaatgacctattccatatcacgaaaagctttctgttgtattttctgatcaagtgaagcaccagcagcttcatcaaactctgatcaatccctctttctgatcggtgcttttcctttcgcctctaatcagttgatttgatcaagatttgagtctggattagtcagtttcctgcttcctgatcactcctattcaaccaacccccctatctgggcaatcaatcactgtttgatcaacagcattcgatcactttcattctcccgcctcttacttgtcgccgccgttttggcgctgccgccgatcgccaacggtggcgggaaacgttgcctttcgcctcctcggccgccggcgctggcgccaagtacggacggcgtgtcgcgcccaccgctggcgctggtggtaccgctgcgcggcaacgggaacggactcgtccgcgacggcacatccggcagcgccacaggggcgacggcggcaccgctgcgctgatcagtgccaccgaacgtggcactcccatttgatcgcaagctgtagggggagggcagcaaattaatgttgctgatcacagacaggccattagccggtattttacgaaaaattcgcgggacaaaatgtcgccagagcaaaacgtcgcagggacaaaacaacgccggacaaaacatcgcgacgtttatgtccaggctgcgttttgactacaacattttcctgaacatttttggggccatgatccgggtgcatttttcaaaaataacccggaaatcggggttccggaccggacaaattctgacagggttcggtttcttgagaaaaacgtcgggaatggaaaacctaaagggactcgacgagacaaattaaaactcattagtcccatccattgtcatgactcatgaatcgagaatatcaaatatttgagatgtcggaatttcgcttttcgaaatgagggcgtcggcaaacatcctgatttgtatgccttgtggctttgcggtgctccgtactcacctgtacggcggtgggggcgctttagcgccgctggtgcccagcagggatggcacggaattccgacttccgacttccgacatttttggggtcggaattccgacttccgacttccgaaaatttttggggcctcggaattccgacttccgacttccgaaatttttgatgaaaagtcggaatttttcggaatttttttgagtttttttttcaaaaaattagcaatttttgtacaatttgttaataaattgcatagaaattttcaatttttttccgacggcacctatcggcaccgccggactcaaaaaaacttaattttcttgagaatttttaatttctgtttgtattttctattactggaagttgaaagaagaacatggaaaatggcctcttctttgtcgtgttgcccgaaaatttctgagcgcaccttgtggatcagttgaaagcgaaagattgttttctaaagccgggctcatttgcacggatttgcgaaaccggattaagggagacaatgttaggaaattgatttttttgcagtccaatttatcaattgttgaatttgattattaatttttaatattaattttttaatacataaatacatttatatttagtaattttgatttataactttaaagttaacttatgaaatattttaaaatttctgtaaaatttttcaaaaattccaagttccgaccttttttgggtcggagttccgacttccgaaaatttttggggcctcggaattacgagttccgacttccgaaaatttttggggcctcggaattccgagttccgacttccgaaaatttttggggatcggaactccatccctggtgcccaggcggaaggcggcgctgaagccgccgtcgtcggcatcgcactccgttggacgcatgccggctgtcagcaacacgcgttccgggtcgccgcgcgtgatcagcggggcagcggctgcggtactgttgccaccggtgccgttggccgcggcacggctggcgcccgctgctgccagctgctggtggcgccggaacgacgccggcgagtcgcgacgcgcgcgcacaactctgtgccgataagtataatttatttttttttaataaatttgagttttccagagttggaaacaacaagttcctgtatcgaaaattcggtcctggtcaaagatagagtctgatcccataagaggcatttcatagactgaaactattcggcactttatttcgagactctcgatccaggtcgctctatatgttgatggatcattgaacttgaagatattagacacagatcactttcaaagttatgatcggcacttcattctgagactctcgactcagatcactttatatgttgattggaacattcaacttcgagattgctgacccgggaccagagactcgggtcactttcaaggctcggatcgacaattcatttcgtgactctcgattctgatcagcagaaatgagactctgatcactcacgcacgcactttttgcatgtgatcagacaagcagccaccatgcacaacagcagcaacccgcacatgcaactgagcacgatgaaggcggtgtagtaggagctggacacaaccccctgttgggaaaatggaaatctctaaatttccaaaaatccaaaatcaccgcatgatttggctccaatacgccgccttctccgtccgcacaatacgcattctctttgatgccccatggacagtttttgcagtcggacacctgctgccgagaatggaaggaataatgaatgacaattaaatgatgcaattaggcttaagccccaacccttcggcgggtagagaaaagtcggggaatcgaggatgaaattcaccgacaaaatttgtcggggatttctggtggaaacttgcaaaaaagtcttcgaaactcattcacagcaaaaaaataaaataaaataattttttatttgtttttaaataatttttatttatttttaattgctatttggttatgatcaaaaataaaaatccatttattattcaacccctaaaagaaacaaaaaattcaataaggaaaaatgagggaagaagtggtgggcctgggccgagaggctgcgggaatggtatcattcgaaagcacaaagtctgaataatgtaataatacgagaaaacaagagaattctaacattccaagaaagtaacaaacgaaaataatcagcaattacttaattaatcaaatcttttttggtaattgcctgaacgctgcgagtttatatattttagcttcgttagattttgtgctttcgaatgataccaaaaagatagggtttgttcgaacatgaacaaagttattgtataaaaacccaggattgtcaattgattggactcataaaagtcgattggactcataaagtgcattagagcccgaaaacctatgtcccacctccccaaatccaattcctgactccgaactttatttgcttcgatgtggataaaggcataaaatggagaacggataaatgattggaaaaataagaaaaaaattcaaatcaaaaaaattagaaaaaaacaatataaatgtgtaagtgttgatcggagagagagaatataattgtcgataaatggagaatagagaaaaggaataattgcggtttaaatgtaaatgataaagaaataattgaagtaaattgaatatggcttaatagaaatgccaacaagccaaaaaaatcagtcctccatcttcctcccttcagtttcctagccttcattttcctcgccttcgtcctcgccttcgtcctcgctatcgtcttcctcgtcatttggcccgcgtttcaaaaattcaacgcaaaaacgttcgccattttttttgaaccacatttgcttggtttcgaagtcaaagcggcatttgtatttgcagaaatagtccatgcccaacctaaacacatttattaaggatgcaacttattaattctctgccgtacacctacgtcaaggcgtctttgtcttcaatcagcacggcgcatctgaacccattgtcctcaaaattaccaatttctaatttcaagccggacaacctagggttttgtttgtaaataattgtcactaattaaaaaacctactgtcctttggacgcctttctgcctttgtaaaggcccttaaaatgctttatattgctccgatccatttttcctccagaagtgaaagtcgcttcgttttggagaaacaatttgcctcccattattccactggtgcatcctgtgagtatgtaactcagatcttatgctggggtaaacttctgagcgcacctgtgtctaccaaaattttcgccacttcaattccgcacactcgtccacgcacatgcgcttggcggtcaatgaggtcgttgtctgcgtacgcttcatcgttcacatcggttgttgaagcggtccttttcaagctagctttgagtccatcatgaagaacagaaatggaaaacaaaattagtaaagaaaaaaacaaatgtatggaatattttaagggtagaatatgagggggggggggagcagaggggagaatatgataagcggaagtagtataaggcacattaaatggccccaaatttgccccccccttccccatcctttctttctcttttccaaaattccgccgcaaatttcataaaaagtcagaaaattagagtttcaatctaggacaaaaaatttcagtgaatttttggggggttcgtaggcccaaccctataattgttagatataattccgactatttgcatatgtataaaagcatggcgacaggcacaatgagggggggggagcagaggggagaatatgataagcggagaatatgagggggggagcagaggggagaatatgagaggggggcacaaatgagcagggaataatatgagcggagggagagagcagaggggagaatatgaggggggagggagcagaggggagaatatgaggggggagcagaggggagaatatgataagcggagaatatgagggggggaagcagaggggagaatatgaggtgggagggagcagaggggagaatatgataagcggagaatatgagggggggagcagaggggagaatatgataagcggagaatatgaggggggggcacaaaatgagcagggaataatatgagcggagggagggagcagaggggagaatatgagaggggggagcacaaaaaaagttggtgttggtggaaggaaaaagggccaaagggtggcaaaatgtaaattagctttgaataagagggggggggagcagaggggagaatatgtttattattcaacccctaaaagaaacaaaaaaattcaataaggaaaaatgagggaagaagtggtgggcctgggccgagaggctgcgggaatggtatcattcgaaaacacaaagtctgaataatgtaataatacgagaaaacaagagaattctaacattccaagaaagtaacaaacgaaaataatcagcaattacttaattaatcaaatcttttttggtaattgcctgaatgctgcgattttatatattttagcttcgttagattttgtgctttcgaatgataccaaaaagatagggtttgttcgaacatgaacaaagttattgtataaaaacccaggattgtcaattgattggactcataaaagtcgattggactcataaagtgcattagagtccgaaaacctatgtcccacccccaaatccaattcctgactccgaactttatttgcttcgatgtggataaaggcataaaatggagaacggataaatgattggaaaaataagaaaaaaattcaaatcaaaaaaattagaaaaaaacaatataaatgtgtaagtgttgatcggagagagagaatataattgtcgataaatggagaatagagaaaaggaataattgcggtttaaatgtaaatgataaagaaataattgaagtaaattgaatatggcttaatagaaatgccaacaagccaaaaaaatcagtcctccatcttcctcccttcagtttcctagccttcattttcctcgccttcgtcctcgccttcgtcctcgccttcgtcctcgctatcgtcttgctcgtcatttggcccgcgtttcaaaaattctacgcaaaaacgttcgccattttttttgaaccacatttgcttggtttcgaagtcaaagcggcatttgtatttgcagaaatagtccatgcccaacctaaacacatttattaaggatgcaacttattaattctctgccgtacacctacgtcaaggcgtctttgtctcaatcagcacggcgcatctgaacccattgtcctcaaaattaccaatttctaatttcaagccggacaacctaagggttttgtttgtaaataatttgtcactaattaaaaaacctactgtcctttggacgcctttctgcctttgtaaaggcccttaaaatgctttatattgctccgatccatttttcctccagaagtgaaagtccctttcgttttgaaaaaacaatttgcctcccattattccactggtgcatcctggggagcatgtaactc

SEQ ID NO: 1154 - DNA, 108 bp, Heterodera glycines
agaggggagaatatgaaagaggggggggcacaaaatgagcagggggaatgtgagattatgagacgggggggggagggtgtgtacgatttgaattaccccccttggatt

SEQ ID NO: 1155 - DNA, 3071 bp, Heterodera glycines
ttgtatctttcatctgaattgtcgttaattagtctctccccagttttcgatatatttaccatttatcttaaatctaaaaaataaaaatttcagaatggaataaaaatctaacctgtatttgtactatctaattctaaaacttttttttacctgatttgtttgttatatttaatgctaaacaacatttctttatatttttatttaaaaaatttcttcataaacgacatatcctaacgacaaatatatcgttaatagttttcaaaaagggccccagatcaagacatatctctactaatgatccatttcataatgaattaatttgctaattaattaattatccaattaaaccaaagttcagttccaactgatgtgttgacaacggaaaagtgatcagcatttatcagcattattcccatccaaatttaagtgatgtccctgggcttttcccattgaaatttcccacgcaacggcggtacaaaaaggagaaacaattgagatggaaattgaaaaagtgtccgaatttgcgctggagaaggtgggaagtgagcgattaagcaaagccatgaacatttggggattttcatggaaaataatggcagaaattagaacgaaagacgaaaacaatgagaaatggttgggctttttcctttacaactatggcactgaaaaaggtaaaaaaaaagccattttcataaatctgtcaggagaaaaaaataataatttcattaaaaatattaaattactctttttaagctgaattacatttaataaattcttttttttccagagatttttattttttactatcttatcatatttatttatgaaatttaatatttaattgaaaaatatgaaaaatacaaaaatatggaaatttaggtctaaatgatcacgattttggtatccatttcgatcgatagggatagacccgaattcgaatctaagagggcagagttggtagttgaagcttgttcctattttcaaatgcattttaaattcttttataattaaattgcccattgtcaaatttccacatcgaatcattgagaaaaatttaaaattaataaaataaccattaaaaatttgcgcgaaaaaggggattaatactgggctaatttatttcattaaattttgaaatggtaaattaaggaattaatggagctgagcaaatgcttgtacaacaaagatgaggacaaagtcaccttagccattgatttattgactgcttcgtgacttcagacgggcgctttggatacgctaacctcgctcaaatttcccctgcgaaaaaacaatatgttgttagccaaaaggatttttctgaaaaaaaaaatataaattttacgatttttacaaaaattcattttctacttattgctctaaatcgatttacgtaggcaattatctaaatgatcaaagtagcagattcttttcatgcatcttttttatgataggaaaaaattgcttttttttcatgagaggcacatttttatgaatttacaccgccaatatttttgtctttacttgtgaattttggattgaaaattctacttttatttttagacaatttacaaaaataaatacttgttttaaaagtagaaacaaagatgaacaaatgggtatttaagtggggtagttatcgtgaaaataatcaatttcctttttttacagctaataattgagaaaatacgggctaatgagtcccaaaatcccaataataataagagtgaaattatttttaaaaattatcttgtttaacttaattttaattattattttttcctctctgtttcctggtttgagaatcccagtttaggcgagtgattgcaaatccgcgctgttaccatgctcttgtcttacgggtgtatttttcaaaaatttcttgatatttttgtcagtttttaacaaatattttttaaagttttcgggtttttcagcaacgctataaaaacttttttatttaggttaataaaaaaaattttgaaaaaggcgaatctcggattcaaggctcggtctcgatgttgagctcgagtctcagataattggtaaactgtgcgctgattctccatacgaacgaagtacagcagggggggccgggtcggaaaagttatggccaacaaaaggaggaaacccagttttttcatttttttggtagtactataatttttaggggaacgggtcgttttggcgccgccgttttggcgccagccttagtttttttattataactttttttcttgttgaccaaatctaacaattttggtatcattcgaaagcccttcacaagctctattagccttacaaaaaaaaaaaaaaaaaaattagcttgtaaaaaagttattaggaaaaaacttccaaaattttggtttttttgttatttcatgttataacttttttggtaacctaatcgctaagcaatatattataaaaagcttctaaacatataaagctttcaaatgataccaagattattagatttggtcaacaatgaaaaaagttgtagtccaaaacttggactggcaccgaaacggcgggcaccgaaccgtcccctatcgcaattagtgcaataagaaatacaaaaactgacccgataactctctttgttgaaaaaattgtccatgacctaaacaacttttgaaactgacatatgtgtaatttcaatgttgagtttttaaagcactaacttctggcttatcattgatctagtttttccacggaccaatgaatgcattttctgtttcttattctatgtaagtatcaacaacatccttcctaaaatcaacaaaatgcaatttgtttttccacttgcaccgagcttcgaggcgttgctttcttctcccggctacgccatattcatcatcttcctttttttgattgcccgttttctgaaattgaccagtttcgatgaaaagccaaaaatcacgctgagaaagaacaaaaggagaaattcgtctcaaaaatgttcacatttaatggaggaaggaagtcaatgtgcgactggtccgtttgttgagttagctgaactttttgtgcaatgttcgattctgcaagaactgtcagtaatttatgcattc

SEQ ID NO: 1156 - DNA, 3191 bp, Heterodera glycines
  unsure (1)..(3191): unsure at all n locations
gagtcccaaatcccaataataataagagtggaattatttttaaaaattatcttgtttaacttaaatttaattaatattttttcttctctgtttcctggtttgagaatcccagtttaggcgagtgattgcaaatccgcgctgttaccatgctcttgtcttacgggtgtatttttcaaaaatttcttgatatttttgtcagtttttaacaaatattttttaaagttttcgggtttttcagcaacgctataaaaacttttttatttaggttaataaaaaaaattttgaaaaaggcgaatctcggattcaaggctcggtctcgatgttgagctcgagtctcagataattggtaaactgtgcgctgattctccatacgaacgaagtacagcagggggggccgggtcggaaaagttatggccaacaaaaggaggaaacccagttttttcatttttttggtagtactataatttttagtcccgcatgtccgaatccaatacccattattttcgacatttgtttcgaattagggattaggaattggtcaaaatgaatgcagatattcataatctgcgctttccgaatattttcgcgacttttgaagaaacaaaaattgattaaaaactgaccaaaaattggaccaccaatacaattttgcattccattccagccaaattattcccccacccctttcctaattaatgcattccacatgatattatgtagtattgttatttattttttatcaaaaaaagtaaaaaataatcattttcgaaaatttttttgaacttttttccaaatcaaattggtcaatttactttcgaaacatttttaagcaatttttagaagtacatctaaaaaacaagttattgcgacacacaaaaattcttcggatttttttaaaagtaaaaacccaacatggtttttccgaaaacaaactttcaaatcgaaaaatttactttaaaagttcgcataaataaaaaaataaggttgatttcaatcaatagaaaatttcaaattgtttatgactcgtcctatgtttttgcttctttcactgtgacatcaatggccaatgtcactttgtcgtcttctctgttgtaaaatccattgttcaggtccatcagttccttaattgtccataattgtgtcaattaagggaaagtttaattgtcactcacatcaaatgaaattgaatgaaagattccagttcaatttattgtttaacaattagtcattgaattcatccttgaaatccggcacatctttcttttgcgagacaattcgaaaggttgccgaacattcgaagcaacaattcttggcttaatggcaattaattatgattttttatcaattagcttttaatttgcaccttcttttggagcatcgcacaaaaggtaaaagcccatccatttctcattgtcagtgccaagcaaattctttctaatttgtgccaatattttccacgaaaatcctttgatgtgcacagtttcgcttatacgttgactccaaaagatttcttgcgcaaattccgacactttttcaatttccgtaaaaaatggcctttcgatttgcattggtacaaaattaatttttccatttttgcttctttcatagtgacatcaatggccaatgtcactttgtcttcgcttttgttgtaaaaaccattgttcggctccatcaattccttaattttaattatttatccatttatgtatattttttcgctgtaccgactgctcttaatcccctctcgagcaaattccaacatttttttaatgtccatcaaaattctgcccttttttcgatcggaaattcgtccattagtcggaaatggcattgggaaaaatccatcagatatcccatgacaatttggaagggcatggaattgataaatgtcgatcacttcatcttctgataacacttcggatggaactgaaaaactggattttaaaacttataaaaaattataataaaataaattcgttttttataaaatcggcagctgctcatcggaaaaaattcaaacattttggcttggttatttttaccaattttcttcgaaaattcctcatttgggatcaatggaaagcgaattttgaacagtgccggaccgagaacggcacgacgattctttgccgagcgttcaatgcaattttgacggcacttcgcgtcggcccaacggagtgcctttattaatgagaaataacaaattaattagaaataatttcttatttatagtaaaattacagcgttccaaattgaaatttcttcacggattttcaattcgtcacgtccaaaaatttcacacaaaaatttttggtgaatttgcaaaaattccttcgatttgatcaaatcgtccgcattttcatcaatttcaatctgtccaacccacctccaattcataaagttcggcctgaacataagccacgaaaacattgcgcagtgatgaaacaggaacttgcaaagatgcgtcgaccaagccagggatattgtactttttggctaattaaaaaaaattaataaattaaatttaaaaaaataaaattcaccggcgtaaagtactgccattgcattgtctccgttcaattcagccaattcgcccgtataaatgaagctcaacatcactttgaacgctgctgcttcaacatcggggacctccacaggataatcagtggtggctaattgaaaattaattaaggtaataaaaagaggctaattttaacttgctgaaatatgattaaaatatctaaatatagaaaaaaatggtatgtttaaaactgaaaataaaatacattcctaaacgcttcaaactaagctaaaaaaattatttaaattaatttttaaactgaaataaatgtgaaaaaatggaaatacataaaaatccggtctctcattaatccctaattttaatagattaatattccaaatattttttaccattttctgattttgcattctttgaatcaaagcggaacattgcctcaaatacttcggacgcgtgcttcaaaatgagtttatgtgctggcacaagcttaaaggaactaatgtaggaaaaaaataaaatacataaaataaaattaattaaaattatttaaaataaaattattcattcttcaaaactcgcctctttttcgtctccgtccccaacaaaaaagtgcacatccgcgtactctcccgaagcagcaacancttcatcc

SEQ ID NO: 1157 - DNA, 4848 bp, Heterodera glycines
ttacacatttatcagtgttaaaggcacatttaattcttttgagggaatttacgcgtatgaatgtctataaagtattgtaaggatattatttagaatatgctggttgagaaatagttgaaaatagaaaacagtacaacaatgggcaaaaagatgaactgatcgccgttaatcacttccattcccttccaaattgtcatgggatatctgatggatttttcccaatgccatttccgactaatggacgaatttccgatcgaaaaaagggcagacttttgatggacattaaaaaaatgttggaatttgctcgagaggaaattaagagcagtcggtacagcgaaaaaatatacataaatggattttcgtggaaaatacaggcacaaattgaaaagaaaaatggaagcactgacaatatgaaatttcttcacggatttgcaattcttcacgtcccaaaatttcacacaaaattttttggtcaatttgcaaaaattcctccgatttgatcaaatcgtccgcattttcatcgatgtaaaacaaacaatggtaggcaaaattctaaaaatggtctttgattaactcataaatataagcgggcaaagccgcttaaaattcagtaaattcaccatttcactctgtccaacccacctccaattcataaagttcggcctgaacataagccacgaaaacattgcgcagtgatgaaacaggaacttgcaaagatgcgtcgaccaagccagggatattgtactttttggctaattaaaaaaaattaataaattaaatttaaaaaaataaaattcaccggcgtaaagtactgccatttcattgtctccattcaattcagccaattcgcccgtataaatgaagctcaacatcactttgaacgctgctgcttcaacatcggggacttccacaggataatcagtggtggctaattgaaaattaattaaggtaataaaaagaggctaattttaacttgctgaaatatgattaaaatatctaaatatagaaaaaatggtatgtgtaaaactgaaaataaaatacattcctaaacgcttcaaactaagctaaaaaaaattatttaaattaatttttaaactgaaataaatgtgaaaaaatggaaatacataaaaatccggtctctcattaatccctaattttaataattttaatagattaatattccaaatattttttaccattttctgattttgcattctttgaatcaaagcggaacattgcctcaaatacttcggacgcgtgtttcaaaatgagtttatgtgctggcacaagcttaaaggaactaatgtaggaaaaaaataaataaaatacataaaataaaattaattaaaattatttaaaataaaattattcattcttcaaaactcgcctttcggcgctacttgcaaagagcactattttgaaaattttttcaccttttttttcatattttttttttgtttattttgttacagaatttgcttttttaccatatggtacgcatttcacgttatttaataattgatcacgacaatctgccggttcggccaccttctttggacgaaatcaatttacgttggatttacaagcagaattctgaggaaattctacaatttctagcttatcatggacttatcaaaaatcaaatggagtgcaagaagtgttttaacaaaatgtcattgacaaaaaagaccaacacaaaggatggttttttggtaatgcatatagggatgtcaaaaatatgtacaaaaattgatcaaaatatgtacataaatatgtaaaaaaaatccccaaatacccgatttttgtttgcaaacataaaaaagaaagtgtttttcctactatttagagcatggagaagccaggaaaaaaaatatgtatttacataaaattgacatccctattaattattagccccggctcaaaaaattgatcccaaatcaatgcaaatgttgtaaaaaaacaaaacattgtttttcaccaaaataagagaaattgttgtgtacataagttgaataaattatatatatatatatatatatatatatatatattgtttaattttaaattaataaacagagaaataaatttgatttaaaaaaaacataattttttctccatttatttttcgtaataactaaatatgttaattcatatcttgctcacaaatcaacaatgttttgttgaaaaataatcatttgttttcccccaattattttgatcaatttgttgaccgtgggcaaagcgactaaaaatgagagaaatttggggggggggggtcataacgaaacattactttctcctgctgctgacctacataaattatcataaacaaattattggtttttgggtgtgtggcctattagccgattaattctttacgtttttttcgactcgaaaattcctttttcaaatttccttgagaaagttaaatttgcggcagaaaaaaaacaacttgcgaattggcacaattcggattatatgaattttattttatgcaagtccataatttggttttttatgaaacaaaattccaaaaaaaaataaaaataaataaaagcatcttaaatattttcattgccaaaaattgccattaataatcagattttgatttttaaaattgttttaatataaattttgcaatcttcaattaaattgttaaaaattaattttttattttaatttattcttttgaatttgttatttttaaatgtgagattgttttttattgctttgacaaaatatttttgcaaaaaccttttttctgtttcatttttgtgcatttcattacaaatttgttgtataaaattaaggaaaaaaactattttattataatgaaaagaatcggccaagaaagtgttaatggcgggcaaaagccaaggaaaagcaagaaaatgccaacaaaaacggacagcagcgacgatgagtcagatgaagaaaattcagcagcgggtgggtaaataactaaataatggttaaaaataaatttaaaaatgctatttttttagcattatttcccgccggtgcccccattaccgtcgtttgtgaaattttttaatatttaaaagatgcattacggaaattacggcactttttgacccccgtaatactaataacggatttcagtaatttaaattccagttacgcccacccctgctgatgttaagaaccattttgaaacatttatgattgtggatttctttaggacattcccaaaaaatatttttatttttttttgcctgatttttttaaatttacaaatatcatgattatcattttagcagaatcaccagggaataaatggatgaagctaatgttgagcacgggaaagtacgcggatgtgcactttttggtgggggacggagacgcaaaaatggtgagttttaaattgcctaattataatccttttaattgtgaaatcgcccccgacacttcggggaagagattagcgaagatcagggacggaagatgggtcaaaaatgggggttattgttagttaattaatttctttaaagttttaatccttttaagcgcgtgccagcccataagctcattttggaagaggcttccgacgtatttaaggcaatgttccgttttgatgccaaaaaggaaaaagcggagaatggtaaaaatatagtaactaaaataactaagatttaattgtcaattagactctgctaattgcccagctgatgtggagattcccgatgttgaagcagcagcattcaaagtgatgttgagcttcatttatgctggtgatttgagcgaattgaacggagacaatgcaatggcagtgctttacaccggtgaatttattttaaggaaattaaatatttataaattaaatgtttgaaattaaatttaatgagtaatatttttttattagccaaaaaatacatcatccctggcctggtcgaacgatctttgcaaattcccatctccgaattgcgcaatgttttctttgcgtatgcccaggctcgtcttttcgactttgaggtgggagataaataatttaatgataatgaatttaagatgatttaaatgcaataattatttatatatttatattttttataaattttaggactattgcaatgattgtttggattatattgatgggaatgcggacgctttgctcaaatcggatggatttttgcaaattgaccaaaaattgttatgcgaaattttgggacgccaattacaaatccatgaagaattttcaatttgggaagcagtaatttttttaatttaaaaaagttacaatttcattttaaataacttcctatttaattcgaatttattttcggcactccgttgggccgacgaaaagtgccgtgaaaatggcattgaatgttcagcagagaatcgccgtcaaatgcttggcccggcacttttcaaaattcgctttcctctcttctcacaagaggatttctcggagaaaattggtaaaaataagtcaaaatttcaaatgcattatttgatgactagggatgtcaaaaatatgtacaaaaattggtcaaaatatgcacataaatatgtaaaaaaaaaatcccgaaatatgtataaaaacccaaaatatgtaccaaatatttaaataaaattttttaatggtttttttttttgaaaaaatcttcgtaaagtgttatataaacacaaaattgcagaaaaatgacctaaatatgtttagaatcaccttataatatttaaaaaattatttttggtattttttatgggtacatttaaaaaaaagttttttttactttttcaaaagaaattctaaaaaaattttcaaaaattctcaaaatatgtataaaaaaatgaaaatatgtaaagaaaaatcccaaatatgta

SEQ ID NO: 1158 - DNA, 1724 bp, Heterodera glycines
tttatcagtttccatgcccttccaaaatggtcatggaaatatccgacggaattttttcccaatgcaaattttcgacaaagagaacgggtttatgaacacggggcacactttttgctggacattgaaaaagtgtcggaattttgggcaagagcctgaagatagtagtcggtgcagcaaaaaaatgtacataaatggactgtcatggaaaatattggcacaaattggaacgagaattgaatccgatgagagacgtatctacatttatctgttgtgcgatgctccaaatgaaggtgcaaattaagggctaattaatattaattaaccaattaatttgaattgagcagaaaattggagttgcaaatgttcggcaaccattcgaattatctcacaaaagtgtgatgtggcggatgtacgaaaagaatacgatgtcgattttggaaaaaataaaaaatatgatagctggggatgccgcgattttagaaggagatacctcgatttggttgaatttgctgtgggtggcatttaaatgtctttctctaattaaaatattaaaattaagaaactggttgatccgaaaaatggcttttacgacaaatgcatggacaaagtgacatttgccattgatgtcacagtgaaagaagcacaaacaggcaaagaatgctgatattcataatcagtgatcccgaaaacccctcgaaaacatatgtattttcatgtgtttgaataaaaaaaatatgataaaaaaactgaccaaaaaaggcgatccaaactaacactagtttagctaactttctttgaacaaaattcaaacaaaatttattattttaattattttttgagtaatatattagctttaacccactgtccaaaaattcctacgcatttgggttactttttcccacctcatttctgcaaattatccacatatttcaagttcaaatgcggaactgcttcctgcttgttgtctgctgctgttgacaacttcagttgcaattagaggggggggggggggggcttttcccccgggggatgcttttcctccacagccctcgccaaccccaaaattttattttattttgcattccattccagccaaattattcccccacccctttcctaatgcattttcgcccttttcttaaatggatggacgacggttaaaaaaaaatttccgtcttttctttgatcactgccctcaagcaaggaaaagagagagattgaaaattgatggaatagtacacaaacgggggataaattaagcggcagaatgcttgggaaaaaggaaatattacatgagaataaatctggagagggagtgaaagtggaggaaatagtgtgggaaagacaaagaagaggattgtgaaaatgtgtgagagaggcagacaagcagagcaagtgaaaatattatataaatctaagagaagagccccagactgggaaaggggaacaaaatagtgcggtggaaagacggcatacagcgaagaaatagtacggctaacagagagctttgatcaatgaaagaaattcagcaaaagctcggtggaccatgcggcgcattaacccaccgtccaaaaattcatacgcatttgggttactttttcccacctcatttctgcaaattatccacatatttcaagttcaaatgaggaactccttcctgctcctgcttgttgtctgctgctgttgacaacttcagttgcaattagaggggggggggggggggg

SEQ ID NO: 1159 - DNA, 1987 bp, Heterodera glycines
aaagttgatcgtaagacctcttggatgagccccccctccttgtacagttatgcttaaaaggaagagacaatgcaaattaaggtcattttctgaattataattttccgtgaaaaaaaattgtcactgtggcttcttccgcttaggatgaaaaggtgtcattaatttttcgattaacatttattatagtcaaccttgtttatgtgcaatatatttaaaatagtttttatatgttattccactatttcagatggagaatcagggactctagttcagtctgcacaatcagctcattcaaaataggtgtggtttgagataaaattccgtacaatatcatgctgtgattgggcatcattttttgcagcattagttcacgcgtgattactatcgtagaatactacgacggactctcgtcactcacagactataactaaggtaacatggggtgggtgattatggtttggcattggtagagagaacaatcgttacagttatgcgaggatttattgataggtcttaattcattggtctcacattaagggggggggggggggcttttcccccgggggatgcttttcctccacagccctcgccaaccccaaaattatggcttaaatcgcgtaattcttataactcatagtaattaaggatcaatggccaatgtcactttgtcctcgcttttattgtaaaatcctttgcttggatccatcagttccttaaacattgtaatatattaaaatttaaaaaaataattatcttaatggaaattcattataattagtattaattagcatttaatttgcaccttcttgttcacgcataaggtaaaagcccaaccatttctcattgtcagtgcttccatttttcttttcaatttatgccattattttccatggaagcccatttatgtaagtgacagattcgcttttacgttcacttctgtcgatttctctcgcaaattccgacactttttcaatttccatcgaaattattccattggatttgtcgggatcagaaatgcatttctcctttttatcatctttcactgtgacatcaatggccaatgtcactttgtcctcttctctgttataaaaaccattgctttggtccatcaattccttaattaataataattatgccaattaaggaattatgtacaattgacactcaacaccacgtttaaacagctgtaagaattgactaaataataaaattgtcacttttccatattttaatttttaattttgtagtaaatataaatttttaagcgcagcttggattattaaagaatgaaatcatagcgaaattagtaatagtttttcaatttttaatttaataagcccaaacttcccggttcccaaatttctggtcccaaaaaattctgcttaaataaaaggaaaaaatgatcagtcaattaggaatggtttcaatttaaaaaaaaaagtttaaaaaaatgtttacgtaaatcctaacaaaattaatgcaataaatccaagtccaaaaattgtaaacattgacctaaaatggtaaaatttgaattgggtttatgactaaaatgtttatcattgaaattcggtactcaaaaatgagagtctgctaaaacagctccgacaattaattaattcacatatcagcagttttgaaagtataatcaagaaaaattaataaataaaaaaacaggttcatcataggatggaggatattcaatggcatttttccccaaatcatattgggcatttatgtttcgtcctccgttttgcttctttcactgtgacatcaatggccaatgtcactttgtcctcttctctgttataaaagcctttgcttgggtccatcaattccttaattaataataattagtcaattaagggaatgtttaattgtcactcacagcaattgaaatgtaattgtatccccagttgttcgatttattgtcaaaaacatggtcatcgagttttcttccgaaatccggccactcccgttccttgcg

SEQ ID NO: 1160 - DNA, 1091 bp, Heterodera glycines
  unsure (1)..(1091): unsure at all n locations
tactgctttttcatttttatttgaataaatttgcatcctttaacatatttgctctaattgtaagccaattgaaatcgggaacgaatccaaaactttagctttgagtaccgtgtgcccacactcctaattggtagttttttgccggctcatcctatatttatattattgcatttttggttttccttttttagatttgttttatccctccccattgagccctgtccctatgcgaaaccattgcaaacaaaacaccatatttcctattccttaatttattttatttaaatgaacgcacaagaagcatttaaggagggattaaatcatggaaagacatacaaaaaaagtaattatcagaggacaaacaaaaaattagtgcatatacaaagctgatcagagaagtacgaataaaacggtcaaacatgggataatactatgcacatttaagggaagggggggggggacgacagcgagcagtccgtcaatttcagtctaacgaaggtagtcgccaaagtcccggagaagggccaactgttcgttggtgatgacaaaatggagccggtacttctcgcgcagggcacccagcttcgtgatggggtcgagaaattgaatgacctggaaaatgggaggaaaatataatgaaaaagcacgggagcgagttaattgaagcatagtcaaaaccgtggagtttgatggacaacaaactggacaagttcagccacttttatcatggccggggttggtttctccccagaggccgtcacacccccccccccccccgaaaatttaaaaagctataactcatgataaaatttgcgctagaaaaacttgattttctaagtgcagggcctatttcatttttggaaaaacaattcggtagggtatatttgatttgttcaaaaaaaattagcgccagtatgtgtgatccctgacagtgggcgttttgtgcttaaaagattaaatttttgaaaaattacatggtcgacgaataagcgtgaaatgcgctccacgtccgtctcgggcattcggaagacgtccacanacagttcgggggaccgcagcggacatccgtacgcaaacgcagccaaatggag

SEQ ID NO: 1161 - DNA, 11167 bp, Heterodera glycines
attttttggctttaagttattaaattgtaaaaattcaaaactaaaaatttttccctaaaatttttaacttggccttttccctgtttttaatcccacccggaggcggaacagttcaaaatttgtaccacattttctggggaaagtccaagtacgttaaagggttccagaagattctatgaagcagtcacctttggaagttattaaaaagaaataaggaaatattcgatggggtgcgatcctttcaaaaaattactctcgtcttctaccccccccccccctccctcgctttttgtgcactgtttcgtttctaaaattggttccgaatcttttggctttaagtaattaaattgtaaaaattcaaaactaaaaattctcctctgaagttttgaacttggctttaccctgcttttaagtcccaccgtgaggcgggacagttccaaaatttgtaccacattttactgtggaaagtccaagtaccttaaggactacagaagagccaatgacgcagtcacctttggacagttattaaaaagaaataaggaaatattcgatggggtgcgatcctttcaaaaaattactctcgtcgtctaccctccctcgctttttgtgcactgtttcgtttctaaaattggttccgaattttttggcattttgaaattaattgcaaaaattcgaaacaaaatactctgaagatttgtaatttcacttcaacatgcttttaagtcccaccgtgaggggggacagttccaaattttgtaccacattttactgcggagagtccaagtaccttaattggacaattacttgtcaacgaacacagtcgcctttggcctcttatggaacagaaaagggtggatatcagtagttagtccagaagattttggcccctaaagttcgagcccccttgactgcaaatgattttttgttaattaattaccggggtgaatttcgaataaatcatttgtttttatcgtatttcctggggatgttggttattttacatgaaaaaaaataggtgtcggagtatttttaaaattggattgaaaattacgatattttctaaggatgtgagtcaattcaatgattattgtattttttgtcatttttctaaagatgagctgtcccacctaaagtgtaatatcatttttattttttctgtttgaaatctccaaatgtcgggtcaccaagagtcaagtcatcaaatgataaaccctcaaatgtacggtcccccaaatgtataggtccccaattgtcgggtcccttaacgtagggtccccaactgtacgatcccaaagtgtagggtccccaactgtatggtccccaaatgtcgagtcacggccccacccccaagtgtctggtcctccaaatttagtgtacacaaatgtcacaaatatagcgttaccatatctagcccaatgtcgaaacccataaatataaatccacaaatgcctgacaaacaagtttatggtcaccaactaatcttaaagatgttttttattccggtttctctagggtttttaataaaatacaccattaaattttttaatattttattcacattttttataaattaaaaaaaaaaaataatttattctttatttttttttcttaatccattaatgttaagaactgttacagtaatgacaaaaggtgttccataaatgttaagactttttcttactacactttgttctactttgataaattgattgaagaccgcgtctgccacatttgagctaataggtgttatcggcacaattatgtctccttgatctaacatttctgaagaaataactactccggctttatccgcgccacccaaagttctcttagcatcttcgatagcttcattaattgacgattttatacattcttctaactccttagtgggattatcacattggtctatattttgaacgacaaattttgattttgaccttaatagttgaaactttttactactagttgtatattcatctatttttttgatacaattttgacttttttcttggtgtttttcttgtcttagcgaatccgaacttcgggattttttattttctctttttgacgcatttctcgtagaccgtttcattttttgttatatatcttcttaagtttttttccttttcaatttctttaaaatactttgctacacccaagtctaagtttcgtatctctgagcaaacatatttatattttttcctatatcccgtcctggacaattttttattccgaattttcttaccaaaaaaaaacttcaacaccgtgaaaataaataaaattttcaaaatactccaccttctaaaattcaaatacctgaacgtatgttttttcattgttttttcaaaaatactttcttgttttgcatttattacgttttcttcaaggtctttatttgtgaaggatgtctttaaaaatcgcacttgtacctaaaccgtatcagtcctaatttgaaaggacgtgcttaaaaatcagcagtttgcctaaatattaataattcccttccatgagatttttgaattttttggaattctatttaggtgttccttaaagaactttactatttttaaccaatttttaacaatttcacagaaaaaactccaattttttcctgacgacgcctgtcgtcgcatccggaccaaaatgccttttaaatttatgtccaaaatctgcaaaaatactgaaaaaatattgtcaaaaatcgctaaatgaaaagattttttggtcaaaattgtgataaagacaaaatttctaaaaaattttccaaggtggtgcctataggcaacgccggtgctaaaaatatggaagaaaattcattttggagaaaaacaactgaattgaataaaaatgttaccctttttattcttttgataacagtagttactccaccagattttcggggttgtatttcagccccgccatttcagtcccagtggaaagggacgtttcagtaccaaatttaaacctttaaaaaacacctataataaatatatccaatcccagaagaggtaaataattgaaaaaacatctgaaggataaaacccaaggctaaatcgtattagagaaggaaagggaggcagaggatgggtgtcaactgtcatgccttataaggaaggcaagggacgcatgccacctgagcgcccgcgtgtgtgccatttaaacgctcgcgtatgccatttgagccccagagttatttttacagcgcacccatttgagccccagatttatttttacagccccgccatttcagtcccagtggaaagggacgtttcagtaccagatttaaaccttaaaaaacacctataataaatatatccaatcccagaagaggtaaataattgaaaaaacatctgaaggataaaacccaaggctaaatcgtattagagaaggaaagggaggcagaggatgggtgtcaactgtcatgccttataaggaaggcaagggacgcatgccacctgagcgcccgcgtgtgtgccatttaaacgctcgcgtatgccatttgagccccagagttatttttacagtccaaccatttgagccccagatttatttttacagcgcagccatttgagccccagagttatttttacagtgccgccatttgagccccagagttattttttaagtttagccatttcactcccagtgcccacgggatatttcagttctgagacccaaagcctattgagtacccaaagtctacggagggtcattaacattccttttaagtgcatttcgaccaacgcagggccgacggagggtcattaatcattcttttgagtgcatttctatcgaaacctaagcctacggagggttattaatctttcctttgaatgcatttctaactaatgcctacgaaagtgtcataaatatccccttaggaaatgtggagtatgttgtgccaaagctaactgactgccattaaccatctttgtgaacatgtttgtccacccgaaactggaatggtcattaattatccccttgggaattcttttggtgcatttctgaccgagccaaagccaatggaatggtcattaataaccccttggacgcattttgactgtataatgcccacggaagtgtcaataatatcccacttggaattgaggtcaagctgtgagtcaatgattaattgtgacagttgtgactatgcaaaacccaacatcagatattctgtgcttgagacagctgcctcttttggcaaggtgccaaatttaacccagccgaaaaaataagccccgcctactcggtggagtataaatagcctgtcatttccagcaaaagtacattttttccattcatttggaaattttgaaatttttctgcaaacgactaacgcgctctttcccttttgcttcctcgctctctgtgcactatttaaaccaatttaaccataaccttttgtttcctaccatccctttaaatttttgcattccctctttcttcactatttaaaccgaattcaccaaataaaaaatataattccataatcttccaataaacctataacaatataatttaaataatattacaattaaataattaattacaaaaatactttaattttctacgtatccttacatcttttacctacttacccttttttgcttttgcttttcctctttgctcactatttaaaccaatttcaccacttaattttaatataaatccctcaatttaaaaaatataaaaaaactcaaataaacttaattaaatcataaaatttttaaaaaactttacttcataaaattaaaaaaaaaaaactttcctttattcatatatacatattttacccaatcaatcaataaaaactataaatatgaagcgtgcctccaaagcccaatcttcatctccctcccccaaaaaatctcaaaccaataaatgcattcgtaaaattgaccaatttacttccaaaagtcttaaacatcattttatccgttccaaatctaaatttgttattgatcaaattgaaaaatgtgcagatccacaggctgaattacgttcatgcgtgcacaaggcggtcgaggaggctattcaagacgcacagaacacacttggagcaaataaggtaggtgtcataatttcttcggaacttttagaccagggagacatcatactgcctataactccaattacatcaaatgtcgtggacgccgttttcaaccagttttgtaaagtggagcagagcaaatcgaaacacatcaacttatatggtgctccctttataattaccgtcaccgtcctcaacactaatggactaccgcgacaacggacaacaaagggaaaagggcgaccacctgtctcctcacaatcgcacattttcaaagtcaacaacaacgacaactattgccttttttatgcactggaactgatgcgctactactctttgtataaacgaggaatcattaccgaagacagatggcggtggattaacaacaaccaaactactgttcttcgtcaaaaagtactacttttactccgcgatgctgggattccgacaacagagacggagtacgacgcggaagtttatatacatcaagtgcaagggttatggaacgtcaaatatccaggtgagtacaaaattttcatatttaacgattaccagatgcgcccaatcaccaaatccgatatcaccgactaccaattccccattcttctctaccacaacaacaaccactttgacggcatcaaaaccctgtccaaattcttcaataaacgttactattgcctctcttgtgaaagcgtctacgagcgcaaatctcaacattcaatgaattgctcttcactctgccatggatgtagggaggttggcgtcgactacccatgcgagccacaacagggatacttcaaaaaatgtttgcactgcaacaactatttctataacaacgactgctatgaacgccacctccacaaggatttgtgcaccaaatttcagcgttgcgaagattgtggggtaatttataatgttaaggttcacggaaatgtaggccaccaatgcggagaaaggttttgtcgtctatgtaagcagtttcatttaaaagaggaagatggcgagaacccctgcaaaagctgcttcatccaacccctaaaaccccataaacttaaaccatacaggatcatcgcatacgattttgaggcgacacaggataaaaaagtaggtaataaattcgaacacgaggtaaactttgcagcggctaccgttatttgcaccgaatgtatcaacaacgacaactggaacaaatctctacaaggaaatccctgcaaaatttgtggcccctaccgcacaatcaccttttcacccttcgactacacggagacaacagtcgaccaaaaaattgtcacacaacaaccactaagtgaattcgtccagtggcttcttttcgaccacaacaaaaagtttcccacggttgcctttgcacattttgggggccgctacgacatgacgatgatcatcaaggaggttttagcgcaaggaattcacaacccggacatcatcaaacaaggaaatcgtctctacgagctgaaaatcaaggacaatgaacattgcccactcacataatgcccatcaaactatctggcctcatcaaatcttttgggcttcatataaaagataaacaacattttccacacatgttcaacaaatcatcaaactatgacaacattctctcccatcttcctccacgtgaagaatactgtcctgatcaaatgaaaatccccgatcaacagaaatttgacaaatggtacaataataattacaaccaaccttttaaccttaaggaaaaactccctgaatattgttgcaatgacgtacaaatactcacccacgccctcgtcgaattacgccgggaattcaaacaactgacacaacggaacggaaaacacgggggaatcgacattctttggcaagccatgaccattgccagcgcttgcgtcaagaactttgcactcaatcatttgaagcccaactcgctcgccatcgtcccggagaaaggctatacaccacaacagaaccaaagtgcactggctatcaaatacctcgactggtactcccacatcaacaatgtcaacattcaaactgcacactcccgctatggtgaatatgtctttaaacgtgagggtcaggtgtatcaagtggatggttatataaaagggactaatgggaagagggataaaattattgaggtaaatgggtgtctgtggcacgggtgtgaggagtgttttgaggacttggacgaagagacgaagatgccgaacggaaagacgctaggacaattaagagagaggggagtaaggaagcacgagattcttcgccggtacgtcgacttggaggttatttgggaacacgaaatcaatgagcagctgaagaaggacaagcaaatgagggagtttttcgacaactggaaggaccactcaccaatcaaaatcagagacgcttttcatggaggacggactggaccaatgaagctactccacacagctaagccgggacaaaaaatcagctacaaggacttcaccagcctttatccgtggaccaactttacgaccgactatcccctcagccacccaaaaattatcagctttagattaaatgagcaaactgtcaactggcgagctccttccgacaacccctacaaaggccttctcaaagtcttgcttctacctccaaacaacaacattaacgtcaccgttatgcccataaaatttgatgagcgactcctctttccactctgtgaaaagtgcgccaaacacatcaccaatgaacacccgaatggcctcaaagacgacaactacagctgcccacacttcaatcccaatgaccgtgcctttgtctctacctgcactcaccttgaattgaatgctgccttggaggtcggctacaccgtcagaaaactcttccatgtcctgcaatacgaccaatggagcgacaacatcttcaaatcttacgttagcgaaatgatggccctgaaaatccacgcaaccgggttcccgtcgtggtgcgagagcgaagaggagaagaaggaatacattgaggagaaccgtcagcgatttggaattttgttagacaacgaaaagatgaaggctgaaccggggaagcggtacatcgccaagctttgtctcaactcactctggggccgcttctcgatgcgaaatctactctcaaaagcaataatcaacaatgacccttgcgtcctccgccaatacactgacgacaagaaaatcgaattagtggacttggaaatgatcgacgacgacaacgacgtattcatgctcacctacaaaccaaaagaggagtttgtcgacgaaaataaatactccaatgtcgtcatctccctcttcacgacatctgcagctcgcctctacctctatgaagtgttaaaaaaagttgccgacacccccgactgcgaaattctctactttgacacggacagcatcatctacgttcaccccgaggaaaacgacccactaccaacaggaaagggacaccttggagaactaacagacgaaaaccccgaccacaatatcttggagttcattagtgctggctgcaagaattatgggatgaagctgcaacgcaaggacaccggtgaaatagaacacgatttgaaaataagagggttcacccttgatgcacaaactgttcaaaaaattcattacgatactgttaaggaccaaatcttacgctatggctccgaagacccccctgaccctatcattgtaacttacccccattttattcgccctaatctaatccaaggcaaagtgtatactcattccctcacaaaacattatcaacccatattcacaaaaggtattattaatgattcattccaagtcctcgaatttggttatcgcaaatgataagtatgcattctcaattaaattttctgtatattagttttcttatggttcccttcttttctttctctctgtttatatcactcatgtgggacggaatgacccctggttgatcctctccaacactccaggccatccatctgagatgaaggtggacgagctgttcattattgtaatgcacagcctggtgcgtgagtgtttggattggggaccgaagggtgaagccgttccctgggtgtgtttgctcactcttttcaaagggaactctaagaattctgatatgccttcaaatctatcaaaagagttgcatactttctttttatcatttctctttattttctattttacacttgtatttttcatttgaatgtttattcagaaataaaattgaaaaatgtgtcattactaatattaaaaggtataaattaaccaaacaaaaaggtatttaaggagaaaaatagtcagggttttgtaactcaatttggaaattagaatgtcttctacttcttcaaagaagactctccaatctgtagtggagcaagtaattcaacaagacgcagaaataaaaagcagtgagaaaccactaaaacagaatgagttggaaaagagtgaacggaaatcaacccacaccgtatataacttgcttgaccacaaacgatccttttggaaattggcccgaccaaagtttgcagtgatcaactttctctgcccagggtgtcgtcgaatcaactataaacacaaggaccagttcaagttgatgggagaagatgagttccactttacccaagtgatgtgtcccggttgcgtaaagtacaatatgatgcagactgatatctataacaaacacacaaagaacccccactaattgtatttaagattaaattttaacattatataattaataaagatgattgatgaaaaattttttcacttgaacgatttgaaattaaaattgccttttggcatggtaataagtggaccgtctagtagcggtaaaacaacatttttactaaaatttttgagagagagaaatgaattgattagcccacaaccaaaatcagtgctctattgttatggacaatttaatgatagtatccctgtactacaaaaaatgggtgtacatgtgcacaaaggacctcctagggatgaattgctgagctctctaaagaagccgctcttattaattctagatgaccttttaacaataattgatgagaaaagtctatccgaattattcattaaaaaggcccaccatttgaatattggagttatatttataacacaaaatttgttcgagagaaagatgaaggtagcccgaattaattctcaatatattgtcctaatgtccgccccgaatgccgcgctacaaatacgtaatttgggtgttcaactgtttccaaaaaatcttgcatttttcctaagtgcgtataaagatgccactttatcaccttatgggtatttatttttggatttacacccggcatcgacccctttactgagaatacggacgaggatatttaaagaagatgaagaaaaagcattgtatattcaaaatgattaatttacctaaaaatgttattcaaaacttggattttttaaagaaattggtaaaaacaaagtcttttaaaaagagacaacaaatatttaaagaagcgactagtgaacaaattgcattattaattgaaattagttataatatattaaaggggtactttccgctcacgaagagacaaaaatatagacttttaccatacgcaaattttgtaagaaaattagcaagagttagaactgagacgggtgcaaagaaagtttttcaacaaaacggtggtggttttttcgttaatttgactcctttattattaccagtacttattgccgcgctaaaatatggagaataaatttattctcgttccctcagacttgtacaaaaatttattaaaacctgagtctggcgagattaatgttgaaaatgctaaaaataaattgtcatcacttttgaagcagcgaaaattggacgctacttcaaaaaatttactttataaccaggaattgaggcgtttcttgaaactaaggaaggaagttgaagataaaccggtaaaggttgagctttcagatggctcattaatggtgtttaaaccaaaacagcgtgaaagagatagcaaaattcctactcaaattgttaatgatgaagaattggatgaaacaggctctattccaacacttgaagacccttagactactgctgaagagagtgatgctgagccaacaccataaacggcaaagacgagaccattgataagaccaatgcgtg

SEQ ID NO: 1162 - DNA, 2015 bp, Heterodera glycines
aaatttgaatttttgggtgtatattccgtgggtggaggggactcttatgggggggaggggagggggcgcgctttggggtgtggggcggtgccgtagggtgtaaggactatgttattttaattaaattttattttaaattaaattttaattattattttaaattaaataattccccaaataattatttcccatcagtgggaggggggcgcactcattgagggaagagatgaactttattatatgaaatgtgaaaaataaataaaaaaatgagaacagatgggaggggagggattagcagtgggggcaatcactgcggcacttctgcttccaatactcaacaatctgcctcatccttttgtcacggtcgcttcgacgggacgaagtggtggatgaagaagaggaagaggaggaggacaccgagctgaaggcagtgtccggtctgttgtcaaacagaattgctcgggcggtcgcgatctgttcggccgagaggcgcttgtaggcagtgcgcacacattctctaggaatgcgccgtgaagacgaaggggcctaattgggggggggggggggttacatttataggtaaaaggggtttaggctaccgtttgcagaacatcgcacaacggttgaggcgtcggggcatcgtcgaccggggcaatttggagtgccggtgcaaatgcatgttggttctgctgctgaccgaattgaagaggagggagttccaaggcgccctgaagccgaggaaacggcgagttgatgaaaaatggcggaaaagcgggccgcagaggagacatgttgtgaaaatgcatttggagcacgctaacggcacggtcgacaatctgcgaaatcagcggccgaggcggcagcagcagttgttgttggtgttgtgccgggaacaattgctgcggttgttgttgttgtgccgggaacaattgttgcgggtgttgttgtgccgggaagtttgtcaattgttcgccgtcaatgtccaattcgatctccacgtctgccggagggacttcggcgggtgccggtaggacaacggctggcggggcaatggcggcagccggtgggacagcagctggtgccggcgggacatccgcgagacgctccttaaagcgaatgcattttgttttttttgctacacttattaaaattatgttaccaacggcacacattgcccgtcgataaggccttgaagggcaaagtcttgctcgccggccctcgcaaaaacgctaaatttacaaaaaacaaacaaatttgtgctgatagacacggtttcttacactcttctggccttttgaacattgagttgcccgttttcgttggcgtaaatgctgacaaaggtcagaagccgacctaggctaaacccggcctggaataaaacaaattatttttttttgaccattcaatctttacgtgtgctatgcaaccttcatctttaagataaaggttgacgccccagtgggtgcgaatttggcgatgctcggcgcggtacccaatgtggtaccatagccgagtctcacggcaaattgtgcacgggcttttatcgtacaaggtgagcgagacaatttcaaattcggttgatccgtcgtcatgctcatcaatgtccagagcatcctgctcagggtgccgatgcacacactaacgcaaaattttcattaaaaaaattacgtaaaaatgctatttatttttcttttcatgtttttaaacaatataaagtaatagagagagagagagagagagaaaatatatttaacatgatttgttaagaaaatccctcattttattatttcaccaaaattgactatgcatatttgatcaaagcccaaattttattattgaagcgtcgccaaatcatttcagtgggacgcctaaagtcacttattcttttgtgtccaatattcctagcattaatctttgttgatcactccccgagccaaacaaaggaagataacatctttggccattctgacaatgaaaagacggcagattgacaaaagaaacaaatttttggaaag

SEQ ID NO: 1163 - DNA, 2997 bp, Heterodera glycines
agtccgttgatgagcggtatcgggttcttcccggtacgttagagataattaaatacaaaatgtcctgaaattttaggattaaaaaagtaaggattaaattttatcattaccatcaaatcgtccggcgttgtgcgcaaaaatgtacgtatcataactggtaaaagcagttaaaatccactccacaaaatccttcatcggctcatgtccctcagcctcactccaatccttggtcctcacctccccacaaattttgcaattcgtcctatttttgtcgtcacaacattccgtacacgtaactctcaccgaaatataattgatcacatgctctttctggtcccccttataaatcgaatcctgcgatgtttccgaatcctgtaaaacaagacctattttgttgttttgttgtaaaacttacccaaactacaattctgtagacgtccttgtcctctttttcctcaatcggcataatataacatccccgcttggggtcgtggctcacactacaaagttggcaataagtctcaccacattcatggtccttcttcggattaaataaataagtcttatcacaaatcacacaacgtttccataatttacaagtctgatgtccttgatgatagttataacactcccaattgtaaaagtaacggcgacacttcgggcattcaatcttcactccactctcctttccacacggtactccgcccactctgttgcaataataacaccttgcccgacactccaaagtatgataaatatcacgcgagtaaaagcactcacaatcaacgcaaaatttcctcccgcgattaaaaaagcagacgtaattcttcagaccatcccagtgagtgttctccaaaaatatcggcacgaccatctctcgccccataggccccttccataaaacacggatcgatttccgcggatccgcagacttctcaaactcaacaatccggaattttccggggtaaatctcatcctaaaaatcggtcatttctgtgttaacaatttttaaactcacccaataattctgaacattcgataagtgctccactccatagctatattcgttaatatcaattccacaattacgtaatagttcaacagccgcctctcgttgtctcataatattattcataaaacgattaaaaatattccgatgcacttccaaataaagctttgacgccaccaaagcataaaacaaacaaattttatccacattcgaaatccttaataaataattataatttttttttctgttttccttttttttttctcttttttttctcaaaaactcaccttatccgttggtgttccttgaatccgaaatcaaatttgtgtacatttctcggcccttctccactgggcacggtgacgcaagtaattttcatcataataggctcagacaacaaaagcgttttcttattttcatccccgtccccgctctgccctaacttattaatctcctgcataataacatccgcattgttctgcgggtacgccctgtacggtaaccataccggggaagcaagcccggcacccgttattgccacaccaaacatccgcactttccgcttcatcctttcttccgtagtcttaaaagccgccttaatcattgtgtcgattgcgtccctcatcgcttcgtcagggcgtctcacatccgaattgatccgaaattccgtaatgttcttcgtgaatccaaatttttcgcaaatcgtcgaccgttcgtcaattaatttataattttccatttcctcagtaaaattgttcctgaaaaattattgattacacttgtctcttaaatatattattaaaaattgcttaccctatagctcgaaaatcccattttttggtcgacggaccgcctttttgcaaagtcccgttgcgttttgaagtcattttaattaaatttaatatatttaaataagagcgcacaatttttattttagcaaaatccaacttttggttgaactgaatggagaagtgaatttggggggcttttatagtggccgcagaatgcctcgtgtcagctgacacctggcacgtgactgtttttcattgacattgtggaatatttcgttgacaaatgataaattttccacgaatgggcagaaagtcacgtgtctattgcgaaatatgcaacaaaaaaaaagtcacgtgcagattgcgaaatcgatggggaaaatgcaaaatagggaaccaatcaatcaattttgattgacaggtgacataattttggtcaatattgcgaaatcgtaaagtcacgtgcaaattgcgaaataatggaagagaaaaaaaaaagaccatcaattatttcagaaaattcaatttcattaatttaaatgaatttttatttattcaactattgtccaattaatattcctatatcatacaattaattcgaatttcattgacaattttggtgcttatcgattttttttttcacgactcggaatcgcggcgcatcgacggagcggatgagagtggcggtctcattatcgattaattttttttttgcgcggcagcgacatcgatagggaggacagtgctagtgtcattatcgattatttttatcgattaatttgcgcggcgatgcatcggcggggagggatgggggtagtgtcattatcgattatttttatcgaatcatttcgcggcgatgcatcggcggggagggatgggcaaaaaaaaaaaagcacccgtgcggatttgggaaattggattgggtgggcggcaacttcaaagggatgcacccctcccataggcatgggtccacgggcggcaccttcaaagggctgcacccctcccataggcttgggttcgtgcgggaaacacccgtgcgcaacttcaaaggactgcacccctcccataggcttgggttcgtgcgggaaacacccgtgcgcaaccgtgcgcttttgggactatatactacttctgtcttcaatttcttcatttcctttcgccaggggtggagcaaaagccgtcaaaatagctaaattt

SEQ ID NO: 1164 - DNA, 2517 bp, Heterodera glycines
gataccatttatatttttagaatgaggagctgtcccccacagcaatttcacaaattagtcgagcgaaaatagtaaacttgagattattgaccttatcaactgagttcttctgcaacactgattcatttcatttttgtagcctaaggagtcgaaactccgaaattctcttggacttattaaaaatcatctcattacagtctaaatattaaacattatcagtggtgcagaggaccgagttgattagcgtcaacaatttccggtttcaattttctcgatcacccttgtgaaagttcgaaattttaccttcttctcctctaaaaataattgtagaaattaacagaaattgtagatgtgaatttgttgagctttttataaattcggtccttccccaacactgataccatttatatttttagaatgaggagctgaaattgtgaacaatttcacaaattagtcgagcgaaaatagtaaagtggagattattgaccttatcaactgagttcttctgcaacactgattcatttcatttttgtagcctaaggagtcgaaactccgaaattctcttggacttattaaaaatcatctcattacagtctaaatattaaacattatcagtggtgcagaaggattttctcgatcacccttgtgaaagttcgaaaatttaccttcttctcctctaaaaataattgtagaaattaacagaaattgtagatgtgaatttgttgagctttttataaattcggtccttccccaacactgataccatttatatttttagaatgaggagctgaaattgtgaacaatttcacaaattagtcgagcgaaaatagtaaagtggagattattgaccttatcaactgagttcttctgcaacactgattcatttcatttttgtagcctaaggagtcgaaactccgaaattctcgtggacttattaaaaatcatctcattacagtctaaatattaaacattatcagtggtgcagaaggaccgagttgattagcgtcaacaatttccggtttcaattttctcgatctcccttgtgaaagttcgaaaatttaccttcttctcctctaaaaataattgtagaaattaacagaaattgtagatgtgaatttgttgagctttttataaattcggtccttccccaacactgataccatttatatttttagaatgaggagctgaaattgtgaacaatttcacaaattagtcgagcgaaaatagtaaagtggagattattgactttatcaactgagttcttctgcaacactgattcatttcatttttgtagcctaaggagtcgaaactccgaaattctcttggacttattaaaaatcatctcattacagtctaaatattaaacattatcagtggtgcagaaggattttctcgatcacccttgtgaaagttcgaaaatttaccttcttctcctctaaaaataattgtagaaattaacagaaattgtagatgtgaatttgttgagctttttataaattcggtccttccccaacactgataccatttatatttttagaatgaggagctgaaattgtgaacaatttcacaaattagtcgagcgaaaatagtaaagtggagattattgaccttatcaactgagttcttctgcaacactgattcatttcatttttgtagcctaaggagtcgaaactccgaaattctcttggacttattaaaaatcatctcattacagtctaaatattaaacattatcagcattgtgtgacggagtacctggataactggcattcctgcttggatttttcgtcctgaactcagacgtgaacacccgctgaacttaagcatatcagtaagcggaggaaaagaaactaacgaggattcccgtagtaacggcgagtgaactgggaagagtccagcgctgaatcgcagctcctctggggttgcgaggtgtagcgtatagaccgtgagcttgggttggcccgcttgttcaagtttcccttgaccggggctccagagaaggtgcaagacctgtccaactggcggtgcctacccatctttacgtgtcttggagtcgggttgtttgggatcgcaccccccccctctcctccccgccccattgtttgtcctccgatcgccccttttctccattcttcgccctcgggcgatgcgtcgcccatccgatgatcattattattattattacagtttatgtttaaatttccgataattcatctacagaaatgactttgttggtagctttttcagaatgcttcgtttgctttttaccttttccacaattttcacgggtttcggcctcgcctcgcccattaaaaatcgttcatcggcaacagaaacagtcgatgatcaaccacaaaatgtaatttattatttttaaatgttaaaataaaatttaatttaaacgcaaatttttttttgtagcaaatcggcacacaattcgttgaagtccgtcggttattagatgaaataaaaatagatgcaataaaacaacatggtcgcttctctgatcaggcaataa

SEQ ID NO: 1165 - DNA, 1749 bp, Heterodera glycines
agaatgaggagctgaaattgtgaacaatttcacaaattagtcgagcgaaaatagtaaagtggagattattgaccttatcaactgagttcttctgcaacactgattcatttcatttttgtagcctaaggagtcgaaactccgaaattctcttggacttattaaaaatcatctcattacagtctaaatattaaacattatcagtggtgcagaaggaccgagttgattagcgtcaacaatttccggtttcaattttctcgatcacccttgtgaaagttcgaaaatttaccttcttctcctctaaaaataattgtagaaattaacagaaattgtagatgtgaatttgttgagctttttataaattcggtccttccccaacactgataccatttatatttttagaatgaggagctgaaattgtgaacaatttcacaaattagtcgagcgaaaatagtaaagtggagattattgaccttatcaactgagttcttctgcaacactgattcatttcatttttgtagcctaaggagtcgaaactccgaaattctcttggacttattaaaaatcatctcattacagtctaaatattaaacattatcagtggtgcagaaggaccgagttgattagcgtcaacaatttccggtttcaattttctcgatcacccttgtgaaagttcgaaaatttaccttcttctcctctaaaaataattgtagaaattaacagaaattgtagatgtgaatttgttgagctttttataaattcggtccttccccaacactgataccatttatatttttagaatgaggagctgaaattgtgaacaatttcacaaattagtcgagcgaaaatagtaaagtggagattattgaccttatcaactgagttcttctgcaacactgattcatttcatttttgtagcctaaggagtcgaaactccgaaattctcttggacttattaaaaatcatctcattacagtctaaatattaaacattatcagtggtgcagaaggaccgagttgattagcgtcaacaatttccggtttcaattttctcgatcacccttgtgaaagttcgaaaatttaccttcttctcctctaaaaataattgtagaaattaacagaaattgtagatgtgaatttgttgagctttttataaattcggtccttccccaacactgataccatttatatttttagaatgaggagctgaaattgtgaacaatttcacaaattagtcgagcgaaaatagtaaagtggagattattgaccttatcaactgagttcttctgcaacactgattcatttcatttttgtagcctaaggagtcgaaactccgaaattctcttggacttattaaaaatcatctcattacagtctaaatattaaacattatcagtggtgcagaaggaccgagttgattagcgtcaacaatttccggtttcaattttctcgatcacccttgtgaaagttcgaaaatttaccttcttctcctctaaaaataattgtagaaattaacagaaattgtagatgtgaatttgttgagctttttataaattcggtccttccccacactgataccatttatatttttagaatgaggagctgaaattgtgaacatttcacaaattagtcgagcgaaatagtaaagtggagattatcgaccatatcaactgagttcttctgctacactgattcatttcattttagtagcctaaggagtcgaaaactccgaaaatctcttggacttattaaa

SEQ ID NO: 1166 - DNA, 795 bp, Heterodera glycines
caagaattcttcggtgaattttacatcgttggtacagggtctcctccagggaaaggcaaatgccggcaattatgcagtgttttctacacattcattatactgagacggaaagaaatggatagttgtcaaaactgactgacctccttcaccagtccgtccctttctgtctccaattgctttacgtactgtccattttcttccgccattaattccattcgacgttggcgaccctccaattcttctttgccctccaaataacgttttttgagcagagcaaatacctaaatgtccaataaagcagataataggcattaaagttaggcaaaaatggggaacaaaattcaaaaatcggcaaaaattggaattataagcccacaccgtcctaatttataatattttataataatggcacaatgctgcaaaaatgcccaaataataaaattgtttttaaatcttttcgtcttgtttggtattaaaatcatcaaaaataaacgctttgaaaattcccacaaaaatcggcgccaatttgccattttggctcaccaccttaacaattttcagctcccaattgcgctggcgttgcacaattttggcggcgtgcagcagcgcatttgcgcactgtgcgcattcgccggtgcgtccgctgtccacaaaatgcgcgtcgcggagcaaagcattgggaccagcagcagcagaggaagaagaagaagacgaggtggaggggagaagggcagccgcaacggaagaacaattggaggaggagaaaagagaagtgcggccatgctgaaaattgga

SEQ ID NO: 1167 - DNA, 1733 bp, Heterodera glycines
  unsure (1)..(1733): unsure at all n locations
gcaataaaattacgaaatgcctcccgacctttagttgtttactgttttttgtgatcagcaaaataaaagttgcattttttgccattgttagcacctgttgctgacaaaagtccaaaagcgcgtccctggcctgcaattcgccctcatataaacacaacagctcgagcatttccttgctgctgtaaagcggtggcgactgcaatttctccacagagtgcgccgtatttttcattgtcacagaccaaggaacagcagcaggaaaggacggacgtgaagcaaaaacccgaaaaatttatttttttgactcgaaataaaatgcagatataatgccaaaaattggaaattttcaaattcaaaatttacctcaaacagaggtatgtaaaaacatatggaaaaattaaaaaatataaaataggtaaaaccccaagttcagatccagacttttttaaaatgtcgaactctattaaaatattcccagcggaatctaaacacacaaggcaattaaaacagaaaccaaaagtgcatttatttagcgttcataagaaagattcggaggtggacagaattttaaaattcctcgtaattttttacaagtaatgtgcaaagaacagaagcgttgttgatatgccgattaaagcatacctaattctttcattttttatttatattatcaatatgaaaaaacctttatcgatatgtatatgtcaaaattttttcccttgttcattttagcattgaatttctggtaattattgtagttgaaacacagcgccagtgacgcattgaccatggactacggcttgggacgcatacgccgaagactctccaactatggagcgatgtcaccgacaaagagtgtccaggaggtgcaacccgtggctttgtcttgggaccgtctcaccgttcggcaatttcttggtaaaccagtcggagttgtgtcctctatgtcaaagattgtttcgactttcttagactacgtgtccggcaaggccgacactgaccaactcgtggcactaatgggcgacggcggagtgggcaaaacaacgcttttgaacactttgctgaaccgaaatttgaagaatctgagcatggaggaccaagtgctgatcaacgcgcattccttgggccaattcatcaattacgtcatcaaggtgagtcttagcgatgcgaagtgcggaggttcgtgattccttgactcggatattccccaaatagtttttcgaaccccttttattatccttataatttgcatccaatttcagtacgtgcaacatgacgacttgttcatgggcacgctgactatgaaggagcatctgatggcgcaggcacagcttcggatggtcggacacacccaacggacgatgcgcagacgcgtcaatgaggtgggatttgggggatggacagaggcagtagcaaactggaaatcatttaaggtaattgacgagtttggtctgcaagagtgtcgccacgagcccgttggattcagcggggtaattatcatttttttcaaatttacaaatacaatttttaggacaaaaagggcattttcggggtggtgaggcggcgtccgtttgctgttcgcttccgaacttatgaacaatccgcaaatcatttttgccgatgaaccgacaaagtcaatttttggttgaanatttcaaaaagtccccctttagagctcgaccttgtcgtggcggacagtgtggtcttgaaagtctgcgtgcctgactttctac

SEQ ID NO: 1168 - DNA, 3690 bp, Heterodera glycines
cccaagttcagatccagacttttttaaaatgtcgaactctattaaaatattcccagcggaatctaaacacacaaggcaattaaaacagaaaccaaaagtgcatttatttagcgttcataagaaagattcggaggtggacagaattttaaaattcctcgtaattttttacaagtaatgtgcaaagaacagaagcgttgttgatatgccgattaaagcatacctaattctttcattttttatttatattatcaatatgaaaaaacctttatcgatatgtatatgtcattcccttgttcattttagcattgaatttctggtaattattgtagttgaaacacagcgccagtgacgcattgaccatggactacggcttgggacgcatacgccgaagactctccaactatggagcgatgtcaccgacaaagagtgtccaggaggtgcaacccgtggctttgtcttgggaccgtctcaccgtttggcaatttcttggtaaaccagtcggagttgtgtcctctatgtcaaagattgtttcgactttcttagactacgtgtccggcaaggccgacactgaccaactcgtggcactaatgggcgacggcggagtgggcaaaacaacgcttttgaacactttgctgaaccgaaatttgaagaatctgagcatggaggaccaagtgctgatcaacgcgcattccttgggccaattcatcaattacgtcatcaaggtgagtcttagcgatgcgaagtgcggaggttcgtgattccttgactcggatattccccaaatagtttttcgaaccccttttattatccttataatttgcatccaatttcagtacgtgcaacatgacgacttgttcatgggcacgctgactatgaaggagcatctgatggcgcaggcacagcttcggatggtcggacacacccaacggacgatgcgcagacgcgtcaatgaggtgggatttgggggatggacagaggcagtagcaaactggaaatcatttaaggtaattgacgagtttggtctgcaagagtgtcgtcacgagcccgttggattcagcggggtaattatcattttttttcaaatttacaaatacaatttttaggacaaaaagggcatttcgggtggtgaggcgcgtcgtttgctgttcgcttccgaacttatgaacaatccgcaaatcatttttgccgatgaaccgaacaaagtcaatttttggttgaaaattttcaaaaagtccccctttagagcctcgacttgtcggtggcggacagtgtggtcttgaaagttctgcgtgccctgacttcctacgggtgtacaataattttcaccatccatcagacttcgttaaatttttactgggtacgaattcgcgtaaaacttaatgttcaatgtggtcccgatccctcttcaatgtgtaaattatgacctttttatctaaaaattaaccccagtaatttgcattaaaaaaaatttgaagagaagaaacaaaaagtttgcacttatgccctatgccaaattctttattattaggcccattatttttgaaaaaacctggtttaaccagtttgggagaggccggactcgggaaccggctgcctaagaaaatctcggtctattcatgttattgactattttatttgcatttgaatttctggccatttgtagttgaaacacagcgcaagtgacgcattgaccatggactacggcttgggacgcaaacgccgaagacagtccaattatggagcgatgtcaccgacaaagagtgtccaggaggtgcaacccgtggctttgtcatgggacggtctcaccgttgtccatgccaaatcgggacggaaaattcttggtaaaacatgttggggttgcactcattgtgtatataaatttctaccttttacagacaatgtgtccggcatggtcgacgcgggccaactcgtggcactgatgggcgccagcggggcgggcaaaactacgctactgaacacgttactcaaccgaaatctgaagagtctgagcgtggaaggtcaagtgctgatcaacggacattcctttggccggttcatcacttacgtcagcggggtgagtcgttgtgattcaatgttcaggtgttgcggttcggaacctggattcggaaatcccttgggtttttggggcctcgtttttcgaaccctttttttcataataattttccacccaatttcagtacgtgcagcaggacgacatgttcatgggctcgctgacggtggagcatttcatggcgcaggattggatggtcggagacactcaacggacgaagcgcacacgcgccaagaatgttctggaggtgcaacccgtggcattgtcttggcacggtcttaccgctgtccatgcaaaatcgggacggaaaatccctggtaaacacagccgagttatgtccattatgtcaaacactgtcaagttttttttagacgccgtgtccggcttgaccgacgcgggccaactcgtggcactgacgggtgccagtggggtggacagaaccacgctgttcaacactttgctgaacaggaacttgaagagtctgagcgtggagggtcaattgctgatcaacgcgcactctttgggccaattcatcaattacgccagcggggtgattagtggcataagaaccgagggggtcaattgatttgacacatttctcattttttgaaaatttgacagttatgtttaggtgtttggttcgtcatttgtagtcagcaacattctccgtgttctgtctggattcccgattgtttttcgtattcaggtgggagaaattctccggcctttcaaacgtcaatatttatatcaaattattctttcttattttgtttatttgataaattttgttttgaaaaatgtcttaattgtgtcttaatttattgtaacctaccaatttgtatttattgaaaaattttcgatttgattaatgctttgtctcttctttagatggcagatcgcaggcgttatacacccactgtaagtctaaaactgtctatctaagttcagaatcactgctaggatttgcgaaactttacatagaaaattcaatgaaaaatattttcatttattttttatgtgaattcgattcaaaattagtcatttgaaagcaggtcatcgtaaaactcacggctgtgattctgagttaaaaattaataaaataagttaaattggataaataatttacgtcattgtcagaatccggttagtagcagattcccagccataaatgtactgtaaaaagggttaaaaaattacaaaattttaatgttatgttgaatgaggttgactcatacattatacttactgccctaaacttggccggtgtgatactgaccatcccaccggtagatactactgagataaacttgaataatgctcgaacatttttaaaaatcgttacgccaacacatgaaagaattttttgaagaatttttgggtttatttgtatacaaaattaccttttcaatttttattaatttaaaatgtacatccgagaactaaaatccccagatgaacttcttcccgttttatcgaacacaactcgttcttacgctcgttggaataatagtgtttgagttttttcttatttttaaattaaaaaaagttaaagtttattagtgtcatagtcagaaatggtcctcttaattattataatttattttcaggagcgcatgcgg

SEQ ID NO: 1169 - DNA, 5364 bp, Heterodera glycines
atccaaaacatccagtgtatgtttaatagaatttattgttgccttctctaattgcgccagtttagatgcgcaacctcttcaaattgcccaagccggcaattttcaaaacctcaatcagctcccaaattgttagtcaacgaaaatttccattcaaaattaccatttagtgcaacaaaatcaacagcaatatggtcagtatccgtttgttcctactcctcttgggtatccgccggcgcctcagggaaatccgtaatttgttcgtcgtcgtgtttctttcttttttaaatgttttatgtttgacaaaaagaataaatctgacaacttatttttgactttggcaaaaattttaaccaataaaaagctcgaaagttcaacgaaaaaagtcattagcattcttggcttattgttggtgcttcctcgttttcattgtcccgcttaaaatcgcatgtgccgacacgcatcacctcgtccattgtgttctgatagatgtttaggctcgcctgttttacgcacacatagtcccaagttccctagagaaaccgttgcccatttattccctttgacaatggcctagcagttgaaatggcagaagatgaggtggagaagagcagccgcagcggatgagcaattggaggaggagaaaaattgctaaagaaaagtgccgccatgctgaaaatggggccaatgaatggggataaccgaaaattttgcaaaaaggaggacggtttgtgttagcgttaaaacgttcaaatttgcacaggtttccagccatataattgtgaattcattttgaaaacttacgggaatttgggtcggtcgacgccgatcgataagcatcgaccggtaaacattggaatttgagaggaattatcccataatctcttgctttttacataacaaattcaaattttcccgtcaatcccagtcgcatactcccatcttccgcattctgttccatttctctaaaaacaatgtggaaattgtacgattttcgcatttacccaaacccgaaaaacgagttgaggtaagcctttgtcccttctgaataaataaattcgaatgattattttattggtagtcttctttaattcggtctcatccataaaatttgattttaattttataacggttgttcaacttataattatgtaatagtaatagtcatctcgtaactctttgaggccactcgaataaacaaaagtttagatttgttatattacgacaatttgtttcttttgaccaccaccagcaaatcaatctttttgccaaaaaatgcaacgaacatttttgtactcagacacatccgacattttacgacttcgccacttttacgcctccatcggcaacaacagcagaaacggttgacattcattctaaaattgtccaccaccgaaccaaacaaaaatgagttcactcctcagaatcctttttccttaaatcgaccattgaccatttgttgtccgagttggagcggacgcgcaaacacagctacgaattggccggacggaacagaaaactcgagcgagaaaacgagtgagtacagggcacagcacacagacccgggctggccaatgacatttttggccaaaattggtcaatttttggctttctaatttcaataattctcgtgaaattcgcgtccaccggtgcgcggtaaacagagaaatgcaaattttaagtaaattggtaaagaaaagtggaacttataaacaaaccctgtttatgggcctggtccgaccacctatcacatggcatattttgagcatttgaaatactcaaaaactttagcgttttgatgaccgaaaacaaggagctgaagaccaaactgagccaacagcacagccaatcgcagcaattctatccgcgaactccgaagaagcgcaagtcgcagtttccgtacgcggacgacaacgatgaggacgcgtactgctcgcggatgggcggcgacgcgtcggcggttcgccgctccgtttccatgccaccgccggagacaccgctgggcattatcggcacaaccgctgcgggacagagcgttgtccgtgccggcattaccaccgccgccgcacgccaggcactgaccgtcaacgccagcgggggcatcaaacgccgacgggcgctggtgccggcgttggtcaaaaacagtcggatcagccaatcgcatggcgacttgaccgggtggggaccatagttttattgcaagaaaataccaaaagacggcggcatttgatttatccaagaatcctatcttttaatggaatttttggactgaatttgtgagaatttttggcaaattctagtgaagttggtggttccgcggtgccgacaaataccgtttgaattcaataatttgtttgttcgccatttttagtagaaacaattcggacgaagcggtggacgacttgctgccgtcggtgtgcgaaagtccgtggctgttcgccgaccaaatggttcacgggttccagaagagacgcaacctcctcaaacactcgtgcactcgttgcgagaaaaccatcggtttcatgtcatttatgtgaaatgcacgcgatgcaaaggtaagctaagaaattggatttgggatgaaaacggattttttagaagtttttcacgagtcgtgccgccattttgcgcctttgccctgcgtccgtcggcacaacaccccgaaagtggctgggaatggcaacaaatcggctggacgtcctcgccttggtgggtctttgtttaggaggactaaccagccaaaatgtcggttctcttgcgtttttttggtcccactgaattttacgcgtccaaagtgccaaccgattttaacagtgaaatgaaaacctgttgaagcaatggcaagaaatgccatggaaagatgcaaaaaaaagaaagaaaaaacgtcaaaaagtgccaatttttacaagaaatccgcttattttcaggtgatttctgtcccgacgctcgcccgatggttcctccgctggtcattttctgcacttatttcttggaccactgcaaaacatacatgccgtacagggacttgtaccaaattgaggggtaattctttaatgaaacgggcaaaaagaaattctgagggcaaatttacgaccatttgtttattttgggccttaaattcaaaaatttccaaggaaaacattggttccgataggtgccataagtaaaaattgcaagccaaatcattagtggaaatgtctccatttttagaaaccctgctgaagttgaggccgtcacaaagcaatttctcgtcccaaacaaaagctacccgaaattggtacaataattgattaattatactaattattatttgcccctttttaggacgcttttcctcccgcagtcatttccgcttgtgtcaacaaatttttgatgcaaatccgcgacccgttgatcccctattcatatggcaaggagatttgtgcacttttggaccgctgtttggccatcgatgggcccattttggagggatttgccggcattgtcgaggatttgccagtggtaagtgtttccatttgctgagttttttagacctattcccattaaaaggcacacatggacacgttgggccacctttgtcgccattgaatcgtttggtcgcgaattcggtgagaaaattgtacaaaatttttgcatgaaattcactgacattcgtaattatgccataaaattcgttggcccaattttccactggggttttcattttgagacttttcttccatttcatttggttatggggcaaattttatggtccaaattgctctttcctgaattttcagcatttggcaaaactctttctactgacaatggtcatgcgttatttaaaaaattttatgtccattgaatttttggcataatttcctagtttgattgtcgaacccttaaaattcggacaactctgacaattattgaaaattgtttaagttcggtctgttgaccattgacgctctgtcagttccgcttggtccgctcgttttcggctccgctcgccctgactgtccgccgctgctgcgccaccgctgcgtcagtgccatggcccaattgcttcggttgggcaacgacgacttctggaccgacacttctgtccgcacactgaccaccagcagcagtgggggcacgccaattgtgcgcaatccgtcgcaacgctcggcacggagtgcggtggtggcggacggcggcggcggaacgccacagcagcccaattttggtaattcaaattcattttgaaaaatggagtccgagaccggtacccattttctattaattcagagccctaaactcaaattcgaacaaaaagacgaaaattcaaactttagtcacaaacccattgaaataccaaaaaacgctcctcccttttgctgcacagttcgccactaccagcagcagcagcttgaagtagatctgaacgcgacgggaaacggtgacaccagcaacaattgggagtcggctcggaacagccaacagtgatgatgaaagccgagatattgattgattgggttgactgtctgactttgtttgatttttctctctcctccggcccaattcactttcactctttgtttctgattacgttttgaacttttatgcctgtttttcccgcaaatttatgctttgccaccgtcaatcattcgtttatttattttatttttattgaaaattactttttctgaccctccatttatttgaatgagcggaaaaaaaatctgaggacgcaacaattagccaaagtgccgaattttgtgaacctttctcttgactctcattgattatgaatctcatcattgtcatcgcgtgcaccgacccgagttttgtttatttatatgacagttttttggagatattggcgataaaactgctcattttcggaatgtaataattgcacaacaaaataatgtttgatggaaggagacactaattagttaattaattagtaattagggaaggcacacaatattttgcataggtaaataaataagtgatcatttgaatgcgctgtgtgtggcgttgtaccttcttcagtcagcgtcagcacaggtggcaatagtaattaatcgccacgacaacgacggacagcggcacaatgacgagcagaagcgtgagcatattggagttcttgatggtccgttcttcgccatctgttatggaaaatgaaaatgacacgcgaagttggagcagttcaattcatcaacggcaaaaaggaaataccaaggaaacagtggcaaaatgcgcccggggcaaagcctcgtggcaattcttggcatttgcgaatatttgatggtttttgggacttgggccattgtccgcccgaattaggacaaaaagtcgaaaggatggggaataagttcgagtttctatccaatttttggt

SEQ ID NO: 1170 - DNA, 2833 bp, Heterodera glycines
  unsure (1)..(2833): unsure at all n locations
gtcagcacaggtggcaatagtaattaatcgccacgacgacgacggccgccgcaccgacggacaacggcacaatgacgagcagaagcgtgagcatattggagttcttgatggtccgttcgtcgccgtctgttatggaaaatgggaatgacacgcgaagttggagctgttcagttcatcaacggcgaaaagggaatgccaaggaaacagtggcaaaatgcgcccgggcaaagcctcgtggcaattcttggcatttgcgaatatttgatggtttttgggacttgggccattgtccgcccgaattaggacaaaaagtcgaaaggatggggaataagttcgagtttctatccaatttttggtccggtgatattttgcattggtttcagtgattctcgcggtttttttttgtcccgaaattgtccaaaaataaaattttctttcaaatggcggttgagaaaagatacggcgaatagcatggcaattggataagttcaaatgccatacataacctatcgaaaaccttcaaatttacgagttgtccgtgccgccctccccggggatgatttaccggaaaccccgagagtcttgcccgaggcctaaaaaaacccgagtcgacacactctccatcaacgagaaacgcgaaaatgccggcctattgccaaaaaagttctgtctgatgttgccttcccccccccccgtgcccacccgtcggatggtcaaaggtggcgaattcgccgggtggcggatcaatgcgttcgaacacccggcggtcgtcctcgtcatgcggcgggcccatctgctgctgatgctggtactgctccaccgccgttcgaccgccgccacttctcccgcgtgccgtcgccgccgctgtgccggtgccaccgttgtcaatgtttgtgttcgccctgcgttttttgatttttttgggcattgaaaaacgcacggcatttttttttgtccaaccgaaggaagaggaaagtgttgcaaaagtgttcttcgccacgagcagatgtgagcccaccggtccaaattgcgttggcaaccaagcgcttcgttgcagcacgttcggatcactgaaaatgggcaacaaaatgggggaaatggtgaaaaaatgtctaatttcccaaacccaaaggcacacgccccgggggggtgtacggtatcgcatgacaaatgctttccgtattactgtaatctttatgaggtcagcactccgacaatttttgagggtcttggtataccctggcataaattcgtggttttaagaaggtgaaaaagccgcggtctttggtcaaaggtcgagactccgattcgagactgaaaaattcgatttcagcgcctaaaattacccgaaaaatattttgaggggatctcacaaaagggataagtaccgtttttcttttcccatttggctgtttttcttctcacattttgtttgttttttccgttcgccgtcgtcgtccctttcccttcgccggtgccttttcacttcgtccaccaaattttgttaaaaaagttgtcttccttttttgttctaccaatctccctctaccattgaattgcagcactgaaatgtttttattaattatgaaattctgcagatggccgcctttgatgcgaataacaatagccgtttatctccagaagtaaattttatttgcatattgcttagggtaatttggtctcagtttgttatcacgggtccggaggaattttcagtggaagaattcagaacaaaaatttatgagcatggaacttaatgtattaattctggttcggctgaattgtttaaaatttcacttcgtttaatgtttaagctgaaatccctatgagttttaaatttaccaaaaaataattttttggcgttttgccttaaagcttaatggaattcgttgtcagctttgttgcactataatttaacaattttctgtttaacttcttatgtacatccgagagttagaatccccgggtgagctccctttggttttgttaaatgcgcctcgttcttgctgtcgtccgactaagcatgttcggatttattaacatattacttttgcgttaaataaatacctattgtgattttttgagaaaggaaaaattttcaaactaatagtttgattatgattttggttcagtaacaccaattcaaccagtaaaattttaggaacaattccgagcagttttaaatctgagaagaactgcgcaacgccttacggtcgaaaactcgaggttggacagaatgaacgcgatgctggttgtactttttcagcgtcttacaggtttttttttttttggtttaccttggtgactaaaagtgcaaattttacttttattaaaaaatctaaaattgtgttgaatagaaatgtcgctttttcattgtttcattttactatggcatgtatggtcaatcatttatataatttcacaatattttcagcttttgccgttccaccggttgtacctgttgtgcctgtcaacgcgaacaataacaacagacacagctacaatgtatgttttcatttggtattaatgaataaacgatgaaaaataaaaattggacgcgaccgggactccgggattttcaagggatcctgatcttggtcccagttttggaaaatagacacccgataaaagcgagcttaaatcaagatttgaggtcggactctaactaacaattgggtttatcggtcttaatatattaattcaaaaaaatccggtgaatcttttctttttttttgaaaattaacatttattttagaatctaattattanaatattctattaatttttttatgacatcataaaccataaaaaatcaggaattacagcgcgaact

SEQ ID NO: 1171 - DNA, 716 bp, Heterodera glycines
tagagatcggtattttgaaaaaaacctggacctggatttcctggacaaaaatccaggtccaggaaaaatccaggttgccaaaaaatgacctggacctggatccaggaaaaatccaggcctggatccaggtccaggccaatcttagtgatttagtctctttttaatatgcggaattttttttttgaatttgaccaattttagccgcagttgctttgccgcacaatgtcaaccccaacccgccgggagttttccaaccgggtcagcaattgtttgacgacaattgtatgcgcatgatttttccaataagaaattttctacaaaaatttaatttgcagttgttgatgcttatcttcagaatatggacccgaactaaaagaaattcatccgccgatgatctttcactttattcattttaaaatatttaatgtgtgtgtgacaatgagaataaaatcacgacttatttgatttcattttcgatgtataattatttgtcattaaattattaaattttgatgttttttaagaaaaatagaaaaaaattccgcattccgttccactacgataatattgttttcgcttcattttgccattgctatttcctctaaaattaccaaaatcttgaatttgaagattttgaggaactttttattgggccagtggtgccgataacgcagaaggcggtgaaaatttggaatttggcctttttacatttttca

SEQ ID NO: 1172 - DNA, 2067 bp, Heterodera glycines
ttgcctaattctattatttgcaaccttgtcccattgcataatccttcattaacattcaaattacgcaataacataatcatcgcacccttttttaattttaattcatggtttggcatacttgaacatttaaatgaattaagaatttctggagtgaaagcattatttttcctttcgtccgtttcatctatgcttaaataaaccttacagttccctggaagtaaatctaaaatttcttcattatatttgtcacaacagcattatacggagataagattgcgacttcactaataaaatcctaatccatgttgtttaaaatattgccaaaaatttcatcaattcaatttcctttacttatacaattatttggaacttttatatatccattttctcccattgttccatttccaatcatgatcaaatcttcactgaattgtttttcgtttatatttgctcgcatgttttgtgttaactttaatgttttaaataatttccacattggtgaattttttattaacaaaatcaatttatttacatatatctaagccatttttagatgaaaaatgcgaatttgaaaattcgactttttgttcgaattggttcctgtgttcgaaattgattaatacaatttaaataatgatcaaagatattatgaaagaggtcaatttaaataatgatcaaagattttatgaaagagatcaaaatgatattatgaaagagatcaataaactttcagcaaaaacaacaacaaaatgttttttcctttctttatctaacagtaaggaattcgtgtcgaaaaaaaaactattttaaaaaggttagttacagcattgaattagtataatggagatttcgtgatttttcttcactaaaattcacgtccctagtcattagtacccttaattggaaaattcatatccatatttcatatttgtggttttttatatccatttttacatgcccgttattacgtccagccgtaataactcaaaacatatataagctctttttacggaaataatacaaagaaaaaaaacgatcacgaaatcctaaaagttgtttgaagggaattgagggaagaagaatgccgcgaaaaaaacaatttcgtaacataaaacaacaaagattattatgacaaataaggcagagtgaagtccaatggaaagcaaatgcaaagaaagaacgaaaaacaaaaaatgttttcgcttcaataaaaaatccatttctcattcaaaaaaagcaaaaattttgggacggaaagacattctcaaataatataatagatagatgacatatatcatcattagggctgccaaaagtatgcaaatgcatatttttttcctggcttctccatgctctaaatagtacgaaaaacactttcttttttgtgttcgtatgaaaatcgggacttttatttgcatatttttgcatattttgggcctttatgcatattttgcatattttggcttgttttacattttcatgcatattttgccatttttcttcaaatattttccgattttttgcatattttgccatttttcttcaaatattttccgattttttgcatattttgccatttttcttcaaatattttccgattttttgcatattttgccatttttcttcaaatattttccgattttttgcatattttgccatttttcttcaaatattttccgattttttgcatattttgccatttttcttcaaatattttccgatttttgcatattttgccatttttcttcaaatattttccgattttttgcatattttgccatttttcttcaaatattttccgatttttgcatattttgccatttttcttcaaatattttccgattttttgcatattttgccatttttcttcaaatattttccgttttgaatatcccttaagtaaattttggcagacaataggatgcgctttagtgccgaaaatcttgagaaattattgattttcaattgcaaaaaaaaccgataaaatttatgaggaataataattttttattggatttgcaccactaattttcaagtttttttgtgcatatttggtgcatattctac

SEQ ID NO: 1173 - DNA, 7960 bp, Heterodera glycines
  unsure (1)..(7960): unsure at all n locations
ttttatttaagtgttaagtctcacccatgaaattcatcatcgaaatttcggttgcaaatttatataatattntggttcaaaataataattgaaaaatttgttgagattatattttntcgtacaaaaagtccaaatattttcgatatttttgacattctgtccgttcatattcttcaaatttatccgcaattttatcacatttccaattctttctcataaaaaatacaaagccaaggtgtgattcgtatttgttctttgaatatttactgatttgagtttttggtgtcctttcataactgcaattagccttttgtcgtcgtcctaattaaaaatgattaggtaaattaatttagcatgattaattgactgatggaattgcatttgaaatgtgaattagaaaatgatgaataatgaaagaaaagggattataaaaaatgagaatgatcatataattattcaaatctattttttacaaaattggatttgtatattgccttaagcaatatgcaattatttaaaaattagaattggtcatcataaattatcataattttttaattaatattttaactgcaattctatcaaagagttattaatcagtgtaattaatttatctaattttgattagggagacgacaaaatgctaattgcttttgttagagaaatgatcagaaaatgcaatgcgacttttcaaagcaaaaatatgagacataccttggcttatttattttatgagaatgaatttgaaatacgacaaaattgatggaaaatatgaggaatatgaacggaaagaatgccaaaaatatcagaaatatttacaataatttatgcggtaaattgtctggtcagaatttcgcaaatttattttcgccaaggacaacaatatgaatatataaattaaagaatttttcaattatcattttaagccaaaattattgaacgaggagagattgaattatgaatagaattgaaaaatgatcaaaaagtgccaattaatgaaatgattttgcaattggcaattgccacagcaaatggctgccaaacaaatgaaattgtgaacaaaataattcgacaaaaaccggatttatatggacaaaaaaatccataatatggattataatatggacgaaaaaattgcaaaatatggacgtaatatgaacaaaaatgctgaaatatggacaaaaaaacacgaaaatatggacaaaactttctgaaaattggtttgaaatttttaaaaaattaaaaaactcataaaaaaatttttaaagaaggaaaaaattttaattcatgaattttataattccacaatttagaactcccatttattatttactgaaatatatttgaaaaaaataaaaaaattagtaattttcttgtagaaaataatttttaatcgaatgtttctattcaaaataatggctcaatgtttcattcgtatttttgaggtcctggtttaaaaccaacacaaaaaaataatacaatttttaattattataacaaaactaaacagcgtataaaaaatcttttttccacaataaaagtgcataataatttttcttttagtaaaaatgagccaaatcagtcaatttttgataatacactacataactttttgattatttgttttcaatttttgccgttccggaaaatccattcccatttatccagacagaaaaatccataaataaatccaaagttgcacattccttgcgcaaggcacaacaaaggcatgacatcatcaaaattgaactcaacaaaatgaccaatatatttgtaaacattgaattttcgatggggacatttaaatcctcccattcactcgcatacaggtttttgccattatttaaatatttattttaaagcgccatttcgtttcagcaatcgttgattaaacaataaaattttcaacataatcactttacattcaattgtccacatgaaaattcattttaatttatcaaagcgatgattgacacagaaattaatgaatgttattattttgacaattggttaacaaattaatattaatgataaaatcactttgactgtgttaaaaattcgtttctttttaattccatttgattattcataaattaatattttttaaaaaataacgctaattaatatatgtatataatttcaaaaaaaaatcatttaaataatgataaaaatgcaataaaataataataatagtaatgaatagataattaacttaaactagggttagtcacggtcgtttaaccgaactgaaaataccgaaaaccagcggtaccaattttttggtatttggttttttgattttaaaaacacacccctttcagttcgctgagaattatgagcaatttttaaactgaaaaatattcatttaacaataaaaaataattcccccgaaggcgtataccggcaccgcaggatttattcgttttcccgaaagttttttaaggtcaaaatcttcgatttgaagttcatttttatcttatttcaaaaaagctagggaaggctgttttaaagacaaataatatccaaattaacaatttgcgcctagcgttatgtgacggaaattttaaattattttcatttttggacatttttatattcatttaaaattaaaattgttttgcatattgcttataagttgggttgacataagtaattgtttttttaattcatttgtgcttttgaaagcacttatcagtccatttaaattaagctgaccattggcaatccctaattcaaataaactaaattaattttaatattttaataaagacaatataaaaatataattaaattttatttgattctttaaaattaatttaatatttggtaattataattttaaaattatcagccattatgattaatttaatttttccattattcatatatggtataacaatgctttccgaattggccgaccacggtaatttcaaatttatttaaaaaaaaacccaaaaaatatattatctaatatcaactcaatattctagaaaatgactttccgacatctcttgatctacgctacactcggcgcggagaacgacgtattccttatccacaaaatcaaggtaaattcttgaatgaaaattttgttgaccaacatagttcggtgccactgtttccgtgccattgcggatgaagaatccttaattttttctcagttgaccaattttataaatttgatttatatcgacaaagaaggccattttaagatatttctaagcatttaaaaacattgtcaaaagttgtaacaaaaaacttcaaaaaaagtttaaaaattttgagttctctggcacgaaacgttggcacgaaattgaaactagaaaaatttaataggaatcaaggccaatagatttgttataagaacctggataagaaatggaatttaacatagtaggtcggattagggtcgagtccgacctgaattctgggtcgggatttggtacgcaaaaaacgatagcgataggttctgacgacaaacttgttctgcacccttttaatttttggtattctgattacggagggttcgcctattacagatattttggaatttttccatttccgaaaatttctagagcactgcggtgcctgttgggctttctcggcggcccttgttcattcggcagcagtttttgaaagccgagtcggcgagcgtgatcgtcttgtcctctattccgctcaatatttggttgattgtactattcgtaagaagaagaagaagccttcagaagcttgcaatgggattgccgtcatgaaagcattaaagttcactaatttttaattaaaaagggataaattgtgagggtttttgaatttcatggttttggggcccgacatttttgcctctaaatttgtaaaagcattatatctaaattcgcggctttttttcaacaattcgcaacgaatgcagtcaaaactttataatttttaaatcattggaaagcttaacatgtttcaaagctgcttctaactattgcttctcgattagacaattactaaaatagctatatcagaaaattaatttgaaatatttgaagtttaaagtttttcttccttaattttaacaagctaaaaagcttttcgaattttgtaagggtaaagaaaaggtgaagcgcttttgaatgatcacaagattattagatttggttgacaaaaaagtatagtcaaaaaacttatgttcgcaacgaaacgtctgcgctatacgacctaaaatccccgtaaattttgaaacgtgatccaaaaataaacaatttaacttaatttttacttatacatgtttcctattgtaaattacgaaattccagtaggctttccactgatggtgttccactcgacgcactttacccgtacttgagtggcaaaacaggtcagaaattttattgtacccacaatcattgggtttgatgtaaataaaatccaagaatgcctaattaatgcccttgtgctaagttaagccatttttcggggtgatcacgtccatgaaataggtacgcagaacgagtgcggagttgcaggagaggtggcgcttgtccggaccaaaaagcagggcctcttgtataaagcagagcccgggcaattcggatttgttcgcgggctaacggcgcaaatgacctatttgacgacgtacagactgccacttgcagcccgtatgttttaaaaaaggaaaagccattaatattaaatatatcaaaacatgaggatattttttaattcttaataataaaaatttttcagcttttgtcgattttaatttatttttgattaatctgaacatttttaggtatgtatgccccggaatcattcaaggcaagcccgaacttttagtgccaggatgctaggggctatgtaaaatatcattttaggaaaaatagtagtttaatttttaaaatttacataaagaaaacctttttttttggttttctaaaattaataaattttaaatgttccttttaaagtttttaataaaaatttgtaaatttatctcatctaaaataaacatattgagaatttctaaaatggaaatttggttctaattttattgtatgattttaaatatgtatttatttagaagccttaataaataaatgggtaaaattctggtttgttccccccttttcaagaaaaaataaaagttttcaaaaaagcatctagcacaaatagggatctcgaggtcgctgatcacgaatctgaaacccatttcgaccaattttgaaccccggaccccaactcgaacaaaaaacgggaattaattttaaccaaaattcacttttatgttcgaacctcaacagaatttaatgtccggggttcgaattggggtttagattcgtgatcagagcgacctctaaaaccctaaaaaagtcgattttttgaaaaattttatttttgaaaaggaggggaacaaaccaaccgattaccaataaatgtttccaaatttatacccttaaaaaaatcattttttaagctttaacggtaaaaaaagtggtcaaaataaatttaaaatgtgcctttaaccgagctttctaaaaaatagcataacttttcttttaaacatgatttttttgaaatctaacagtcgttagtttttttcgaaaaaagatactttacatcctctgttaccccaaagtcccgggactcaatattccatgcccacttcaagacttacaaaagcaaggaagtctacgacccttcccctgaggaatgcaaggccgcggaagaggaccctgacaactcaatgcacatcattagcatagtgggctatggcgaagaaggaggcaagccattctggctgatcgttaacagttatggccaagagtggggtgacaatggtgaggccaaatttgttagaggcaacaatgcgtgttgcattgaggattatggatattatgtcaaaagtgtagagcattattgaaattgtgtctttgaatggctctactgcagattgcgcgtcaattttgtggtgctaaaatcatgttggtgttagggaccgaattcaaataggaatagctaacctgttgggcattcaaatcaaataacaaataaaaaaaataccaaagggttttctaaaattacaaatgtagaaattttatcgccttggagtgcagatatttggacactaaataagtacaaaaaattatggtctgaaaactaagaatgggcattgactggagaagtaattgcagtggagccattaaaaaatattgtgttgaacgtggaaatatgttaaataaataaatggaaatattggttttttaaatatgttatctaattttcctttaattcctcaccattttgctgaatcaacacatctgaatagatataataacaacaaaatttccaatcgatcgacaattttgattgtatgcattttgtgctctattaaaatataagcaaaaaattcacatcatatattattagtatttaaattatatgtaagaaattagaattggacaaaaaaaaacccgcagcaaccgaaaaaataaaatgtctttccgactattcagcgcctggagaaaacacgaaaaaaatgtgttgtattgtatttcttttttcttttattttgagcaatttgggatatgaaaaggcaatacatcaatttaagagcataatattttaagttcagctcgagaaaaggtcagttcaaatacgtaacatttaatctagtaaagaccgaatgtgattgatcgattggttcctttaaacagccgatcagctttgagaagatgagggcgggtcggcaacttctcaaagcgaggccataacaaataaaagaggaagaagctgttgtcccagaaaaaaagcctagtcaacagattgctataatttgtgtgtcataattagggagcgaattcataggtttatacacatgaaaaaggcacataattttccgatttttctcccctattttactatttttgcccttttttaccattttcgttcatattttacattttttttgtccctataaatcccgaaattgaaaattttcaccgctaagcatccgctccttagtcattccttacaatttatatatgtcatatttctatattttgccaaattttgagttatgtccacattttataaacatagtaaaaagttaactttcagctcttttgtgtcaaaaatagggcttaatattaaaatatttcatttttgttttcattttcccacgatattaataaatttcagtttatttttctatttaaaatgatttttatttttgagaaagaagaagatgctttcctaaaaagaagcttaattgattcatttaagcgacaattaaccttttttaagggtcggtagtcttcccaagctgattcattattcaataaaaattaaaatcttttattgctttttagctaatttataagcaaacaatcaatggctttaatttaaattctccggccttcacaatgcttactgctaatgaggccgttcaaagagaccaagatgagaaggaagtagaagaagaagagtcgtgggccaaacgttttcctccatacagtgcagaaacggaaattgaacagcttgacgaatttagtttgcttcatcaacaaattgtggccggccgtgttgtgccgtgttgtgtaaatttgccagaaatcacggtcagcaaaagcgggactaaaaggccaaaattttcagttttttgatgtcatggcaaaactatttttttacatataaaatgatgcattaagctgaaatatttatctttctaagaaaacactaactggcatttcactaagttggaaaattatgttgaaatttttgaagaaagcaaaaaagattgtgtattttgtgtaaatatgctcaagtgaactaactaccagataagcttggtaattatgaccacagtggccacgaccacgacaatttcaccaataaaaactgtgactaacaaacaaacagatttattaaccaacctaactggcgcagaatgaacaaaacgcttatcagtaagcca

SEQ ID NO: 1174 - DNA, 1504 bp, Heterodera glycines
gcagattggcgcgtcaattttcgcggtggctaaaatcatcggtcggtggttagggaccagaattcaaataggaatagctaacctcgtcgggcatctcaaatcaaataacaaataaaaaaaataccaaagaggttttctaaaattacaaacgtagaaattttatccgccttggagtgcagatactcggacactaaataagtacaaaaaattatcggtctcgaaaactaagaaagggcattcgaccggagaagtaattcgcagtggagccattaaaaaatattgtgttgaacgtggaaaatatcgttaaataaataaacggaaatattggttttttaaatacgttatctaatttttcctttaatttcctcaccattttgccgaatcaacacatctgaatagatataataacaacaaaattttccaatcgatcgacaattttcgattgtatggattttcgtgctctcttaaaatataagcaaaaaattcacatcatatattattagtattttaaattatatgtaagaaattagaattggacaaaaaaaaacccgcagcaaccgaaaaaataaaatggtcttttccgactctttcagcgcctgggagaaaacacgaaaaaaatgtgttgtattgtatttttttttttttttatttttgagcaatttgggatatgaaaaagcaataacattcaatttaagagcataatattttaagttcagcttcgaggaaaaggtcagttcaaattcgtaacatttaatctagttaaagaccgaatgtgattgatcgattggttcctttaaacagccgatcagctttgagaagatgagggcgggtcggcaacttctcaaagcgaggccataacaaataaaagaggaagaagctgttgtcccagaaaaaaagcctagtcaacagattgctataatttgtgtgtcataattagggagcgaattcataggtttatacacatgaaaaaggcacataattttccgatttttctcccctattttactatttttgcccttttttaccattttcgttcatattttacattttttttgtccctataaatcccgaaattgaaaattttcaccgctaagcatccgctccttagtcattccttacaatttatatatgtcatatttctatattttgccaaattttgagttatgtccacattttataaacatagtaaaaagttaactttcatacaattgctcttttgtgtcaaaaatagggcttaatattaaaatatttcatttttgttttcattttcccacgatattaataaatttcagtttatttttctatttaaaatgatttttatttttgagaaagaagaagatgctttcctaaaaagaagcttaattgattcatttaagcgacaattaaccttttttaagggtcggtagtcttcccaagctgattcgttattcaataaaaattaaaatcttttattgctttttagatagtttataagcaaacaatcaatggctttaatttaaattct

SEQ ID NO: 1175 - DNA, 2073 bp, Heterodera glycines
tttggtttgggctattgtaggttatcaaatttagaaagttttcaggaaagaaatcatagaaaaaatttttctaagaaaatttcaaaaaaaaaccttgaaaaatttttcagcgatatttttggaaaatttgaaaaaaaatggtaattcatccataaattttgaaaaaaaagtataaatatttttcaaataattttctttttgaagtttataaaatattttttaaacaatttttttttcttgaaatttcctttaaaaaaaaattttctacgatttttttcctgaaaaatttctgtttgaaaattttttcaattattttcgttgcgggggaacaatacgggggactctgtttataaaacagcaaactggtgggattttacagccaatcttacgatataaattagtggtcacaaatcccgaccaattcctttcaatcggcatcatttagccattcatttttaaaggaagtgtcaccgtatggccaatttaatgccgcaatgcatcacaacgacaatgcctacttttacaataccacatgcattgctgaatatgagggcaccgattcggctggtaaatgggcgaccaattaggggggggggataaagccatttggggggtggataaagccatttggggggggggataatgccatttgggggggggggataaagccatttggcggggggggggggataaagccatttctgttgaggagggcaattatttgcccgatttgatcattcttatgatgaagcatccctatttttaattaattttaaaacaatgcttttccttcctttagccgattattactccaaaattcaaaaaggctgcacggcggggagcaacattaacaacaattgcaacagtaatttcgctgttcatcaacaacagtcaacatttgatgcaaatctcagctatcaggccattcctaatcccgtaaatttaaaatgcaattgattttaaagggataggctcgtttcctttcccctccgaatttttttctcaattttcgaatttcgaatttttcaaaaaaaaaaatcttaaaaattttattataacaaaatttcaatatgaaaaatttagaaaaaattttcagcaattttttagaaaaattattgaaaaaaacttagtaattcatcataaaattgaaaaaatcgttagagaaattaaaaaaaaaatttcactaaaattttctagggatttttaaaaaagtttctgtttgaaaaatttttggttttaacgtggtgggggagtggtgacaggaagtggcgagaggggcagcaactctctcgtcggcttccgattgttttctcctctcttcttatccctcactctcggcctcctctttttctctcgcccgaccgttaatgggacagttccatgaacattttgcattaatttttataatattcaggcacttaaaaaaattaaacattttcacgaaaaatttcccaaggagcccccgctgaacaacggcgtgccctcctcctcaaccgtttcgctgcaacattatggcgttgcgtccacaacgccaaaccaattttgcatggacatggaccacttccatcaccattacccacagcaacaccaaactcacaatcagtcggcaagcagtccgtatgagacgaggagtgcatgttatgtgcaaacggtgggcaaaaagtcactaataaatgaccaaaaaagcaaagagaatgtttaaatggcatttgtaacggaagcgtacactaaattacggctaatgggctaattaacaaaatttttaactaaaaaattcttattttgtcaatcaattcatcaattaaaataaacaaaatgctcaaaattgaatcatcatatcaactatcaacagggatttagcattgtacctaaccgtaaattcttggtccttccatgtcccggtcccgagattttgatgaggccattttctggtgggacaacccgggaataaataaataataagcactggtaaaataggaccatgctttcaaagttttggtcacttccattcagacactcgtaaatatttgataattttgggatataataaattgattggatgatttgaaaata

SEQ ID NO: 1176 - DNA, 1897 bp, Heterodera glycines
agtaacggtctttgagcccttctcagcaacacatgtccctccacccgggtcaagccaaaccgccgtttcgtccgccgcgtagacatgtgtgtagctgaaaattagtcgtttgaaaaaaaatttctcatttacctacttatttttgtgtatgagttgttgaatatataatatgatgttgatgatgatgtttttgtatgcatcgggttctttttgcgctactgttgtcggtcgacgtaaggaaaatttatgatggtgcatgaatttttccagccatccattactagcctaagagaaaaatgttcaaaaatttttcgaaattttaccgcaaaattttcaatgtcttcgtaggcggcgctcattttgattgcttgcgcagcaatcatatttcgtgtcacccgcactttcttttgtcgcaattcagacacccactggaacacagcttcttcgaagttcctgtttggaactttccttccgcccccttccaaacgttttcgttttgacgattcggccctaaattaaacgaattaaaacattgtgacattacaggcatcttactctttcatcaaattcgcctcttgttttttccattcacggaccatttttcggtcgactccgaagtggcggctagcggcatgaatcgaagacttcatgccgaagtctagaatctcgactttctcttggattgaactgtgacaatgcttcgtcgttttgtttgctgcttggttctgttgaaacgacggcactcgcactttggtcaacgtcatcgtcgagccagcacagacagcaggtgacttttgagcagaatccctcttcgccgtcatgtgaaaatgagcatggcgctatcgcatggcaaggttttttgcacttccagcattggtgggcaccagaacaaggattgctgcagtagcagcaaaccttaagataggtaattttgaaaagaatttttaataggtaggtactttttttagtcgatgattcaggtaaggtttttgttgcgtccataattaattataaaatgatttgtatttggcacctgaaagttaaaaagcaacgtagtttttcgtaaagttgaataaaagaaggttctgaaaaaattgcattaatttgtagaaatgaagggttgaacaataaaagccccccccctcgattggaagccccccctcgaatataagccccctttggaggggggttgaacaatagaagccccggggcttataatcgaggaaatacggtaaatgatttattttgaattattgattaataaagtttttaatttattttttgctttcgatttaataggctctaatataaaaatggaaaataggctctaaaaagcccaaatttagggggtgtaaactaataaaatttattcaaaaaagtaaaaattaagccaaatcagtaatgaggtgcgtaattgtgaaaaccaaaaattctaataagaaaaataaataaattaattttttagatgcatttttgagaaaatttttcatttcttaggagtgaatttttgaaatttttgggttggtcgattcttagagggcatatatttttgacaaaaattgcctaacattataaaaaaaaatgagtaacgagggcgccaaattttattcccaactgatcaaatctaaaattaatgattcctaacaattgttgatcaaaggaaaccgattgtctgtcgaaaatagaattgagcaatgtctgatgttctccgatcttcagcagcagttcgtcacccttgtaccgcatgaagcgctcgaactgaaaacaaaaattatgttttaactaggaaatcgactgttgtccaacctgcttgctcaaaacgtggtgaaggtgttcgatgccttgttcactgatccaggcgaaccatccccagcgcttggcaaagtctggaccatgg

SEQ ID NO: 1177 - DNA, 2549 bp, Heterodera glycines
aaaaatattaaaagtaacaatattttaacaaaatgggggaaggaaaatgataatttttggctttttgtgtatcaaaggaatccaatatgcctatcaaaaatggaattgagcaatgtttggtgttctccgatcttcagaagcagttcatcgcccttgtaccgcttgaaccgatcagactaaaagagaaaaagatttgtaagctctagaaatttgattgccccacctgcttgttcaaaacgtggtgaaggtgttcgattccctgttcactgatccatgcgaaccatccccagcgcttggcaaagtctggaccatgggcgagaagccagtgtaattttggggtgaatccagcggcattgtttgtgtcgaatttagccggatgagtttcccaaagtttcttgaaaaggggaaaatgagaaaaacagaaaaaaagtatctttgccttgaaatagccatgaatggaggagcatttatttgagaaattgtcgatttgttcttgggtcatgaggtcagcacgtccaaaaatgtggagctcccgaatttcgtcaaggaggtcagcaatgtccatcgaaaacggtgttccgatcgatctgatttcggttgaggcgagaattaggcgcttcatttggtcacctgaaatcattttgaaaaaaaaggaaaaaagaaatatcaggaccagtgtattcttgtgtcttggcatgacgaattgctcccgattttgccattatttcttgtaatttgcgtttttctgctggggacccatttttttcaaaaaagtcaatgcatttacgtccggcgctgtgaagtgtgtgaaatggtgaaggaatcacatttgtcggtgccacgaaaaagagtggcaaggctttttgactgccacatgaaattgagtcccgagtagtgtgcttgcccgtgtctgctgttcggtaactgaaaattgcggcgccaccgacgatcgattttgctgtccttgtcccgatgatggtgttgcccagagctttgtatggaattcggcatagtgcacaagggaagacggaggctggtcccatgtgccccatccaagcgcatatgaaagccatgtcgccggtcagaaaccttaagaaagattgtgcaaaagaattaaaaaattataagaccattcaatcgtcaaatttcgatcaaatgacaaatccgcgatttgctcaagctgttccaagaccggacctaggcgcgcttccatttccgagcgggtctcgggtccctcccaaaacgcaagtaaagtcaaatttttgggcgaattgacgttggagagcaaatttccaatttggagggcaattttgactgatccacatcctcgatctccaacaatcgcaacaaacaacttttgttcaaattctttcagtcgtgctaaaatttttacttgtctgttttcgctatttgtcccaccgtggccccgtaatgtctccactcgtttggccaacactgcctattgttcgtacacaaaagagtgatcctgccctcgctgttcaccgcttcaaagcgggcatgtgttgtcagtcgtcgtcgcaggccattgacttcatgcgttgaagacaaaaaatccaaccctccggcacttttgtcgtcgcgcatgttgatcaaaatgtctttcagctgctgcctttgtcgccaactgaatcccaacatcagttggcctgatgacgggcctgatgcactattctgtcgatttcgggcactggagtacctaggaatgctccgctttattgtcaaaaataagaaagaaggaattgttcacctggtcggaaaagatgactgaggtcccgagctatttcctttgcgcgtgttgtccggctctgtcttgacaagtcctccaatgaactgactctcttggcctttttcgttgttgctccgtcggtcgcttttttagctggttcatctcttctgttctcttctgtagctggcgttccagtgtcgcaattcggcgtttcgtcctgtttctgtctgggtggcagtttcgacggtttctaaaaccgtttgggttgacttgactgttgctcgaaaatcggtgtccgttgtttggtcggtagttgttggacgcgtgcggacatggcgccttataggcgttgttgacagtggccgtggacttggccgttggcctcaaaaaatggaatttatctcaaaaattttgttttttggacttacgaggctcagcattgaatgtcgatggcattgtatctgttgatgttccctctcctgttgttaatggagcttctttagtttgcagttggcctgcaaaaattggattttttaattaaatgaatattttggtcaaaatgtcactactttttggtgttgaaccgccttttcttccacttttcctgcgccattccgaccgctttcgctttgcttcagtacttgaatttcccattttcttgaacttatcagttttactgcgtgtggataccatttttaactgtaaaagtgaaggaaatttattgaaatattcactcagttgaaaaaatttttctacagttgagaatttcttgaaattttgcatagtcccatattttaacccc

SEQ ID NO: 1178 - DNA, 1496 bp, Heterodera glycines
  unsure (1)..(1496): unsure at all n locations
tgtatttttcgtttttattgcatttttgtaaataatttntgggcaaaatgccaaaataagttttttcattttttttatttttaggctctaaaaataaaaacctagaaaatagacactaataactcgaaaattaacttaacaaccaccaaaaaaatatgggtttcgtgcatttaaggccacggggagctcaggaaaaaataggctaaaacctaaaaatatcaaccctaacgtcacccattttcctacattttttgggacattgatcatttgaaacggcccttcctctccaaaacccgcacatccatacttttgtcactttggctcatcacgtcattttatcatttttgaatttaattttattaaaatgtggtaaaaagcaaatacagtatctaattttgtaaggaatttagttagcctcacaagaaaaagcagagaaatgaaaggacaattaattcattgatcaattaaatgcttcttttcagcttcacttcatttgtttttctctaatacaacgcactcgaactaattgtaagcctaatgaatcaacagcaacaaaatttcgcacaacaattcttaaattaaaaaatttcaaaaagaaataaagtgtcattaaattttatattttaaatatttgttgtttctttacaatgcaaaattggattaagattgttgtcctatttaattaaacttttttgataggattgaactgacttcgttttgatccgctgtgtctttattatttacagcaaatggtacattgctggtcgttgagttgaccacgttcacctgctgcgggggtggcgcgctattcactccgctcaccgcggatggtcgcgcggggttcgcttcactaaccgccgatggcggcacgggttgcactccgctcaccgccgatggcggtggggggcatgcttcactcgcggcgggtggcggaggcggtgggaaattcggaggtggcggtggtgggaaattcggtggcggcggtggaggaaaatttggaggcggtggcggtggcaaaaccgctggcagcggtggcggcggaacagtctgtactggatcatctttacacccacacaatgtcacactttgttgacgcgtcatttgcatcggtggcggcacctaaatttaaaaaaattttaatttttttttgtaaccaaagtaaacagtgaaagaaggtatcatcagatttgacatgccatcaaaattatttattaccttatttgactgataaaatgggacaccctttggaggtcaacttgcctgtttgaatttaggctttattaaaatcatttttgctttttaatgggatgggacggttccagatccggtaaatattgatcacatgatccaggacccaaaatggccaaaatatataagtattaatcgatagctctcgatctgtgatggaagaattcgaaatcatttttgggtctgtaactcttcagggattggttgccgcaaaaaaattctttcggattcttccattacagaacgag

SEQ ID NO: 1179 - DNA, 1949 bp, Heterodera glycines
tttatatttccgttatttttaaatttttgtatgttttatgcaattcatttaatccttgtgatattcgctttatctgtgaacaataagttttttctatgtttttttattaccatcatttgcggacttggaagcgatcgagctgaatttgcccttggcaatgctccaattgctaaggcacccgctccaagcgtggtcaaagttcgggctaaggtgggcccagcagtgccaccagcagaagtgccattttctaaaaataattctggaaaataatttgaggtgccaaaagcagcgtgccgttagtagtcaatatttccaaaggtttttttgacacgacaaatttatctaaaattttgcatattggtaggaaaaggttggactacgaattcagaaaaacgtaaactttgcatacctatatatgaattcttataagcaaaatatgttcaaataaattaagaaatggcactcgatacttcttaaatattatttgtttgggccacctttttgttcactgtttggtggtcgtcggcgccgaacttttgtgatttgctcctttctttggctccttccaccagcagttggagaattgttttgctcatttaatgcttaaaaagaaaatttacattaaaaaagaaattaaaattcatttaatttttttttgtgaaataaattcactttttagagataatttaaatgttttatcattttaaatttaatttttaaaattttgcttaaaactaacgcattccatcagctgatggcattgggtagagaacaaggcacagtccaagaatgaaaagcagggcgacattataaattaaattcattttctctttaattaatttcaaattttttttagcagaaaaaagtgggaaaattttaaataaaataaattaaattccggttaaatacaataataaaagtggtttttatgaatttatatgccaaaatatgctaaaaaacaaataaatacccatcatatttacaaaaacaagaaaatatcaatcaatttccggctaaaagaattcgtaggcaatcattatcaattaaatgctcgcaaatattgccacaaaatttgcatcaattttcaactaagaaattatgaatcaaagttttcttttgttacttctcatgcttcggtgatccaatcggcgggttaaactttttaccataatattcttttgcgataaatattaagaaatatacaaaaatccaaagtgttgaaggaaaaaaaataaacatgttttcatgaaaaactggaacaaaaggtttttcttgaaccggatcgatccgggttccggatcagagactatttgtgccccgaattgggtctggtaggcctccggaaaatgtgccacgaaaattttacaaatttgcgtcttgaattcgaattaccgttttatacgaagcctaacaatcaattaagattgaaaagttagctcatttattaattgtgtttgcatatattagtttctgtcgttcttcacttcccttctatgtaatattggtcatttgtaaaattatattctatcgatttttttacaaattcttataaaaaaatttcattttttctttcaataaaaataataataaagcattaataatttccgttgttatgttccttctattatttttatttctttttcgcaattcttatgcctttgttgcgcaacaccaaaggcaaaacgaatgtgaaaaattatttgcagggattaaaggtatttacatatttatttatcaaaaagaaaaacaaatacattcttcctaccttagatcagccaatattcgtcggcggaatgaaagaaaatttcgagtatttgttttttttttgaataaaaactagagtgccacgggaccgggaatttttgccaaaaccgggaccgggacttgctaagctaatttgtggcgctgatcacgaatatgacctttgtttttcaaattccgaacccgaa

SEQ ID NO: 1180 - DNA, 1394 bp, Heterodera glycines
  unsure (1)..(1394): unsure at all n locations
tcataaaaacaagttccttgcgttttcgggggcacagaccatgaatccggtatccatttcggccaaatccgaaccccagacccgaattcgaacaaaaacttgaaagtcccaattttcgaatttagcatttttgggtcaaaacggcatacatgatctattattgaaagactgatggcttttagtttgtttccgtgtatttaaactaattttgaagaaaaacgctaatttcgaaattttgacttttcgattttttgttcgagttcgggtccggcgttcggaatgcagaacgatgttcttatagaagtttatttctatattacaatacaaatgccatacaactttattaaagtattttttatcactgacgcattttctactgacgcattttccactgacgcattttctactgacgcattttccactgacgcattttccactcacgattttccggtcacgcctactggccgccgtagtcgagtgtgcggcggttttttagcgcaataagctaaattcaattggatcgaattcgggttcggaattttgaaaaacaaaggtcatattcgtgatcagcgccacaaattagcctagaaaattatttcatatgtcttttgagtgctcttcatagtgcggtcaattgagtcccagctgagtttggcactccaatttcggcactttttcagcctgaaaaagagcaagcgcgcccctaattatatttttccaacccatttcgatcatttttacatcgattctgaccgtttttaagcatttttgagtttggggactatgaacaatattttcctttttttaaaatatcattcgatagccataagtgttgtatattagtctaaaaaaatcaaaaaattgtatgtttgaaaaagttatggccaaagtacacctaattagcgaaaagtcatttttagagatgaaagccgaacaattcgataaagattattcaaatttgctcgaaatggctttgtccaaaaatgaatattcaatgaaagaaaattatgaaaacgaaaaattaaaaatagaaaattcaatttttaaaacatatattgtgcaatttttagaatcagtcgaaatgaacgaattaaatgacttccaagagaaaattttcattgaaaaaatagaccaatttaatgaaaaaatcagcaaactttcacattctgtagaaaacaattgcaaagtgtggaaattttggcgtgaaattggtaacaaaagtgtccattttaaagtttaaatgccaaagaaattaaattttcgtataaaattctttaaaaatttaagcctcactaaatttggcaatgattagcaatttgtttgaaccacttgataaaattgacctgaatgaaatcgaatgcactgaaantgaaaagaatttgcaaaaaaatgaa

SEQ ID NO: 1181 - DNA, 1675 bp, Heterodera glycines
ttttaaaccaattttggtaattttttttcagaattgattggaaatttttcattgaaaaattgcttaaattttagttttttggagtatttttaatcccgaaattccgtgcggaaaatttgtattttaaagctttttctacaaaaaaacaaattctcagcaccctagtggtgagtaacaaagatttctgcctattttggtcttaatttttgtttgttttttttgtactttttatattcattttaatctttaaagattttatgccatttgaatatcatgcatatttattacagcttaatttaaaactaatttttgttaaaaaacatttaattttaatttatttattttttgtaatagacattgttgatgatgagcagcttgctttggactacacgaaaatgttttcaaaaaatccaacaaatgccaaaacagcggagatagtcatttcattgcgtctaacttttgcaaaaataattaaaaatttcttggccgtttattcctattataatttgcagcttccaaaaaagtccaaagtgtcaaagaaagctgcaaaatttgttgccaaagtggcggaaatttgggaattggaattttgggccattgttttaattcgaattgccaccaaagacagcggagctttggtcatgctttatgacgctctttatgtgctgtcagtgatgctaacattgggcaaaaatggggaatacattaccaaaatgccaacggaactttcgccgcgttcggctgaacggcttttggcggactgtgaaagtacaattcgggcccaattttatgaggaacatacagcaaatatgctaagattttacgagaatggcatgttggcccacgacggtggcaattcgttcagcaactttttggccaagtgccaattggacgggtgcgaccacaaattccgagtgcgcattttttatgctaacggcgagaaaatggcaaatgatcattatgacaaaatggttaccaaatacccaaaactgaagcaaatgctacgcattggttcgtatttttaagattttttctttttttttcttcaactgttctaataaatttttataaatcccggcgacgataaaaatcattaaaaatgaaaaatgttttttttggggtaaaaattttagttttaaaagatttatttattttgaaaaaatgcaacttttcttttcctgtagtttatgagcaggtttgccagatctgaggatttatcctcattttgtggctttttgataggtcaatgaggatttttttggaaaatgagaatttgaggatgtttgttgctttttgagaaattttgaggatttttgaggcttttggggaaaatcctcagaatcttttaaattttgataaattggcataatgtttggcaatttaaaaattttttttaatgaaaatacgcaaaaaatatggtcaaaattcttaatttttcccccggcggcgcctatcggcaccgccggaccgtaaaaatccttaatttacaagcaaaaatttgctcaaaatcgcaaaatttggtcatttttcggacaaaatctgttaacaaatcgcattgaaaattacaaaatttcccccggcggcgcctatcggcatcgctggcccccccctgcgccccaaaagttttttgggaaaagcgccgcaaaaaatcaacttcgtttttcatgttcagaat

SEQ ID NO: 1182 - DNA, 4479 bp, Heterodera glycines
ctgcttctgctgataatggtggaaaacgtgaacagtcgtcaatcgtttggccgagttggaaattttaatgaacggtgccatggaagcaattccaatgaaggagattgaccaaaacgaacaccgtttactctccgatttatttgaaaagaaaaatgaacttttcggcgaaaaaattgcgccaaaatattcaaaaaatccatgtgacagggaaaagcatttgaagtttttgtttaatttgcacgaaatcgcaatgaacaaactaatggaggtaaaagatgcatttacgaaacgattggaaggtaaaaaaaagtttatattaaatttagtcaatgaccgaattttttttaaataaataaaataataaaaataattttggagcctatgaaagtaggcatcattttttataagaaggctatttttctgtggctttattatgctaaatttgtagataattaaataaaaaacgtctccgaaagatcgatcgttcaaattttcataaattttttcaccgtaaatattgaattccatcaaaataaaaaaatgttttcaaacacttcagaatccttcccatgaaattcggtttttcgcaacaaaaatatttaaaatttttacccgataaatttcgttttcttagtttttgggttaaatattatattgattaatttaaaacgaattatgcttgaatgataaaaataaacacaacaaaactcagacattcaaattgataaaagccgacttgaacaaataatttgtgatgattcaaaagtatttcaacatttgttgctgaattataattttatttttgatgcgttgccaaaaaataaaaattcgaaacattttggacgaaatttacatttaaatgccaacatttctgagcaaaacacatcatcatcaaattcaccaccatcgtccttattatcatcaccatttacaacgcaattaacagctgaaaatggtatatttaacagaagcccaaaaagcatttatagaggctttcatttaaatgaaaaacatttaagtaaaaattttttctgtaaatttcgcaatttgtttaaaaaaaaattaactttaacaaattggggcgaataaaaaaaagtcttaagatttcctatccataatttcccaaatgactgctattttgtatttagaaggtgcgagactgtcggattttgataagcagctaatgcgttcgtatgaggccattatggtggacggaatggcaatggcgggagaaagtgccaaaaaacaaattggcatcaatgcgttgtatttccatcataaaacgatcatttttggactgatcagggaaattggagaggacaaaaagaaactggaaaaatttggcaacgaattggccaagttaaaagtgaaagtggccgagttgaagctgagttcactgccgagcgatgacgacgaaaaaaggcggcgaatttgttggatgaaaatctttttgaaatggtttatgggcaaagtagcagaaaaaaaggaacgcacaccgacgggactgatcagcgtacgctttttagggaataaaatttaaattagagaccggaaatttcaaatttacggatctatgcgcgggattggaactcaaaactttttgtgggggacgggatctcgctgaattaatcccgcaaaaagttcgcatttttacgatagcctgtacgggatttttaataaaatttctcctactggggtaacctttttaaccagggttgccagatctgaggatttatcctcattttgtggctttttgataggtcaatgaggatttttttttggaaaatgaggatttgaggatttttgtggctttttgagaaattttgaggatttttgaggcttttggggaaaatcctcagaagcttttaaattttgataaattggcataatgtttggtaattatttaatttgaattttggtttttaatagagtatcaaacggaaatctcacccaaatttagccagaaaattacaatttttttcgaaaatccacaaaattatgaatttttatgcatttaattattcttcacgcctctttcaaaaaatctctacctggaaacctttttaagattttctccgattgcctagcaaatttggcgcaaaaatgactaaatttcgctctttattgataatcttttaaaaacaattttttttgagagatttttcaattctttgccattttcacgtcttgcccattgtaagttctgaccatagtttgattttcattaactccaaaaactcgaagggcattttgtccagaaacgagaagtcagaagcattttctggcttcctgctacgcctttggcacagacagcaaagcctttttctgtacgggaaatccaaattttaaacgttctaaaaatgaaaaatatttaaatttaaatatgtatttagaaattgcaaatggaatttgaagatttggatgaaaatgactgcaaagatgcgcgttacctgcagtcatattttgatgtcctattgtccagtgctaattacacattgacagttaatgttttttcagtcatgcaactcttggaccattctccacaatttgtgcaatttgtcaacgacaattgcatccaatttggagcgattggcgccaatgaaaactgtataaattatattttaaaatatatttaattcttagttttctaaatcgtgaccggaaaatgcgtcagtagaaaatgcgtcagtggaattaaaataaagttcggtaaatatggttcatagggcccagactcaaaattaaacaaatgatatatcaatcgatagctctcggtctgtaatggaagaatccgaaagaatttttggcaggaaccaatcaataccatccctggcgagttacagacccgggactgaagtggcaaaatggctttgggactgaaccgtccactgacctaaaacgcatggaacaaacaaattagataccaatcgattcccctcggcatgtaaagcatgaatccgagaatttttggacaaaagagaaattgacaaaagttatgggtgctcaaaagccccaaatgagcttaatataaaaaataatttagttgaattaaaaaacagcttctggatacagattcgtgatcagtgacctataaaacccaatgaatttgtttttatgacattaaaattttcactgacgcattttccgggtgctttctcaattgcttgatttaggccgggtattcagaggaaaatgccggggcgttggcgccgcagttggataattttgtttttgggggatcaccggcataaaataaattaagcaactgagcacagatttcactttctttacaaaagaaaattccctccgcccacaataaaatgccaaaataatttaaattgtatttttttcacagcttcgttgcacgaagaagaaatattcaatttgtacatcacttattttgaaacgaatgacattgagaaaatgcacaaatacgaagcgattattggcctaaaatttatgttaaacaatgtccgactaattgaagcggaattgataccgaaactaaaaaaagagggggatgaaaaagcgcaaatggccaaattccgtgccgaaatgttggcaatgctcaaaatgtttgacttttgcatggaaagtgtggaccaattgattcgcatgagttgcccgctgattgaatacaaggcactgttttccaaattttatctcaaaagtgccgcggcaccgttggccgaatggcaaccgccgtttgactgtttgacaaaatcattcggccaaattttaagcgattttcgcaacagtgtggcgagccaacattttcaattcatgcaaatggcattgaacaaagacagaaaaggaaaattggcacagattttgagggaaaaggaggacacatttatgagattggagaatttgattggcgaagaaatgttcaaatacctttggaacaaaagcgaaaacagacaaaaactgttcaaccaaaaatgtatgttcaagactcgttaattttaggctaggatttcgggttcgggtcgaaaaaagcaaactcagtttttttatcgtgtcaacaaataattccgatagaaaaaattgctatattggttgcactgaaatgacgacaactttttgaagattgtggataaatattttcaaaattttaagtttaggtattctttaatctattttgatacaaattttattaaatattttaacttttttgcaaaatattaacttttatttaaaagaaattttgaattttaaaaccgagatggtcggggtaccctggccgggaattccctgttttttaggttctggtagggccgtgatgaactgggaaaataaagcagtgataaaattaaaccgaactgaattttttacatcttagaaaaattaatcccggttaaaaaatgaattctcgactttttggtcccgaaattcccggtcccagcaaaaatttattaattggaattttgcatttttcgcacccccaactaaattttaattaagtctttgacgacaaaa

SEQ ID NO: 1183 - DNA, 2931 bp, Heterodera glycines
  unsure (1)..(2931): unsure at all n locations
tttttttttttttttgcagccgttttcttcactttggccggcttgcgncagatgaaattggggcggacggcaacaccgggcgtacaaaaaggacttngccgcttaccgcgcaaagcgaatgccaatcattccgttcctctgctgatgaatggaagattatgatagggatatgataatgatgatcagatttgatgtggggttcttggcgtttgtgttgtctctgattgaatggttggtgatcggctaatttgaaaattgattgaatcagcagccgaatgatcggtccaacgaaatttaatgtttttttttcgtttttgccatagaaaaacttcttaattctcgatattacaatacactgactactactgcttgttgatggtgatttatcctcatttgaacacttttccagaggcatataattaattaaatttgtattttttcaaaaaattattttgaatgtcatttttgtgatcactttgatcaatgttgaccttgaaatgctccggaaaaccgcttttttcataaattattctcaaaaatgatggagtaaaccatcagcatttctaccattctctacaccgtaattacccaataaattaattaattgtccacgccaatttccttctctctaaattattattattattatttttgttgatcagtttagcattgtcacaccaccacaaattgccgctgtttgttgccatttaaaaaacaaaaaatatgcacttcatttcacttatcaaaatatacctattatgccttggccatgttaaatgcatatcacacttataataagtttgacctttgccagcaaaaccggtttatcaaaattagttaacttaaattagattttttgtttttcgaaactttccaaaagtttaaaaatcttttaaattcgaccggttttgtacgaccaccactttaatgacgtatttccccatttatttatcattttttcgaaataaattactaggatgatttaggcaacacatacgccccaattatgcatgaattgttggcattgaaaacactgaagatcacgggcggccattttggctatgccaaattttttggtttaattcgtaatcccggcaaatcaccgcgggttcctttccggcggtggtctgtccgcggtatgctctcgagaggaatcctttgaaaaatataatttgataataaaagtatcataaattgaccgttttcttccataatgtttccgttttaacctacctacataaaatatttttaaaatgttgaaattaataatacagtttcctcgcattattgtaaggggtgtacggttgagtccagcagcagcagcagcagcaaacaattgggcacttcagcagcaggctcggcaccataactcttctccacaaaattggcgcctcaccccaaatatggtaccaccaccaaccattccaatcagtctctctctctgatcaagatcagagcagattttggcacgggaaaattttccttcgcgaaaaacttgcaattttcctcggaaaattctcgcttaatgaataaacagtgaacatcagggatgtgccgagccagacaaaatccgattccgattaaatcgccgattccgattatggccaaaaatccgatacggttttaaaaccgattacgattatggcccaaaatccgattaattgcgattccgattacgattccgatttttttaaaataattttttcccaaaaattttattcataatcaaaatcataaaaataaaagtttgtccacattctgaggcaataaacgttttctcagatctgtcacaatcaacccagcggtggagaaaagccgttcgctttcagtcaatgtagctggggctgagaaatatttttttgatagcttagattcggaaacgaaatgtcttctgcatacagaagcccaacaactgttttgttttgcaaaaaacgatcaagcatttggaaggtggatgaccaacgcacctgataggaaaattgcaacttagtaataattcattcatggttcttttctgctttaatgtcccaacaaattttttcttcaaatttcgacttttggttcgaattcgggtccgggattcaaaaataggtgaattggctgccatgttcttaaactgacaccattaacaacccttcaaagactttgacatttttgctaaataacaaaaaacttgattatatcggggagaattaatccggcactgctttgtgagaaaaatttaatttcagtcattatgttaaaataagattaaaagattcgtttcagaaaacatttttttcaaaattcattggtattctcgctaaaaaaattccttcaaaggtcaattcttaggggtgtaataatcggatttcaaggcaaaatccgattacgattatccgattccgattatggcccaaaatccgattaattgcgattccgattacgattacgattccgattcggcacatccctgattggtagcattgaagaaaagatattagcatcagattgaattctgttttttcaattaaaaaataaagagatagtacgccaaacagagataaattacaaagaaaaagagaaacgacgagatagtactaggcttttctctgcacagtggggcgtacccataatcgactaaaaaacgctaaatatgtgcataaaatatggactaaaaatgcttgaaatatggaccaaaaagctcaaaaatggccaaatatggactaaaaactgtcaaaatatatgttttaaatcatcaaaatgccaaaaaaggtttatatttcaatatttgcttaaataaacttaaaaaatacaataaacaactaaaaaatggatttaaaattaaaaatgcaaaatttttttgtcgttgtataaaaaaaacacctccaagtttgtcaattttaaaaaaatttgttaaaaaaagaaaagttcgcaaaaaatggtgaaaat

SEQ ID NO: 1184 - DNA, 4686 bp, Heterodera glycines
acttataattagagaaataatttctgtgttttcccatttccggagaaaatttatgaaaaatattctcatgagatttttaatatattttatgaaatatatgtttttttgaaatttttataaaatcctctggagattattaattattttataatttttaattatttgactgacggggagagaaaaacagtttaacacactctctctctctcattgattgagtgaggcgatcgtttgatgattaaattttgttgtaaaagccaaaattggccgcaatcttcagtcttttcttaatcatttctttacttactttactgataaataattaaataatatttatgattttaaatttaaataatttttttcaaaatttatttaaaaggaaaaaatggacccggaaaaggcacgacagcacattcctgagccggcaattttcacttatgcatccaaagatgccattctctacgccttaggaagtgagcaattaagaaaagtgccgccggcaaaattaaaaaaaaaattttgggtggtctaagtttggaaataaaaattttaaaaaattttgaggcctactcaccaaaatttaattatctttttatccgccgagttcaattttttagttggtgccaacactaccgaggatttgcactatgtttatgagggtaataaaagaaatttaaaaaatatatataaataataataatttatacgcaaagcgtgacgccgccaaaataaaaacaacaataagataaagcaaaatggtcacatatgagagtggttcataaatgtgtaaaacgaaccaaatcaattgagtcaagaagtttagaaaaaaacagttgaattttgtaacctaacttctttaggtaataacctatagaagcgagaagcacgaacaaaaaatgaatggtatctaacattagttgagcaaaaagttggcttaattaaattacccagtctactagaaaaattgggttgaggtttattatattaaatttttcatttttcccgtccaggccatcccgactttcaagtgtttccaacctttgctgttgtgcctgggatggtggccgtttcattggtcagtttttaaaggccaatgtaatagaaattgatctgttggccaatcgaagaaagtgccaaaagcatttttggaatgcgtcatctgattcattattcatttcctttcatggtctgatcagtgatcagaaaattgatcagaaatcatcgttcggcattctgccggatttggtgacccataaaacaggggtttttggcaccaaaatcagccgatcccacagccaaagtaatcacaaggaatttaagaaaattggcattttgccggattttgagaccaagaaaatttgggatttttggcaccgaaatctccgctcccccagccaaatccattctgtcccaaaattttgatcatctctacgcatctagaaggttaaaactgatcacacatcgatttaagtcggattggcctggcattcaatttgatctgagccgggtgcttcacggcgaacaatacattgaactgtacgcaccgtttccggccgacggtgcgcgactgcgctccgaaatccgtgttgccgacctgttggacaagggggcgaacgcagtgatcatctccgagggtacaacaacaaaaacaaaatgcgcaggggatcatcaatcatctttaattttatcggagaaaaatgatcaaattgctggactaaccgatggatttggacccaaaatccttccgggatgggatcccatttacataatcgccgcatatgatctattatcattaaactgtggaggattaatctaggaatgcgagatcactgatgggtcggggctgaaattgtgggattactatgattaatcctgcatttatatgcctaatgagacatttgaaaaatacaaaaaattcactatcgttaattaaaaaataattaaaaattaatcattttcaagtgacaacattcgacgatcagtctggcgaaaagctttgctttcaacaggcaagttgttgtcaataataaatttttttaaaatataataatgaaattttcagtttggcatttttcaaggcggcgccggccggctttggcgtaattttttgaattttgcattaattatttattatcattaattaggtaattaattatctccccccccccccccccgttttctttagggcattcgaacttcgccgtccgagcgcaaagtgccgccggtgccgcaggggcgtgagccggacgcggtgttggagcagcgtacgctgccggatcaagtcgcgccgaccccttagagctgtctaaattattattttccaacaggctgccctttaccgacttggctcaggcgacctgaacccattgcacatcgatgccgactttgccaagctggccggctttccacgtccgatcctccatggtagtgtacggtgtctcaaaatccaacccttcgttcgacccggcccgacttttttctcgaccaagaaacccaatccgttttttttttcgtttgattcgtcccgatatgttgatcgagtaaaacttacagagaatcatggcttgacctcaagacaagacctatgtcacaaaaaaaaagattcgagactttgctcgaatacgaaacagagactcttgaacagcgaaaatgcctgtgccactcaattatcagtcatgccatgataggctaatgttctaaaaaattaaattttcattaaaaaactacaaaaatttcaaacacacacttcttgagagaacacatttaaggtctgtgctcacttggcatttcgtgccgactcattctccgagcatttggtcgtaatttggcacaaaatttgcactccgtcaaggtgcgcttctcggcacctgttgtgccgggccaaacactggtggtggagatgtggcaacagcacgaggacaacgacaacaatggcactgcccccaaaaaagtgctcttccagaccaaagtgaaggagactggcaaggtgggcaccactatttatttatttgaaataaataattaaattttaaacatgatttttcatatatatatatatatatatatatatatatatataatatatatatatatatatatatatattattaggttttctcatagttctgagccccttggattaaaaaaattggcgctaagattgtgttgtccaacggttgtgtggagttgcgcgagttgcgcatcagcgacaatttggtggtgccaaaaagtgtcggtgaaaatgccacaattggccaagtgccaaacgcgctcaaatcggccgaactctttcgcgcaattggtgccgaactgcaaaaaaacagtggccaactaaagagtgttgaagacgcactgatcctttacgagatcaccagcaaagggcaggtggtcggcaagtacagtaagttttttttggttgtttttaatcttacggtatactgtaatttttgaacacaaaattcgaaatttttaaatttgtttttctgaaaattaatggcatttcgccaagtttaagaatatttttaaaagcagaaattccaaagcctggcaggctccgcttgtgaaaatttttccaatttttttatgaaattgagaaatattacaaaaatcattttacttacaaaattctaaaattctgaaaaatcaaataacacaataatacattaagctgttgaactgaaggcgggcaaagggcacgtgtacgaaggtgagccgcgtgatggacaaaaagcggctgcaactgtacgtgttgacgacgacgattttgccaagttggtcggcggacaattggacggcactcgggtgagagagagcaagcacacaattaaatattttaattatcaaatatatttaattatggattatttatgctgcttgctattaattaatctatggcacaaaaataaaatttgccagtttttcatttgaatatttttccactaaaaagaaggaagttttaatgaaaagccctgttttaaaaatcaatcacggaaaaagttcttgagttagagaaaaaagccagtatcagtaccaaaagttcccgtccgggctctaaaaagaatttagatttttccaactatttacattttgtgctgtaagcgtactccccaacaatagtgatgctcgagaccaaaaatttcccgagactcgacaccgagaccgagaccgaaaaccccgagaccgagacccaaaaaacccgagactcgagacttttttcaaaaaattttcctattcgcttaaaaaccgtttaaaaaatttttttgactctattcttaaataatttttgtttttttattttgattcaatttgctacaatatttatcatttcaaaaatgaccaaatgttattactagggctgtgaattttagtgacgaaaaatcccaaaatagttaactaaaatagtgagtaaaaatgccaaaatagtgaagaaatagtgacaaaaagtccgaaatagtgacgaatagtgacataattttcagccaaaaattgagcaaaactaatttttattcactatttgcagttgcaaatgagttggactgggatttttaagaccaaaaaacccaaaatagttacctaaaaaaattttttaaattaaaaatttttgccaagaaagtaaatttttgagaaaatttttttttgatttcataggagtatattttgaaaaattttagctcgattcttaggggt

SEQ ID NO: 1185 - DNA, 3671 bp, Heterodera glycines
  unsure (1)..(3671): unsure at all n locations
gaccgatagtgacatcagaatcgaaaatttttaatgcagaaatgcgttttttgagctcctttcttcaaatcaatcgagcaaaaaatttagttaaaacctaaaattcacagccctagttattactagggatcggattcttagttttttaactattttttctgcggctttaactcgacgagaaatgcacgaaaaacacattctttttcgaaaatttttcgtttttagtgccactattcatcactaggaatcactattttggagcttcgccactaaaaaaaactatttcggaagttagccactaaaataattttttgccactattttggcattttttggaaaatttcccaaaaaatgcaataaaaacgaaaaatacaccccaagaatcgacctaaaaaattttcaaaaatacacccctaagaatcgacctaaaaattttcaaaaatacacccctaagaattggaaaaatttcacaaaaattcttcccccaaatttttttttcttgttcaatattttctaagaaaatattttgtaactgcaatcagtgaataaaatctttttccttaattttaaattattttcaaattaaaaaacagctatttaaaaaattacacccctaaatttggaactttttcgccactatttttgccactattttggaatttttttctcactatttagttaattattttgggattttttatcactaaaaatccgatccctagttattactttgagacagcactaataattgcactatgtatattttgcacattttaactgctggttttttgcaaatttaattgcgcataatttttcaatataattatatttcaaatacatacatactatgatgataggtaatacaaattttgattgaattttcacaaatttaaccttcatcgttctgctgctgaccttgaaatttataaatgaaaattttgtaattttggtttgatttttcttttttctggcaaaattttcaatttctacccgcaccaacctattgtataaaaaaaaatacatatattatcggcacagctgaatggcaccaatgctaatgtcgaggatgatgatcatacggcacgggagaacgacggcgacggcgacggccaaaagtttggcggactgttcggctggttgtggctgttgctggagatgatgacgggcgtgcagttgcgctttcggcaactgttgctgcaaccaccaccacgaccacctccagcagcggaagattgatcaggaaatgcgctttttgctcaatgccaatgccttccggggaatttaatccccctttaaaaaattttaaaaaaatttggcaaaagttgtccctctcatcagaaacatatgcccttgctgattcgatcgtttttttgttgttttgaatagtcaattttcatttataaaaattgcctcatgccattcccatagctctaccgtaatattttaaaatattttatcgtagcccaatgactactgtgattttttttcaaatcagttctagattctttcaagatttctatatgttgttgttgaatgctttatatagtcagaataaactgttttcgcatttttggttgcttttccaatgcctttgatcattttagaccttccgctggtcaataatcattccctgatcagtgagtgattatcccccacaattatccattaattgattgcttttttttcatactgatccatccattatcccccctaaatttcttcccattttaaggcgtttctcagcggtcggcttaaagtgcagggcaaattggcactgttgcagcgcatcgatgcagtgttacgcaaaactcgcaatgctcagcgcagtaaactctgaattcgacgacccgtttaacggggctaatggggcgcgacttttttgatttatttttgtaattcatgtccaaaatgtgatttggattctggatatgcttcacttatcagcagaggaatcggtcgctaattctgatgattgataaaaaaaaactgaggagatccatatgccattgggaaatggctggataacaaaattatccatgagcttaaaacgacgaagctcaaatccatgggccaaaatgtgcccccagggcagggccaaaacgacggggctcaaatccatgggccaaaatgtgcccccagggcagggccaaaacgacggggctcaaaattacttagaactcaaatataccccagagccaatttggcggaaatctcaaacttatccatgacctcaaaacggcggggctcaaaataactgttagctcataatttttatttaagccaatgtttggttttttcctttaaaaacattgctttagaaagtcaatttttcctttgttttgatgaatgagtgagtgagtgatgcccgtctcgactttggcacatttgcagggccctcccctgactgattggcactcctcggcatttttacgattttctttaatccaattttgggacctgccggccatgcatccacgacccttcttttcgcttgtattcattcattcattgtttttatgaccttttagcctcacttctaacacattacttatccctcagctagctgccaacaaatatataaatttgagcatttttaaataattaaaaaatatttttaattcttttttgtttaaattttagaattttactaattttcatgtgtctaaaaacttaaaaatttacaatgttcgcatcaaaatcctttttaaaaaaacaccaatttatttacaaacatttcctnagcgttgcacgaaaattgtatacacagaaagtgccaaacttttcatttatgattcatattttaattnttcttgcacttttcncaatttttgaattaggaatttttcacataaattttttgcacttttaaaatccgtccaaacaaataaaatggtactccatttgtttttggtgccacattcgataaaagcttctgcaagccaacagatattagcttagttgctttttgcctccttcttctctgtctatccgtccgttggattttttggatgggcccacggaaaatggatttgcccctagggaatttttagctttcgccgcacggcacaaaaatttgcgttggcacagttcaaagaaaagtgtgtgccattgaatgcaatcgacacgaacattcaaacggaaattttttgcttaatatattgctttttataagtaattaaaattttgatttcgatttcgatttttttggcgaatttatttcaaaaaaaattggcaattgtgccagatttttgattttgtatccaaatttcattttggcacattgttttaaccgagttgctttattcatccagtttttgaataattaaaaaagcgtgaagcatgtctatgaatgagaagggcatatgattacgcttcatgtgccttatttgtgccccacataaatctgtcaaaaaaataaattttgtgccggaaatgaaatgggagaatggcatttttagtcaaataagccatcgaaaaacagacaatgtcataaaaatttattgaaatattgtgaaattaaaaataatttttgtgagccgaaaatgaaatgggagaatggcatttttagtcaaataagccatcgaaaaactgacaaagccaaaaaatttttttatccttttttcgagtgagagaatttaaatttacaaatttttaactaaaaaaanttattt

SEQ ID NO: 1186 - DNA, 5838 bp, Heterodera glycines
  unsure (1)..(5838): unsure at all n locations
tgaatggttaatgcggtaatgggaggtggtcattgttgtgccaggttggccttggccagtgctttcacgcttattttgtcttccatgattcattcggtaaagactgattgggccaaatgcctaaaaatattaacccgaaatttttgaaattttgaaaggcccaaaaaattaaagaggatttttaacctgtgaaatttttttttgggaaatcatgaattcctggtccccaagaaactcaaatttacctaaatatggccaaacccttgaaaatttgttggccatgttttccgcctaattgcccccccccccctataaggttggtgccgtacatggtcaccatttcctgcgcaaaacggcacaacagaagcagacggaggatgccgagctggaggaggagttggacttggacgaggaggaaaaccgttttggcacggcaaattcggtgccatagttaaataaagcatatttaattgctttaaaattttatttttctatttatttaaaaatataaattttatatttttatttatttagcgtcaaaattaggaccgcccaatatttttattattttcagaatttttttttaattgagaacgaaatttttttccaagtaaatgctaagtaatttgattaaagatttgggcgttcgaaattccatgccatccctgctggtgtgtaatatgaatggttttccttaaaaaccagatcagggtcattttggcacggcattttacacgtccaatgagtttatacgggttccgtttttttggcgaaaatatttacaaaaatcgccattttattgggtttttgaaaattagggtttgacctcctcccctgaattagaaccccccccccccccctctcagaattctttcaaaaaaattttgctaaatgattggatatagggcgacaaattggattgaataattaatttaatttgaataatagactgatcggaattgggggaaaatggtttaactgatcgacggggattcgaatttccattatttcacttcttcttctcccattctttcgacatcccacttaaataatgctcttccttccttaaaactcgttcacttcaatcacggtttaagccgatccaaaatggcgccacggaaaagcggcaaaatgccttaaaaatgcaaattaaaaattttttttttgtttccaaaaaatgatcaccgatgattagtccaatcactatcaatggcattccaacaccgtggcaactgctcgcgttcttggctaattatgtaaattaaaattgttaataagtaaatatttaaaatttaaattctaggtccttgaaaatgggtgtatccttcaaaaaccgggttcaaatttcaacactggaactcttaacctttcggcttgctattaaatatatttaattttaaataaattctgggtccttgaaaatttgtgtgtatgcccttgaaaaaccgggttcatagtttcagctttggcattctgtctgtacctttcttttgcttcaccaccggcggtgccggtgccacaaactgttcattgtccatgctcttgtccttggccccaaaatggcacgtgcatttccaatcggtggcggtcggggcacgcattttggttgtagcttcaacatcggcacgaatttgattggcaccgtcaggaccttccttttcacattttgctttgttttctggaccaaaaggggaacaagcccacatgttcaagaaaaatccatctgaaaatgtaaaaaaaaaataattaaaatttttaaattttttaaaaaaacttctgaataaattttttctttaatttaatagtcaattaaaattttaaaaatatattaaattttgataattttgttcacaaaattttaattttttttaagtaaataatgcaagccaaaatgaacgttctaacaataatatttaggtcactgacttaattatttttttgccgcttgtttcgatgaaaagtgcttgaaaacaggcccatagcgcccggggggggggggtttgaaaattttaaaagcaattttcttaacaaacttcaaaaacagctaaaaatcccttcccatattcactagggctgggattctgactcgaaatcgccttaaaaagactttaaaaaaattgtttctatattttttgtatcttctaccatgatttttttgtttttctatttttgggattttggtgacttttttagtcgaatttttgggtggatttttcgtcagataaattcaatcactttcagcggatgaacaaaacattgccatacaatgcgtggctttggaacacattgttttgatttttttttcatcaagactagctgtgaatatctccgtgttcagggcgtccttgcacttcaatgcagcagctaacatgaaaagtgaaaaaaaatgattaaaaaaacaacgcattaaatgggagggagtgcagtgcttacgggaatactgaaatgtgtgtgtgtactggaaagatactggaaaaaggcagcatggtttttttgagcaattttgcgtacttaatttttcaaggacattgtttctctctttttttctatatgttattcgtaaaatttgcgtttgaccagcgacaatcaatgtnccttatataaaaatgnctttttctttttttttaaataaaattatttggataatcttacgaaaagcaaagctttaggttccagttgaaagcaatttttaattaacccatttttattatacggtaattaccgtggccatgtttccggttgaaagcaattttttaataaatgtttgtaaatggtcattaccggtgttgaattgacctggtcgaccaccaccgaattgaccgtaaccgtgcccgtgttcaagcaaaacgctgatgatgcacaaccgcaaaagaacggcgaaaatggacgggaaaagcaagcatttgacgaagaccatttttggagtttttaaaactctctttttcccattaattgccatataaaattcaattcaccatttaccgttttcgattggaaagaaggcaaagtgatgggaatggatgaagcaagaaaggaatgttagctgattggtctgatcaatgaaaatgaaaaatgtgtgatttttgatggcttttcgttgcctatttatggacagacaaaaaagagggggggggaggtggaaaatgggaaaatggccaaatcaccacaaatttacactccccaagcacaattttttgtccaatcgctgggaaaagcgttggcaaaatgagaaaaagcgaaaatgggaagccgaatcatcgccaaaacggccgatggaatgccatttccgatggatgggaatggacaaattagacaattttcggattaatattccatacaaaaaaaattcatttttttgtaccatccgacgaccaatcgtttgggaaaagtgttggcaaatgaatggaatggaaattgactgaaaataataaaaaaaaataatttaatatagtaaaataaagaattgatggattaattatgtattgtataagaaaaagccattaaattttttggaggcatttaattaaggatgaatggggataaaatggaaaacgatggataaacaaaatctcgaccgtacaaaatatataaattaactcatttgtcagctaacaactgacagaatgtcaatgagtcgaaaatttcggcttacataaaatgcgttttttaaaaacaaaattctgtatcattaatagggctttcttttttaggcacaaaaaatcgcgaaataggcacctaaaaaggcataaaaaaatcgcaaaataggcattaaataggcataaaaatcctcaattaggcacaaaaataggcaaaaaatttttttattaacgctttttaggtattaaaacacgtaaaaacttaaatatttcaaatgtaaatgaatagtttaaagttattttctaaataaggacaaatttttaaatcaaaatttttattaagaaaaaaatatattaaattttgggatcaatttttagaaaacttttttcaattcataggggtgtaatttctgaaaatttttttgggtcaattctaggggtgtatttttcgtttttattgcatttttgttaaggattttttcgaaaatcctaaaataggcactttaagcacaaaaaccccgaaataggcaaaaataggcattataaaagtcatcgtagactccccaaaccaaacggaaaacgcgtttttcgtgcttatctatgcgtatcaagtgcgcaaaaattttaggcatttgcctaaaaaaggaagccctaagcattaagtattgtacatagtacacaaaggtccatatgctaaaaagctcgttcttctgaattttgtcaattcagttttttgaagggttccaattttgacaaaataaaaaaataaaaatgaataaacaaacctactgtaattggattattgtaaatttattcgttcccttttaattcacgtttaaaatttcagaacatcaatccccccactattaccgaattgtttttcaagaaattttaattttgagaatgtttcataaaatttagaattagtatacagtaaaaatttttttcgtgtttcgtgtttcgctttcgtattttcatgttttatttagtttcgttttttcgaattcgtattttgcataaattttataaatactttatggagtaaatatccaaaatttaacagcccataaccgtttccctgattttcttgctttcttgattttaatttaaagcatattgagttacatgttcaatgagatatggttacggtatttgcaaaaataagaaaaaactcttgcccaaataacggcccttaaaacaacaattttttccaatcattcacaaaaatgtatctcttacaaaaatcattttcctgtcgcaacagtgccactgatggttgaacaaatatattttttgctatgccccaagggagtagccagactcttgggattcgtgagggaggttgaattcaaaaattcgatttttagggggtgtattttttagaaatcccgaattagtgagtgtattttgcaggaatttgtacccgtttttcgtaactatttttttgccattttggggttccatttttcaaaaagaaagaagtttaatgtaatttgttaagagaattgcttaaaattttcaaaaaatttgcccaaattctttataaatttaacttttttggattttgaggcggctttagcccactctcaaatcagccccttcccccctggcaacgcccttgggctaaacaattttttttttttgctgtgccccacaaccaacagcaaaaagatgatgaattctgggtggtgatcatggtcaatatgatgctgatttgataataataaaatgcaggattaatgatcaaaaaaagccggttcattttccacatttttttttatttgcttcgccgctgtcgctgcactttttgctttattgtgtgctcattcaaattgctggccaaatggaaggaattttggtctttcatcaacttccaagcggatcacacaaatgtgccgttggccactttggtgaatttgtgccgtttttgccattatgattctacatttttcaaatctttgttttaagaggatcagcatcgtcttggtgtgttcgtccatccgagattgttcttcacaaattcgtggtgaattgcgaacgccttacgctaatcggaaaggactcaaaaactggcgaattcggctcaatgtacaacaaattgcacaaccaactgtggatgatttgcaccaatggccgaccaatcgaagaacagcaacaccaattcatggacgaattggccgcgaaattgcctcccgctggacgccattgcattccgataacagtcaatcagcaaagttgatgc

SEQ ID NO: 1187 - DNA, 1425 bp, Heterodera glycines
ggtcacctagatatattgaaaaacatttccaggatgcaatgaccattgttcgaagatttggaaaaccagacttatttgttacaatgacatgtaacccaaaatgggaagaaattcaagaaaatttatataaagaacaagatcctagcgaccgaccagatattattgaccgtgtttttaatctaaaaattaaggcacttttaagagatgtaacgaaccaagtttttggattttgtattgcttggatgtatcccgttgagtttcaattgagaggactcccacatattcatttacttattacattggcacaaaaagacaaattacacgatggagaagatgtagataaaaggggaattagtgcaaaaattcctaataaaaaccaagacccacaactttatgaattagttaaaaaacatatgattcatggcccatgtggaatattaaacccaaattcaccatgtatggaagaaattaccgacaaaaataatgttaaaattaagcgatgttccaaaggatacccaaaatcatttcaagaaaaaacaattgttttagaaaatgggtttactatctatgcaagaccaaatgatggaaattttgttgaagtaaaaatttttgatggaaaagtttataaattagataatagatgggttgtacctcatatgccatatttattaaaaaaattttcctgtcatatcaatgttgagaaagtcaacagtttatcttctgttaaatatttgcataaatatattcataaaggaccagatagaactggtgttaagttagttgaaaaaatcgattttgatgaagtgaagcaatttaccgacgcaaggtttgtaagtccaacagatgctgtttggagaattttagaaaatccaatttgtgatagaagccatgcaattaaaacattgcctgttcatttatcaggcgaacaaatttattattttgaggaaaatatggaagaagaagagcttagagacaaaataaacagaaatacggaactaatggcatattttgaattaaacaaaaatgatgaattggccaaaaataaatattatcacgaaattccagagttttttgtatttggaaaaggtaaatggaaaaggcgtgtcggaattgaaaacaatataacagaaaatttccaaacaaaaacaataggtaggttggtaaaagttttaccttctgaaactgagagatattatttgagattattgttattgcatgtaaagggcgcgacaagttttgaaaacttaaaaacaagaaacaatatttgttatcctacttatgcagaggcatgtttggcctttggattgataagagatgatgaggaatggaaaaaagcaatagaagaagcaaatttttacatgatgccttcaaaattgagaatgttttatgcattgattttggcacattgcggaccatcaaagccca

SEQ ID NO: 1188 - DNA, 6979 bp, Heterodera glycines
ggaaacgcattcgcaagtccgcagaacagcgtctttaacggacggaaagaatgcgcacagaaatgaacggcagctttttggaaataaattcagccgaagaaaaaagacgaaccttcagaggtaagaaataccgaaatcagagtcgttggtaattttaaagtttacattggatccggaattggttgaaaaggatgccgaattcgcgatcagcgacccccgaaaagatttcacaccaatttgttgggggaggggggacaaactccaccaaattcctcaatgtccgaaatatcgcaaaaaataatcacaaactttccgagttgatttaagagttaataaaaaacaaagacgacagtttctggtgggttggcttcgtaacgactagagatcgacctggacctggatccaggcctggatttttcctggatccaggtccaggtccaggccatttttcggcaacctggatttttgtccaggaaatcaaggtccaggtcaaatgtgaaaaaaaatccaggtccaggtccaggcaaaacaggaaaaaacctggattttcctggacaaaattttagaatttattttttcaagtgaccgatgttttttcaagttttcaaaaaacagattaaataaatttaaaaacacattattattattaattagatatttttagatgcttctaagcaaataattaattttttcaaacatatttatttttaaaataaatttcaaaaaatccaggtccaggcctggatccaggtcccgaggagcctggatttttcctggacctggatttttgtccaggaaatcaaggtccaggtccaacatggaatccaagtcccggcttttttcaaaatgtcgatctctagtaacgacgatacattccccgcaatgggccaatggcgacgaaaacggaataaatgaacgaaatttggcacgtggcgaagaacggcaaatgtgcacaggcataacaaagaaaggagggtgacagagaatggaaagaaaatgcgaagaaaggaacgaattcatttgtcagataaaataagcagcgaaagaaacgccaaaataacaaagcccagaacaaacaaagtgaatatcatatgaacactctgacaaactcactcataacaaattagacacccaattagccaatcaatccctttcttccccgtcgccctccgaattttgatcagattcactttcgctggaatcgaaggttttctcgggcaaagaataaattcgtatcacatgcttaatgaaagcaattgattacagctgatgtgtgaattacactcacctgaagggggtctttcatcatcaaatatttcccgggcggtttctccatgaaaaagtcgatgattgcgcgtaaaatgccccagcaggtgtccaggttcagattcatgttgctggccgattcgtttggacgaaactgctgggtgccgaggatgatgtgttgagtgctattgcgtgagttgacgcggctcacataactgatgattttgggtggtaaaagcaaaacaaaacatcaaaacgacgcaccccaatttaatgtaatccgaaccggccaaaatcgcctgcagcgtccacttggccaatttaaaagaattgttacgcatttccgtcgccagcactgcccccttttgaatgtccagctttgaacgccaatcgacaccaccgcttagctgtttaaattgtctgttgtctgatttgatgaacgcgagcaaatatcaatgaatttttctcagaatgtctgttccacaattgaatcttccccatgtactcaccgaactgtcccattcattgaatgccttcacggtcagtttttgtacttctttcgtgctggtccccgccagcatcaccgcgtcgtgttccgttcgtgccaccaatgttatcgcagttccgtttgccattgaccccaagttccaagtgcggtatttatacgcacaatccgtccggcctaactgttcgtcttcgaagggaattcgctcctcttcgaatttgaaaactttcccgtctctctttagcacttgacgccgaaaattttgattgacgtacagagcctcggaagccaagtcattggcattgtttatcccttgcgcgtcgccactcggcggatcgggcgctgtttcactaacccaaaaagcatctaaaataattgacgggtaaaaaatagactttcaggatgtatgtgcaggaattggccactgaactttaacctaatcccggattaacgcaaaattaatgacgaaccccaaagccgaataagccggttgggaatggataggtgtaagaaagagaaaaaacagtggataattatttgtgggggaagtgcatattattttgaagacgcgacaattgcacttgggatgaaatttttaaaaaattgtaatgaaaatgttcaattatttctcactccaaacgccactattctaattacaaaaagaaatgtcaaagatgtgataccaattggagaaactcctgaagttgaacgtttgtcgaagaaaagtttatcgccaattcgatatgcgatgatatcccaactattcactgaacgattagccgccataattgtggtcaaaatgatatctgtggcgaatacattgccgacattgttgcaggacagcttaaccatgcgaaattcagcaaagaagtgaacacaacaacctttctgaacaccgggtcttcagtggtggtcagcgaataaaaagacgcgtggaatttctccaaatgcagggggtttttgacgctcagtttgtccattaatgctttatcataaaagtgaagggtgccgtacgtttcgccgggtctaaaccatcggttgtttagagaattcccttagaaagaacttacatatcctttccaggttcaatgtttggcaggtaaagtttgttcagctggacaaagtccaactccttcagaaccgcccaatcgggtcgaacttgaaccgaaggctgtcgccctttgcccgcctgtcggtcattgaagcgccgcccggtcggtcgctgcgctgtgccgcgagttccaccgccccgacgcaaaaacactttgtacgctttttgttgctcccttaaagaaaaattttggagcagtcgattttttatttaactaacaataaattcgttataaaaagactaaaattttaaattacccagtcctaaattattatttttaatgttttttaattgagtacattttttacaaaaccaaaacttgtatttaagagttttcggactcgttggtcacaacttttttgaatgtcataagcgaaagtacgaatttgcctattgttaggacatatcttccccctttgttaaagtatggcaaaaccaatacattagcagagtaattacaatacttgagtatactccgcttcatcttcgtcgaaacattgtacttctcatattctcggcgttcctgctcacgttgagccaatttacgctgcaacatatattttattaagaaatatgcgatagttttgcatacaaatggaatttgacgacggaaaggcctctgcggcttttgtggtcgactcgagtcgaccaattggaagttcgattcctcgttgtcgtggatgtaatcgaattgaacgcccgcagtcgctgaggagccatacacacgctcattgtaccgatctcctgcaaaaaaacaaaatcctctcgaaaaactctgtcaaaaattacgcgtttcgccttttttgaaaaagcgatcgacgcccaaccaatcgacgatacgcccaatccgatcgcatttgttgaaatgttgatacggaaggcccacaaactctgagagtacttgactgtcacttacagaccccggaccccatccgttggagttcgacacacattcaggcagatcaaattgtggtagagacattattaataactactagtactgaaaataaagagaaaaatggtaaatacacaatataaaagaaatacagaacagagtacttgaaagtgaaactgaatcaaatgaaaaatggaaattcatatgaaaaacaaataacgaaatgccaatttcagaattgtcaatacctaaattacttacatacagtatggtgcaaaagtatataatcaaacagtttcatttccatttcaaatatcgtccaagatataagacaactttattctttacaaattcaggtgatttgtcatcacagttcaatgggaacatcttctctcttaaaaataaaaggcataaattaaaaaattgaataaaagataataccgtaatggcgattctctgagtgttttagctttgtttgttggtgacttttccgactcatttacacagatttcctctaaatcactgtcggcacaagtcatttcgtcgctattttctttttccaaatcgttcaatgggtcccaagtcgtaacaaaactcaaatccgaatcctaaagtggataaggacaactgtattttttattcttgagtttacattaaatcacctgctgcccaaacaattcgtcctcaaagtcttcttcttgcaagcttttgtttggtgtcaattcttccactttttcattatttttcatgttgaaactgcagcttaattaactttttttttaaaaagatgtgcattaaataccccggtcattatttaatgtttcactcttcctaattcagtcttcatgaacagaaaacatttgcaaataattaacaaataaacaattttatcaaaaataccgtatttcttcgattatatccccccccctcgattagaacccccctctcgaataaagcccccttttgaggagggttaaacaatagagcccccgggggctataatcgaagaagtacggtattacatatttattcacaaatcgaaacaaatgtgaagaaaagtattattattaggaagaagatactaaaactgattttatagaattgtttttttatatgatgggctcaatgttctcaaataaatattgtaatttgcgcctttttactgtatcaaattatgattttgcggtatgttacataataagcaaattgccacggcgaaaggcctgcttacatgatttttttaactttgttttttcactcggaaaaattctaaatgtgaaaaatgtcatataatttcttagcactctctctattttttgttttacatttcgtgaatttttgtaagtgaaattttggctctaatgcattttatgagtccaatcgagttttatgagtccaatcgagttttatgagtccaatcaaatatttgtgaataaagtacattttacaattttattcaacttaggagatttttcattccacaataagatgaataaataaaaaagttcactttgtttgcgcaagcgctagaagacattgtgtttgttctttagataaaagaactaacattcgttcaatgcatacgatcatagatttttataacttttatagagatctttgccaagtgtggcagaaagacagcaagcagaagggcggctgggtggccaaggccttgttgtggaaatcgatgaaagcaaattttttagagcaaaatataacaggggggagaatgataaatagagcctacgattgggttttggtctattagaaaggggcactaacaaagttagattcttcaacgtacagcgtagagatgccgacactctcctgcctataatagctgataatattgaagctaactcaattataataagtgacggatgggctgcttatggagggataaataacatgcaacagcaatacgaccatcgttgggtaaatcatcggatgtacttcgttgatcccaatgacccaagagtgcacactcaaggcattgaggcgacatggagagcactcaaaaatggattgcgacacttgcacggaactaactctgacatgtttgttaccaacctatctttatcagtatatgttccgtcggttccatggaaatgcaaaaattttccaaaatattctggaagaaattcgatatcaatatccactataattgtggctttacattgtgtatttcaattttaggctgacagtttgaaaataaaaattggactcaaacttttattaaaaaatcattggactcataaaaaaatgattggactcataaatttttataggactcataaatatttgattggactcatatattctgattggactcataaaactcgattggactcataaagtgcattagagccaaaaattttattcattccgttaattggagatggtaattattaaaagaaaattatgaattttaaaatcaaatttaattcaggtggaattgctccagcaatgttgttcactggcattgaccgactgattgcaattgctttttcggaattgtatgaaaaattacaatattatcaaattgttaagtacagtaactttcagtcatgatagccttaaaaagcgactgtatttggcactgttaactgtaatttctgtagcctatggtgtctgcttctctgctacggtgtaccaaaatgaaattgtagatggtgatcagatgaccaccggatcatatttggattttataaaggtttagttttatctttttgtgatttctaaaattttcaaatgctttatagatctcacctatttttaatacaataagttttttgcttacttcaatgactttcatcatttatctgcttcttggaattgcagtacgtataaaagcttcaggtaatctcaagattgatgaaatttaggggtggaaaaaatttacaaaaatttttaataaattttatttcctacaaaaatgaaaaagtcactaccataactcggaaagaatttccattattaataagtagggatgcgagcgatttttaggcacaaaaaaagcgcaaaataggcattatataggaaaaaaattgtttttattaacgaggtagcaaatcacgtaaaaacttaatcaaaaaacttaattttgcgtatatttcattgttttaaagtttttccgtataagcacaatttttaaaccaaaatttttatcaagaaaaattaaattaaattttgggggtcaatt

SEQ ID NO: 1189 - DNA, 4593 bp, Heterodera glycines
caattttgggctccaagtacaaataagtttattatttatttagtaatcagaacgccaaaactttgcaaaacttaaaatttattggggattttcccttgtaaaaatggaagagccgatctcgagttaaaaacttaagtttcacaaaataaacttggaatcgttaaagggggttaaaatatgggcctatgcaaaatttcaagaaaatttcaactgcagaaaaattttttcaactgggtgaatatttcaataactttccgacacttttacagttaaaaatggtatccacacgcagtaaaactgataaattcaagaaaatgggaaattcaagtactgaagcaaatcgaaaacggaaggaatggcgccaggagcgtgctcgaaaaggcggctcgacgccaaaaagtgacgaaaattgacaaaaattaattttattttaaaacactgcatttttcagcgctaaagcagaccgaagccgagacaacaggggaattgtcgatgagccacttttgcgatcaatcaaatttgaccggataatcctggcgccttttcacgtcttccagggcattggaaatgcactgatcaaagagctcgaaggattaactgaaagcgcggaaattgcgaacggatttttcagaagcatcgcggccaggagggaagcgttcagaaaaaaagacatgacggggaattcaatcagaaaagttctgattcatgctgaccaattggagaggctttactcagctgaatggcctcaaatcatttgcaaaaccatgggacacttggcaaagatacaaacttttacaaaagagattttattttgtctttcttgaaaataaaaataaaatttaaggcccagccactgtcgccacgggatttggacgaattggaaacgtcgattgatcaatttcggacatttctcaacgatcagccacggatgcgcactttgctcgcctaaacctaaggtccacttgctggtgaaccattttgtacccttcgcccgacacaccaatttttggcacttttggacgagcagggtcaaaaagcattttgaaattttagcccgaatttttttaggcgatgaagcattgcattcggtgtggaggcgtttggaacagctgtggaaaacaatgcctgacgaagaacaaatgcgtcaattgttggagcaccattttgtctcaaattggcttctcgagacgggaaagctcgacgaaatgaagcgggtcagtttggtgaaaattgggtttcaaataaaattcccatgcctcaggaccgtgaagaacaacaggaacaaatcggaggccgggagagcgacgaagaaagcgatgtagaagaagaacaattcgattttgaatagacacagttcgataaaaggtttttcttcgtttttacaggaaataaattttttatttaatttttgagcttcattaaaaactgtgttatcatttcacttatatttatttgctttaaaaacctcaaaatacagttaaagcatgcatgggactcgaacctgggaccccccttttggtgactaactcacagaccactaagacgaaaaaaccaacttaattgtacttggagcccaaaattgaatcgccgtgtatgataacatttgactaacaaatggaagattgatcaaaaataaaggagaagcattaaactgatagtacaatttggtttgcatttgtataatgtttatcagcacatatacacctcaacaaacatacatacggaaatatgaaaatgagtgggtttacacacaaaatgataaggggaattgtctgatctccagtcgcgttcccagggcgcttctccatccttctgttctgttagtgttcgatgctcatcgtcctcaggccggcgggaagcgggtgatgctgtggctcaggttcgccgcgattgtcagcgttgctcccgtgttgttgcggccattgtagcgcgccgacgagaaaagggtgatgagccggcggccggcgaaatattccactccgttcatcacgacctggaaaggggaagtgggaatttagtccagaagcaaatgaaaaaaactcacttgatgcgcccgaatgatgtagtcgagacagagcatgtcgcacacccgctccaccacgtcctcgccgaatgcgatgcccgctcctctggtgttcgggatgacgccacgaactccgcgcgcagggtccgcccacaaaagatcgatctccagcgtccgaagcggcgggtcgatttgcggacgattcaggtggctgagctgctccaggctgttgatctggtcggagaggccgccgtgcatacctgaaaaataatgaattagtatgaatggacaacaacaacaaaaaatgtgactcacacaggattttgtcgccgatcaggccgacgtagggcatccaggcgaacgtctgattgaagaggtcgtagaggcggcggggacccggacgctggtagcggcggttgacctcatcgaagaagccataccttaaaggtggggggggggggaaatttaagtctgaaacaacacaaaaaaatgcgatccttacactctgttgatgttggcgcactcgtggttcccgcgcagcagcatgaagttcgctgggtatttgacctgcaatggttttggggatttaatttggtctgttaaagattcacaaaaccacaccttgtagcagaagagaagaacaattgtttccagtgactgggggcctcggtcgacgtagtcgcccaggaagacgtactgctgctctggagggttgccgtgcgtgtggaagatcctctgcaggtccgtgaattgtccatggatgtcgcccacgacgacgaccggcggctgaatcctgacgagcgtcggctgcattctgaagatgtccgtggccgccatgcagagttgtttgagctcctcgtcggtgatctgtggaaaaaatgaaatgttttaattgttgaaatgtcatgtcaaaaaaatcccacctcatccgtgaagcgttggacaggcgaatgcctgaccttcctgatgatcgcgtccacgaagctgcttgacaggccatctccttgcacaagtgttgaagtcgttgccgaaggccgagactgctccgccgctgccgccgccgttgcatcgaagcagtagtcctctcttgccattgttgcgccgggcacgtcgcttcgtgggattaaagatgcagacgatgagcaatatataataacaataatatgtgggcaatgaattatgtgatgaaacactgcaaatgcgctccttttatatacattatttccgttttcactatgggtcaagtccaatgcagtgttagacaaaattatcatttcgccaaatagcgtaattgacgtaattttttgcgcactaatttaaaatttttcttgaaaaattttaacgaaatgcaattcaaaatcgtaaaaattttgcaaattacaaaaaaaagtaatatagataagtaataacaaattaagtgaaatacatgtgttacttgattatctcttatacaatttgccattgttgccccctttttaattaaaaaaccttcaatttgctctcgtaaattaatctgcgaatagatccttccttttttgctgctttattgagtattctgcagcctctgcatgatcacaattcatttactatcgtaataaacagaaagaaaaactaaaagcattttttcgagtcaagaaaaaaagcaagcataaaaacttcttttagatactaaaattgttcggttttgttaggaatgaagcgagttatggctgatcaaaatcaaaaatacaaaaaaggcatttaccagtgtaaattttaaattagtgcgcaaaaaattacgtcaattacgctatttggcgaaatgataattttgtctaacaccggtcggggtcggtatgctatggttgctgccttggctttgctcgccagcacattctcgaatgaaaagtcaaagattggacgaatttggaaaggcaaaatcccaacgagtggcagtaacgacgagaaaagacggaaagcagatggaaaattggggacaattttttcgccgaaggccggggaggaattggcggaaaccgcagcaacgaattttgaaaatttgttgaaaatcagcaaaagtctgagttttccatttgatgatctgaagagtgcacaagaagatgccaatgaaggatttaaaaggccagatgaaaagtcggaattccgttttgtccgttgtttttacaggtctgaccctgcaacgcgacttcatgccgaaccggtccactgctgacacccttaccgcccctttcaacgccgaatgcactaccgatgagcccaaagcgctgagggcatcgcttcttagagggcgaggatgtgctaatattgtgattttaaaatatatttggcgttttgttatttaatttgtttcatttttgtttgtgatttttgtgaggtgttagttgttagttttatgctttcgtcagttctattgattgtcgtcgactatttaatttggaattaaacgataattgtatcttcggcattgggctgtgttttgtgtttgctttgggctgttgtcttttgccgtgtgcagtgcaacaacattattaaaagcccctgacgacaacttttcccctttctgtttttta

SEQ ID NO: 1190 - DNA, 4148 bp, Heterodera glycines
agcatgtcatttttgcgcttagtcccagtgagttgctgcattcaaggaaaacataaggacatgccaagggcaatttttgtaatttcaaggtgattttgccaagatttggctcctcaaacatgccctcctcgtcgtctatacgcccgaccgcgagcattttggcattgtgccgattgaagcgatgttcatgcgctgtgccgttttggcagtgaacagtggcggaccactggaaagtgttgagaatggcagcagcggctttttgcgcgattcgaacgccgaagaatttggcaaagtgatgaaattggcggtgaaccgaccacaactgatgcaacagatgggcgaggctggtcggtccatcgtttgtttattctccggggaaatggaaatttcaattttaggacgaattcgtgtcgaaaaacatttctcatttggcgcctttgcgaataaaatagatgaaattattgtcaaacttggaacaaattcccggcaatgagaccgtttattccccgcaacccagttttaattgagtccctcccagaacatttggaatgtttttattaatttctatttatatattattgtttgatttttttagagatttgataaattattctgtgctttcactgttctacttagtgcaggaattttgagattgtcgggcatagggcttatttgttagaacacttgcggccgcttttttcaacaaatttttctggcaattccaacaggcttgctcgcgttttggtctagaatatgtcccaaaaaatagacacttcgtactttttagtcgatgtttaatgagtgaagacaaaactttttaaaacaaaaaatcaaattacaaagcatcacatggcttattgctctttcaaatgctaacggaagaactgattggattgcgcattttggccaaaatgccgcccatattctgcgtctgacgattgaatgagcgcgacggggcgaatccgagcaatttttgcaaattctggcggagactcattgtgcacagaatataaaggaaaatgaaggaacagtcggtgaaatcgtcgcctgaaaagcaggggaccaattaagaaaatcagacaattaaaaaaagaaatcactgaccaaccaaattgcgatggctaaggccctggacccaagtgatcggctcaaatggcaatttggcaaccacacgaccctcgaaaatgctggagaaagtgctgagcaaagcggcgaacacaaaaccaatggcgagccttagaaagaggccaaatgagtgggtgtggtgctgttttggtccacaaaagttacatggacttcatgcggaacatgctcaggtcgcggttggtcgacttcagtctctcctcctcccgctcgattttccgtttcgtcgttttgctggccgcgttcgccgcacccgcaccgcctgccgcgtcccctccggcgccaattgcgtcctttttgcgctccaacttcttcgatttgcgttccatcgaaaatttcagccgtttgtactcgtcggaccttcaaaggcacatggacaattttggccaggaaaacattgtcccaaatttttgccaatgaaaatgcaattggccccgttttgccaccgacctgtagacgagcacccaagtgagtccctcgccgagcaaagcggtgaaaaaggcgatgaaaattatcaacaaggcgtcgctgtacatctaacaaattatgggaaatgcaaaatgattttaattggaaaagaaaaagaaatgcaaaaactccggtaacaacggaataaatatgaaaacgatgagaattattaaagctttgttttccattcgtcaacgttttaaacaaacattcaaaaaaaaaaatggaaaatatcggccaaaaagcgaatataaattagaaactgtatcaacaatcgcaataataaactaatacagtacggaaccgacatttgccataaacaaaatatcaacattgggtataatcatcggacattgtcacatcgaattgactccacaaaataacttcgaaatcccgaaactgctcttcagacgaggaacggctcgatgttcagctccagcgccgagcatggattggtcagcgcgaagttggcgagaaccgtcgggtggagcactccgaaagtgccaacgcacgcattgcagaacaaaacgttggcacaccgtccatcaaaataactggggtcttaacgggcaaaaaaaggactaatttggcaaaatgtgttactaattttgccaaccgtccgattggacgatgcgatagcccccgacggatggctcggagtcgttgcgctcgtaggcaatgcccaacatttgcatgattcggtccaacagtccgtggatcacctcgaaggagccgcttttgctgtagaaaatggccgccaaatggcgctcatttcggcattttgtatctgatgtttgcgctttttaaccattttgccggaacattgccaacctttgctctcgtcgatgaacaccacgtcctgcacttcgaagagacgtagtggcagtgccatgtccttgttgttggcgatggtcttcaaaatgccgggcagcagggaattgcgggccacctaaaaatggtaaaagaataatgtattttgtctaaattttggggaatggcacctgaaaatcgatcgttttcggatttgaaattcgcaccaccgagtccatttcgtggtcaggtcgaagcattttcgagccgacgtcttccgtggaacaaagcgcaaaagtgagcaccttttaaaagagggaatttaaaatgagtaaactcactctaattcgatttgttctcgccctgccccacttctgtccatccgctgatggccaactgaagacggagctggtcggacagtttgttgagcggaaacggttccgccacagtgttcgactggggcagtgccgtcggaattgcgttgtatccgaaggccaacgccaaatcctcggccaagtcgcactcgtgcaaaatgtcgtggcgagtgggcggaacagtgacctaacggaggtttattaatttggcaattgcaaatatttaaattggcaattaatttttacaaaagtccccctctggcaaattaatttataaaaattgaaacttgctttgactaaaaccgccggcacttcgtccccattttgcgctttttcacttcgcttctcctcgccgctcattgtcagcttcaacaattccaacgctttgccaatgtccaccgtttgcggctgttcctcatctttgatcggcacgcattccaacgccattttggacaacaattgcacggctttgtccgctccgatgtccgaaatgccaattttggcggccaaactcagcacatcgaccaaatggtcccggtaatccaatttctaaaacaaagagtgacacactcacatttaccaggaattaaaatgcggaaaaggttttttgaacaattaaaagacaaacaaattttgaaaacgacgaccgtttaaacaaagacagcgtttttaagtgaagttggcccttttaaagaccaatgtttgggtttcgcattccactttttgttgaaccaaccggaaaaaggctgaaggtgccattcggctggacaatttggacaggctcaacgctaaaacatgtaaatggaaagtacgagttattcgccggataatcaatcattccaattaattgtgatttggtctctccaaatgccactcacttgaattgctctgtgcaatattggctgaacatggtgaccaacatgtccagcacaatttccaatttgaccaggtcagtgccggtcacttctatgaaaatgttgcgcgtgttcagtgttattttggaatgttccgagttgattatcggcggcattgagcagatgacgccgtccgcgtccaaaatcaccgggtacaacggcttgtcgcggatgatgtgcaaatattcgcggagatgcgacgactcggactgaaacgggacggagagtcaattttgggaaagaattgatgaagaagtgatttcttatccgtcccttttttttactataatttccaataaaaatgcctctgacttttaatgcacgaaaattcattgtcaaactcaaaacgcacgtaaagttccatctgttcagcggcgttcatttctctgctctgattgagcggtttgaaacgatgtcacgcggaggaaggggcacatat

SEQ ID NO: 1191 - DNA, 5549 bp, Heterodera glycines
aacggggaaaatgttgttgtattacaaatcaatgaaagcagtaattattggcctaaaatgcagccaaattcgaatggcgtttggttgtatttgagaatgggaagacatgccacaaccaatccaatgacggatttgcataagccaacctttgatggtgtccaagtcgtgggtgcccatggaggccaatgtccgttttcggccaatgttttggtgcaatttgtcctgcaagtcaatgaacgaagcgtaggcatcggcgtcaaagtgaacgtcgcggagaatggcaccgacaacaaagggacgcacggcactcacctgaaaatgcataattttagtgggaaatggaaacatttatttctgcttttttaccgattgatctaccactattttctgggttttcggcggattcgtcagagaataaacgggaggtgtaattctaaaaaggaaaagcaaacaaatgatcaacgatggcatttcgatgacttggcacttcgtacttattttggaaaatgagcaatgcccgtgccaatccctccacacaaagcaaatcgtagcgattggcggggatctcaattttgtacacttcctcctcctgtcccgtcttctcgtctttttcaaccaactaaaaatacatccaaagcaaattaatttgacaaaacaatttaaaagcccaacaattaccacgtcatcgacttccaacccgtattggaagcacaaatcatcgacttgctgttgcgagagcgaaacgcgcaaatgtttgtccaacaaacgctttttcacagaaatagtcggcattttattgtttttcttaatgtcagtgtttgtttttttttatatttgtaaattcaattcccaataaccgagcaatatttttaacaatttgtatgtattatgtatgagaaataaaaagaaatctgttacattaccaaaatattcgctacaaataaatttatttttaacataatcagaacgcaaaactttgcaaatttaaaaaacgagcttttcccttgacaaatacaaaagccaccaaaatgcattttcaaaatactttgatagaaatcgatgaaggaatgggttcaaattataggcctatgaaaatctgaagaaaattaaacaataaggaactttttacaaaagcacagtttttcttttactctcattttgatgcactatttccatgtctctaacactgtttgtactttttcttttgtcaacagaattatttttcaatattttaaaaattaaaaagtaaaataatttttaaatttaaaataatatagttatttaaaaatatttgctacataaaaaaaaacatatacctaactgaaaaaataaattaatatgacaaaatgcgccttcaactatttttcgtgaatgacaaatgaaaatttaatattttaatttttttttaaattttccaactccatttttgacaatttttttttatattttgcaatttttattctttctgcgttttatttttgatccataatccatattttagggttttgtccattaatccagtctcaatacattatattgtgaaatgcttttttttagaggtttttgggatggcatcgttcaaaaagcaaaaagacaataatttactggattttggacctgcaattctaattgtaatttatcctgaattctatgaatatttttgaagcattggttaaaaataatcaaaaatacaattgagttgaataattaatggagaaaatggatacgtttataatatggagatatttataaggaaaaaggggagaccaaacagggaaaaacaacaaaatgaaagaatttgtgaagagaaaccaattcaaaggatgaaaaattaaatgatatacaatttaaaatgtgtgggagaaaaatgacagaaaaccaaagggtaaaagggaagagagaataaatgaccagcaaatgttgtaaattgtgtaattgtaatgcatttgtatgatgatgagaaaggttggagaatatcagccgacggcataccgaaaatgacaatgccaaaaaatcataattcgtattacgcttaatgtgttttgtgagtggggggggggggcaagaaaaggccaagaaaaaaggagggcgggggcagcgagttcattcatcattcacttgacgagattttctgtccaattagtgaggcattttgttcgtagagaaaatgggcacaacaaaagcaaacacgtggcggatgcgaagtgatcactgaaaaaggaaggcgtgtgaatgaaagtcgatgataacgacgtgaaagtgaacacactgattgtaagttactgtattagggtacggtggggtggggttttccgccagtttctaacactcaaattcttcactaaatgcgatcgtccgtccctcattaccattggttccgatttatgacttttttttgaagaaacattcttagaaaagtgaggcttgctgtactgccaagccgatggaacggaatgactctctctcctctctctctctttttctctcccaatgttggctttgtgtgtaatttttctcgacaattaattacctttgcttgacccctggcgctgctgctgccgcccgcgttttcatcattcgtttcttctgtcgagccttccctcgagcggagttccccgccgctgggcacaaaatgggacgacgaagtcgctgccgcaggcgtcggtgcaattgtcagcgcccgtccaccgctgcgcggtgccgaaggaacatcgccgcccccgcaattctttccgctcgcgttccgttttgccgacaacgacggggaggaggcggcggatgaacagttgttgaacaatggcaaccttcagaacgaacgaaatggcggtggtattaagtcaggacggtaagtaaatgttcgccctctcacttcactccgccgttgttcagcacaatttcggcctctccgcccacgccgaagttgttgttgctgttgctctgtgccccgtcgtgtcgcccatcggcgccactttcgacagtcgaagcagctgaagaggctgaggcctccttctgctgctggttgtgctgttctgactcaatctgatgcagccacttctggtggttgtgcttcaggttgatgatcagctctgaatttccatttaaatttatacaaaatgccggcaaattgtatcaaaatggcccacctgattcgggtaagccgggcagcacggggaacagtcccgcttcgttgagcgcaatcgccagcgggttgacaatgtgcgcgatgaatgagtcctgcagtttggcaaccgccggctcgttccggtccatgtacggactgaccggcattttccgccttttttcatcgtccccctgggaattacaatgttaatttcgaattccttttttaatgattggccatgaactccttccccttccccacctgttcataaaactcctggcaaatgcgttctgtccattgtctgtgcagactgtaaggtttggcgggcgaatttatgtccgcaaattgatcagcatcagcgaaatcagcacacgatcggattcgctgttcaggtccatgtcgggcactcgctcgttgaactgcatgatgatgtcgaagtgctgcttgaggtcggtggccaaaatgtactccaggaccaaatagctgcaaagtcaaaacggtggaaaataacaaaaaatattcatttttaaatgccgtcaattaaaaactgtccaaaaatgagtgttttcgcttggtccacgcaccgaaatcgtttcgtttccgccgagtcgagattctcgatgaattggaattgagcatgggaattgagcagtcgccacgactccgccgcgtgatgattctccaacacggaacggtcgttgtaaagaatggccttaaatgggagacgaaatggtcgaaaattcaacggaatagggcattttgtctcttccccaccccctcacaaatggcagccattcacactcacttttcggtcttcggatgccaccaaaaatgcgtttgttcgcccgggatggtcataatcgtgcattgcagcggccgtgtaaagagccatcaactaaattttaaaaaaaaagttacaatttagaaatgcagtgactgtaattagaccaaatccacaaatgccatccaatgtcccctaatatgttcccaccgtctcacctccaatgggctcatgctttgcgcaagcgcaacagccgccgaatcgaacgtctgctgctgtgggtgagcctcacaattgcgatgagtagcgccggtggcggtgttcgactgttgctgtcgcagcacatggcgaccaccgccattcgtcgtcgacgtggtcggctggccgttgtggttggtcaacggctgttccgtggagtaggcggcgtctgtcgccgtgtcgttgttcgcctcttcgtcctcctccaactcgtcttcgtcctccaattcagaggaatggtaactggaacaaatgaatttttcaaaatggactcaatataattgccaaaatcaaatggcatttgcctgcaaaaggcgtgcacgggatgacacgtcaaatagtaagtgccgtgcaaaacgtcggccgcatggattcgattgtgatcttaaaaatgttaattttgcaactgggtgcttttaaataaaagaaattcgtacatggaatgtcccaatagcccgattcgagcgcatgaaaaaagttgaagaattttgtgtaggaaattttgaaggtgcggaacaggtcggcctctttgaagatggcgtaagtcaactgaacgaaacgaactcttttgagtattaggaaaaggttgttgaattagcttcggtattgtaaattattttattcttcaaattaagcataaaacactcaaatattaagactttgaccccacaaaatcaagattttctagctttcgggagccgaaaaatatccccccatattctaacagttcaacagtttttgtttgtcgacagaatgatttcagttcgaagtgtaaggtgtgtgttttcgaaaagtctacattcggggggaggggaatatttttaactgagaaaatattttgttcatgtgccgtttgtccccgtgggcccggagtcggggccgacaaacagataatgtgcgtatttattttggtcccaattttctcgagatgttctaagtaattcccgcttaccctgctcaacacggtcctcttgtgtttctcggcaagccgaaaaatggggaaactccattcctggatctgtcccagggccgggtcacgctccagctccgcccggtcaaaggttgtgccattgaccgctttgtacaccgtgggaacatcgccaccggcgccgtgttgccgtccgtccttcgagggactacaaaaaaatgggggaaataagccgaatttatgaatcatacattaaaaagggggtgggtcggaaaaattttttgcgaaggggggtcggctgccgatgaccttttttttgcttttcaaacccattctttttttcggcgcgctttttccaaaaaaatttcgggaacaggggggccgacggtgccgataggcaccgccggggaaaatttttggatttttttaatgaattttgttaaaaaaatttccaaaaattt

SEQ ID NO: 1192 - DNA, 2730 bp, Heterodera glycines
gtttccctcctcctcctcaactgatcgggttttccctttttttctcacggttatgattcagttaccgttgctgctgctgttgttgctgtactgcttgcccacttggttcaccaccgtcctcattattattcaccagtcgctgtgaccgccgtctctgttgctgtttgtgttggtccccaacttcattgtgctgctgctccttccatgccatgtcattcggcgcaatttgctcaacatgttgttgctgttcaccgtgaagttcgtcctcatattcgtacaaatttatgcgttgtggcaaactgttgctgaaattggtcgcaatgccaccgccgtgatggccgccatggttttgaatggtgtgagcgtgagagggcttccaacaactgacaaaaaagagttggttttatgattttgattatctaatcaaattctatttcagggcagggttaatttctcattatatttactcctaataaggaaagaattgcctcgcccccgcctcatcctaatttgtaagccattaactttcatcaaattccaaccaaccatcctcagttggattagaatgaaaatatgggaaaaaggaagagggaataatgttggagaaaggaggcaacggataaggaggatgaggattttgtcggagaagagaggggtgaaaaggagaggagagtaaatgatgagagagcgagagagagagaaagtgccgtgccagatttaataaagagccgagaatgacaggtggaggaaggattggccaaaggcatacatcagagcaagatggaagaaatgccacacattggtcgtcttcgagattctcgacaacagagggcagacacttcagtggtgacaagggaggaaaagagagagagagagagagagagagagagagagagagagaaaagagagagagaagagagagagaagaaagagagagaaagttgaaaagaagttaaaatgagtgagagatggagaaaatagaaaaggatgaggataaagcgagagagaagtgaaaaaagaatgggtgccgtccgtcaatttggccataaggaaaagtatgcgcagaaagaacgaactacaacaaatgtggcaaacgaatctcgggatttgaattgggttcccgttgaaaaccaattacaatttgctaattgatagcccatttgcacagtaaccacctgcttgatcgcgggcgagacggttcgacagcaatggttggtaaacccgtggctaaaaagaataaaatcatttgtaaatgtcggacataaattaaggggaaataaaaactcacctgaagtgaccgtggaaaaagtaatattggagacacgaggctttgcagtctgtaaaaataattgtgggagatttaaaaaaacaaaaagttatataaatggatggctcaaaatatgatgccaaaaaattataagtatttaaaaatggcaatgcgatcattacaaccaaacatttatataatgagatgtgagacaagggggagggagcgaagagttaaacggaggatggaaaaaaattgtaacgggatagggagattattggacatactgacacatacagcatgagcaaggaagaagcccttcatagttttcataacggacggacggtgacggaggatggcattggcaaacaaacggagaaaggaatacaacaaaacatcaacaatctgccgctggtggtgccaaattagcacgcgccgaaacgacagggggaggagggggctaattggcatttatagtatgggtcgcatagaaacaacccatcaacagtcggcataaacacattttggtgccaaaagtgttcacaattttgagaggatggccgacctttttcggtttttatgatggattggcacaggaaggtggggaagggagggaacaccaatgttttaagtcaaaataaagcccacctctcccctcccccctcactttcatccgccttttccccctttctgtcatattcatccacttcggcgaatgccgggaaaagcatcgcaacgcaaaaagaaaagaaccaatttgccaccccctcaggcgaagggtggagaaagtgccgtgatgggtggaagagaaagtgagggttcctttttgtcgaaagaacaatttaaggtgaaagtggttggaatgggggtgggcatttcttgacgcgtgattatgacgagctcatgcaatggcgccttaaacatattaactgcccaaaggggaaagatttggcgctatgtttaaattaatacttagggaaaagcccaatttaaaacaacttcaaatggaaacaaacaaaaacataatgaatcaccagaatatcagaaaagaagtagctaaattagacaataaaaaatgacaaaatataaacgaatgaaaaaaaagtgcaaaaaatgatgaaaactaagaatgatggacaattgtcggtgggattgccagtggacatgcttcaccgttcgcagacagatgcgctgcttaaatacaggctattagctgctgcactcatccgggacggatggataatgtgacggttgtgtgcagttttggtaatgaccgtcgatggagggaggacacatgtttgccgacgatgtccaccgtagcgtgaaagaccggtcaatcggccggcggttggtcgactcgcgcagtacgttcccaacccctgcagaagagagggtggcggagcggagcatcggaatgacccccgaggaaggggggggggggtaattgtggggagatgaggggg

SEQ ID NO: 1193 - DNA, 2017 bp, Heterodera glycines
aaaaataaataaagcgcatagaatgacggaagaatttctcgctcttgacagatgaagcaaattaatttgccttaatgagagagaagtagggggaaaaaagaagagagagtttgatctatagccacgaggtgtttttttttgatatgacatgacagtttaaagaacctatgatggaagttgattcatttttggaattaagagtttttatttaaaccaaacaaagttaaattttcatcttttgaaaaaagaagtccaatcgaccgatggttttggtcttcaatgacaatgttcttccccccatcacattatcccattttcggacttacaatttgtctgaacatagccgatcaggtttgcaaatcgtcatcatggacaaagtgtcataggtgggggtgaattgaagggagccgtggtagggaaaatgagtgcgcaactgacgcaaattaccctcccccccccccttcaccactcccagcaatgctaagaacagagagacatccggaaaatgggggaaggattaaaaacacattaaaaggatgaataatgaatgatggacgagagaggaagatgagtgggtaaattgtaattcggtgtgtaaaatgatgggcattggaaaaaacggcaggactaatgtcagtaaaaagggggaatatggaacgctaattaaatatgtatctgaccgggacttcacactccaaacaatgccgaaggcatggagacgtcctctgtgaagatggtaccaaatttgttgaagaggaatgggcagaatggtactgctgatgcgacagtccggaagtgctccgttccgacttctgcttggccactttgcctttggcagcactgctccgcaaatccccacccggtgaacacctttgacaacttgcgcttaaaaagtgcagtgtacaatgcaggatcattgtgctgattttgtgtggtagcggaggatgaagatggtgagcactgacgtgtcgttggagcgaaagaggaggagcacagggagggagaggcggacggcaaagccaacgacggcatcagcagcgaaggcgtggaagcggaagaagccgtttggaacagcagcagacgccgactatcatcagcggaattcacaaatttggcaccgttgtcagcagttagcgatgctggattcaatgcaatgttggcatttggtacacccccgtccatgacgtaataattttatttttttaactaaatcgtcaaaaataatgttcgatatacttaatgaaatgtcaattactatcattattataatgttttcgtagaaaatgaagcaataaaaatcgaatgaatgtgaaggtgaattgtttgggtttcgccactaactgacacataattttaacgtgagaacaaaaattgaagaaatttttggactacaatttcattggcaatcattcggctcaaatttctaaggccaattcttttgccgaaacgaacaatgaatgaatggacgcgttggattgtttcatatttaatggactttcttttctctatcctttttagtttgccaatgacaaaaagaaaatgggtagggggggggggttaaattacagcaaaataaaaagaaaacaattgaaaaagattatctgataattgatttttgatagtctgtcaccattaacaacaaataaattttttgccttgaaaaattttggagattcccccaggggataaaagagaaatgggaggagagatggaaaagcttatcgtttaacaaataacagatgactcccaggggcaaatttgaaggaggcctttataaatggaggggaaaacactccttttgaaccggggtaaacaacagcagcagaggacaaaaagaaaagatggattgtgtgaacggacggcacggatggagaagaatataatttgggagatgatgatgacacaatgacttagtgaaaaaagggaggtcgtcgagaaactcgtcgagagagggaggcattcgggactcactccccccaccatccccctttgtgtgctttatgcccctcttccaaat

SEQ ID NO: 1194 - DNA, 1330 bp, Heterodera glycines
aaagaaagacacaaaagagaaagagagcgagagaaagagaggggggggggtaataagcctcaccgggaaaatttctttctaattaaaatgcagaaaaagccaaaattactaaaaaattaacgccacctcccccaaaaagccaaggtcaaaagtaaatgcgagagaagacgaacggaataaaatgaacacagctaatgggatgaaagttaagaaaacagaggcacagaattaaagacgaactcatggaaatttgattaggaagaacaaaacggagggaaaagtttagaaagaatgaggcacacaattacagcattttacttttaaaaacccatttttattccgtcagtagtgatgagcattggacagaaataatatacacttggccgcatttcggccaaaattgttttccaatgtttgcttatctgccgtgtgaatcccgtccatgcccataaatgcaaatagtccaacaaaaaaagaattctcatttccaaaaagattacttaatatttttgaatttgttcaatatttatttaaagatggtcaaattaacaaagtcccatcagactaatggccatagaatttcactctctgctgctcacgaaaagttcattctctcccttttccttcgtcgaagttaattatgcaaattgtacgttcgccatattcactcgcatttgattttgttcgttatttcgttctttacccccccccctcagtcctcaactaaaagcaaataaaaaaccaaaaaattcaatttgaaaggcccgagattaaattataaaagagaatatgcaggagaaatgagagagggaataatgttgcggagagaagggaaattgaattaagagaaaggagaacagacagtgaatgagagtgacacagaaaccaatgaaaaaacaaaagcccagaattattaactaattgcctaaaattaggaattaaacggccaattgtagcaaaaattgagcttcatctgtatttatgcttcaggtcaaagaaatttcactcattgtcagccaagagtacaccccaaaatgtcgccgcaacaaaaaaaacctaaaattatttgatacttttccgttatgcccccccccccataagaatgtcatgatcccgacaagggaaaccacttttctggggtacttttaggcactgatcaagaatctggcgtcaaaaatgcaaaaatctatgggtttatctattaatttcatcatatgattttgtcaatgatttttaaaaaaggaataacatggcatatccttaccaaatcgattcctctcctcgagagggatctattgatactgtttttagagttctacgatgtctctat

SEQ ID NO: 1195 - DNA, 1838 bp, Heterodera glycines
  unsure (1)..(1838): unsure at all n locations
aatgggagaatgaatgatttaatatggccaaaagaaagtatttaaagagaaaatgtgcgcacaattatgccgaagttagctaatgaaatgtgggaacaaatttaatgggaggagcgagaaaataattgttattatgctgttgttccaaatataaactaattatgggaaaatgcaaatgttagcaatgcctattttaaacggcaagttaataggcattgaaaatagaatgcacattcgcatatcacatgcaatgaaaatgaatgctttttttgctgtttgcgcaagagcatgacatttacccaaatgccaattcccaccccaaaaatggcattccgtttgatactctttccttacgttttaccatcacgagaaaagcaaaaaaaaaaaaactttctcttcacaaaacagtgctattcttggcatggcattaccccgtataatgagagaattgagttgcagctttggcacccgccggccaacacttggaccaactccgactcgctgatgctgacacaacgcttccgtcttcgtcgacccgcgctgtcgtttgtgccggagcgagagcgcattgtggccatcattgccagcgtgtcgtcgccctgcaagtcgggcagctcaagaacgctctcgaatagcgtctgttcctggatgggcccaagtggactggaagcggtactttttccgttgttactgttgccggtggtagtgccagaagcggatgccgacgagtgatggcagtgccgctttttgactgcctcgtccgtcactgaaaaatatgctctcagtgaagacgaccgttcgtttttaggctaataaagaggggaccagttggaagaaggggacaaatgatccacagaagctgagaggaaaagcatggtaatggacgaggaggggggggggggagggcatatgggcacatttgttaatccttcagcgcatttgtggacgaatgggagggtcccgtcagctgacattaccattgccgtcctcactctcctcgtccctcaatcaattaggccaacactgttaaaactcacttaatctccggatgctcgggtcttgtcttgacagtcgtaggccggcgttaatcaatggcaccaagtccgattgggcacgtgttttcaaaaattgcttttgtctcccgttaattagtggcggtggcactcgtctgctgcccatcgcggcgggtgacgtcattttcttctgtgaattcttcagttggggtgaatttagacgaattgttgctgaatgattctgttgcgatgccattatcactgaacgactgccgacgatgccataattttagtgccgaagaataaattggatgtgcaaaatcaatttctaagagttgaagtagtccctttggcacttaaattctcgtcctttcagctttgggaagtgacgatatatttgtgtgaaaatattggggaaaaaacattcaaaacaccagagaatccttcctctctatgtcacttaaaaatattaaaaatggccgtaagggaaagaatgcgcaaaaggaatgaattaataggtgaaattaatacgcaaaaaaagtgctctttcgttcggataattaacgacattaaatccattaggaaaaaaaattcaaatcgctttaattctataacaagcggaaatccggttttataggaaattttatccgattgatgccaaagaggatgaaaccaagccaataaccagggtaggaggaaaatccctttacaaaatgaaatttaaaaatgtgtaatttttaaaatttgacttaagtccctcanaaattgcttatttagggccataaaataatttctgtcccaatttttattcgagtttcagagaat

SEQ ID NO: 1196 - DNA, 8010 bp, Heterodera glycines
  unsure (1)..(8010): unsure at all n locations
actagagtccggcgggatcgggactcccgcgggattttacgggagtcccgctcccgactcccgctttttcggtgaacgggatttttaacgggagcgggatttttacgggattcccgttcgggactcccgtcccggaaaattttgaactcccgatcccgctcccggaaatttttacccaaaaacgggagtaaaaatgcactggtaagaattgattttttttggtaaaaataatgatttttcattgaaaatctgttaaatatatagccaaaatttcaaaaaaatttcccggcggcgcctatcggcaccgccggatccttaaaatccttaattttcttaaaaaacttgctcaatttgcaaaaattggtcatttttgaacagaatctaacaatgtattgtattaaaattttcaatttttttcccggcggcgcctaccggcaccgccggcctccctcctcctccttggtcaccaaaaagttttttcaagaaatacaccgcaaaaaattttgtaaaattaataaagggagtcaaaaatataaagttaataaatgttttgttcgaattaattataaaaaataatttatttaagcaatttgaaaaaattttctgatttttgactcaaaaataagatttttttatttcaaatttctcctttataaatttttctatatatttttaatttaataaattgattgtcctttaaatttgtgcattacaaatatttttgtgagtttttaattaaattttcgaattactcccgcccgggactcccgttaaaaatggacgggattttaacgggaatcccgttcgtgactcccgtcccggaaaattttgaactcccgatcccgctcccggaaatttttttttaccggactctattttggagcaattaaaatctatacagaaattagtgattcacagtgccgagttgtgtcgtgaggaacgaaaattgtttagaaaattttatggaaaggacaaaaaaaatttccaaattactaatgatatcatttatttataatttcattgactgaacatttttaaatttatgtgcatttgcaggtgcaactcgtttttgagaaggccattgaacagttacaagactccgaacgcaaattcaagttttaaaaatttttacaatttcaataaaaattattaattccaggcatatcaatttcgaagatatcttcaaaatttaccacaccagattccagttgacatacaagtaggaaataagcttttgtcattaatatcaaatcagatattacattgtgattgaatcagttcttttgtaaaatttatgtgggctaattagtcttccgccagattagggatcattttgatcaaaaagggttactcattaaaaaataataattagaaagaaatgacgcaatataactttaggactattatttgataggttggttatataagggtttgaatatcatattagttgtagtttaagattaatttgcgacatcaataaggaaaagatcaattcaatttaatgaaatgaattgaattaattaaaatcagagttagttttaatccctgatcactgataagtacagtaattacttcatttcgtccatcacaacagattcggtaaaatggtagtgactcttatgattggaatgaaaaatggcgttgaaaaactgttcaagcagcgtccactcacaattgaccagttggacgagcagtacattgacaaaggtggcacaaatttaaacaattttttttttcatttttcccaatggccaaattaaattttatggcaaaatttgctcatcttttcaatttgaatttttaattttcagaagttttggtacaaaattggaagcccaatgttgtgtatttggtgcaatttccgcacaccgattcggccccaagtttatccccggcggcgatccaattggagacatggctacggatcaaagaaatcccattttatgtgggttttaattggggaaattgaaaaacattttaaaataaacttaaaagtttaaacactcatatacttttaccactcatttttattcaacattttagaaaataaaaatccaaaaaacaattttctttaaaaatttttagcgattatctttggtagaaccaaacgaaattgcaaaaatgaagtctggttgatgcctaatgtattccctattttcttgttttttaattatttctcaaaagttgaaaaatttaacggtgctatgtcaaccgacaaaaagtgcaaatttgggcgacagacgaaagtgcaaaatttgctaaatttttgactaaatcgactcataacttttctaaaacgcaaccaaattgcacaatcttggtatcatacgatatcccttgaattgcattattagcatgctaaatttcaaaaaattttattaagtttttcaaaaattcaagccaaaaaattggaaaaattgtcataacttcaaaggctatcgtatgataccaagattgtgcaatttggttgcgtctgagaaaagtcatgagttgatttagtcaaaatttagcacttttcctcggtcgaccaaccacgaaatttaactatttattggggattggattttcgtttaatttttattattttttgctttagactgtcagtgatggtgttctgtttcgcgctctttttgccgatgacaaagtgccatttgttgaatacaatgggcagaaaatattcggcacatccgaagagataattgacactttgaagcaggaagctttatccaagggcacacttagcgaattattagggttgggacaaaaaagtgatgaaaatgagcaggaaatgcgcaatttaattgacaatgttctatacaggtgatattgagaaaaactttttatttaaaaatattaaataaaattattttgcttaatacagtatccattttcatacaacatccgttttatcagttgcacttaatatagtctccttgttcatacagtatcctacagcatccgtgttgtcggttcaccttaatacagtttccttataaagtatccctcttcatacaacatccttgttatttgtctttatacaacattcatcttatcagttcccattaatacagtttccttcttaatacagtatcttgctgcatgatcgttttcaaaatttggcaagttccgaggccgaaactcatttggccaaaaacattgattttcaacgcattgtgctgccatcagtgctcaaggaggcgaagcgcaattggttcaaaattcagccgttgccaaaaccattttgggatgaatattttgccaagggaaaaactgtagcatatggtagcaaatcatggaacggttacggtattagtgagaaagaatggaaaaaatttgtggacaaattgagcacggaacacattccgaaagcaatgaccaaatttgtgaagcatttgaaaaaacaggtgggcactggaattgggtgggacattttggcattttgtcactgtcattgtgcctagctgatttaaaaaagggatttcttcgagagaataatctttacatccgcctgatttatttttccatttaagcttcttcgccagctctcggaacgaccttctctcaaattttcggatgtgggttttttatacctacaattaatatgatttagataccgaaatttaaattttccattactgtacggtactgtaatcgataaaaactatgagaaaaagatagataaattcaacgataaattgaagaagctttttgacgaaacaatgcaacaaattgagcaacagttgaccaaaatgagtgcaaaaggaaaaaaaacgaaattttacctttttggcgaaacgccgtcagcggtaagaaaaagttgaaaaaatgttgcctattaatttgggtgataggtcgtttcgtaagattcgccattagccaagctttttctctttttctctattagcctgcaaaattttaaaatatggtcaactttagaaaaagttgaatgaaaataatactgtttctgccacaacttatattaaatttgataattttgtttgaaattttgcaggcttatagagaaaaagcctttgctatcgaatgatgccaagaatgtaaaatttggttgcctttaagcaaagttatgccatgttatgtcgaaaaattcgctaaaatggctgattttacgaaacgacccagcacgattaatttggaaaaatattaattttaatttaaactggaattttttaaaaatcattttcacgaaaaatttttttattcatatttatttgttttaaaattaagctaaagtcaggaacatttatttttgcaaattaagtataaaaaatattttttgaaaaaagtctcgactcaagaaaagcctcatttttgggtctcattctcgactctaaaggtcaagtctcggtctcaagaagttttgactctcgaacaaaactgaaaatcagcctttattaaaaatggagagatggaaattctatgccaataatatttttgttgctaaaaagttttattatttttatgtgcttgtttagttggactccgttctcttcggcattctttcccaatttaccaacaccaacacaatttacaatggacattatgccaattctatttcggcaaaactcaatagaaatccgaatgatccgttgaaaatttattttggccatatgaaagacatttttatgggccaaaataacaccgaacaaaatcagtggcaaattaatgcggattggaaatttgagaagaaagcgaataaatataacggtaaaatgggagagaaattataaaataaaataaaataaaatattcatttacaataaatagatgattttatatatatatttaattaacgttcgaattagaacttctttaaaatttcgaatttaaaattaaattaaattatatttactttaacccaacaattttttactttatttttaattttaggccctttcattttgcgttttgatgtgcttaagctcgattatgaacaaagaaagcggttcaccaatgatgaacgtaaaacattttcgccactgtttaacaatggaaatgccgaaaattctgatgaaatctccggcactttgttttcggaacgaaagtttttggcggtttacccaaaggtggggaaattgaagggcattttgaatttgggattaggttagatcagcagaaattgcatttgacattaatgatcgggttgatcagcagaacataacataggtaatacatattgaaatcgaaaaatgtatccaataaagaccaaattttcaaagtcacaaaaaaattttgccaaaatttacctttaaattaaatttattaaaatatttcttactataaatttgaatccattttgttaaatttaaaggtcgtcactttcattgtgcaccaattgctcagcttgttcaatttggaacgatttgccattgaaatggcggaggtttcttttttaggttttttaaatttggcattttgttttgttttttcagttacccactgttgttgaaattcgatcattggcggattacattgaatttattccatcagattcaaaacagaaattattgcaaaaattagaagaaaaaattggaaaaattgggactttatcagaaaaaaaagtaaaaatctaaaaataaaataaaataaaaaatatttttatttcattaattatttgatcaaaggcattaattattttcttttttaaaactatataaattgttttttacattaattttcatttgagcgtatgaaattgggccgtgctttgattcatttgatggcctcatatttatgcgaaggaaaaattgggcaaaatgattgtgaaactgaacatgatgaaaaagcgaaaaaataccttggaagaatttgcaaaatttcgtaaaattaaattaaaaaaattattaaaatatttatttttatttccagtgaaaaatactttgctgaattgtctgtgatcgtccgaagcttagtttaccaaatgatgtacacaataaatgtggaatatcagaccaaagaatccgtaaaaaaatatttttatttttagtcaaattaaatttgattttacctttaaaaataatacaaataattgattaagctcaaaatgtttggtgccgcattgcttgactttgatggtaagaaaagaaaattcgctattttacatttattcaaaatccaataaaatataattcaaaaaaattaattcaaattgaaaaaaacgaaaaatatttttaaaaacaatttctcttttattaattaattatatggaatttttagaggaacaaaccattaaatacgaggccaaacggttgcgcaacgccataaggcatttggagaaatttgagagtgaaaaaattgaatacttacgaacgaaggtccaacaacttggcattttgatgcagaaaagtcagcaaacagattcgaaagatcctcaaacaatcgcagatggacaaaagtcaaacgaagaaattaaggtaattaagaaattacgatagttatatcggaatttaaaagtgcaaatttgaattttgatcaatttgctttttgaaactcggttcagagctattagactgatggctttaagctttatccattttgtattcttttttgtgaattaaacttcgaatattgaatatttcttatagaaattgcaaaaagaattgagcgtttgggtgttgcgcagtttcattgtgtccgaaatgcgtgccttggtcgatgcgcttgacgacgatgataaatttagccgggaaaaagttacgttcaatgacattgagccgtcacggaaccattggctcaatttgaatgtactggtagaaaagtgcgagaaagaggacagaacgtgcaaaatgaacagggagcagatgaagcaaggctttcaaatgatcactgaacgcaaaaagaagcacatattcaaggtggacaaatggggcgaaagtgatcaaaactaaacaatagaggttgggaaatcggggtagagggattaaaagtgatcattggaggtggggaagtggaaagaaaagagattagtgtgaaatgaaattgaagtttcaactgggtataattaccacgttgggtcaccctggaaggccgaaccgatgccattcgtctaattggtatcatgtcactgatgagtgaaaaattgaccataaccaaatcaataatcaagccccgatcgggaattgactaagtgattctcggaataaaagtaacaattaattttttaggaactttgggccaaaacggtggaccaggcagagagcgtttttactgtacaaaaataccacgaagttctctcctatcggttgggccaactgcgcaagttgtacgagttgcgcaagtcgcagttgccacgtgacgaggcggtgaacatcaaaaaggtggaggcatatttggaaaatattcaataaataaatactatttatttatttttaaacttaaagattgacgagcagtacgtcaaagtgaaggcggagctgttccagcgactgggcgattccgaagtgaccacgacggaggacaacgacgagggggcggaagtggtcgaagtgctggcagaagtcacattcacatcaagtgatcagaacgataataattattattaaaatgaattaatattgattaacacaaaaataaaattgattagatcgcaaaaaatatgtataattatatagttttattttattaaaaacattattttattattattttagaaaaacaaaatataacagcagacgcagaaagaattcgaaaagcaattaaaaaaatgtttgtttttgttaatggacaatccgaagaactcaaaaagatgtccagtgaacagcttaaaaaagtaaaaatgcaaaaaagaaaataaattaaaaatttaaataaaattacgaattaaaattttaggatgaaatgcgaagtgaaattgacgcggttgtccattagcattctcataatttatttgtaaaaaagcctaacaaaaaccccanattaattctaataaattcgtctaatattttaatattaagtggtacccttccccatgaattgtttctttcaanatttatt

SEQ ID NO: 1197 - DNA, 3984 bp, Heterodera glycines
atgaaatgcgaagtgaaattgacgcggttgtccataccattcttttactgactgaaatgaaaaatttgattgatttattggacagaaaagaatttcgaagagaacacttatccatttgcagctttccgtcaatcatatttcaggtggataaatcataaaaaaggaaaaattgaaacttaaaaagggagaaatttgtctaagcttttcttgaaatttttaaattttcaattaaaactacctaaaaatgtttacttttacaacgcaaattcttttatatttgcctcattaaaaatttctttccttcattctgataatttgaatttataaaaatatatgttttttaaatttcagtggcgaactgttcattttattgcgtgccaaagtggaggaggacggcacaaactttgatgaggaagaaatcgccaaagggttcaaatatgtgaagggccacaattcaatgcaccgtgcccacaaattgcgggcttttctgttcgattgggccggcaaagtggcgaaggagaagaaatttgtcaaagtgagtcagttttggcaatcagtgacataatgccaaattttctttttttcaatttttaaatgttaagaagctcgcctggcgcatgggccaactgtccaagctgtacatgttgcggaaagagaaaattgatgaaaaggacatcaagtcgtgggcaagcaaacaagaagagttgagtggggagatggagaaacgatggacggaattgaagaccataatggaaaaaatggtaaaaaaataaataaaattatttacaaaaatttaatacattttcctaaaatatttcaaataattggtgttttctcagtcggcgcatcgacctcccccctagcattctcataatttatttgtaaaaaagcctaacaaaaaccccaattaattctaataaattcgtctaatattttaatattaagtggtacccttcccatgaattgtttctttcaaatttattatttaaactggcaaatttttttttaaatattcaaaaaaattaaggccgataaaatcatcgaaaatgccactggaaaaacagacaaagccccgctcgcagccgccaatgtttatgccgaggatggaaagcccggaacaatgccattggaggagattcaaatcgaagacaaacgcgaactttgagaatgggggcacttgttaccatttgaaatggtagtttttattctttttgggattttttattttctgagcagatactgtgaaatatgtacaaaaaacaacaaattttggacttttttgcgttcgtttcgaatttagggatttgaaaataaatcccgttatttattcatccatttatgtaaacacgccgtttttggcattggttgtattttccatataccgaattttttcgattattagtcccccctaaattataaaaccctttttgagggaagttgaacaatagaagacctgctgggtctaataattagggagtccaattctatggaaaacgagttatcataccatattcagccattttagatgtattttactagaatttaatgaatttgaagaaatttttgcaaatttacccctcaattcggaaaatttatgtccatatatttgccattttatgtccatattttgcgatttttggtccatattttatggccatatttcgcgactttatatccatatttttggactccctactaataatagaagaaatacggtataccatatttttctatacacatatttcttttaacgcttttattgacttttgcccttttatttattttatttttatttttttgatggtatgcataaacttttatggcaattagtttctgttgtatatgaaatataaggaaaaaagtttattctcctaaaatattaacatttaattaaaaattataataatctcatttggaaactaacactttaatccaaattaattattccgtcattaaaaaaattattctcaataaagccaataagtgggttgggttatgtgagacagaatcctacttgtggtgaatgcagccgttttgggtggaagcgaatgcgcggcctttagcaatcttggccggcacttcacgcccccatcacaagtttgctactgacagttcctactttgaaaaaaataaaaacccattagcacggtgcagggtcgctacttaaaaaccatcataatgggcgttatttaaaaaaccatcataatgggcgttacttaaaaagccatcattatgaaaatttttgtcgaaaaattatttataactttgctcgaaagcaaccaaatttttaattcttgatatctttgatagccctaagtgttctctatcagtctgcaaattttcaaaaaatttcgttaagtttcaaaaaagttatagctcgaggaactcaaaaaaccttgattttcgaacatttttggccataactttttttaaacttaataaaattttttgaaattttacagactcataaagaacatttagatctatcgaatgatagcaaggattaaaaatttggtctttttagagcaaagttataagcaaaaattttcattatgatggtttttaagtaatgacatagcaccattagcactcggctggctcagaaggcaaacgtccccgctaaaagttggcgataagaagtaaagttggaaagaataaagaatcgttcactaataaattatcgattaaatcaagctgaaaatttgaccaatatttattaagggaattgtcgagactgagttttattttccgatttttaaactgctaatttggatagttcatttgctgatttttagttcacttgttgattttaaatgattttctgcctatatttggaattagttacttttttaataaaatattaaattttcactttatcacttgttcaattcaaataatatacaaataattaacgttacttgcgccaccactaaatgtttttaagtatatcaaaaaagataaaattttaaatgaaaagcgaaaaaataaatataatattaaaaataaataaataataacgactgagaaaataatatgcaaaaaattgaaatttaaataaaaataaatataaggcaaagaaataaattatagaaatgtggtaccccgtgtcttggaccgatcctcaactggcttcattatgcattaccaccatgtctgagctgggttgcgcataagggatttctatggcgtgaaccccaaacacgccactcctcgagggggtgccaagtcgttatataaaagccatcaaaaagggcgttatataaaaaaccatcaaatgaaaatttctaacagaaaactgcccataacttttgtcaaagtcaaccaaattataaattcttggtatcattcgatagccctaacatttctctacaagctcatctaaatttcaaaaattttttcaagtttgagcaaagttatggccaaaagtacccaaggaacctggttttcaaacatttttggccataacttttttgaatcctaatgaaattttttaaaattttgcaggctaatagagaaaacatagggctgcgaatgttatcaatatcactttattttgttcgttctaagaatgttttgatcaaaatttttgatcatcaaaattattttatgctaaataaaaaatttacgttataaattgtttatattttttggtttcttgatttcattttatagccctcattgttctctaatagcttacctaagtttcaaaaaatttcgtcaagtttcaaaaaagttataccaaaaatgtctgaaaaactggttccttaactacttttggcaataactttgctcaaacttggtaaaatttttgaaaatttaggtgagctaatagagaaatgttagggctatcgaataatactaagaatgtttaatttggttgacttagacaaaagttatggacagttttctgttggaaattttcatttgatggttttttatataacgccctttttgatggcttttatataacgactcgggaccccc

SEQ ID NO: 1198 - DNA, 1184 bp, Heterodera glycines
tttgacgagatcagattggagagggtgggctgagaattacgcgaaaggcgagaaaaaggagtgaacaataaatcgattaacggaatcttttttctaccttttccataatggcttctgaaaaattattcttaaattttcatagaagttaagaaaccgggccaaaatttcaaaaaaaaatttccccggcggcttctaccggcaccgccggcgcctaaaagttccatttcattcttaaattgagtcaaaaaccaggaaaagctctaagtatttataaaaatttttatttctaaatactttctgacgaaaaaactcaatatatttattttattgaaaggggttgatctctcgccgttcctctcaagatttaaattagatatttaaaagaaatttgatggtgcatatatttttaggtaaatttttttttgaaaacttcggcttaggcttcgaaaaaattgggcttagccttcgggttcgagtgaaagccgagcttcgcccaaaaatgtgctcatcacttcttatgtgtgtctaaaccatacatgtatgttaattcattatgaatttcaactgggacccgagtgtcatggaacagttcgtacaacagagtttcatacaaaaaaatttttaagaattttcaattaaagaatttttttcttaaaaaaaggaattattttcaaaagaaaaactaactcttaaaatttttcaaaacaaaattggaaagtaatttgaaaattagcagaaaaactagcaaaaattatttaatgttttcttaatgtctctctagatttgaaaattcattttgactttttttgtaaagaaactccattgtacaactgccattgccattatatgctattgcttgggaccggagacgcaaccggaatttttcctataaaattttttcagttttaacttttaaattggtaaatttttgagtaataactagggctaatatttatagttttttcactattttttttcctgagctctccgtggcctaaaacttacgaaaaacaagtttttttttcggttcttgttatcctacttttcgagttattagcaactattttctagttttttatttttaggaactaaaaaactataaaatttttgaaaaaaaactattttcaactatttttactagtaaagaaaaatttgttatgaaaaatgcaataaaaagcgaaaaa

SEQ ID NO: 1199 - DNA, 1338 bp, Heterodera glycines
cagaagccgcaggcggacggcccgggggacagtcagagcgatttcaatttcaatgctttcttgggcaagccggacgagttcagcaaggaagtgactgaaggaggcgctcttttcgatttcaacttttgagtttttcctttcatttggttttggttgtgctgtagctgttatttttattttaatctgcttatcattatattttggccatttttgctttgtttagcattgttttgttctggtcagttcatttgtgtaagtaactgtgtttctgtttatttccaataaaatcatttattcatttttacttctttttttcgtttattcgttcgttttcaatcaactaattacctaattattttttcagtttatcatttgttctgataatttctgttttcctcctctttaccccaaaagctatgcttgccacgcgtcccttccgtttcgatcggcccgcgcctcagccgcagcgagtccatccgttgtcactgattcaaatggtcactgctgcgaaaatcgttgacgaacagcagcgggccaaagaacgaacgcagacgccactgtgagttgagagtgacgcgaactgttcaattttggttggaaatgaccaattgctttgttacgatatccaaattgggtggaaattcttttggttacgttttgccattggtctcaaaaagatttgtttgtgcttttcttcgttcaattccccttcctttctcatcagagtttatcggatggatccgcaattgctcatccgagaggccaccttcaacaaaatcgcacagaaacaagcggcggccaaatatttggcgaccaaaaagcgtcgggagaaggacgagcagagaatgcgcgagttcgtccgccgggcggtgacgccgcccgactttggccaaatggacgccgacgcaatggtcaaactgtcggattttatgcctgtactgaatttggaattctttttgagtgccatttccgaatgcttttttcatttgtttaggccgtgccggcccaatttgaccgctcttttcgctacgaaacgctcactgttccggtcaaaattgcctcggacggagtgtattcatcggacgacattctcatcatcggtgctcaggtgtgagagcgaatttcgatttggaaaactaattggaaattatgcgggagtatttggcttttctaatacgctttttgaagatggaactcgcgaacaaaacaatgacggcaaagtgacggactgctgaaggaaggacagaaatttaaatgactgactgacggacgcaaatttgccttaatttgttcattttttatttttcattgactcatttactcgatctgctgtggaca

SEQ ID NO: 1200 - DNA, 6732 bp, Heterodera glycines
  unsure (1)..(6732): unsure at all n locations
atcctcagtttctttggcctaactttttgcttacttggccaattcctatattcatggtatcaaacgaaagcttaaggtctatagaagcttnttgtataatctcttattttttgctaaaagcaatagccaaaaaattattctcgaaaaaattgaatttcgtgatttctcattgtaatttcttttttaatgccagtatttgctctttttttgcatttataaaagcccgagacttttagctctcatttgataccaagaatatgtttattgaaaaagtaagaaaaaagtttatggcctaagaaactggggatggctattcatgggacgcataatatgacatgggacgcataaaaccgactagaaccaataaaaattcaaattctttcaaatgtctttttcaaaatcaggcatagcaaagttaataatttgtcatgattagagaccgcattttgaggcaaatgccttttttttctgcgcactactttcgatatattaagcataaataacgcattttccacttggtttgaggcttctacgttgacttttattatgccttttttttgcctttttcgggattttcgtgctttaaatgccttttttggcattttgccgttttcatgccttttttagcgttttttccgaaaaattccataaaaaatgcaataaaatcgggaaaatacacccctaagaaatgacttggaataattttagaaaatacacccctaagaattgaaaaaatttcagaaaatacacccctaagaattaaaaattttcttaaaaattgatcgccaaaattttatcttttttctttaaaaaatttttgatttaaaatttgttcttttggaaaaacattataaaacattaataatctttaaaaatgaccaaaattaagttcttttgttaagttttacgtgtttttgctcactaaaaaccttagaaaaattttttttatgccttttttcatgcctttttcgggattttcgtgccttttcatgcctttttttcaattttttggtgcctattatagtgcctttttcgggatttttgttgcctttttttgcggtctctagtcatgatacattctttgtatgtgtgtggtatatacagcaaaatgaatgaccgtaaaaattacagggaggcatactcaagaaaatgtggaagatcagttttttggacgcagtgtttggtgggggaacgaagtgtttgttgacttgggaatggcagtgctttttttggggggggggagagactcatttcatcacaactgttgctgctgctgttgttgtggtgcttgttgctgctgctgttgctgacagtgactcatcagatgggcgaacaccgcgcgaatggcccacaaaaactgtgtccaatccgccttctcccaccgctgctggcctccgccgctcggcgagaaaatggtgccggcaccggcggctgcggtcagcgtgacggcatcggccgagtcgacgatgaccagcagaaaggcaccacgcccaccgttgacggacagtcggtagatggacagttggatgtcgctgaaacaattggaggcgttgctgcaaatgaaaaaatcttagaatatttcaaaatttcttcttgcgtttttctcatggattttgttgtttgtttttttttgcaaatgattcaacgcttaaaaactgtggtgttctgctttgatagcgtttattcaaatttatttcagccaattttttcatttttgccttgttatttttcttactatcatttgcaacaaaattcagacagaacattttttgtttctaattctatttaattttgatgccaatctacatatttcattattttagacgctttttattgctattatttgttccaattttaatatgaatttcccatcaagaactcgaactcagttggtaagctcttataacgcactctgttattcttaatccaacgttgtcgttaatttgttttaaataaaaatgggaagtaaaataggttaaaatttttatgcagttagcgatggcattcccatcttaactcggcgaaccgccccatctctccagtgaatttgccgttgtccaccctttctcatgggcgttggaattggcatttgtttctgttcccctttttccaacatttccattttccaatgaatccaaaaagaattcccattgaattggtagctgaaactgttgggtttttgaggttgaatcggagatggggtcagtgccgagtttcagcttcatttgatcatttccttctcaaaaaaattggcaaatggttgaagaaatcaaaatctttggttaaaaaattacaatttcttatttaaatgatctgatttcaaggtcacggactgcatcgattactcgaacgaaatcgaaggaattattcgtgctgttcccctaatatggcaacgatttgaagaagcatccaaattctttagaggtctgttttacaaagctcttgcctcatttcgatttgttcacatttcccaattttttcattttagtgatcaacaaatttgtcggctatttcccaccacttcgcgattcatttcctacgccaggcaacgaaacagtaaacattagaaaacactaaattaattaattaaaaattgcttttctttttagttggacgaaattctgcgctgtgctggtgtcggagtcagattgttagttgaggcagagagtgtttcggactattccctctcaaacttacgtggcggtgagtttgacgagattgattctactttatttaaaatacatttaactcgggttgtttggccggattgcagatggtcacgggatttcagcatttactaacgccaatttttgagtttttttgggaacagggaacaaaacgggaaggggtcgacagatccaccgggaaaacaaatttgaaattttttactatttttaacagatttcgccagaaattgtaaatttagaaaaattttggaaaatttcagtaagtgagatattggagggggtggggtaccaatggggaaaaaccatattgctaaattttcggtacaccttaaacttttagcttaatgttaacactttttgttattccagccctgttcgccatttattattcggccgtgtactacatgccaacgactgatgactgattttgctgatggacttattcgtgacgaaaataaaataatttgttgttgcatttctctgttgttctgataaaaatttatttctcagaaggtctttttctgtaaggcatttcatttatgcaattgagaacacatttctcaaattaaccctgtaaagtgtggcatcaaaaatttaggactcctcatcactccgagataaatgtttttttaattttttggaaaaaaggggagattcctaaatagtcagcgatggcattcgcaatttaacgaggcaaaatgcccaatcagacgaatgttggaaaattgtgaacaatgaatttgccgttgttcacccttttttatgaaaaggcaataatgaagacaaaaaagtcaatgagtcggctgaaaacgcctagaaaatgggcataattttgagtgccgatgaaaaatcatttaggtaatcactttttgttttgttttttcgttcgtttattcgtttcccatcctaattacctaattatttttcatatcatttgataatttctgttttcctcctcttttcccaaaagctatgcttgccacgcgtcccttccgtttcgatcggcccgcgcctcagccgcagcgagtccatccgttgtcactgattcaaatggtcactgctgcgaaaatcgttgacgaacagcagcgggccaaagaacgaacgcagacgccactgtgagttgagagtgacgcgaactgttcaattttggttggaaatgaccaattgctttgttacgatgtccaaattggatagttgggtaaattcagttgaaattccatttggttacgctttgccattggtcggtacttgtacaatttacaccccatagaaagaatttttaatttttcaaaagccatgaaaatatgtttccagtggtatttggggtcgctaatcatgaatccggcatccaatcatttaaattatttttagaacaaaaatatgaatttgaaaaatttaaattttctactttttgttcgatttgggttcggatttggtcgaaatggatatcatattcgtgatcagtagcgaccgaacacccctggaaacacgtttttatcattaaaaatataaaaaacttctatgggtgtaaactgtagaagtacccattggttcccaaatgatttgtcctggtgcttaattaagacagaataacttctacgaagtgtcaaggaagcgagtgagattatcagaaagttttaattgtgaatgaattgaaaagtccaaatttatgaattttgaattgaattaatttaataacaaacccaattttagttaaccaaagggagcaattgaagcgcaaaatcattttggcgaagatcgtcaaccaaagtttcagtttttagtgctttttactattacgttttcgtttagagttcactaaaatttggggtcgactcgcattgaacgtgggagagagttggcgaacacggaaatgctgaagcagcatgttgaggacgtcgtgaaggcggagcagtacgcggcttggcacgtcaacaagtaaatgaagcgttgagaaattggcacaatatgaaacactttcagggtaaagttcgagctgaagcgcaaaatggcactgaaggaggaaatccataagatggttggcatgcttcatcaggtgaagcacagcgtaagaatggggagaattggcaccgtttgcttcagaattcactcgaccgcgacattgagaaggccgaaaagtcattcggcaacttttactccgacttggccaatgcgccgtggctgccggagaagcgagagattcagagggagttcaagaagtacgacgacgagttggcgaagttccgtgaacagatcgccgagtacatcaacgccatttctaagatcaaatcggaaggtacgcaatggcattttattgtttaacggacaccaaaattcagcggaattgcatgccaagttgccgttcaaaacattcgtttatacgctcgccaattattcaaagcaatcgggaaaagtttgtcagctgttgaaaaaggaacagaagaaggcaaaacaggtgaaagtcatggattcaaagatgtaatttggaatttttacaatatttagcttcgggaaaagctgtcgtagatgagcgacgaggaaattcgcaattcggggttaacttttgatttgggatcggttcaaattattacgtctttaggaacaggacacggccatagtggaggccgcaattgaatctcatggacaacgcatggagcaagaaagtcggaacgaaaccatcggagagcagcgccgcgaggatgacaagcgaaacgaagcgaacgcaattcagcagccgcaacagttcgacatggacactcaaaatgacattgtcgtggtgggacagcaaaagctgcagcgtattgtggaggtggaggagaacagcccaagtgacgccgaacagatgccgcagcaactgctcatggacagagagagtcagcaacacgtttttgccacgccgctccctcccgtttctgcgccgcgcggctgcgacgacggcgaccagcaggcgctgttcgacttcttcgggggcgaaggcggcgccgatcagagcgccacggaaggctctttcaacttcggctcgttcatgaccactctggcagggcccggcgcgaagaaggggcctcagaagccgcaggcggacggcccgggggacagtcagagcgatttcaatttcaatgctttcttgggcaagccggacgagttcagcaaggaagtgactgaaggaggcgctcttttcgatttcaacttttgagtttttcctttcatttggttttggttgtgctgtagctgttatttttattttaatctgcttatcattatattttggccatttttgctttgtttagcattgttttgttctggtcagttcatttgtgtaagtaactgtgtttctgtttatttccaataaaatcatttattcatttttacttctttttttcgtttattcgttttcaatcaactaattacctaattattttttcagtttatcatttgttctgataatttctgttttcctcctctttaccccaaaagctatgcttgccacgcgtcccttccgtttcgatcggcccgcgcctcagccgcagcgagtccatccgttgtcactgattcaaatggtcactgctgcgaaaatcgttgacgaacagcagcgggccaaagaacgaacgcagacgccactgtgagttgagagtgacgcgaactgttcaattttggttggaaatgaccaattgctttgttacgatatccaaattgggtggaaattcttttggttacgttttgccattggtctcaaaaagatttgtttgtgcttttcttcgttcaattccccttcctttctcatcagagtttatcggatggatccgcaattgctcatccgagaggccaccttcaacaaaatcgcacagaaacaagcggcggccaataatttggaattctttttgagtgccatttccgaatgctttttcatttngnttaggccgtgccggccaatttgaccgctcttttcgctacgaaacgtcaactgttccggtcaaattggctcggnacggagtgtattcatcggacgacattctcatcatcggtgctcaggtgtgagagcgaattt

SEQ ID NO: 1201 - DNA, 2434 bp, Heterodera glycines
gaaataatattaactgtaaattcagtttcaaatcatgctgtatcaaaatctaagaaaaattgtgccatcagcagattctcaaccgttatcctccttcattcatgatttattacgacggaagttattaagctgcactcatcccgaatttccatacaaacaacaaggtgtataatacatcattgtgttctttatttcatttttaaatactttacagatataactgcatattcttcgacattgccaaacgtgctttacgcgggtgttgatccaacagctgacagccttcaccttgggaatctcctcgtgctcaattccctgattagagcttccttttttggttgttctcctattttattaattggagaagcaacagcttccgtcggagatccgagcgggcacaaaagaggtgccagacaaaacatctaatgaattattgataattttaattagacaggaaattgttattacatgaatttatctatgcgaattcaaaggcgttgcaaagacaggtggagaaaataaaggcgaatgtttcatcattgtatggggaagacatttctctcgaaattcgaaataatgcagaatggtataaagaggtgagtttggctcgtgggtctcttaattttcagctttttattagatgcggattttggactttttcgaatcaacaaaaagatttcgcatgagtgacatgctgaagagtgggccgatcaagtctcgtttagacgactgtgaaacattgtcctatgctgaattttcctaccaaactttacaagcaattgactggctaaaactttacgaagaaagaggctgtctttgtcaagtgaatttattatcgaattataatttccataccccaaaaattctcttttgctgttagattggcggaactgatcaatttggaaatatgagagccggttttgagcacatacgagcaaataccgaacgtttatcaattgcgctttgtatgcccctactaactgataaaaatggacgaaaattgggtaaatcttcggaccaaaacggaggcactgccccactctggttggatcagttgaagacctcagcttttgcattttatcaacatcttcgacagctacatggtaaaagcaatgttttaataaaatgcacttttttaagccgtatttcataaaattataacgtttagatgatgctgcggaacattttttggttagcttttctcttcgcaaataaccgaagttgaagatgtacttgaagaacacagaaataatttgggaaaatgggtcgcccaattcatctagcagaggaaatgacagccattgttcatggaaaagctgcgctggaaagagccaagaaatgctctaaaattttattcgatggtgaataccacaaattaaatatttgaattttaatgtctaatgtttaggcgcttcgagttcggaactggaaaatctcaacccggatgaaatcacagaaatgttcggctcggcctcaaccttcgaaattgtatgtggttcgataaagacaatgggtgatctcgccgcaatgacaaaacaggatggaataaatttgatgagagctggtgcactgaagataaacgggacaaaagcgactgacccagaagaaaaaatagatttggaacggatcttaataaatgggagatttacaatagtctgctggggtaggagaaaattttctttaatcaaatggtcttaaaatatgtttgtttacaaataatgtgtgtaacataatgaacgaataaatttgtcattgaaaacgaattataaaatttgtgtggtgttgaatcggttttgccaaaacactgcaatcaaagtgaccacatacatgcctgcagctatccagcattgtttcgccttttcctcgtacttttcttccaccatttgtctaaaagtttttcggtcaaaaatgcatttgcttatttagcttaattgcagcgagtttttatcttaaaaggcatttacctttctagctttgcttcttcctcaaggtgaaggtctggaaacaaagtcacagcgtgcatataaaagaaaacgccaagaaggcctagaaagacgattccccacacggaaataatcatactgaaagaaaaagaataaaaattgtgagaccgctggttttcctcaccaaaaagcagacatctttggtccaaaaagtggacaaatcttcatcgcgagaggaaaggaaagcacgctaaaataaatgttaattagttttcagaaaggataaatggcaactcatacaataagcaattcgtacaataggcaatttacaataacctatccctacatatgtacgagttgctttttgtacgcgttgtcatgacaccgtcaaaaggcaagaattaagaaaacaaataggtacatacatatgataaaaataaaacaaattttgaagaaagtaaattctgaataatttttctgggttttgagga

SEQ ID NO: 1202 - DNA, 2074 bp, Heterodera glycines
  unsure (1)..(2074): unsure at all n locations
atcatacntgaaagaaaaagaataaaaattgtgagaccgctgtgttttcctcaccaaaaagcagacatctttcggtccaaaaagtggacaaatcttcatcgcgagaggaaaggaaagcacgctaaaataaatgttaattagttttcagaaaggataaatggcaactcatacaataagcaattcgtacaataggcaatttacaataaccaatttaataaaaaggtctaactctaaggctaaagcttcggcctagccctatccctacatatgtacgagttgctttttgtacgcgttgtcatgacaccgtcaaaaggaaagaattaagaaaacaaataggtacatacatatgataaaaataaaacaaattttgaataaagtaaattctgaataatttttctgggttttgaggaatacaaaatttaatggttggtcttcgattgttggttttctttttttcctactacaacagaacagcagatggaagaaatgaaaagagaaaaaaacgcagagagaaagaaaataaagacattttcttgctgattgggtgacaaaaaacaagcgcctaaaaggcaaaacaaaaaatgggcattaaattagcataattttagaattttgaattttaaagtgcttttttgtccgcagaacgaatgtctgcgttaattccatttataattgttacactgttttgggctgtcattggtgcaggaggcccatttttggtaccaagtggtatgaacagaggtaatatatattttcaatatatttcatcgttttcgaatgttaaaatgaataattatttgtttccgattttgtatcattattttttaagggatcattcaaacgatgatcgtactgaccgcagtctgctgttatatgttttggctgatcgtctaccttcaccagttgaaccctttgataggaccacaactgcccgtgaaaacgatttggtggattcacaacacttggggtatataaatattgtacaattgcctatttctcaacacacatagtcgactcaatcttaattttcatttctcaaaactccgaattaatatcttacaatacatttctatttttagggaatgtgaagaattgatgatcgatgattgcagtgattttccacttttgggtgtagtattagtgaattctctatttctgtgaaaaactggcatgacaaaaagacacatataatttttcaaccttttatttctataaaaattgctttattttttattccattgaattaataattgttttcattatcaataaacccatgtttttttttaaattaattttccaatttggttttatttctttacaattagtccatcaatgagtggcaccgataggttgccaagtatttctgcaaatgaatcattttcgattgattctgatgttgccagacgtttttgtcaggaaaacagagaaattgttcaggtgattattttaacactagtctttgaggattttcttcatccggttgttcctttagatttgtgcgttgttggcgtacaacaaaacatatatcgaattgttggatgaattaattgccaaagctgacgaggccgtaagacataacagagatgcgcaaaaggtggtcaaggataagctgcttcgtcctgataacaagccgggaaaacgtcgacggagaaaggatttcggactgcactaccgatacccatacttcagagatgccagtggaatggtaccagcacaaaacatggagtctttggagttgtctcgcgtctgttctttcaacccactgacggaagaagaaaaaaagtgtcagttcattaagaagcttattattgtttttgccgggctcaacttattgttacacttaaattaattaattttaaagggacagaaaaagagttgagggggttgcgagaagccgtggcgcagtcgctcaatgaacaacaaataataaaattggatgccaagtgatttaatttttatcaaagtctttttcaaatgtttttgtttgatagaaaggaggntctctatcggaaattgcgaaccgctggagttgagacgacagacgaacaaatgaagaattgccgtggggaagtgg

SEQ ID NO: 1203 - DNA, 3687 bp, Heterodera glycines
  unsure (1)..(3687): unsure at all n locations
aaaactggcatgacaaaaagacaccatataatttttcanccttgtatttctataaaaatgcttttatttnttattcatgaaaattaataattgtttcgatttatcgataaaccccatgttttttttaaattaatttcccaattggtnnttatttctttacaattagtccatcaatgagtggcaccgataggttgccaagtatttctgcaaatgaatcattttcgattgattctgatgttgccagacgtttttgtcaggaaaacagagaaattgttcaggtgattattttaacactagtctttgaggatttttttcatccggttgttcctttagatttgtgcgttgttggcgtacaacaaaacatatatcgaattgttggatgaattaattgccaaagctgacgaggccgtaagacataacagagatgcgcaaaaggtggtcaaggataagctgcttcgtcctgataacaagccgggaaaacgtcgacggagaaaggatttcggactgcactaccgatacccatacttcagagatgccagtggaatggtaccagcacaaaacatggagtctttggagttgtctcgcgtctgttctttcaacccactgacggaagaagaaaaaaagtgtcagttcattaagaagcttattattgtttttgccgggcccgtccgggctcaacttattgttacacttaaattaattaattttaaagggacagaaaaagagttgagggggttgcgagaagccgtggcgcagtcgctcaatgaacaacaaataataaaattggatgccaagtgatttaatttttatcaaagtctttttcaaatgtttttgtttgatagaaaggaggttctctatcggaaattgcgaaccgctggagttgagacgacagacgaacaaatggagaattggcgtggggaagtggagagaataaaaaaccgcacaaattatattcggtaaactttttgataatcaacccaatgctagtaaatgttcagtggtcgtcccgtggatgaggtgattcaggaggccaaaggcgactttagtctcgtcgattgggcaaaaattgcttcttctgtggtaataatttaaagcgaatttcactcgtttgttatgcattacttaaatgtttagtttcaaggaacgcggtccatcatacaactcaggcaaaagtggttctgtgacatgatgttcaaccaagaaccgtggactctcgaggaggaccaagaccttctctcattggcggccgatttttctgattgggattcgattgcgcaacacttaaagacaggacgaagcgctttccgttgtttccagcggcacgcctatttacaggacctattaaaagaaaaaaagtgcacaattatattgtttttaaagtacatttttatttttcttcttacaattaggccatggactcccgaagaagacgacaaattgctctcatacattcgcctcttcaaagttggcgagcaaattccttggacaaaaagtaattttttcatttttttttttgatttaattcgcttttaacaccagtttctatgtacatggagggtcgtccaaaaaaagcgtgtgaatatcgttacgaacgttgtacaagtgaagcgttacgccacggacgatggaccgaagctgaggatatggtattgtctgatggaattcagttgtaacaaaaaaaaacatttagttgctacttcatgccattaacaaatatggtcctcaaaattgggccagaattgcgagttttgtgccgggaagaactctgttgcaatgccgtgaccgatggtgtttcaatgatttattcctcaaaaacatttgtttcaggattcacgtgttggatcacaaacgccgagacttgccttggggatgggaggagcaccagcgtctcctttacggcgttgagctatttggtcgcagtgaatgtgccaaaatttcaaaattgttgcctggtcgaaacaatatggatgttcggatgcgaattcggttgcttgtcaaatacaaaattgaagtaaatcacaatcaaaaaacatccagtacggttaatttttaaggaaacaatgaaccccaaaaaggacgtcgtctttcgtcattttgccaaaaattacttgtgttgtaaatcacgtcgaacatccgtcgttgacaaattccaacgctatctcgagactgaacagcaaagccaaaaaaatcagctgctctctcgactgggacttggtacttatatggtggattttgcagattatagtaagttgataagacttacaagcagaagcattatacttattttccggatagtttaactatgagttataaccacggtttattttatggaaatttgtattttcttctttaatcgtgtttaagcaaattaaaatttggttaaagaaaatgacaaaattcaatctattttaaaaaaataatacatttgacttaaatataaaaaggattctttcagttagcgccttaaaaatgccttttccccgaaataacagattttgacgctgatgcattaagcatacaataccgatatttagttcagtttggaaaacgagaataccaaaaattgcgatttctcaattttagccacggttaagaattaaccgcaagttagggaatgaggcctcagctgttttatttatgcacccaatttagcggacgtgaaaaaggaacgtgctgagaaatttggtcaatggactgtgaaggggtcaggaagatgggttcgagcgttgatgaaaaatccaaacgaatataacagtgaagatctgatggaagagttggacaaactgcccgaagaaaaacgggaagaggtaaaatgagggacaaacaaccattcccgtattacataatggcattatcaggctatcgaatggcttcacaaatcggatgaacgattagagcaagaaagacaaatggaagagacaataccggaagacccagtggaagcgaaagatttttacgagcgaatgtatcccaaagaacgactcaaagaactttcggaatttgttggaaaattactgaaaccgacacaaaagtatggttgtaaatgaacaaaaaatttaaaatatacgtgaactttgttaagtgatattgcctactttgagcggcacagagttcgaccaggacacatgaaattgaggaaggtaaaaggcacacaaaagaggaagggccagaagcggagaagcggagaaagaacgagaggttggcgaggaagctcaatggagaagacatcgaggaaagcgacgtcatcggaatgcgatggtccgatcggatgatcgctgaaatcaacaaaagtctcgaggaccttccgcaggtgttggtttatccaataattccaatacaaactcacaatcagctgatttccatttaggaaaaacgtcgtgaatttgtggtccgcagtctttgcaacgcggtccgacagcgcgtccatcaaacgaatgtcactctgctgaagtccaagcctgactacagagacaaagtaaagacactggtacacgattacattgaacaggtggtcaatttaagtcgtttttctgtgattttacaagatttaattcaggtggttaacgatccaatagtgccaaagccaataaacccaaaagtaaacaacgaaaaagttgttatgttgccgcaaaattgccacaatctgaccctgaaggagatgatgaagttgaaactcccaccgaatat

SEQ ID NO: 1204 - DNA, 3259 bp, Heterodera glycines
  unsure (1)..(3259): unsure at all n locations
agagatttgctaaaatacaatagtatgggatacgcaaanagtcaacagatctgtgtgaagtcaaaagctcatgaggttcttctttggtattcctaccgaacaatgacactattttttgtggctgctgacaaagtgttgatgagcaccttgtcacagtcgggcgacacgcgaattgttaccgaatcgtcgtgccgcggtgcgcgaattcgtttaattgccgaagggatggcatagccaagcagaagagggccgggcgtaaaacaggcgacagaaattggcaaaagcttaagagagtagcaaaaagtgaaccaaacaatgtaattaaatggaaccattttaccgaagcaaggtccgagtcggcgccaggaaaagacaacttaattttgaataaaaattataaatgagacaatcgtttacttttagcagcataattgcgatcccagtattttgaacgccagtttcaatagcctaaataaatcgttttaaaatggttaaagcatgcgcttgaatgtttttacaatagcagtgacatcagcaggcgcctgtgccaaaattattgaagagaaacagccgaacatgaagccgcaccatggcaaaagcaggccactgacaaatttttatatttaagtgcaattaaattaaattaaaaaactaacgctaaaagaacggtccaagtaatttgagcaaaaagccataaattaatggagatgccaaagataatgatgaacacaagaacgaaaatgatgaaaggtctcatcagcttaattacaaaaaatttaatgttttgatagatggtccttcttacttttttagcttttgtggccattcctggtttgtatttggcgattgtcagaccaatgagaagaggaatgaccaacatgagcaaagaggccactattttggcatatggaataaacacggaacgtctttcggagggagtcgcaaagtcggtagacaggtaaattgacttgagaattcgacttccgagcacatttatccaaaagggcatggcaactaaatgggagagataagacgataaaaagggcaattcgaaaggggaaccaaatgacgaacctaacgctccaattgtgcttagaaatgtcattgtcacggacaggttggcgtttccattgagtaggacagtccaataattactggcacctcccccgggggaacagccagtgacaaacagaccgagtgccagcaaatgggttctacggttatcatcggagaacagaaacagggcgatggtgtagcccaactaaagttacaagacactcaaattaaaataggaacaaattcttgacaaattcgaaaggctaaccaatggcataatgataaactgagtgaagaagccaattgctggagccaccggtctttttaccgatgttaaaacaacattgaggtcaagctaaacgaattgcgacttgatttttatattaattgataaatgtgattttacaatatgggacatacttcacatcccatgagaacatttgcaattgttatcaagcacaccaaacaagtgacaaaaatgcggtcgaggaattctctgttagggacttggatattcaaagtcgaggaataaattgaagtttcattgtagaaaaacgaagaattaagtgaaatgttactttccattcgctaaaaaaaattatgagaaaaatagtcagtaaatttttcttcggtttgcgctagttaaagcgtgacttcttcccattagtctgattcttttaagaaagtcggcaaattaactgaagaaaatgttgtcacgccaaccacctcaataaacgcaaaataattaggtatgtaagaataataaaataataatgtactgtggtgagaaattattacattattaaattattctcataaaaataattaacgttgtgcttccacaattcagttgaacaaacgaatgaaaagaatgggaataataggaattagaagagagaattggtggaacagaagcagaacccctgaggggtttgaattgaaaagggaaaagaatgaaagagaaaagaaatgcgaaaggaatgaaagggaaggaagagagcccattactgacacttccattccactttaaacatttgcttaattctttcacccgtcaaaactaacaaatcaaacaaaaagcattaaaattaaaacacaacacaaattcatattaaattaacctagtaactacctaaataaatcttgtgtttatcaaacaaaattgtatttcttacagaatgagttcaattctcttcttccgaatgcgtgaccaatacttaaacttaaacccaaacttcgcgcaacttttagtgagcgtagaaagaatgttggtgaggagaattcgatcactgcacaacaatgaaatggttttgccttgggcgttttctttttttcgccgggattttaataaatggtttgtttttaattaaaaaaaactgaaactatataaaccaattttcagtacttcctgcttctaattccctatttcgtctattaaaatgccatcgttttggtagaaaatgcggcattttatgtgctttcgatgttcaaagatgcgaatgccccgcagaacaatggaagaaattaagacaaagttgtagccgaagcttaaaaggtgggaggagaaattataaaagcgataaaattttagaatttttaaaagtttattcatttctttagggaggcgattaatctgtgcttctcaaaaagtgcgaaaggctgggcgatgttacaaacgcaaaaaacctggggagttttgcaaattctctgaccaatgtattgatgagggaccagtacaatattcctgcataggaaacttatgccaaatccctcctggtaaacctttttagttttgtttattaatttacaaaacatttttagaatgttctccggggcatgtttcaattggagccgaatgccttccatacgcagtcactggtggaatttttaaagttatgttagtagagtaaagccgtgaggtcccactacccagtgcttaatgagggaatttagtccaaggggagccctcttacgcgtccgtaattaggcccctcagggcttggaatggaagggatgatgatggaactctgggggtacctcccaggcgggggattggccgttccactgaatgactcccgactgacccctttggctggttctccattgccttttaagcgccccctcgggatgggaggagccctatcggagagataaaatgtggggggggggaagggtaaaggccatttccggtcccggccttaca

SEQ ID NO: 1205 - DNA, 4328 bp, Heterodera glycines
  unsure (1)..(4328): unsure at all n locations
tgcaattacgtgccgcagaagaatggatatttgtgttgtgagcgtcaaattcgtacattttgtcttttcatttttgcactatttttccgcttcgtttaggttcgaccgcgcaatgccccgaccctttgtctatcccccagctgagtcaactgacaaacgaagtggtcgactgcatgaccgagcagtgcgggcccgggttcacttgccaattctcaaacaatgggaagggacggtacatttgctgctcaattccgagccagcaaaagcagaataggaagcaaatatccaaccaaaattgatttctctggtcattttaaataaattaaacgcaaaaataaattcatcattctcaattggaatcttttccagccattcatttctttttattttatcccaatttttagttttatttatttttaaatagcgcataaaaaatgacgacaaattgggagaaacttagaaaggttttaccatgattaaaagttaataaatttatttatttttaaggaattaaacgaaacggaagaaaagggaaaaggaaattcgaagaaaagaaagcgaaaagtgagtgaaaattgtaacaacaaatggaagaaaatgcgagaagaaattgagaagaatgaccagcagaagccggaaaaggcaattgaaacgacaattagcgcaaagaaaattttgatggccatcgattgcgaatatgttggagttggactgaatggagcggagaatatgttggccaggggtaagaaaatggagagaaattacttaattgcaaagcccatgcaaattcagtatcaattgtcgacgccgaaggaatcgctgtctatgacaaatacgtcaaaccggtgggtggccaacaaatttgaacttgacaattcgaaatggaaccgaataattctttcattttggttatttattggaagacaatgttttaagaccgaagaagtggtcgattaccggaccaaagtgagtggcattaggcccggccatttgctccgtggcgttccctttgtccaagtccaaagcgaagtgaggaagctgctctcagacaacattctgatcggacactcacttcgaaacgatttgactgtacgcatcattttctttatttggttgaattttcttttttctaaggttcttggcctcactcatccccccaaacttatcagagacactgccaagtttaaattgctcagagaaacgctcgacgactccacaaaaacgccttcacttaaactgctcgcgcacaatttgctcggtgttcaaattcaacagggcgaacacgactcaattgtggacgcaaaaattgccctgagaatttatttaaaatatcgagagaagtgggagagaacgctaaagaaaggaggcaaaaaatgaacggagagaaagagagagaaagaaagtcagtgaccgattattttgtttttgttgtttgttttgtcaaaattgcgattgcctttcattttcaaagtcagaaaaacactgtaaattataaaattcctaaaaaaaattcaatacaacgagaattataatcggtgaaatatttagagattttaatattttttacttatttcatgtttattttaaattgtaaggctatggaacaaaacataattttgaatttggaaaattcccgtcattttcaaaatccattcctgacaaatatagccgacagctcccgatacgttagtcgtgattggattttgcaaaagttaaatgaattggcgcaacgaattgtaaagcgaagaattccgacgagtgaatacgaagagggtaagacattcgaaatgcgcgcgattctttcccaattcattcccttcgttttcatcagatggtccttacgttggcccctcgggcattgcctatgctttggtcagagtgatgcgacgaattgggcaaaatcagtcaaattttggcgatggcattcggacaattttggcaacccaaaaagactttctaaatcatcaagcgaaggtgaagcggctgtccaaatttagttgaaacagtgaacaatcagatgaaatccgactccggcccgcacaaatgccgttatttgaccggcactttgggctttttaacggtccgaacggtcgtcgattttcacctgtccaacggggcggacatcgcctcgctctcggcacactttcgcaatttgctaccaattgttctccgtccgggttatcagcaaatcggggacgacgaaatgctcaatggccgtgccggctttctcgcctctttgcttgaacttcggtgggtgcggtagggtttcgtcaattcttacatttatggggctttttcagtttactttttggtcaacaattactttccgacgatgaaattcgttctgttttggatgctatggtttcttccggcagaaaatggtttcttccggcagaaaatactccaaaaagcacaaatctccggccaaactgatgttcgaatggtacaacactgaataccttggcgcggcgcacggcgtcagcggaatttaccaaatgatgttaaggtgagtgattggacagacgaagtgtgatcaatcaatcatccgtcatttggggctttattgtatgcattttgcagcttttgggacttgttggatgcttctgcaaagtcggatttgaagcaaagcgtcgattggctgttgagcacccaattttcggatggcaattttccctcgtcgtccgatcgaatcggtgcttttccatttgtgaaatttgacacattcttccattcatattttatacttcaatttcctccgcaattccaaaggattgtctgaggaactcgtccattggtgccacggcgcctccggcgttttgcatttgctcatcgtcgcctctttggtgtttaaggaggacaaatatttggaggtcatcgccatttattgcccttgggaatgccaattttatcaaaattcagtcggctgaacgatgtgtcaatctcatctgggcccgaggaattctgcgaaaaggacccggcatttgtcacggagtggccggtgaattgtgagagaatttagagagagagagaaagagagagaaatcgggcgggtgaataatagcactgaataattattaatttaattaaaaagcaaaggcatttccaatgtttgtgttgtcttttcaggcaatggctacgcttttcttctcctcttccgactcaccaaaaatgacaaattcctgcaaatggcccattggttcgccttcgtaatgatggccccctcttttgaggtgtgtctcttcctttgctgtgcctttctgttcgaatcgctccgtccctttcccttaggcgtccgcccgtgtccccgactgtccgtcgagtcttttcgaaggatgggccggcgccctctgttttctcgccgaccttttggagccaacgacggcgcaatttccgctgcttccgattcccttcaactgaattcgaagggatgaatggatgtccttccagaaaaatgattcttttttgaatgtcttagaaacattttttggcatttcgtttgtctgccatttttctcaccatatgagtgccatcatcataaagcggctttctttgttcattttggcaacattttgtcccttttcccaccatcttcatttgtaataaatgtgtcaaggccgaattctgtcttgtcaacagctgcttaaaagcttcttccatttcctcggtgtctcacttttctatttgcccgttggactgccaaattggtcatccgtcggcggcacttttgctcttcggcacccgcttcttcccccgccccccgggcggtccgtccaccacttttggtgccatttgcctcccttttctgtcggcggtgtccgtcttttatttgtgaggcaataaattttcaatttcttttttttttggacggaaaagccaaccnaataagtgaacatttatttccatttatcagctgctaaaatgctttttcaattccattttttcattttgttcctccatttttctcgcctcttttaattgcaacatttgttttgtgttttttcccttttctctgcgggtcccccccccccgggggcataaaagcgatttgtcttggccaattacgcgtttcccaattccgtttttttcacttttcggccattttgtgtccctttttccgttcctcccaaatccctcacaatggcactgtcttttccccataaaattcatttccttttagatgtttaaatacgccgtgaggatgtaccgccgcgtccctttcttttgctccctccgccggtgtggccaaccctttggtgcgcgaagacaaactgaaaaaagggtacaaaacggaggcggtgagttgggggggggggagagggaaaggggga

SEQ ID NO: 1206 - DNA, 2062 bp, Heterodera glycines
aaaacaccgttgtctgatcgatcattccaacgtgattcatcagaaaggggcggtcaatttggcaaaattggccaatcagtgcgaccatttgctcgtccgccatccgaattcggtgcagcagaattccgttttcgtgtgccttcgcaaatgcctcccaataaatgccgagcattttggcattgccctcttccatttggctgcccaactcttttcgccgttttgcttcgctgatcaggtggcgaaagctggccaccaaaaagaaattgatctatgggaatgcaaatgtgaaatggcagagagtgaaaatgtgccgacccaacgaggcaaaatgccataaaattggttggcagaaagccaaaaggaattcaatgccagccggaggaatcgcttccactcgtgatttgcttcaaaataattgatcgtgcagcgagtgttgcgctcaaaagttcgctggcacacggagttcaacgcttccgtcactttccggacgtacactttttgccacgtgaactttccggtgccgtcgggaggaatcacattcttcgggacagacagttcccgttcaattgaatcgaattttaattgggaattttatgtctaccggtccgtccatcggtgtaagtgtgaaactgaaaaagcgcttggccaaaggggacgaccatttggtgagtcggccatttttgcgcatcaaaaattggccccgttcgtccgtttcggcgttggcaaaatgcacaaaatatttggcataatcagcgaaactcttttgatcataagcaaacacaaattggcgttgtgtgtgcttggattggaggtggtcaaagatggcactgttcagcagcgcggcgttggccaatttgtcccaaatgatcactttgtatttggccggagggacaacctgacaaatggccatcatttaaaaatttgaatttgatttagtccctttggcaatggttaaaatgtatttgcctgtgccaaataatatttccttttgtcccaattggcatttgttacaaacgatttaagaatcgactgtttggcaacattcaccgcaagcatttcaaaaaacagaaaaacgaatattaatttgaacagcgccgacataagcactttaatttagtgaaaattaggcggaccaaataatattttataataatgcaggtttatattttatttctattgaaaataagacaaaattaaatttattggcgaaagcatcgattgagaaaatgaggctacgctttctagcccaaatgcgttttttgtttaatggtaaatatgtaaagcaaaaattagatggatggtataagcccatttaataacaatttcagacgtccccaacccccttcccaccccattaaaagcgcacaaacgaatgtctttaagcacataatctggaaatgaatactcacggagaacgtgttggtcgaacaacaatgaaaatgacaaataaatatttccatcgatcgattaatcgtaaagaataagtctccatctcaaatgtttcctcttaagcagtgaaacgtgtggcgctcaaacgtccgttgcgatagcataagccttccgtcagtcgcttcgtgtcgaccacaccgttgggaagtcgcggaatatctttggggaagaagcgcctaaatgacaaaaaatacaaagtgaaaatgcaattaacgttatactctccatgccaaactcacttcatagttaagtaattgttgcggcccctcttggccaattcatccgcctgccaaatgggctcgggaagggaaatagcgaaactaatgatctggtggctgtagcacaatgcattcagaaagccctgaagttcatcctgcgtcatgccgatttcgtccaccaacacactgtactccactggcttgccagtcccctaaaacaagcagatttaatttagagaaaactttgcagttgcttctgaccttttttggatagtgtgattgcatgaaaaactcgggtatgtccggccgaaccattttctcgttaatcaccgacccgggcgtcagattgacaacagtaccatcgtgaaccatgaagaatttctgtgaaagcaaaa

SEQ ID NO: 1207 - DNA, 3267 bp, Heterodera glycines
tttgttagttaaaactcactccgacggtggatgggtcaaacgaatcgcatgtggcacccttcacatgaagcatacgacgttcctgtggcgtggtgggtgccggatgcgcaacatcatagccaatcacgagcacgtttcctttttccaacgcaaaacgttcagccgagcgctccaccaacggcatgtagttgaggccaaagtttttgcagttcaatttgttgatgatgttctccaatgtctgagttttgcctttgtgcacaatttcggtgaccttctcaacggacacatgttgagttggcacatggtaacgtgcttcgtagtatttcagcagtccatgtgagtcctcggttttgtagtcaacaagcctgttaaacattaaaataaatataattcccttggcgactactaacatgatgaattcgatgttcgagttcaaacagcgttcaagcatctccacccaaccctgaatgccacttcgactaaacaccatgaagatcgggttggtcagctccaagccacgttttcgcgctttatcaatcagcttgctggcaaacaccttcacaaggccttccttcgactgcttgtcaggccgcaaatggcgctcctcggtaaggataatccaattcaccaattcgttggtttgcagatattgcgcctgtgcgcccaacttggtccattcggtctaaaaatgctgttttgataggaaaaaaaacataaatttacattgtccggacatgggttgattatctgattcttggcgtagagaatacgcggactggaacgcacaccgatcacgacgcgatttgatgtttggtcgacggtgataccaaaagcgctcagcactgggttatccacattgaacacattcattttgaacgcacactgcagaatcttgtccattcgttcattcggaggaacggtgttagcctaaacatttgttaataatcaaaaaataatgtaatgctgtgcagcaacggactttcaagagctttccagacaagcccgagtccatcttctccaaaggcacgcgctgatcctccatgatgactaattgctcaatggggaacgtctctactggacgaccttttggcactggagtgttcggaataacggcaggaaaatcagggaagtcgatggtgatgccgtatcgcaaggtgaagtactcgggcatcgacacacgtttgccctgccatttgacactaaagcgaaatcattaaacataaatctgtgttagactgtaacaacgaaaacatacgacagctttgacatcggttgatcagtgaaccgcccaataccgaaggatctatgctttgcatacatcacattcacacgcacatcgaccagcactcttcggatatggttccaatcgttcatctgcggcatgcggttgttcataatagcaaaaatagttggcacaagtccattggactcgtagaatggcgacactttgactaaaagacaaaacatttggctaggaaattgactctaaaacgcactgtccaaaacaagcgcaggcgccaattctccatagttgcgcacgactcgaactcctaaaaaacccatcactgatattgagcgaaaaggtgaatacccttcgcaactccgggacggagtataatgccattgccagcagagactcgttcctccggggacacttcgtagagtttgccggctccaaccggcgagtaaatgtctctgcaaaaaacaaagcataccatattgctttctgtgtgtattacaatacctgttgatcgagaattgggaaagacacatttccagaaaagtgcgcacagtgcgatcttcgtcgaacagagacttcttctaaattgtaaacatttgcaacctgaggtctagcgttcaaaaactaaccgaataatactgacgataatccgaaatgtccaacacaggcttctgatggtttggcgtaatagtcaccaaaaagctgtccatcgcggtatgatctcgcacgtagtcgtcaacaatttcttcatgcgtaatttcaatcttcggacactcaaggtggaacggcatggatgagtacatagtggctttgctgtcgtagacaatctcgcccatacggcccttttcgtccggtttcatcccgaattgtcccgtcttctcataggcaatgatcaacagttcgtaacagattttgcggttgaatgcgcgaaggccactgaacaaaggcatttgataaccatggtaccgttaccggattagggattagtaacagtggcaacgaccgagaccccatatactagaatcactaaaatcgtactcgtcagttccacgggtgaggctcttctgtttgaccatgttcatcacttcgatgtcgtaacggtaggcttttcgaccctcctccaccttaatgagaaacatcgaacaaaggccctcctccttgatacgaaagtccttcgatggctctccaatggccttctgaagtacgtgaaattagaataaattaaaatggtgattcaaccttcttctttttcttcagtgcttttgcctcattgtcggtggttttcacctcagtatcagtagccttcgcctcattgtcaggtgctttgacctcattgtcacgcgtttgcgcctcattgtcaggtgctttcgactcagtgtcaggcgttttcattttatttagtcgtcagcaaaaattatcaacagaaaggcacaaatctaatctgcagaattgataatgtacgagcatattaagtgagatagaaaacagaaacaaatgttgattctttaagaacaacatacatatttagattgttatcaagtcatcccaaatcacctacttcctattaggttttaattacatatgtttatacagaaaaataagggttctagtgcactttatcctctcgacttttaggtgtccgtaatatttaagttttccttacgttaaaacttattcttggtattaatcggagcttagtttggatgtttaagtgcatttagagctaaattaagaacggaagtaataaagtaataaatatcacagaaacatattcgaattctggtaagaatagtgaaaaatttttttttaactttgtgtagacaaggggaacttttaacagacatttttatgcattaaatgcatttttagtacaccgattgtttaaaaacaatgcttttttaagtcgtatgaagaaagaagactaaaaacgattttgaaatagtatgtatgtaagtggaaaggaactaaaaattgcagaatgacgaaagaatattttatcgtatgctcttaagaaaagaaaaattcct

SEQ ID NO: 1208 - DNA, 755 bp, Heterodera glycines
tgcttcttttctatcactttgtccaatatgtttaaaaaacgatgcaatgcctattttttgtctttaattctctccacggagttgcatttatttgagctctgcctgcacctgggtccgagtctgtattgttttggcgccgccgttttggcgccagcccaagtttttgagttataactttttttcttgttgaccaaatctaacaatcttggtatcattcgaaagcttaacattttagaagatatttctaagctattgcttcgcgattagacaattaccatagaagttataacatgaaaattgcaaaatcagtcgagacatttttgaaggattatttctctataaactaatattagtaattatatacatagtgtggattgtactttcaagaagtggattagcataataaacgtagtccatcatgtctacatgcgacgcgcattatgtgacgagttgcacacacaaattagatttggctcatcatcatctatctgtcctcatcctctgtctgccgtgggctggtaaaattccgtaatgagccgtgtcaacgattgccgccgccgccgccgtcgtccattgtgacgttcatccttctgtttgcccaaaaatacaatttcatcatccccgtcggtgcctgaaaataggggaaaatgcaaatttaaaaaaaaaaatttatttacaaaaataaatcttcccctcttctcttcaccgaaattcttgtttaaaaacacagcgaaaaaaatggggaaggagcagtg

SEQ ID NO: 1209 - DNA, 1929 bp, Heterodera glycines
  unsure (1)..(1929): unsure at all n locations
gaaccgtcctgttccgcagccaaacgtattttttctttgatcatgccttttggtattgttttttgatcgtatttgcttaaaaatcatataatcagaaccaaaaaatatgatatcaaccaaaagtccaattaaatattttttaataatgcacaaaatttcgccacgttaagtcctcggcaaacgtttggctctttcgtttggagtggacagtttcagaaacttctttgcctgatttttaacagattttgtgataaaaaatgccaatttggttgattttcgtcttaaatttaattttaaattaaggatctgagaccggcggtgccgttaagcgtcgccaagaaaatttttgaaagtttaattgtgatttgttttatgtaattttcgagttgttgatcacgaatctgacatcaaaatttagattattcagaaccccggacccaaactcgaacgaagtcaaaactcaaatcttcgaattccgcatttttatttcaaaacgaaactgaatcttagtccaaaataaaaaagttaaattagggaccacaattctttgccattaccataaaaaatcatttaaactcgaaaattcggaatcatgacatttttagtgaatttttgtctttttcgtccttttatactcacaaatttgtccattgaaattgcgcaactaacagctttttcattggttgaaatggctatttaaaagcgattcttcgtcaattgttgtcattgtcccagtattatttctttttttttgatttttgatttttcttttttatgttcattcgtgtcaataatttttcagcctccaatttcagccacatggctacgactgactggggccaattcgacgctaacggaactgactacgatgccatctacgacggcacagatgacgaagcgggcactacggacaacgggcagggcggcaacgtgctcaatcacttgctgactcaggtggaacattcgcgacaattgctgtttctgtttataattgaaatcccatttcaggttggcgccggaatgactcttcagaatctgacgctgccggcctctgttctggaaaggcgctctctcctggaaatgtacgccgactttttcggtgaacagcatcggatttttggattttaaagaaaaattcccatttttcagcccatccagacgaattggtcagcgcggcttacgaaaccacacctgagaaaaggtgtttccttttcgctgacaaccaccctaattctttttttaacagattccttgccgtcctgaagtactatctgaactccttcttcccggctcgcaaaagtggcgtcgccaagaagccgtacactccgattttgggcgagacatttcgctgccgctggacgctgccggacgtgcctttgaacacggagcaaactacccgcggaccgttcccgggctctgccagcaatcaggtcgagtttgacgcaagtgccagggtcatcattttaaacgaccaaaatttttcagttgacattcatcgcggagcaagtcagccatcacccgcccatctctgccttctacgctgaacatccggcctctggcgtctgctgcacttcgtacatttacaccgagtcgtacgtcgccggcctttcttcccttggcgtccgtaacatcgggagagcgactgtggtactaggaaatgtaagtggacagaattatcggacaaaaatctgctgatttaccccattttcctttcagcacaatgagacttacaccgccactttccctgacgccatcgcacgaaactgtcacgccacaccgtggttcgaactcaccggcaaagtgaacaacattttttgtcttaattcatttccagctaattttttcccccnaaatttcaggtgaaagttcgctgcgcgcagactaaatacgtggccaaaatcgacttcctggcaaagcccctggtcttcg

SEQ ID NO: 1210 - DNA, 6417 bp, Heterodera glycines
ttttttggtaaaccccatcggatttttggttttaaaaaaaaaattccaatttttcagcccctcccagaggaattggtccagcggggctttaggaaacccccccttgagaaaaaggtgttttctttttcgttaaaaaccaccctaaattctttttttaacagattccttgccgtcttgaagtactatctgacctccttcccggctcgcaaaagtggcgtcgccaagaagccgtacaatccgattttgggcgagacatttcgctgccgctggacgctgccggacgtgcctttgaacacggagcaaactacccgcggaccgttcccgggctctgccagcaatcaggtcgagtttgacgcaagtgccagggtcatcattttaaacgaccaaaatttctcattttttcagttgacattcatcgcggagcaagtcagccatcacccgcccatctctgccttctacgctgaacatccggcctctggcgtgtgctgcacttcgtacatttacaccgagtcgtacgtcgccggcctttcttccattggcgtccgtaacatcgggagagcgactgtggtactaggaaatgtaagtggacagaattatcggacaaaaatctgctgatttcccccattttcctttcagcacaatgagacttacaccgccactttccctgacgccgtcgcacgaaactgtcacgccactccgtggttcgaactcaccggcaaagtgaacaacattttttgtcttaattcatttccagccatttttcccccaaatttcaggtggaagttcgctgcgcgcagactaaatacgtggccaaaatcgacttcctggcaaagcccctggtcttcggacaagcgcatcaaatcgttggccaaatcttccacgggcctgaacggaaggtgccgctgatgacactgaagggcgagtggaacggcgaaatcatgctgagacgcactgcgcgcgggtcattccatctgttcaccaacgtccgggccaagccagatgtgcggaaggtagagatttttcaattttcactaagctgattattctttttatttttgtcaggagtgcgttccggtgatggagcaggaggacaatgagagccgaaagctttggcgtcatctcactgcagcgttgtacaccaacaacacacagatggcgactcaaagtgagttttgaaaggaagggttcaaattgcattaattaaggttttccccgtttagttaaacagcacttccaacaacgccagcgggacgaggaggcggagcgcaaacgacagggacgtccatggagcgcgcgccactttgtcagagagggatccgggcttccgacagacgcctggaaataccgcgatgcaccgtgatagcgaacccgaaattgtctgtatattgtatattagcccgaaattgtctgtatattgtatattagcccgaaattatctgtatattgtatattagcccgaaattgtctgtatattatgtactaatatatgtgtaaatatgtacttgacagaccggagccagaaactcacaaaaccacttataggttttttatgtgctgaaatcgagaaaaattttaaaaaaggtctgcggcaacgcgtttaaacaattggttttttcaaccggttaaaaatggggccttcctgattagaagctttttctaacctattgcttagcgattagacaattaccaaaaaagttataacatgaaataacaaaaaaaccaaagttttggaagttttttcctaataacttttttagaagctaaaatttttgtttgttttttgcaagggctggcgccaaaacgaccgattccccctgggtccatgccatcgtttggcaacctggatttacctgggttttcgtcccgaaaaaccaggtccagccaggtcaaccatgcaatccaggccaggcaaattccgatctctaacactccacaatttaatgagaatgcttaagattcataatcgcaattaaaataatacaaaattatcaaaaaaaggaaattacaaatttaaccaaacaagtcgaattaaattaagaattttcatttagaagaacaacattagtcttgctaaattatccttcagagttcagcatgttccccctttagctcttccgggttagcacaagcggtcggagattttgccaaaaagtgatattcgcacttggacggttcgctggtttccacaagttcgaactgttcaccgcactcgaactgcaccaaagtggacctacgaaatgaaacaacatacaaggaatatgaatcatcctgtcatccatcatcacctctccggtccattccaacacgtttggccatgttcatagcgttgagcctcgaatttgttgccgttttccggcccggcccacttgccccaatggctgaaaatggagaatataacaaatacatcataatgaaatgaaagtgggcgccggtaaaaagggagagcagaagataaggaaaagaaaaaaattggacatataaaattttctaatttttcaaaagtcagtgcctttttcctcacactatgcaaaaagcacgggaaatgaatcaaagacaacaacccaacaaaataaacccgaatatggggtggcaaattctcaccccaggctgatctccgagtgtccgtttcggtccttttgcaccgttcggtcgaacatgcacagtttgtacacgtattgggtggtggtcaattccgcgcattggcccttcagcggtgcccacgcgctgtccggcccaaattctacgtccaaataggaggaggattctctgcaggaaaattaaatggtgagtttaatttgccacaattagtcgacctaattagcctctccaagtcggacactttgtcggcaacctgaaaagtgttggtaaaatcaatgaactgccgtgcccaatgccatcgcttttgcccacctcgtcgtactctttgcgagcctggtccgcccgttcgataagttcgcgcgttttctgctcatatttttcggtttccttttgtccctcttcgccgctttggtcgtccgttttgtcgccctcttcggtgccagcggggatttctgcatcttcttaaaacaatggatttttatttaggatgtgtttaaaatcctacgcttttccgctgcgctggcgatttcatcaacaaactctttgaccatttcaaatttgtccaaaaatgcggcaaaatcgagtgactgaaaaggtaaaattaaaaaatgtgtccaaaataatcgccaaaaatggcaaaaatacttcctcaatttgctgttgtttcgcgtcaccagtttctgttgtctctccatcacttttctttttaaaaatgtccttcagcaattcgtctccgcgttcgcccgccgcccccgcggcacttccggcggtggcaaatcgcttcagcacatccgaagagattctgattgagaacaaaaaagggtaaagaatttaatatcgatgaaaatttggaggacaatgcaataaaaaaggcgacatttagcaggaataaaaccctaaacaagtagacccaatttcctccagtgctttatgcattttctctctccgattcaaaatcctagaattccctagaaatgattgatttggcttattaaaatgattatcttttctatgtattaaaaaatgcgaatttaattccccgaattcgccctctgctgaatgtgctttcccgccccaccattaaacgcactttccgtccccgtccttctccattttgtcgaacatttgctttgcctcggcctccgtccgctcctttttcgcctcctcccactctttttcctccctgtccttcgcctccttttccaactcttccgccgcttttttcgcctcctccgtcccttttttcagttcggccaattcgtccaactccttttgcttcttttcaacttccgatttcttttccgacaacattttgcctaaaattgtcaaaacatttgcgaaaaatagtgtgtttttcattacgccagttattgcatcgcattacttccaattcccccaaaaaggccccagttttcaaccccccccccttttcccattttcaaccattccccatcctttttttccaaactgacccccttccttggccaactctttgcgcttggcatagcctgccgtctgcacttcggcctgttgcttggcatcttcgcgcgctttggcacccagcgaatcgcacacatttggacattcggtgcccgagtcccattcgtcggacccgtcacagcaatctttggggaaagacaaagcgggtttatcgctacaaaaagccccaaataagacacattaaatccataccacagatgaaatcgttgactcggctcgacggcaaagtttgcggcctaaagccgaaattggtgcagtaaaaatgtccatttttgcacgccgacgtccctaaagaaaaatcgaaatgaaaaacgcatcccatataagtaagtccttcacaagggttcccgggcaaatgatgacacgaaaatgacagccatttcggctattcctcaccctcctccggtccccctaaacaaagttaggtaatttctctgcgttctgttctgacccggctcgtcgcttccgtccgcgcagtcgcaatagtcgtcgttgacctgttcaaatgggatgctcttcttcccgtccaaacactcaaattgtgaccgcgtttggtacaatggagcaactaaaaataggaaaaaaatttaaaaatactaataattttgccatttacgttggggagagactcctcgtggccgagttggtaattccttttcctccccttttgagcacaccgaagaaaaatggacagtcaaaacaacaaaaagagagagcagcggcaaaaaacaaatgcaattactcataataaattatttgcagaggacaaagagaaattgcttaattgttgttgaactaatagatggaaagaaatgaacaaacggattaaagcaaatgatcaagtcgcgaaaacgtgtgacgtggaagtggaatcaatcaatgaacaaaaatagaggatggactaattgatgagcattccgaatatacaattaaggtacagctggaaattaagagcttggtcaccaaagtaccggtttttaggtccttaaatggaacttcagtaccgggtctgtaaattttccgtaaagaattgaaaaaccccgaacgattcggtcaacctcgacggtcggggtctcgtcctaataaaatggtcaaaaaataaatttttcagcgaacaaaaagacggaagtcacaatttttcagaattcaatttgttcgaattaggtagacctattttggtcttgaattgtttaaattgcttttatgcgcaaattatactgtacacaataaatacatacacatacatacatcgaacagccatatgaaatgtgggaattatacaatagctttgccaacatatatgaacattataatcaatcagaaatggcatgtcgtcgcgtttcatctgtgtcgccctccgtcgattaggtccttttgattcgcacttgaattgacgtgcccctcgtgttctttttgttgttgcagctggtacagtcatgagccgaaatgccaaaatgctgcctcaaaatggacgacgcctgttcctaaaagcagtccgttttaccaagaactttattattgtgtaagtttcgaccgaccgaaagtgcattcataagtgacggcgccgaattgtttgttgttgctcctctggcgacgcacagcagttgcccgacaatgccgacgtgatgaaacaaagccatggtgaagtgccggttggactgaggtcggtcctcgagtgatgcgcggattgtgttcagtgtccgttcgagcagcgccgcgtcaggattctcacgaagcagctgcgccacaatatttgccagcccaccgctcagcaaatggtcgtacagcggcataggagctcccatcattgcattgaccagcacccagtaagcctcctgaaaatgtcaaaaatgaaagtgaaaaggaaggaaatcggatagtcaaaacacacctttctcttccgtgggctcgggtcacggcaaaggcggaaaacactgtcggacagtccgtccacggagaacaggcgcgtcacgtgctcagctgtcccggccgcaacgttactcagaatccagaggcattcccgcgagacttgatgaatgtccgaatcgacgagcattttctgaaaataaaacaatgatgcgggagtataatcgccgccaaaaacacactcacaaagtcatcgagcactccaaagtcgagaatggtggtcgtttgctcgtccgtgcccgttatgatgttcccgaccgtccgaagtgcgccagtcaaagctcggattgagtcgctcttcagcagtgtaacgatgctggtgacgaggcccggctgcgcaagaaggaggtcaatctgtggaaattgtagaatatatcattcgaaactcgacaa

SEQ ID NO: 1211 - DNA, 2020 bp, Heterodera glycines
  unsure (1)..(2020): unsure at all n locations
ttgtcacttattcagctgctaccaggcctcttttttttgttatttttgacttctttcgctctcttctctttttctctctcatcctgaaaaataattgccaattttatcaattttcatgaaaatttggtatggctccgtccgccttaaaacactcaaacagctgtctcatcgcacgcaaagacactagtgtaactaaaattagaatatgcgtgaaaacttttccgctaatcattactttttttcatgccataattttattcgaacaaatgaataagaaacgaggctttactaaattagttgaattgccacattcaattgatgggtccatcttatagagaaattgatataagcaaatttgtttaactaaatttattcaaaattacaaatttaccatgaaatttgaatgtaaaaatgcttataatgaataaatagaggtacaaaaaataggcaattcacatttgacttatagaggggttgaacaatagaaggcccctctctggtagaaggccccctctaattaaaggcccctttttggaggggttgaacaatacaaggcccgggccttcaaatagcggatttacggtattttggaaaatacaggatttacaggatttgcaggattaatcctgccggatcctgtcatgtaaaaaattttgaattccaatcctgcaacaggacccgcaaattagatttttatgcaggattcagcaggatcctgcattgattttttgaatatttttaaaaatagaatgccaaatattcagaaactttcttttttcaaaaatttttttcttaataaaaatttttcgtttaaaaacttatccttattcgaaaaaagtttatttggcaaatcggtctttttaaacgcattaaagaagattcagtcgattgcttggagtgtaagcaaaaaaacgttattaatttttcatcttcatcattttttggtttaaaaatatattgaatacttttttatactttgaaagacttttttattaatacagaattttttgaaatttcctaaaatccgcaatcctgcgcaggatcctgcagattttaatggtcgggttaaaccaagctcatttgtcagattaagacaaccaatgtttcaaaggtcccaaaaagctcggattaccgtataccctaaaaaagcccccggtggcttttttaactccactcaaaatgggggctgtactgtattttaagaaatacggtaaattttaaactcatttttcacatttattcttttttattcgtttgaatacagtaaatagaggcatacaatatgagatatagacaattgcatttgtaagcagacacagttgaaaatcacataggtaataacatatctacatatacaatacgaataatatacatcataattacggaactcggattggctcttcttggcttgaatttcttcttctcctcctcctcctcacaacgatctgctggtggttctcgttctcgacgcggattcagcatcagcagatggtgatggcaattctctgaaaaaatggttggaaaatcagaaacccccaaactgtaacacacccaatttcgttgtcgttgaagccaatgtggaccaaattgtcatgaaacgccgcattaattctcgtagtgttcagccattccttcaactgtgtgtcatcaaactccatggaagagcgtagcaccatcacaatcgtctgcacttctccagcagcatcaactcgtgtacgacttgtcagcgctaagcgttcttgggtgatctcattcgccaattggaccgtatggttgaatcggaacggcaacgtcgatagcaccatgaactggacgggaaccacggcctcggcgaaggactgaaaaaattgaaacaataatttcttanattgatggagtcggaagacagaattcgaaatttccgtgttttgctactccaccccgaaaaatttaaattctaatttttgggggttttcaaagtcactgatcacggaatatggtgtcatncaatgtcgaaacaacacccatattcgtgatcaag

SEQ ID NO: 1212 - DNA, 1263 bp, Heterodera glycines
tttaaaatttttcaagggcggtagcaaaacatggaagtacccagagaattcaagcagcactcactcactcaccctgcacaaattgttcataaactcgtcccatttggtctgcctccatttgatgagtttcacggagatcggcgcttgtcggtagtcgcgcggcgagtgaatccacgtgtacagctcacggcatgttgggtcagtattttcagcagcatcggacggacactcgggcaccatatccgtgtgaattcggtgcaggtcagggcagtcgaacagcacggtcggcgacacgtgtttgcgcagcatggccaaatcgcacttcctcaggcacaccaatgtgctgatcccgtcccgtaacagtggccaaacatgtcgcgcaatcacttgccaactgcgaaactccgtgtgccgagtggagaattccagtgcgatgtcctcggcgaacagacggcgaatccggcgcagaaatttgatgacgtccgcgttgatgaacctgcaaaaatggggggaaattatgaaaattattgaattttttcgaccaaatggagagtgattggaagccgacgacactgctcggcatcggcgtggtgggcagtggcaacgtgatgaagttggtgccgtcttccgatgtcatgatttctgcgccgcctcgttgtgctccttcccgctcgcagatgtgaaactcgccaaagcgccactgccgtagcatgaattgcttgtccaccagcatgttgaaccgggtgttgaccagcgccagcttcatgcccacttctgcacgaccgagccacgccaatgtttccatccaagcgaagtcgctgagtcggctgaaaaaaacaaagaaaattgtgatttttcaaaaaattttctaaagttttatcacttttggtccatgcgttttgttgtcctctgcttttgctgctgctgatgatgatggtgatgattgtgagatatgcccagtgtttaacagcagacagatgacgtcggttgttgtgcacagttctgcgtcgattgtttccgtctgctgttgctgctgttgcgttgtcgaggccaacggaaggcgaaaatacggaaatgaatgaatgaatgtgtgggaagagcgaaatggccgaatttcgttgcttttatactcgctgagcatgccgccgacgaaaaacaacgcggagactgacaatgagacgactctttcccgcctataaaaggcacttcccttccacccatttcccatttatcgaccgattccttcaaaacattcatttctcc

SEQ ID NO: 1213 - DNA, 1171 bp, Heterodera glycines
ggaaaggccgtcgtttgtgcccagcggagcgttggccaaggaaagtggcagcaatcggtaagaaaagttggcaaactaacaaagagctcaagcaactagtgaaaaaaattttttcttgaatttcccataaattagaccagggttcccaagttttttttttcaaaataaggataaacgaggctaaaactaagatttttacccaaaaataaattttttctacaactaatagtagcgtgaaggaaacgcaataaaatacatgaaaatcgacttaaaacaacattttattagcgtgaaacattgaatttttttccgttgaccatttttctcattttaccgcatatgcacttttttgcggcgcttttttccccaaaaaaaaacttagagaaagtgggggggggggggagggtccggcggtgccggtaggcgccgccggggaattttttaaaaattagttttgtatggttagtcattaaatttgatcgcgggagttttcggtgttactgcttacaaatctatcatcttaaaaaagtttttgtaaaccataaaggccctttttgttttccactttttaaaatagcagcaaaaatttttcaaaattctctatcccgcaaattttttccaacagtcgtgctgacaaagatcgccgggagcgggacaggggacgagaacggcgggagcaacaccaccatcatcaccatgaacaccaccatgagcatcgacggaaaagtggacggagaggaggaggaggagagggggagccaccgccgggcggctgggacaagccgaaatgggaggacgacacggtcaaaaaggaggaggaagaggggggaggagaagaagcggagaagcagcaacagcacaggggggagggggaggaggagaaggaaaagccgtcatttgtgcccagcgggaagttggccaaggacaccaacacgtacaaggacgttctgatcaaggttcatctccgaatagtgaaaatttgaattccttttttcgaaaaccctaatttttgtgaaaaaattttccatgaaaaaaattgtgtataccaggccgttttcgcgccagcgcagtttttgaactataacttttttcactattaaccgaatccaactttcttggtatcattcgatagccctaaaggtcctctattaagcctacaaaattgcgggtt

SEQ ID NO: 1214 - DNA, 2736 bp, Heterodera glycines
  unsure (1)..(2736): unsure at all n locations
gtcctgtttgtttctgttttaagagctcaacaaacttcaaacccgtcgaaagaaaaattttgaaagaaattgtttttggcaaaaaaaataccgtaatgcaattttttggcgcagatttaataaatctgaaactaaatcccccattcattcgcgcacagaatggtgaccgaattgaggcacaacgttactacgagttgagggagaagcatgtgttgcggttcgggttcagctcgcgtgagtatgtgctgttgcatgagcattcggcagcagtcggcgcagacgacgaggcggaggaggacgaagtgatggacggattggggcggcgaagagcgaattgcggcggcggaggaggacgacctgttctgataacgatgataatgataatgatgtgatcagtgatcagagttaaattcgaaatatacaaaatttaaaaaaaacagaccatattttcatacgcttctaacttgtataaagttggtctccgaaaacacaaaaattgtgaatggcgaattcgaaggattttttgggttggtctcttaagcctgtgatttttttgtttgttggcaaagggccaattgaagcggttgttcaattttgtaattatttggcaattttttcctctgtgtttactgtgttatttgtttatttttatttttcttgtgccttaaagggtaattatcgggcggagttagcgaccgattgcgcattttattgacgatgacggtccattgaagcaatttgctggcatacggtagagtgttttgttttccaaatgactcatgcgggtggcagctgtgcttcgtgcccattctcccgttcccaattcaggatagtttagaaggtacccccaacccttttttggcatgaaatttttttgtttctaaaagccgaagaaactgaattttgaaaaattcgagttcttgacaactttgtttgattcggaattggttgaagggtttgccacattcgtgatcagtagggctgtgaatttaagtcactaaaaatcctcaaaaaatcgccaaaaaagtcacaaaaaatgcatgttagaagcttcaaacaacctttagaagactttttaagtcattttaaggccatttagagttagcaaaaaaagtcatttgacttaaattcccagccctagtgatcagcgaccccaaaaatcaaaatgttttcacggctttttaataacaaaatttttttgcaaaagggggggggcatctaaactagagtgaagcgggaccgggaattttgggcaagaccgggaccttttcgggttgaaaaaccgggaatttttggctgggaaaaacggtcaaaaccgggaccttggtactctgttgtccgctaccaggtcccggtcccgcttcactctaatctaaactattatcgaatttgctatccttttccagtgaaaaaaaaaattaagaaacagggaatttcagttttaaagcatttttaggagggagtgaaaacgttgtgtacccccgcacactgttgtcaagggtggcgggggaagtggcaatgcccactgattggctggattatgtttgggggcgtggcgtcacaaaacgacgctttttcagcttagagactccgctatttgtcagttaacggaaatttttaacacccctttcacattcttctccatctttcagtgagtacgacttgcccttcgacatgtgcgtgtgcattgaccggcagcagttctttttcggccaatgtcacaccgttttgggccgtaattcgcccaccaaattgccatcaatctgtcgcaaagaggcgttggtggaagcatcggagcccgtggtcccgaaaaatatccaacaataaaaaaaattcgaatttttttttttgttgcagttttatgcctttgacattgaaacgccaaaggcgccgctcgattcttcgaatgttgaggcggtggagttgggcgtgttccagctgaacttgggggcattggcccaaattgtggtgaacaaatttttggaattttcgataattacctaattagataggtttcagttttcagttccaaaattttgtataaattttttgaacagatttattccgataattgtccatcaacaaccaaaaattcatttttacaacacttttatgagtgcaatttttctgttaggacggtgcgcgactcaccatggagcacgacgagttgcgaaatgaggccaaaattgcggacattggcgccggaatggccgactttgacgcagtttctgtccaaattgacgcggtcctgctgcaggcactcattgagcgaccgttgcgcaccgatctcccgcgcatttaccacttttcggacgtcggcgcaatgtttccgaacatcattcagaccaaccttatcgaggaggtgtgcatggcatgcattcacaacgtgccggaagcgaagtgcaagcgcccgctgcagtgggtgtggcggggcgaatttggtcagtctcatcaattagcgcgctaattacccccataataagtgcactcagtcgcttgaaattgggcgtcagccgaggcggtccataggggagaggggcgggggagtatttggatggcatttgagggcatactgtaatcatgggctaataataagtttatccatttttttcaaaattttaaatgttgccctcttanagttagtgtgtacatttgcagaattttgtcggaatgcgttcaaacggttgcacgacaacggaagaagttcagaagaagcggcggatgaccaccaccatt

SEQ ID NO: 1215 - DNA, 522 bp, Heterodera glycines
aacaaattgtttatttcttcagatttgcatcactcgacctttacctattatggaaagcagcgctgtaagttttttcttcttttctatcgcccaggatttggaccgtatttcggccatttttactccctaatttcgcatttggcaatttcatggcttgccgtccatcaaaatggagagagcgaactgtggagaagtttgatttagggggctgagatggtcggtcggtcgatcctgtggcttttactttgctggggataaccccctcccttctcctccagtaatgagggtccattgcattcggtgggggtcgactggacgccagccaactgagcgccagcccggtttttggggtataactcatttcatagttgcacgaattgaatgaatttaatatcgttcgaaagctctaagtgtcctttattagtctgcaaaatttctaagttacaataaagttctggccaaaaataaattcatccaattcggacaactatggaatgagttataccccaaaaaccgggctgg

SEQ ID NO: 1216 - DNA, 5183 bp, Heterodera glycines
cccccccccccccccgaattaatttgacaaaaagttgtttttagtcgacgcatgctaaaagcactcattttttttgagaaatctatggcgtaatgttgcattttttagagccaaattggctgggtgaatggctgagtttttctttgtttcgccatgggagggcggggcgttctccgccactgacctcgacgccgtccatctccgcgtttagttttctatcgactcattcatttgtgcattcccttttctttattagtttttatataataaaaacccattttccgaacgaaaattttttgcaagaattccccaaataaatggctgagtgtggcaaaaaacgtaaaattcaaattccgaccgaattggtcgctgaattggtcgatgctctccattttgatgtccgttgggccatcgtccgcgtttcaacggcctttgacatttttgtttttaaaaaacaaaatgcttttataattgccaaaaaagttgcaattcgtccctgtaaagtattttattttctttaattttagcaggaagctatcaacggaggaaaaagcgccatttttaactttgttggcactcattgtgacgacccaattgcgctgaaactccattaccaaagtgagtctttttgaatgccttcaacggcagtccaaggatttttgatttgaaaaatgttcccttcgggagattttgttttctgtctgctcctatctcttctggcggggaagtcgtgcggggagcagctcgccccccccagaaaaacagaaattttcagcgatttttttgtctttttgaaaaatctttgtagctcatcataaaattttttttcgggagagagggggggggggggtaactggtacgagggcaaaatgctgtgtgaggaaatgaagtgcacccgtcgtgcgaatcatttaacaaatgcctaggccttcgcaatttcctcattttgaatgccgttgctgtgagtccgcccgttaatgatttgtcgtccgtgccgactttcaaaaatgccgttgtccaaatgaccaaacaattgccttttgaattgaaggaacacaccggcatgtgtaagttgtttttgggtcttatttttgcaattgttaacatttaagtcatgcgttatttcaccaattcattgattgcgcaaaatcacgactacagtgattccggtacgacgaaaaaagactgaagagaaagctaattgtctaattattcctttaggaatcttccttttttggaaaacctttaaagatgcaaaattaaaggaaaaaggctctgaccagtccgttgatggtcatcagctggaagacgcaaagaccaaagtgtttgactttgcgaatttgttttgtgatggttcttctcgaccgtatcacattgacagtgcgtaacttttgctttgctttccaaaaactgactcccctgggggtttttttgtacaaaaattactgttaagcactttggaaatgttttggtaaaggcgagacagtggaacgttcggacggtcttcagagtgattcgccaatgccccctttggtcttcgagaactcgttggagcaattaatcacatacaaatgccagacaaaagaaattgccgattctttcgcccgctgtaagtgacacataattatattttattatatgccaaaaacatctttaatcacatttagttttggaatctttcattgattccctgttccatcaaagtggtgttttcaatttgaagtcggggaagctctccgctgctgaccaccaggaattcttcggcgatccgtcgtcatcgcattcgtccagtgcaggtgcacagcagccgcagcaggaattgtccgctggtccgtcatcgatttcgtctgttgttggtgaacagcagcagaaggactcgtctggtatttcgtcggcacaacacattggacagagttggaaaatgcatcgaaattttcaatgattttcaacttttgttctcagagcgagccaacattgcacagtacaaagaagctccgaagaaaagcaaaggcggaaacaattaaagtggaaaggcggcaaaggagggagggaatttgttggatttcgttgtcattggaggcactttttgttgagttttaaatcgacacgaaacggcgtattttgttgtttttggaaaatgttcagttatttatgttcttttaccaatatgcataaagacaatgtttaagaaaaaacattcattgtgtactcgcggagattctcacgcaaaaagcaaagtgcaaacgcccgctgcagtgggtgtggcggggcgaatttggtcagtctcatcaattagcgcgctaattacgcccataaataagtgccctcagtcgcttgacattgggcgtcagccgaggcggtccataggggagaggggcgggggagtatttggatggcatttgagggcatactgtaatcatgggctaataataagtttatccatttttttcaaaatttcaaatgttgccctcttaaaattagtgtgtacatttgcagaattttgtcggaatgcgttcaaacggttgcacggcacggaagaagttcagcagcagcggcggatgatcaccaccatttgccatcgcgagaacccttctctttacgtggacaatgatgagccaacatttcgctacaaatacaaacaaatgccgaaggtgtgctgcagggtagaggtgtgccgtgactgaaaaaacccgtgaaattcacggctttcgtgaccgtgaccgtgaatttttagcgatttttttttgttatttttatcggggatcccaactgaaaatttttaaaacacatttgtcagacaaaaaatcatcatttggggtcaaaaatcagcattttggaaaattattcaaaattaaaaaaaataaatttttttttgcgacgcgctttttacaaaaaacttttaggaaaccggtggggtccggcggcgctggtaggcgttgccgggaaaatttttaaaatctcaatgcaatttgcgaacaattttcaccaaaaaatgcccaatttttgaaattttgagacaattttctatgaaaaaaaagttttgggggccctatggtgccaataggcgccgccgtaggaaaaatagaaattctgactatttttaacacatttcactgaaattttgtggcttttacactgaagaaaatgaaatatatatgtataaagtttttttttggaaatcaaagtaattcaaatattcgcttcaaaaaaaaattataagtgaaaacagtccttaaattgggacaccctcgtttcggcgctcacgtttcggcgccagcccaaatttttgggctataacttttttttatttcaaattggtatcattcgaaagcccttcacttgctctattagcattacaaaaatcaaaaatattttctagcttttaaaagagttataaataaaaaacttcaaaatttttgacttttttgcaatttcatgttataacttttttggtaattatcgaaccgagaatcaatagcttagaaacagattctaaacatgctaagctttcgaatgataccaacaatcttggatttggatgacaaagaaaaaagttgtagtcaaaaaacttgggctggcgccgaaacgaggtggaccccttaaattttacattttttattatcaaatccaaaataagcacgtaatgttgaaataggcacaaaacttagaaataagcacactttggaaatcttgatttaagccgatttgtttatgaaaagtattggatgccctgcggtgccgataggcgccgcagggaaatttttgcaaattttgctccaatttcttatataactttgcccaaaacatgaccaagttttctctataaaacaatatgaaattctgaaattttcaattttatccagtgtaaatttttcacggaaaaaccgtgaactgaccccatgaatcgtgaccgtgaccgtgagtgagaaaacccgtgaaattcacggtaaccgtgattcacggcacacctctactgcagggagtggaaaaacaattaattacctattggaaatttatggcacaccatttcaattactgtttttgtttttatgtataacgccctttttgatggcttttatataacgacatagcaccgtacagagagagaaagtaaaagggcagtcagtgagggagagagtgtgtagggagaggcagttggaaattcggagctcgtcaatggatggggaaaaatggtttgccaaaagaggctaaaaagaattaataccgagagatatgtgtgagacaatttatccgaaagtcaaaaccggttctgctttggattatctctcgagatcgagaactgaaactaaaaataaattcgcatttttatgaaaagtgacagagagtctcgcacattcaaaaggggttaagaagaaattatcccataaattacatatgagacaaaaacaaataatgagaaagtttgattttcttgtccattatttatggaaaaaaacacttttaattgctcaatttggaaatgaatgtgacagataattggtgaacaaatgaatgaacgtgataacaaaggcggcattttgacacaacaacacatacaagggcacaatgccaaagaaacattttttcgaaaaaataaaaatttctgagcgcgcccttggacatgtttgagatgatcaaatgtcaaataaaaatgtggtttacttgtttgttgtctaattatagtatacaatccgagaaaataataataaaataataatcaaccaaatgaacgaattaataaaggtgcatttttttttgtttctgatcaatcaataacggatcaacaaaatttccaccgatttccgcacgacctgcagaacacaaaggtggtcatcggctcgtccgcgcttcgcgtttgcatttggctgtatgtgcaacatttggacccgcacttgtgacacctgtcgagtggggggaggtgggtaattaatcaattaattgatgatggcacacaattttggtttggcacccacacccccacacccccgccggccaacaaacacaaaaaaacaaaacaaagaaaaaaaattgcactctttaagcctccatcccctcccccgtctatcttggcaaattattaaagccattatcattattaattgggattcagggtaattaacagcaaacgaatggggacagtcagagccaaaaacttgagaaaataatgtttactattattatta

SEQ ID NO: 1217 - DNA, 1642 bp, Heterodera glycines
  unsure (1)..(1642): unsure at all n locations
aaaaaaaaattttgagggggggggggggggggacgatgaagcctgctctcccagccaaattgccaaaatcagtccccaaagtttttcgcgatttttttttaaaagagccgatcaaaaaatttatgtgttttaaacaaaaaatcaaaaaaaatttgaaatgcccaaacgattgccctttccccgttcaaaatgccaggagggagaggggagggagaggatgggggcaaaaaaattgtaaagtgcaatttttgtcttccgcccaaaaaaagatgatacgactgtttggcgtgtcagtcactcaatgatttttcatccaattcccaaaacggtccaatgttttggaagtggacaacgccctgcaaaaagcacaataaatgtgtaataataacaaataaatgtgtgatggcaaaagtactgaaattgcaacaaaaaaaaacgcagaaaaaacccacttgaacatgtccgtcggagtgcctgaaaatagggaaaaatttttttatttaaaaaattcctaattaaattagtttgaaaaattaaatatgtgaatgtgtccccataaatcgctgattttttttccaattcgcgtaattttagcattttttacggcataaaaccggtggaaaccatccaaaattggggacccaaaaccgtcaaaagtcgcaaaaaggtgccaagttttccgtcggtcacaatgttgcgattccgaaactttccactgaccttcttggacggacatttggtgctccaaaatggtctccttggtcaactgttcacggacctttttcatctcctcggatgccatctcttcagcggtcatcacggcaaactctgcaaaaaaaagggggcaaatttatttatttatttttttaatttcatttttgaaatgactgactttctggcgacactgcgccagtcagcacattctcacgcaatgccacatttttcttgtctcgcaaattgaacaccttcaaaacaaacacaaatatttagttgactggaaaaagtgcccggaatggcgccgaaattcggattggtaaaccaattttggaacttaaaaatgaagcaatttcgaggattttttgggtcatttgaagaatttaaaggaattactaatgggtgaccaggtgatgtggcacgactaaccactttttatttgatattgtagtaaaaaagcacgtagttggtgcctaccgtattttctctaattaaggccctgtctccattaaaggccctgtctccaattatgtccccctttctgaggatgttgaaaaataatcgcccgtctctatttatccccccgggggataaatggaattattattattttttaaatcttatttttaataaaaattaattttaattaattctaaattgaaattcatttaaatgtttaataaacatgaaaaaataatacagaaaaatcacttactttactcaagtccgaatctaacccaccccggtgctatgtgttttcaattttttgaaatttaattattaatccctaggggtcttatgagacgggggtctggggttcgagtccgcttggctgcggtttatttttttaggtacttgtacagtttacaccagagnntgccgcgnngtacccgaaaaccgacatttttctcgacccgaaccngacccg

SEQ ID NO: 1218 - DNA, 909 bp, Heterodera glycines
tagaaattctatccgtcatatcggcttttggaattttaatgagtaaatcagtaaccgtaaatgacattctatgcttctcttgttggatacacgggaagaaataatagttagtccttttgttgaatttttagaaattctatccgtcaaatcggcttttggaattttaatgagtaaatcagtaaccataaatgacattctatgcttctcttgttggatacacgggaagaaataatagttagtccttttgttgaatttttagaaattctatccgtcaaatcggcttttggaattttaatgagtaaatcaggaaccgtaaatgaaattctctgcttctcttgttggatacacgggaagaaataattgttagtccttttgttgaatttttagaaattctatccgtccaatcggcttttggaattttaatgagtaaatcagtaaccgtaaatgacattctatgcttctcttgttggatacaggggaagaaataatagttagtccttttgttgaatttttagaaattctatccgtcatatcggcttttggaattttaatgagtaaatcagtaaccgtaaatgaaattctctgcttctcttgttggatacacgggaagaaataatagttagtccttttgttgaatttttagaaattctatccgtcaaatcggcttttggaattttaatgagtaaatcaggaaccgtaaatgaaattctctgcttctcttgttggatacacgggaagaaataattgttagtccttttgttgaatttttagaaattctatccgtcatatcggcttttggaattttaatgagtaaatcaggaaccgtaaatgaaattctctgcttctcttgttggatacacgggaagaaataatagttaagccctttttgttgaatttttagaaatttta

SEQ ID NO: 1219 - DNA, 1087 bp, Heterodera glycines
  unsure (1)..(1087): unsure at all n locations
ttctatccgtcaatcggcttttggaattttaatgagcatttcagtaaccataaatgacattctatgcttctcttgttggatacancgggaagaaataatagttagtccttttgttgaatttttagaaattctatccgtcatatcggcttttggaattttaatgagtaaatcagtaaccgtaaatgaaattctatgattctcttgttggatacacgggaagaaataatagttagtccttttgttgaatttttagaaattctatccgtcaaatcggcttttggaattttaatgagtaaatcagtaaccataaatgaaattctatgcttctcttgttggatacacgggaagaaataatagttagtccttttgttgaatttttagaaattctatccgtcaaatcggcttttggaattttaatgagtaaatcagtaaccgtaaatgaaattctatgattctcttgttggatacacgggaagaaataatagttagtccttttgttgaatttttagaaattctatccgtccaatcggcttttggaattttaatgagtaaatcaggaaccgtaaatgaaattctatgcttctcttgttggatacacgggaagaaataatagttagtccttttgttgaatttttagaaattctatccgtcatatcggcttttggaattttaatgagtaaatcagtaaccgtaaatgacattctctgcttctcttgttggatacacgggaagaaataatagttagtccttttgttgaatttttagaaattctatccgtcatatcggcttttggaattttaatgagtaaatcagtaaccgtaaatgacattctatgcttctcttgttggatacacgggaagaaataattggtagtccttttgttgaatttttagaaattctatccgtcatatccgcttttggaatttaatgagntaatcagtaaccataaatgaattctctgcttctctttgtggatacacgggaagaaataatttgtagtccttttgttgaattttagaaattctatccgtcatatcggcttttggaattttaatgagtaaatcagtaaccgtaaatgacattctat

SEQ ID NO: 1220 - DNA, 6607 bp, Heterodera glycines
aatgtgagaaaaacccacttcactgaaatgttcacgagaaaagaaaatattttgcctctcgagacacatggaagccaagtatcgttcgacactttattaagagcaaaaataaagtcaacaacttcactacaaatgcaagtcacgctcaaaggtcacaaagtcaaagcaatttatgacaaaaataattgtaccgtaaacataaaatcgttagaaggatgttactcatgcaccaatggagcagaatttaaattttcatgtacaaccaactttggtaccgcattggcaaatgtaaaatgccctagtcagaattttcaaataccatgtgacacaaaagggaatcaacagcaaactcagcttttctttaatcaaccgagtgtaaaagaaagatgtgaagttatatgtccagatggaaaaagtgaaataacaattgaggccactctgaattatgtgagccaacaagacaaaataattaacccatcgaataacaaaaaggaaacacccgtacttggaacttccctcgaacaattttccgatatatttaatttcatatatacattaatcaaaacaaatctttttaattttttaactatactttttactttgattgtgatgataacatttataatttgtatatgtccaatgatttacccacttctttttaaatactttcctttccgtcgcgggaatgtcgcgactacgcgaaataggatttttaatttaaaaaataaaaacattaaaaacaaaaaacatttaaattaatgttaaattaaacagctaaacattaattaattaaatgtgaacgaaatgaatgaattgaaagaaagaaaaatcattagtcattttctgtcacaatttttccattagaaaaattgtcaaatgttaaactttaattatgaataatttgaacgttaaaagaaataacagattttaaacaaatgttaaaatgagacaaaatgtgaatgatattaaagaaattgtaaaatgttaagaaaactggaaaaggctaaagtggcacaaactggaaaatgagaaaaggttagtaaaattggcaaatgttagggacagaaatttggacatgccaagttggcaaacaattgttcaagcagaaactgccggtataaaaggaggccacaaaccccccaccaatcagtacaccaacggtttctgagaggcattgcctcgtcctccttttcctccctccccttccccctgtgccgacaacagccaccgacaactgcgccgcccgcccgttcgtgccgtcgactcttggccctgtccgttcgtgcgccgacttctgtgccatgccgatccgtgccctgccgtgcccgactaccgccttgacacaccgcccgctcaatgccgcccgtcccgtgccgttgacgtgtgccgagccgaccactcccgttcggtccccaaattgtgccgtcctccgatttgtgccgtcccccattttcccccattgtgccgtccccatttctgtgccatcccccattttgtgccgtcccccatttttcccccattgtgccgtccccatttctgtgccgtcccccatttgtgccgtcccccttttttgtgccgtcccccattttccctccattgtgccgtccccatttctgtgccgtcccccattttgtgccgttcccccatttcccccttcggtttaattacccaagtttgaggactccaataaagtgtattttgaatcgctttcccgcctcacttgacccccagcaattccaccatccccgattgaccgccaagcgtccaccccaaaatttcgccacaaccagtccctctcctggtcaccattgcgccagccgcccccaccccgccgactcgcactactcgtccacaactcaaagcccagcaccaccaagcagcgccggccctctaccaaccactgaactcatcagcacccccacatctcgccaaattcctacccctcccatttgtgcgccatcgaaagcgtacaagtggtgccgcacgacccgggaacaattgcacacccgcctctaccggaccacaacaaccgacccttcgaaagcacgtcgccacttttctgaaaaacaccggccgctcaaccattcaccaccggactccatttgaaagtaaacacggtcacaaacccaaaaaaactcacaaaaaagggccaccaagcccaacactcgaaattaagggataatatccccacaagtcaaaaaaaaaaaacacacacacacaacacacaaacaaatcacaattcagtgagaaaggaccacccaccgccatcccgcgcaaagagtgaaaaaccaaaagaaaagaaagagcattttcggaccgaccaacccaaaagaaacggagacgaaaccaagcaaatcctcagacggacaacagtgataaaagtgaccactgtgatcaaaaatttctaaactgtgatcaaacccaatttaattttgtgataattgtttacctcaataaaatattaactgattacaatcgcagaagggaataaattggccaaccaaaattaagaaacaacacaaatcatttttaaaggaaaaaatgtctggttttatcaggagcaaaatccctctcctcaatcgagtgctaagaaaagaaatccagtcgaccaaaacaaaaatcgaggaaaacaaatttgaatttgaccaaaataatctggacgaatgcacacgggtgttcaataaaacaaaggaaatcatacaaaaaattgagccaaactttgagaaattaaaaactttacacaaaaaatggcaaaatttaatgagaagaatggacaaagaagaatggaacacagaatggaaaatccagaaaatttttcgcgaaaaacatgattatttaaagacaattaaggaaacagacgaaatcctcgacactctgaaagacataaatttggaggtaaaaagaagactcaaagtaatcaaagcaaaaccctcttcagacactgaccaagaggatgaatcaaatgatgatgaagaagaaaacgaagacgaagaaattgaagaagaagatgaagaagaaaaagaatacgacagtgaccaggaagacgattcaccggaattgacctcaaatgaccaaacaaaccgtaaacaaacaccttttgtcaattatcgatcgagaataaaacttccaccccaaactctgacacacttctccggaaaattctcccaatggcccagcttttgggacgatttcaaatcatcagtccacaatgacccaaacttagagaacatacaaaaactgaaatacttgcgaggactcttacatgacgaaccataccgaattgtgtccccttaccccctcacaaacaaaaattatcccataatcatcaaattactcaaatcccgatacggtaatccacaattgatcagagaaaatctgcacagcgaattaagaaatttaagaaaaccaaatgaatccacaagcgaactgagacgatttatcctattcattgaccgaattatcctacaattacaatcccaaggcgaagaaataaaccatccccaaatcaagcaatccattgagactaaactccccttcaatatccgactaaaactgagagaaaaattcaaactttactcgacaaaagaattaatgaattttctcaattcacacactcaagctcgtgaagacatagaacgaatggaagattcaaacagacaaataagaaatttcacccctcaccggccacctcaaaacagaccacaaaggcaatcctacccaaactattcccaaccccagctaaaagcaaaccaccgaaaccatcaaaatatgcctctctcgccatatcccatcacttctgcattaacaaccaaatcaaaacctgtccgtttggcagaatttaaaccaaaaccatcgcaacccaaaccacaaacaaaaataaaattttgtcgattctgtgaaagagacaatcacttgagcaaagaatgcaaaatttattcaaccacggaaaaaagaagtaatcgagcgcgcgaattaaaactttgtctaaactgtctgaaaaaaggacatcatttgaaggaatgcaaatcacctttttcatgtttcaattgcaaaagcaaacacaataccctcctatgtacccgaaaaacaaatcaatttaatcaaagagaacaatttacaaacgtaaacgtcacgcaaaaccccgaagaattcgaagaaacccaaaattttatgtctctagattgcgatcaaactgatgaaattttacaaaatgacgaagaagaattgcttatgaccacggaagcaccagtattaaatcccgaccaaaacagaacacaaaacgaagtaattttctttgacaatgggtcacaaaaaagttatataacagacgaatgtgctgattcccttcaattaccaacaattgacgaaaaattattggcaatatccacctttaaccaaaataaacccaaaatcatttcatcgagactagtcaaaattggaatcaaaacactaaacggtgaaatcgagtacgtaacattacagactgtggaaaaaattactgatgttacaaaaatggtcaacagagagactgttgatatacgcaagagaaaaataccaattaaccatgcctgtccacaaattctgattggtatagaccactattggcactttatgctaccaaactcacaaattcaaatactcccctccggattttactcaatcgatacaaaattaggaaaaatattatccggaaaaggtactattgaagacacaaatattaatcttgtgaaagaaaagcgaaaaaaggatgagacaaacgaaatccttcaaaaattctgggaattagaaaatattggaattaccgactctccacatttgacggacgaagatacagctctcatacactttgacaaaaatgtcatttttgaagaaaatagatactacatccgatggccatacaaaagagaaacaccgaatttacccacaaattttggattatgtttgggaagattaagaaatgtagtcaaacaattgattaaaaacaaacagttggaaaattataataaaatactgcaagagcaaatggacactgacgttaatgaaattgctgatttcaaatccaaaaatttaattcactatctcccacatcaccccgttataaaagagagttcaaacaccacaaaaattcgaccagtttttgatgcttcggcaaaattaagaggaagcaattccctcaatgacgaaattcaccaaggaccaaaattattacctgatttgtgtggaatgattctccgattcagactcaaaaatttcgtcttaataggcgacttggaaaaagcttttctaagagttggattaaatgaaatagacagagacacaacacgctttctatgggtaaatcagtcatatttggacgaaataaaccaaaaatatcgagaaatcgaaatgagagacgtagaattaagacgtttcacacgaatacccttcggagtcaatgcttctccgtttttattaactgctgttgtgaatcttcatttatcaaaaacagatgaaatgtttgaaaagtttaaaacattacaaatagatgaagaattatgtcttagtggaaaagagaaacaattcaaagagctatgcacagaacttaaagaaaatgcatacgtcgataattttgtaatgatgtgtgacgacgaaaaggaaataaaattcaaacattactggagcaaagaaatattcaaattagcatccatgaatttgagagaattcgtgtctaatcacgaacaaagcaacaaagagattcaaaaaatggaaggatcagagataccaaaaattacaaaaatgttgggtataaaatggaatgtcgacacagacgaactcgaactacaaataaaaataccactaatgagtagagacacgacaaaaagacaaattttgacaatgatcgcaaaaaatttcgacccaatgggttggatatcaccagtaatactcaaatacaaactatttttccaaaaactatggagatcaaacaaagactgggacgataaattaaatgatgaagaaataagagagtggaacaatatttcaaatatagacgaagtttccataccacgctcaccatttacaagtcaaaatttaaaatgtgcttctttacaccttttttctgacgcctctgaattagcctacgccactgccgcatatttacacacaaataataaaactgacttattattcgcgaaaacgaggcttaccccactcaaaggcctaacaatcccaaagcttgaactattgggactattaatagcagcaagagccgtcaaatttatcattaaaaaatcaaaattgaaatttgaaacgatatgtatctggtgcgattcaaaatgtgtactcagctggttaaaatgcaaaaagaatttaccaatatttgtaaaaaacagagtggaagaaataaaacaaattgtctcagaatttcacatcactttctattacgtaaaatcagcagacaacccagctgatttggcatcaagaggtacaacaatgaatgaaatgaaatacaacgaattatggtggaagggactaaaatggcttaaattaggaaaagaaaactggccagcccacagtttctatactcctgaccaaaatgattcactttatgatgataacataatggaaa

SEQ ID NO: 1221 - DNA, 422 bp, Heterodera glycines
atttcaagtgtgtgcagcaggaacctccagggggtcttactagatttgtgtaaaattgttgttttgttttgctcacactgcgcagttcggtgtccatcgttttctcaaaggaacgcttcgtcagccattggcccactcggcccgccatatttgtgccaaaaacaaaggcatttgggtccttttgcgaggcgatcagctgctgcagagtttgcacgctatttttgttgtcgggaggctgaaaaaaaagaattttttgttttaattttagccaactattttttgttttcaccaaaaattggtacaattttcgggtgccattatttggaaaatttagcggaatttttagggttcgggcataggcgccgtcggggaaaaaattataaaaacaatcttaggttttcgggggcgctgatcgcgaatcc

SEQ ID NO: 1222 - DNA, 1045 bp, Heterodera glycines
atcattcgatagccctaagtgtcctctattagcctgaactttcccaaaaaatttcgttaagtttccaaaaagttttgggcagaagaattcaaaaaacctggttgttcgaaaatttttaatctttttgtaacctaacgaatttttttgaaatttgaaagattaattaattttttttaatttcgtgtatttgcttctctttcccagacatgaatatctgaatttctcactttgcccactcaaaaaaaaagaaagaaaaaatttattttataaagaaatattcagaatgatgaccgaccgcttgtaaccaatcgtcgaaggcaaagccaagtgccgacggacagagatgggcagtgaccaactccagcgatggcgagtgcaacaacagagtgccaggacgcaaatgggcacgcaaatgttgccaacacgaaacctttttagagaggggggggtagaaattttcatccaacaacatttaaaaaaaactaaagaattctaacgaagggagaaaaattaaggattgaaaaattggtagtgagaaaataaaaaaaaatttatcattagtcacactgaatgagagaggaaaaatcaaaaaaaaaaatcccgcaaatttttttttaaaaatatcccacctgttcagcgtggtcagcaaagaatgtgaacacgttgttcatgatgacaacatcagcattggccaaaatgtcagcatcggcatgaccatcaaaaaaaagaaaaaagtaaatataaaatttttttttaaaacttttaaaaattttcttctgctttttaaaaaattatatgctgacttactatttttttaattttccaaaaattacttaagtaattctagtgtttttttttcttgtaaaatttcagcttgttaaattttcgggggtggggggaggtgggggaaacggtaggggacggttcggtgccagcccaagttttggactaaaacttttttcattgttgaccaaatctaataatcttggtatcattcgaaagctttatatgtttagaatctttttctaacctattacttaacgat

SEQ ID NO: 1223 - DNA, 1380 bp, Heterodera glycines
tacagaaatgcgtcacgctcaatgccaattgcacgaccaatgcgtgggctaaacaaaataaatatttttgattggaataaaaagatatgtaattcaaaacacaggcaaaagaaatgatgagagagtgagatgaaaagagagagagaaagagagagaagagaggaaaaacgaaagagatagaaagaaagaaaagagacagtcgagaaagagagggaaaacgaaagagatagaaagaaagaaggagagagagaagagagggaaaacgaaagagatagaaagaaagaaaaagacagccagctaataaacattacgcagagaaagcgagacacgaatcaaatttgagagaaaaagagagagagagggacaaacagacagacaaagaaatgacaagttcaatcctcaacaattccacaccaataaagtgcagcagcgtataacactgtgccgaggcgagagccgatgtccaccaacactttgccatccaacgaaggcagacgaacagtgaacagatggtgaagctaggaaaaaaatagaaattctaaaaataatttaaacaaaaatttaaatcactcttacagtttatcattgcattgatatttatcccttcaaaatttggtgcatttctgctgatacttttcgaacgagtcgatgggtgtacaaactttgcttctttaaggggccatccccccggatggccccgtcccaaaaattctaaaaccttggggtgtggggtgggtttccttttgatgtttgccactagtccagttagtgtataacaaatgtaaagaaaatgagttttattttcgtatgggatggatgggggcagggaacgcaggcaccaccacacatactctctcatctccctctcttttctcttccgttttgtgcagcatacactctctcgcgcccagcagagaagaaatgggcaggcaaaatgagcagaaaattgaaaaaaaattgcctactttaaaaaatgaaagttcaaaatcacatattcttgtagctttctagcaataaaaattcaaaaatttgttaaaatttaaaaaatgggtgcgaaattttataatatgttagttaattattccctttttagcatagctgcaaaattttggtctttaatactgtaaaaatccgcaattaaatattagttattgtaagcaatgacaaaaaaatgaagagtttttctgcagcattgaatttgattatttctagcaatgtgtgcttcattttaaagggccatccatacccccggatggccccgtcccaaaaattctaaaacccagggtgtggtctgggggggttgtcgcgcacaagctgaactgcaggatggtcatggtttgaaagggacaaagcagcagaaaattaaatatgggttgaaag

SEQ ID NO: 1224 - DNA, 2645 bp, Heterodera glycines
  unsure (1)..(2645): unsure at all n locations
aagccaactatantttgggaaaagcggaagctacaggcacattgacatgtgtaccaattcgcgcaggcgttttgcgatacgtccaagttgcttgcgcaccgacaaatccgttggatgccgtttgtcactgtgctgcagtgtgtcttttgttggcatcgcattttcacggcgcaaccgttggcgaacccatcgcaaaaactgctccttctgctgctgcgattgttcattgccatcggcggtgggagaaaagctggccaaaattgcctcaaattgtttctgtgccgcctccaatttgccattagcgtcgttcatcaccaaaatgttttgaaaaaatgtgtaaattttgttttttaaaaaattttgtataataatagcatcacagaatgaactcttagccaattaacagaattgcgaattaaatttttcaataaatatttgaggaaatgagaaacaaaaaattgtgggttttatgtttgagtgtcgggtgttaaagcatccataagggcatccattctctgctccaacattggcacaatgtcacgctccacgaacaaacaaaactcgtcaaggtcctgtcaaaacgggataaattaaaaaatgacaaaaactcaaaccctttttcaaaattcgacttttaggcctccaattttttcttatttggtcaatgacagctttcttggcatcaaccgaacgaaagcttttcaagaatggctcagaattgaattaaagaaaaaaaattttagacaaagcttttgtttggtacaaatgtgggcctttatgaagaaaaaattgatggctaaagaaactggattgaacacctacaatacaattgcctcaaaaaaaaaaaaaaaaaaaaatgggaaaattttaataaaatggagaatgaaatatttcacgaaaaacgatctctcaaccaccttgacgatgaacggcctgcccagagcccgtgtctcgtccaaatgcttcaggaactgtcgcattgccgggtcacaacgaatgacggtgcccttcttcacgttaaccattttatctagcaaaataaaacaaaaagaattacagagaatgtttaataatcagggattctttttttatgtgaatacatattttttcctggattctccatagcctaattagtaggaaaaaaactttcttttttgtgtttgcgaacaaaagttgggacttttatttacatatttttacatattttgggatttttctacttattacatatgtacatatttttatacatattttggactttttcgtacatattttcatttttttttacataatttgaggatttttgagaatttacagaaattttttgtgaaaatgtatccctaaaaaatcgaatttttttttcaaaaaatgatatatcaaaaattaattgttgatatattaaaaggtgattctaagcctattttggtcatttttatggcattttatgcctctgtttcactttttacgaagaattttttttccaaaaaataacctttaaaaaatttttatttacatgttttagtacatattttggggtttttgtacatatttcatacatattttagcattttttatacatattttatttacatatttcgcgatttttcttacataaaaaaagaatccctgttaataatataaaataaatatatatatatttactaaattcaaataaaaatatatttaaacattgcatgcaattttattttgaaaaatttattgtataaaacaagagattaaaaaaatgaaatccaaaaaaatgcttttgagctgttaggcatgattaaatgattgctcgagcagtacacaagtggttggtttgtggggtaaagaattgaaaaaagagcaattaatggctggcagtttaaaatcaaatatttaaatggttacaaatttagaaaaaaattttacacatttaaaacttttttttcaaacgcataaaaatggtaaaaaattaaattaaagcggcgaaaaaaaagagacgctcgtcctgtgcaagaaaatgaaaaatgagagagagcttcatttttgtaagcaaatgctcaaatacccgacgaagggattatttgccatgaaatttacaagcaaatgatggacaacaaaaaaaagtggttggtgtttgcacacatcacatcattcactggtcatcgaaagaaatttcctttttaaataaaaatttcttagtttttaaaatttaaaacatttagattttttcgaaaaaacatttaactttttaatatttttctggaataaagccgctcatgaagcgggaccatggccaccagggtcttgggaattcatagaagggccggaaatggttaggaatctcgatttaaacagtaaaaattatgaaacaaaatccaaaatctaatgaatttgtgcaaaatccactgaatccaaaactgagattatgtgcaaacactgatttttgaacaaaaagtaagcaaatagagataaaacaaaaaaaaaaaacttctggcacaacaatgattggtaaatgaatggagttgggagaaagaaaacggtgaaaaaatggataaatgacaaaatttaaataaaataaattcaaacgcaaaaaaaaaaaaatggattaagaacaaaaaaaaataaattacaaaaatgcgaattcagtttngtgctgatga

SEQ ID NO: 1225 - DNA, 2193 bp, Heterodera glycines
ctctagagtcgccgtacgactttttcggttggattatttgaaaatttcgcttttcccttttttggtattcgtccaccgatggtgaggagggtggcggtggcgcttcgtccaccacaattttcggcaattccgttgatgtcgttgaagttggacgatggttggtggtggtggtgatgttgtcatcggaaagctataaaaacaaaattttttttttgtgattttctaaaaaaaataattggaaaaactgaggggttggcaattcgattttttcaaaattcgttgcgtataaatttttcacctttccgtcagccatgctcaacacacggccaaggccagtgaccacgttggtcagccgatgtgtgatcaccaacactgtgcgatcagcaaattctttgcgaatcgactgttgaatgcgttcgtccgtttgactggaatttttttttctagtaataaataatagaaccatgacggaaaatagaaaaatttaaccggatgggtcaaaaaaaaaactttatcttggtcaagttcaaaaacccccggattttagacatggataaggtaacttacatcccaccaccattttccgctccatatcaccaaataaaaaaaacagaaaattttggggaatttttagaaattcataatttccaaaaaaaaaaattttagaaaaattctgtcaggaaaatttttaaagatttttcgagtgtcagggggggggggaggtacgggctgctcctgacaagaaatcttttattccagttaacaaagccactacatctcttacatgtccacgttggcggtggcctcgtccagcacaacaatttgcacgttgcgcaacattgcacggcacatgcacaccaactggcgctggccggccgacaaattgcggccacccgactcaacagcaaaatccagtccaatctattggagaaaaaataataatactattaggaaccacttggttagtgttacaaaaaaatttgaaaaaaaaatcccagttttacgcatgtcgtttgcaggaaaataaaaggaatacaaatcaatcaaaaaatggaaccgaatttccgagtccattatctgctccaaaccggctgaacagctccaaaatgcgtgcatcatccgcgccaccttccgggtccacgttgaaacgaagtgtgccactggggaaaaatggaaaattcgtaggttaattaaattttggattaaaattattaacattatctaattaggtagtaattacctgagcaaaataaacgaatcaatggcaactcgtagatttattagcaattaattatagaggattaaacaaaattttaaaaaatttacgcaaaaagtgtcggctcttgcgaaatgatggccattgaacggcgcaaacgtcgaagcccaacccgctcaatgtcccacccatccaaccgaatggtgcccgattcgatggggtagaggcgaaacagtgcattgcacagcgacgttttgcctagttcggcatttttttaaataaattaaattaatttcttttaccactcccggtacgcccgacaatgccaactttttgtccggaataaataatgaaggacacgtcattgagtgccggattcatttgaggcacataacggagactaaaaataataatattatagtaccagtggtcaatcgactcttatgatttcaaaaaaatttttttccttcaaaaaaattcgggtttcaaaaaatatatatatttatatttccattcccgaagcctacttacatgacatgatcaaattccaatgtgcccgattggggccaggccgggccaatttcagccgggtcatctccatctttgtccgattccacctcgatgttcttgtgaaggggatggatattattgataaagggaaaggaaaattttgcggaaatattagacttttaatttaaaaaaaacgaaaatctgcggatacgcgaaaaaatgagtgaaacaaaaaccttgtaatagaagctgacgcgttccactgacgtcagtttggcctccagttcagtttgagaacggaccgcaaattgaaaaatgccactcatctgtgttaaatgatgggaggtaaaattgaataacgaaattattcaatgtttgttttgtggaagataattgagactaattgggcgttgttgcaattgggtgcacttcatttcccacagatgagtggcatttttcaattggag

SEQ ID NO: 1226 - DNA, 3272 bp, Heterodera glycines
gggactcaattaaacggtgcgcattttgctgtgtccaaattgatccgtccggcgatggattagtgtggtgaaatggagaaaactgtgggagcgaccaccgttgtgttgacctttggcacatacattttgtgcattatcccatcgcttttaggctggcagaccaaaaatggaaatattctctcacgccgctcaacaaaattggccaaaaataaccaaatttaacaaaatgtgaaatggtggcggatttataaaagtactggcacctccattaagcgaaagaggcatttaattataaacaacttttgattcgtaaagcatttaatattggagtttttttcatccgggcaagtgccggtcctggttgttctccaaatttcagatcctcgtgctatttagttgatatttataatgactgatctgaagataattttatcaatccaaaacattcaaattgcattctttaagtgttagccaattaagctaaaaatgaaaaatgtcctagggttacataaaaaatgttgtgaaaaacaggcaaaatgtagaagtcatcaaatgtatagattaatgattttatcaacattaaactaaaattggaaagcaacgatttactaatttgcatcatcaaactgtcttaataattttataacattaagtaagtctgtaaaattgagcataataattataaaaattgtaatacttgttggggggggggcgagctaacgagctgctcccgttgcaattagccccccccccccattcacattcatgcatcattgctctgccatgttcacctgcatagcaaatgcaatggccataccggcctccgccgggtcaatgcgcccggtgagcagcacaatgaacagggagacgaagaaggtcagcccgaccaccaacaggtcaagccacaccgcctgccaccgcattgccgaatggtagaggaacaaagcaccactggaaaatgaaaaaaaaacgaaaaaattaatgtggcaacaaaaaaaaacagacggacgaaaaatgggccaagaggaatacataacgacaagttaaaaaccaaaaactttgacgaccgaatagaaaatggtctttttaattgcgggaaatataacattttcttgaataatcgtagaaaatttttaatttttttttggaattttcatttttgtttgttgcgaaatttcaaattgtaatttattttgaaaacgatacagggaggggggggggagttgtaccagttagcccttagcccaccgaagccaagggcctggctacgtccttggttggctgcattcattacaatgaggtagtttaaatttttttttcgaaattgaagaaattttaaaatttgggaaagtacggaggaggaataaagaaagtgacatattggcgttcatttctagaacaccaaaaactcttacctgttctcatccaagtgttgcttcagctgctccacaaagcgttgggtttggccaaacgcgtgaattgtcggaagggcgtccagcgaagtggtcaaatgctcaaacactggtgaacgggtgacattctcaacacgtttcaaactgaaaacaaaacaaaaaaaaagcattcgattcggtgcactcaaaaatgtcgattgaggattttggaccgtattttttttttttttggttgtaaaccaaataattaagcatgcttggaattgttcgattgctaaaatacattcggttttgtgcctacacctcaaaatttttaaaacggtcaacaaggggcgaaatctttggggcataaacattttctttaaaatgcaaaaaaaaaataaaaaattgttaccatcgaatgccggcacggaagcataggaaaaagagcaaaaagaggccaaacaatggagcacatggaaccaaaaagagtgggaaagtccaaatgatcatgaaaataaatcctagggaaaaaagataatttattttaaaaatattaacccttgcccaaacgaacccaaacaggtgaacattccctgaagcaatgcttcggccgaaaaaggcaacttcacatcaactgaacaaagttggaaaattagaaaacaatttgtgaaaagcaatccaattaaataaaatttaattacaaattcttcatgccttggaattagcggatgctaaaagttttacaatattttttaaatttaaatttgcttcagacaactatgaaaaaattagccatcattttaattgtaagtcaaataaacaaaataaaaacaagctgtgctcactttcgtccatgtctttgctgaaccggttcaaaatgcgcccggacggtgtacggtggaaaaaggcggcagtggcgtacagtacacggcgcaacatccgattgtgcaaccgtgtggcggcagtaagcgtaaactatgggacaaattttgtaggaataaaataccaaaatcattttatttaatgatttttttttgtgaaatttgacaccttgacaaacaccaatgccttgagcagtccgctgataaacaacacaagcaaagtgaaagctgaaaaatgttatgcattttattttggcctaaaaacgactcacaattaaaatttacaaaaaaaaaaagaaaaaagatttggaaaaaaaatatttaatagctgcattaaagcggattataatcgaaattttctgcggattataatcgaaattttctaagtttttttggcatataaaaaacgcaaaaaaatggaataaaaaataaattttttagatttcaatataattgccgagaaaatgtgaaccaaccaacccacccacccaccataaatgttgatgtaaaaggatggactgtcggccaaactcccaccagttccatcagtggcactgtgattgctgtgtgcggcacgctaatgtgggacataattaggttttgtaattttttttttttgattactgtaagtaggtaaaacaaatttttaagtcgtaccatccaatttttgagccaaacagtgccaaaaatgttggcaccaacattcagaatgaacgcagcaatgaccaatgagcagagcaaaggaccaccaccagcccgaatgtattccctgggggaaaacagcaaattttttaaatttttcatttaaaattcaaaaaaaaactgaaattttggaactatttgacattagaagaactcaaaaataacataacaaatcaaaatattaaattcttttagtaaaaaaaaaaatttaattcaatttttttaagaaaaaattgtatcaaacaactcataaattaaagataattatatacttctatgaaaaataaaatagaat

SEQ ID NO: 1227 - DNA, 3288 bp, Heterodera glycines
tcaattgccgttgaaatcgatgcaaattccgcaaaatccgttgcccaagaaagtcgtcggattcgaagacattacaaaaagggaagcgaatgatttttgggtgttccctctgtgtaaaacgattccttcctctttttacagatacatcaatgacaatgtgatcacttttcttcactgttttcgtccacttttcgccgcctgccaaattaattttgccatcgacgatacccttacgatctttaacagcactttggagccgattttgcgcaacatttgggctgtgatcgcgacgaacgtttgtgccatccaattgtctgccgaagttttccgccgtttgcgtcaattcgtcccctcaattctcgacgactgtccatcgcttcgcgttttcaatgcgtattactttggtttcttcacccaatttccatgcgatgacagtgccacggcatcgaatggacaagcggtggccaaatggcttttcactccccgtccggacaatgtgccgaaggtgttcaaatgctggttgcaatgggatgatgggcatttggcgtcgagcattgaagacttcaaaagggtgattattgtttgactgatttggcacttttacgggctttgagggtcgctgacaaaaatattttggacggcattcaatttgaatttttcagtttttaattgttttcctcattttaggaatttaccatgcttcatctcccgtcaatttcatcgctgtcattcgctttccgccgacttttgctgactccgttttgctcttcgatctgaccaatggatttacgcatgaacaattgacgttgacatggatgaacgatatcggccgttttctgctgatccgtcgtccaattgtgcgcgacgaaaacaaatgggcgaaatgggaaaaggaagcgattggctggcaattttatgatcaatggaacagaatcgacattcgttcttcgtgatgcaatcaatgatcgggcccaagtgatcagcagaagaagtgaatgattgttaataagtgatcgattaatgcccatttgacttttataaaattgttatttttgttgcggtgatcacaaattgtattatatatatgtgtgggtatatgcctttaggataaattaagagatttcctgaaataccaggctcattcttttgatctaatgataaagtcggtagtcactgttccttcggtttttattttattttttgttatggtaatttttggcgctgaaaacgaatctgagattattttaagctaatatccattttatgttgagttacatgaaagtttacgtattagcgataacgggagaagcggctcaaaatcggtggcattttactaaaaatgaaaaacaatgtcatgtcgacagtaaaataaatgtcaaatattttcaagtacgtacttgacattcaagtactaatccccccgtccctggtttaagcatttaatcgttaagaataatttttattgttaattgatttctacggatttctcaattgatgagccaaccgtagaacagccgaaagcagtgaaatgttcagtttaatacatttaatgagcacgtcaaaaccgaatttcatcttccaattttacactgcaattgatcgatcacttctcaacaaatcattcattgctacttttcgagttattaatgcctattttctaggcttttatttttagcgcctaaaaaaattttgaaagagcctatttttgcctattttggcgttttgcccaaaatttgtttacaaaaatgcaataaaaacaaaaaaatacacccctaagaatcgatttttttggaattttaaaaatacacccctaagcagagattcaaaaatttctgaaaataaatcccctaagaaatgaaaattttctcaaaaatcatctttaaaaatttttttggacaattttttgaatttaaaaaataatgtaactcaatactgatttgacttatttttttaccatttgaataaatttttttcattttacacccctaaatttgagactttttagtgcctattttccattttttggagcctattttgggggttttttagagcctaaagcctacctattttagcggtttttagtgcatataaattggagccctaataataaattatgtagaaaattaattaaaaagtacagtcggaaccaatcactgtcgaaaacacctggtacgggtcctgcctccgccatatttcattattttcctcttcgccatttattttcgtccttaccagcaggtgttcgacagtgattgatttcaaaagtgattgatttcaaaagtgattgatttcaaaagtgattgatttcaaaagtgattgatttcaaaagtgattgatttcaaaagtgattgatttcaaaagtgattgatttcaaaagtgattgatttcaaaagtgattgatttcaaaagtgattgatttcgacagtactttaaaattgcttttctacataatttattgtacatatgaattaatattaatatacaatttgcatatacaaaatttataattgaagtaagtcataaattaattaccttggtatgtttgtcagaagatttatcgctttctcattttgtatacaaatatctcctgctggactgtagtcaagaatataaagattgcttatataagattctcgaatcgtgtgggaaaatatgctaactaatgccgggtttgagtgccaagatgcaaatctgcaggctctttagcagaactcgaaaattacaaatcccttttcatgtataagaaagagcctatgcttatctgattatggcccggattttgttttttaactattttttttgcggctttattttgacgagaaatgcacgaaaaacacattttttgctcggaaattcttcgttttaacgccactatcgtcactaggaatcactattttggagctttgcaactaaaaaaaattatttttcgaagttggccaatacaatagttttttgccactattttggcgtttcgtcactatttttgccactattttggcattttttggaaaatttccatgcaataaacacgaaaaatacacccctaagaatcgacctaattaaacctccattttcgcatttcgatccaaaaaatgagttagggaataaaaatcgagttcgggagacagatttaagaaataaacgaaaacattccaacggtaaggaatttctgcgggatgaaactcctgtggttgagatattaaactttttggtagggaatgtttgtagactaataaaggacactttgggctatcaaataataccaaaaatctgcaaaagtgccgaaaa

SEQ ID NO: 1228 - DNA, 1236 bp, Heterodera glycines
gcaggagatgaagcattggcaaatgcctaaaatgtggaaaaattggttaagtagtaaatgacaaccacagaatgagtactaaataaataataagcaccgctttgaagtgttcaattctcgacgccaaattcccgtcatccaaagtcaaccagcagttgaacattttcggcacattgtcgggatggggagtgaaaagccatttggccaatgcttgtccatcggatgccgcggcactgtcatcggcagggaattcggtgaagagatcgcaatagccaaaaaagacaaagcgaagcgatggacagtcgttgagaattgacggggcgatttgtcgcaaacgggggaaaattccaacggacaattccaagacaagaatgttttttccgagcaatggccaaatgttgtgcaaaatgaactccgaaatgcgatcattggtcgtttcgatgtccaaattaattgggcaagcggcgaaaagttgacgaaaacgatggagaaaagcgatgacatttcggtcgatgtaactgtaaaaatggatgggaactgttggcaaaaaattttgacattggccaattttacaagatgttgatccatttgaatccgatgactttgcgtggcatttgaatttgcggaattggcaatggttttccatttaaaattgacaatttccatttgctttgtgccattttctccaattttgtgccaaattcgaataaatgccaatgtccatttgcgcgttttgaagtgttcgtcgacgtaaaagtcaaatcggtgactgatcatcgcaattccgaggccaagtttacgcggagagagcaaatcgaagacacaaagccaacagtcggcagagatgaaactgaagaaaaagggaaacaaaatttaaaattgaaaattggcattttaaattttaattttacattgctttttccattttttcctccgcttcttttcggcggtctgacattttgttgggagaaattattaagacagttttcgacagattaaattagctttttaaaattgaaaaattattaaaacaatcatttttttataaaaattcaagagaaaaaaactgttcaaatggtcaatttaaatggaattgttttcatttttgatttttgtgcatgaaaacaaaaaccgttttaaatttgttcaaattaaacaacaaaaataacaaatgaaagaacaattggaattttaaagaagcaataatatgggaggaattaaaagcaaagaatgaaa

SEQ ID NO: 1229 - DNA, 1845 bp, Heterodera glycines
aaacaaagtttttcttagaaaaaacaaattttgaaagataattataacaagtcccattttttcaaggcatcaaaaattgctaaaaattagtataaaagtggttgctcctcctccgccactttcattattattattttccattcgccatttatttgtgttcgtctctctgtcttcgaccttttcccatgacaatgtctttaaaagtgattctgtacgttttgcgcatttcttctcgacatttacccttttgcgttctcattttttagactcatcgctgtgccaatgtttgtcatttgttgtgccattcttttgaagtattgggaccgcttcaagaaaccaccaaaacaacaacgaggccatcgcaaaattgaaaaagtgccggaaactgtcttgacaattgaaaaagtgccggaaactgtcttgacaattgaaaaagtgccggaaactgtcttgacaatttgcctcgacgaaatgtcatcagacaaccaaaatgaagcggaggaaaagatgacaaaagcgatgtgaaactaaaattaaaaattgccaaatttcaattttaaattttattttcttttttaagcttcatctccgccgattgttggctttgtgtgttccatttgttgccgcctcgtcaacttggccttggcatttcaatgatcagtcaccgattcgacttttacgtcgatgaacacttcaagactcgcaaatggacattggattttgttcgaatttggcgcaaatttgaagcggatggcacacaggaaatggaaattctcaattgccgttggaaatcgatgcaaattccgcaaaatccgttgccaaagaaagtcgtcggattcgaagacattacaataaggtgaagcgaatgattttttggtgtttcctctgtgtaaaacgattccttcctcttttttacagatacatcaatgacaatgtgatcacttttcttcactgttttcgtccacttttcgccgcctgccaaattaattttgccatcgacgatacccttacgatctttaacagcactttggagccgattttgcgcaacatttggccaatgatcgcgacgaacgtttgtgccatccaattgtccgccgaagttttccgccgtttgcgacatttcgagccgtcaattctcaacgactgtccatcgcttcgcgttttcaatgcgtattactttggtttcttcacccaatttccatgcgatgacagtgccgcggcatcggatggacaatcggtggccaaatggcttttcactcctcgtccggacgatgtgccaaaggtgttcaaatgctggttgcaatgggatgatggacatttggcgtcgagcattgaagacttcaaaagggtgattattgtttgactgatttggcacttttacgggctttgagggtcgctgacaaaaatattttggacggcattaaatttgaatttttcagcttttaactgtttcccctcattttaggaatttaccaatgcttcatctcccgtcaatttcatcgctgtcattcgctttccgccgacttttgctgactccgttttgctcttcgatctgaccaatggatttacgcatgaacaattgacgttgacatggatgaacgatatcggccgttttctgctgatccgtcgtccaattgtgcgcgacacgaacaaatgggcaaaatgggagaaggaagcgattggctggcaattttatgatcaatggaacagaatcgacattcgttcttcgtgatgcaatcaatgatcgggcccaagtgatcagcagaagaagtgaatgattgttaataagtgatcgattaatgcccatttgacttttataaaattgttatttttgttgcggtgatc

SEQ ID NO: 1230 - DNA, 564 bp, Heterodera glycines
tatcggtattcctgaaaaggggtttggtactgagatgggatcttacagtatataaaggaaaacgtcgccgttcaacggcatcccaaagtttttgtcagaaaatcccaacgcccataaaagtgccaaatcaatcaaaacttcaactttgaacgtcaaattcgcttcatcatccttgcccaagtagcagttgaacacctttggcacattgtcttgacgtggagtgaaaagccatttggccaccgattgtccatccgatgccgcggcattgtcatcgcatggaaattgggtgaagaaaccaaagtaatacgcattgaaaacgcgaagcgatggacaatcattgagaattgatggagcaaattgacgcaaaagggagaaaaatgtggcagtcaattcaatgccatgaatgttttttccgagcattggccaaatgttgcacagaataaactccgaaatgcgatcacttgtcgtttcgatgcgcaaatcgatttgacaggcggcgaaaagtggacgaaaacagtgaagaaaagcgatgacattttggtcgatgaaactgtaaaaatggat

SEQ ID NO: 1231 - DNA, 6682 bp, Heterodera glycines
  unsure (1)..(6682): unsure at all n locations
ctctgggtctgcgtgtcatttcaagagtgattgccaactcgggattagaaatggctcttatgattgaataatcatcgtattgctgttcggttagacccggataagcgcggcggaccaaacccgaaattctgttcccgagctcatcgacactctcgtttggtcggcgccgaattccgcgcattagttggtcgaaagacgtcaattgtttggcgtctgtgtcgtccaactgtcgaataattatccgcctgattagctggtattcatgcgggttttcggcaatagctgaattgtaagccctctctgctttgccaaagcatttcgatcgaagagcgcgaagtcgtttatcctcaggccattcctctgtcgctacatcaaactgtttaaaaaatgcgttcactgcgtctgatccgctgggccgtccaaattcggaatagagttcagagtcattgtgtacgagaagctgtctaggcttctaatggcctgtgccatcatgccgtcaaataccagtccggggtggacaggctgctgatattgttcgaactgattcggatgattttctctaattggcacattttggttgtgattttggaactggggagcttgttgggaattttgtgccttaaatcgctgagcataataatcgtcattgtgagcgtaggcatgaggtggcgggttttgtcgaaccaaatgatgctggttttcggcaacaactggtctttcgactcggagaggtcggtaccgttcagtattacccggggcattctcatacaattgttgattcattcggtaactgtttggctgtggtcgttcaatggcagtaaaattgttcctactgtgccccgtttgttgattttacttgacattcatgtcacgcctttgatttcggtcgagaattaaactcaagttttcagaaaaatgcagtctaagatcgcgctgtaaaagtccaaaatcgcgcgagtcatgcggtgtagaaaatattggcccatcattcgcatttgcatttactgttccaacttctaccactccaccaatttgttcaccccaaacttgacttcccatattttccctcaaattttgttgtagaaccacaccattagcattttgttcgttgtccgcgtccatttcctcatactccaactgctcatcatttgcgctgagttccattccgacaccgataagtcgacgatttgcggttcgctctaaatcagtcacatcattcccatttgctatggattcattttaattcggagctaagggcgagttcggtctgtttccaaatgcttcgaaattcccggtccggtgtgcattcccatcacggtcaactactattccgtgattcaaggctcttgtccgcgtcagcggtggtgtgcgaatcactcgcattacaaatgagttgtttcaaatttcgtcgttccgtcgaacaaaacctttcaaatcgcagcaatgcgttatttaatgaagcggcgagcccacactttcgcagcaatgcgttatttaatgaagcggcgagcccacactttcgcagcaatgcgttatttgcgaggcaaaatcggtgagtcgcaacaatgcgttagaccacagaaccgcaacaatgcgtttgttctgctcgtctggtgatgaagtgtcaactcttcagcaagccaacagatggacaatttgttgccggagaagcgaagctcgaccaatgagtaattcgcttttgttgaacgccgagcaaaactcggccagaagaaaatttgttttttttttgtcaaaccccaggaaatcaaataactcccctttttgtgcccaatctcgcccttttaatgcaaaattcccgacaccgcttactcagttgtctaggagcgccatgtagaacataaaaggtaactcgcccggtgggactcgaacccacgaccccagcaatccgtgccgtgctctaaccaactgagctacgggcgcctcttttagaggttctctcaggtcctttatcccactttctcccacactcctttccttctggcatcacaaccaaaatttaagggagggtcccaaatttctcttattttaacgcaaatcatggataaggtaagtcaaaaggacgtcgtctcccgctttgaaaaccgaatcatcgacataaatgaaaggaagtgaagtgttatggtgttgtttctctgcccattcacaaaattcatgaaaaaacccaaaaaaattttccagtcggcgccgccgtgccccaaaattcccctaagatttcaaaagtttacatanatttgccatgcaaaaattggccttttttggtgcaatctgttatctagtcagactaaaaatttacaaattttgcccggcgggcgctacccggcaccgcaggacccttttccctcgcacattcctcaaaattttttggaaaaggcacgccgcaaaaactcttaaaaaatgggtacttttgaagcggatttaattgggaaaaataaaaaatttaataaaggattattaaagggatttatttttgtaaaatgacgacatattaaatatttgtactgaggcaatacatattaaatatttataattaggcaagcacaaagtacatttttgtctcaaaaatttcaattacaaattgagtaataaacgaaaattgttgaaaaaatgttctgcgcctatttaaatgattttttttttattttgttcttcatggtgtcctcttttatatcttactatcgtttcactttatatttgattgatagatttttctgccttttttcccgaccatgccaaaattgaaaattggcccactaatttttctcgaattttttatggtcaaaaaccaaagctgatataacaaaatcttagtttttctatacaatttagaccagtagaatccgaatatggccttaaatgggacctatcttttaaacctggcttgtactgctccaactccatgcatgaagttcgagctgtacaggtttgttgcgatcccagagaccaaatctaagaccatattcgaactcaacatacccgattttccaaaaccacttttaaaacattagttacttggtggtcttgaaaaatgccgtttttggagaccactttcagtctcggctctccaataattcaatttttgtaattaaaattttatatttttgtgttcttatagtcctaactttgctctatttaatcactatttctctggctctgtatctcttttatttttctttaaatcagccatcaaaaatacctacctctaaaatgaccatttttacttacttaactctaactccctaaatacttttccattggtattgatctcttgccagaataatggcaacatcttatataataaagttgagtgtgtgtatgtatgtatgtttgtatgtgtcattgtttgaatttgtgtggcgttttgtttgagttttgcgttaaaaaatgatttgcaaagagatgaaaagaaattgttttgaaaaagaagagaatataaagaaaagagacgaaaataaatagttaagaagaagaagaaggcaaaagaaatagcacagaaaaagaaggtaaaagatttctcctcctaggatgtagaggttagagggagggatggtgggaaatagtgcactgtatgactgtctgtctatgcgggcagcggcaaatgggaggggcagacagtgaacagacgcgtgttgctgtggctgctgtgcagcagcagtctgttggacgcgtgcgtggtgtgtgggagggagggagtggggaaaaagagagattaaatggaaaagtaaaagaaataagagaaaagaaatgaaagggagagaacaattgaaaatttgtctcacatctcttccttatttacatcccattttttattttaataaaagaaagggaaatgagagtttttttatttctgttttcgcttcagtgagaattttcctatcttcttatataataaagttgagtgtgtgtatgtgtgtgtccattgtttgaatttgtgtggcgttttgtttgagttttgcgttaaaaataattttgaaaaaaaagaaatgttggttttgtttttttcattttcgttttgtcagttttgcaaaaagcagtctttaaaaatgttttctcttcttttttaataaaaaataattttatatgtttattaataataattaaatcgcattgaatgctttcaattgcatttgttaagagaaaaaaataattagtttttgttattaataaaaagcatttggaaatgaatgctcttagtacttttgtaaacaaaaagaaaatgtttttgtaaatgaattcctttgttattggattaaaattgatttgattagttatgaattaatttatgttgtgagtattgtttttgattatggcaaactcgatggaaatgttattgtttttgatattgcattgaaaaagttttgattcaagaatttgttttgaactttgaaatgaaaataatttgaattctttttatttttgttttgtaaaaaatatttgtgtattcgttcattctcattttctttaaatgtttttacttttttggtattttgttgttaaaagaatacgtttatgtttttgatgcgatgtttggttatgattttttcattttgatttttctttttacgctgaaaaagaatttcgtgatattttcgtctttgtctttgctgtggttttttgtggtttttgttgggttacgtttagataagtcgactgcttttcacacaatgttaagctgttttgaggacataatcgcgatcccatgtgggactctgttagcgtaagttattttgtttttaaaaattaattggttgttatgtaatttgaatttttaagatctgccactggtgttattactaaagtgatggaatcggagaaaaaagtcagcgttgtcttggtgtgcggatctggagaaaattttgttgttactgaatttaaacaaaattctgcgaacgctcttcaaaagtacctttcagttggaaatgtaaattgttgtcataattttaaattattttgtatgtttaaggtgctgaagcttcaatctgtcaaagcccaacgcttcaatgagaaatttgatggtcaaaagttttttcagactccatttccgtttgagtttgttgtgacaaagcactcgaaaatttgtttggtcaagactgaagttttggcggccgagaaatttacgcagcttgtggcgggccgtttttatagtaatgcattaaataaaaatcttttaaattttatttttagaaattaagtgtgttttaacgactccgttttcattaattggagaaatgttcgctgctgttgttggcgatctctgtgggaagcgcgcggatttatttatttcgggcgaaaaactcccagaaatgtttgggcaattggacagcaaggaccagcttgaactaaaacgttgttttgtcaaaattgaaggtttttgcctaattgattttttgtttatctatgatttaattattttgtagatgagtgtatgcagcttaatgttttggcttctgatgttaatgtgtgtggatgtaaagtgacgattggtgataagttggtcactccggtcaagagaaagagtgatgaagcaattttgagtccgcaatcggctaagaaatagtgtgtttttttgtttttgcttttttctttttatctacatataaataagtgcatgtttatgtttgtatgtttattgtgaatttattttggatggtgttagctagatttttgtatgaatttaaaagtgttgtcagttctatgtttgtatttgtgtgatgttttggatattaaaacgttatgtatgtgtttgtgtccgttcatttatgtggtgtattgttttgtttttatttataatgtggcttaaggatttccacaattaattgtgtttaatttaatgaagttttaataagaaaatttaaaaattaacgttgaacaggtctgtttaagttcttggttagttatataatttgattattgatcaatttgtttttcattgataaatcttaacatttttttctattttgttgaatttgcaattttacctttatatttattaattgtgttgttaataagcatttatttttttatatagacctaaaattacacgatattatatttcagtgatgaatttggcacaattttttgtctggtgattgagagaccggaagaatatcggagaattgcttaatttgagtcgcgttgcttgaaatgccagagaattgagtctcggtgattgattctggtgggttgagtcctggcgattggaatgctggtgggttgagtcccagtgattgaaatgcaggagaattgagtcccagtgattggaatgctggtgggttgagtgccagtgattgaaatgcagaattgagtcccagtgattggaatgctggtgggttgagttccagtgattgaaatgttggtgggttgagtgccagtgattgaaatgcaggagaattgagtcccagtgattggaatgctgttgggttgagtgccagtgattgaaatgcagaattgagtcccagtgattggaatgctggtgggttgagtgagttccagtgattgaaatgttggtgcgttgagtgccagtgattgaaatgcaggagaattgagtcccagtgattggaatgctggtgggttgagtcccagtgattaaaatgctggtggttcagtcctggtgattcgaatgctgttgggttgagtcccagtgattggaatgcctggtgggttg

SEQ ID NO: 1232 - DNA, 8523 bp, Heterodera glycines
ccctataatcccgaaattgaaattttcaccgctaagcatccgctccttagtcatcctttacaatttatatatgtcatatttctatattttgccaaattttgagttagtccacattttataaacatagtaaaaagttaactttcatacaattgctcttttgtgtcaaaaatagggcttaatattaaaatatttcatttttgttttcattttcccacgatattaataaatttcagtttatttttctatttaaaatgatttttatttttgagaaagaagaagatgctttcctaaaaagaagcttaattgattcatttaagcgacaatttaccttttttaagggtcggtagtcttcccaagctgattcattattcaataaaaattaaaatcttttattgctttttagctaatttataagcaaacaatcaatggctttaatttaaattctccggccttcacaatgcttactgctaatgaggccgttcaaagagaccaagatgagaaggaagtagaagaagaagagtcgtgggccaaacgttttcctccatacagttcagaaacggagattgaacagcttgacgaatttagtttgcttcatcaacaaattgtggccggccgtgttgtgccgtgttgtgtaaatttgccagaaatcacggtcagcaaaagcgggactaaaaggccaaaattttcagttttttgatgtcatggcaaaactatttttttacatataaaatgatgcattaagctgaaatatttatctttctaagaaaacactaactggcatttcactaagttggaaatttatgttgaaatttttgaagaaaaccaaaaaagattgtgtattttgtgtaaatatgctcaagtgaactaactaccagataagcttggtaattttcgaaaaaaaacttaagggaaggcaggtatttttcaacaaatgacgtagaactcgaaaatttaatttaatcacaggaaatttccgaaattgcggcccaaaaattgaactccgatcggtctgccgggggcatccctttgcttgatattgtcaaaattatcaatgccacaagacaaagcgttgcaggcacagcttatcgtgtacaaatactgttcaaattgagaaaaaaggtgaaaaacacttggaaaaattaaaaagtttttattcaaatttaaaaataaaaagattaacacaaaaatttaaaaaattattcaaaaaaataaatgaactaaataatttacattatttattttaaaataaattattaaagttaatttttaattttttattaaaaaaatgtaatagcataatttttactttaattttcttcgagttgtttcaattaaattagttaatttatattatttttggttatgttttttttctcttttttttattaatttttgattttttcacaaacaaattcaggacttgggaaaaaaatcggaggccaccggaagcgaagtgcgttgatatttaattaatttcatggaaacgaagaaatagtttattttttgaatttttgcaaactactgaacaatttatgactgggattttgtttttcaaaaaacaccaacgaaattttgattttaacaatgtatttttttcagaagagcaacattcaggagcgtagctattctttaagcccggtaattaaacaaaaaataattttaaaataattttaatttaattttaatatatttgttgaattttatattcacagatttatttgttcaaaatttatcgcaacatcaatgaaaccatagaaatcaattacaaaggtgtgtctaacggaggttcttatcattattggaaatagcaagcaaataaaacagaaaaacaaatttaatttacaaaaaaatgtcaatcaaaaagtaataattattcctaatttgtgccaagtctcgttttgtaaaactgccataagaaacaaaaacaatttaatcaaaagaaattcagattttgattcaaattcaagcaaagtttttatggcttaaactttatatgtcttaaaaaaataaaataaattttcctcttttaaatataattcaaatttaagaattgactttttaaataaaatttaatttaagaaatcgccaatttcgttaatgtgccgggcggacggtggtgtttgtccactggcaattttatgccaaaaattggccttcaatgttcgccaagttggcgccaattggaggcggaacaatttattttggtaaaaaacaattttttttgccaatttttcaaattagaagtaatttttgccatcaaattaaggtggcgctcgaggtgggcatccgattgtttgacacgtcattctttggccataatcgtggacaaataagcaaagcaattaaggcatataattttattagtcttttgctaattaatgtgacattttacaaatacataggaaatataatacttaattaattttatttaaagaccgaaaattctttttcggcctgttgttgctatttgggttagggctctgaatagtcaaaattgatgcaatggtttgagattaatgtcatcaaaaatccaccggtaaacaaaatttaatcacttaaatataccaaaaataaattaattaaaaatagcgtttttggttattttcaagaaatttttgccattgtttggtctgctacgaacggatgtgtttattagtgcaaaaatcaacattgttcggcctgaaaacgcccaggatttgttcagatatgggtgggtttggattaattttttattacaaaaagatgagatttgaaaaataaaatattaaaattacaagagatggacacaaaattgcaaaaatatggatttaattctcaagtggagattaaaatttaacaaaaaatccttgaaagtcgcaatattacaaactaaattctcaaaaagcgccaaatatggcattaaaacttagaagaaaaaaatacacaaataaagctaaagttttttagtttttggggaaaaaaagaaaaatatgaaaattttgccaatttgggacttattttgatataaatatttagcaatttttaagaaattattatttttttattgatattttcataaaaatttcccaaaatctttccaaagaccagattttggcattagggattacttaaaagtcagagcgtttgaaattttatgagatgtttcaactgattgcctttatgccaaagtttcaactcattctgaaaagtacgaattgaataaggaaatatgctttttaaacctaaaaaaaataactgcaaattccaaccccctgctttagaccgattaaaaaagaaattgactgcgaccaattcaattcggttttcgattacgcacattttagcgtgaaggagtgcatcgaccaatttgatgggtggcttttttattatttatattttgttatttaggaattttaaattctctaaaattataacttttttgtttttcaaatgtttcctctttttaattaaacattttggtataaaatgcattttttagtaaataaatatttaaatcattttcaacaatttttcagctatattgacttgtgcatggttcactatgcgaaggatgcttttaaaaatgtgtcaaacacttgctcaaataacagaagtgaccgtgaagaagtgtacagtgtgttagaacattacatgggtcagtggggggtcaatggcgcgacatttggggatttataacattggataccagtaatttggggacccaacatttcggggtccggaaaatccgttaatggacaacacgtcagcggacaatccgtcagtaatagacaatctgtcagatgtccttaaaataatttgatgtccccaagtcgcaaatccccaaatgttaggtagccgagtgggtcagcatcattgatttttcgataaattctgaatttttttgttcataaattggagacgagaccagttataaaatacaaaattttaattttataaatatgctttttttattttttaagaaaatgattttagatccgcccaaaaatcttttttggctcggatttcgggattttcatttcgaactagggattagctctaatatcactgcttagtacatacaaatcccctttctcgtcaacagacattggcaccgttcggtccattggcgtggcaaatttcgactcagaccatgtcgaacacttagtcaagaacggcatacattgtgtgccggccgttgtccaatgcgaaatgcatccattcctacagcgtgacgatctgcttgattactgtaaatccgcagggattttcctgcaggtggtcaaatttggaaaaataatctaaaaagtcggaagggtcagtgaaaaatgcaccagggaatcagataattttctaacaaaatttcagacgaattttttcaaattaaattgttaagccaatttgtgttttaaaaatttaccttgcggcacaaatttgcacgaagggcacaaaagccccttaaattttttctaactataacctaaatacttaaaatttcgccaattggatttgaattgtgagtgtctgtttctcatgtttgtggatatggtgctagatggtcctagaaaagtttctcattggggcgagccaggggacaaataaattagaaaatcttttctctattaattgttaacttttaaaggcccacagcatttttgcatacaaagaacaaaaaccttcctacctaaagcaacaccagcgctatttgctgctgaaaagcatagcatcattttacaaaattggcacatcggtgagtgatggatgattggcatgttatgggcatattatggaaccgccccgccccctttaaaagttaagcagttgtcactttgtttcctcatgcaacgcgccccacatgttggagcagtaattgtggaacaaacggatgatttgtttctcacaaaaaatggccgtccacggcgtgtgatgtcatgtcagcagctcaggaaactgctgaacggcctggtggccagcgtgtgcaacaacagcgaccaccttgatgaggctgatgagcactacgattacgacgacattccgccaaaatcccaagaacatcagcagttgagagtaggcactgctttgacaaaaaaaggaggaatgtcacgcaaaatcggggccttcaaaatgtccggggatttccaatctgacactgcgcgcgaatataaaaatgaagacgacgattgagggaagagactgttattcaaaatcaaatcaacggtgctatgtcgatcgacgaaaagtgcaaatttggtgtatcgaaaaaagtgcaaaatctgcaaagtttatttttactaaattaactcataacttcgcaactaaattgcacaatcttggtatcatacgatagcccttgaattgcgttattagcttgtcaaatttcaaaaaattttatttaagttttccaaaagttatgaccattttttcctgttttttggcttggacttttgaaaaaacttaatgagttttttgaaatttagtaagctaataacgcaattcacgcgcaatcgtatgataccaaaattgtgcaatttagttgccgctaagaaaagttatgagttgatttagccaaaagtttagcacttttcgtcgatcgaccaaccacgtaaatcaacatctaatttatttttaagacagaggcgaataatatcaaaataaatataggggagggaccacaactgatgagtaaaaaatagctttttaggaaacctctcagtatgaaaattttgaattattcgaaattaatcgaaaaatcaaataaagcattgatcagattttttgtgtcgtgatttcggctttattaaatcttcaaacagtcggtcaaaagcccttttagttgttgcgcgatgagcacatgcgcgcgctgcaacggatggacttgggcaaatcagggggaggccgcttttcggactgtgaacagtggaaagtgatgtgaaatgatgccataatccgttatgaggataatgaaaacaaataaattagcacttataccgtttaacttgcacgatttttgaaaattttggtatttcaaagtcatgaaaccattctctttacaaaatatgactaaatgacaaagtccgggcgctcggcctatctgaatgagtccattgttttatcagtgatcaaatggcatgccgctaatggaaatttgaattaaatattaatttaggcaaaaaatcatatattaatggattttacaaaaaaaaaatatttatttatgtagatttttagtgaaaatgccaaaatatggaagtaaaatacggaaatgtggacaaaaacctgaaatatggaaaattaaaaactatcaatattcgaatgataccaattttgaagataactgacgaacaaaaaagttatggccattcccatttgaaattgtacgaaacgccattgtacgaactgctatcgacccatttttggtgtcatgtgaaggaatggatggatgataaaatgaagatgatgacggaaaaaaagggacgaagcggaggggaagcggggacaaaggaaggaaaaggggcgacgaataatcgcctccggcactttcccgtggtgaataataaaaacaattttagcattctgagcagcaattcagagatgtgtcctgacttttaacaatcctttttgtattattttgtttaaatttgcaagaaaattggacagttttccaactcaagctaaatttcttgggcctagtttgatgcctaggctttgttttgtaaaatttataggcgtcattgaaaattcaaatatttaaaaaatttaaagtaatctggctttcacagggacccaaaattatatagtatttaaaaaaaattcatcaggaaagtaattataatgaaaatgcattagtaatttatccgtttaaaatttgtgcggtatatttttatttgtttccaagaattcgtttgtccatttttagggtcttcgtgaccagccaatggagtcgagttagttgctaatagttaataataaagtagaaatatctttacaatttttctattacgacccattggaattgtaattaaggaaaaattttatttaatcattatttaccaattcttttttgaattttattcaaattttttgttaaattttggttggattattcgttcgacaatttcatttgtttcccattcatttgctgtttcaattgtcaattgcaaaatcattcgattaattggcaattttgaatgcattttcaattttttaaatgatcaaatctgttctcatttagcaattttggttcaaaataattattgagcaatttatttatttatattcattgtaattaccaaatttaaaataaaactgggaaattttcactagacaatttaccgcataaattattggctataaattttaattagttttttaaatacaaattttggtttaattgttagaattccattgtattatatgtacaaatattcgtacaaaatgtccaaatatttgctatatttttggcattttgtccgtttataatcttcatattcaactgatatattgtcacagtgccaattcgttctagatataattcacaatgccaaggtgagcttcgtatttttgctttgaatatttcattgatttacattttctgacaatttctagcaaaagcaattagtattttatcgtctttctattaaaaatcattaaaaaattaattactccctgattaaattgtcttactgatgaatttgcatttgaaaaaggaattagattaattataaaaattatagaaaaagcatttcatgttctttaataaaaattaaattatctctcttattaaagtaatttttaataaatataaactcgaaaatttttaataaaaataacttatttgttaaaaattacttagcttaaaacataaggtcaaatgtgaaaaaaacactgccttttattgaagccaggatcaaattgtccagaatttttatgatttatagtgaattggagaaaggtaatatgaataatataaaaatgtcctgatttttacgattgtcctgaaatggagaaaggtaaaaaaatataaaaatgtcccgatttagagaaagacaatatgaaaaatataaaatgtcctgaattattacgatttgccctgaattggagaaaggcaaatataaaatgccctgaattattacgatttgtcctgaattggagaaaggcaaaatgaaaaatataaaatgtcctgaattattacgatttgccctgaattggagaaaggcaaatataaaatgtcctgaattattacgatttgtcctgaattggagaaaggcaatatgaaaaatataaaatgtcctgaattattacgatttgccctgaattggagaaaggcaaatataaaatgtcctgaattattacgatttgtcctgaattggagaaaggcaatatgaaaaatataaaatgtcctgaattattacaatttgtcctgaattggagaaaggcaatatgaaaaatacaaaatgccctgaattattacgatttgtcctgaattggagaaaggcaaatataaaaagtaaggaattattacgatttgtcctgaatggagaaaggcaa

SEQ ID NO: 1233 - DNA, 2872 bp, Heterodera glycines
ttcgttctttcgtctcccccccccccccccttcaatttgttgcggagttgctgctttgactgcctttgctgctccttttgttgctcctttctccttttcgtccgtcgcttcctttttctcttccgctgctccttttcgtcctccttttgttattctttttgttgttgttgctcctctttttgttgctccattcatttattattcatccatttttaccatttgtttcccatttcatattttatttttactttctaatactgtagttgcccttcttcataagtcagttttcttctcttttctctcccaagcaatcaattaattaattatttctcttttcgatgctttgtcatcaaaaatgaacgcttttcccattcatttttcaatttaagttttaatccgaaacaaacgatgcgtcaattttctttgcgttctttgagccttccttctctcactaaataatctttcaaccaatgagaaactgtgtattgtttttaacatttcgttttattttcgtttgttttgtctgctgtttaattgaatttgttgccttttgagagttttttgacttttctgaaattaattaattgttttttcacaaaatatccaaaaaagcaacaaattccgccaattaattttcgtcattttatgagtgaggcaatgcactcacagatttgttaagatgaaacataaataacaaaacataaatattattatttttattttattttctctgatatattttcgtttaaatttgtttttcaccaaatatttaatcacgaattgtttttcttttgtgaacgaataaaaatgagaagaaggattttgtttgagtgaccacaaacaaatcgaattccattccttccctccctcccaaaagaatttgtggcacggcacgtgccttctcaaaaaataaattttaattttaatgacaattttttgatttatgccgttcaaatacaaaaatgcaaattgatcagctgattgtccctaattgcctcttttttctccgtttctcagtttctccgcaattcctttgaactgagtgaccagcgaaaaggaaaaaaattgaattttgtcgtgcaattttttgaacattggcgcactgtccgtaagtgccgcaacagccgacggggaacaaatgagcataatttgagagaaataattaatgtaaaaatccaaattcacaagcatttcactgttttgcaaattttcagggcgtggaaaaattaatattttgctaataatattctaaaaataattaataaattaaaacattttgtttttccgtttgcattttccttttccttcacttttcacctcaatttggtccaccacttcgattgccattgtcaaatgctttttgtccgactcctcaaatcgttttcgtatcgctttaattgtctctttgattaaatctttggccggcttttttatttccaaaatggcaaatgccaatgaagcgaatttctgcaccacaaaattggccattccctcgtgctttccttgcgcattgtgccaaacattggcaaacggacaaaaggcaatttcgatgccaagaagtgccgtgtccaatgctttggcggcggagaaaacactcagttttttcaggctaaacttgaagcgacacaattagccaaacccaaaaaaggcactcaattttaacagatcacacaaaaagggggcggggtgggaatttggcactttttcacctaaattgcacaatttttgcgtttgccattgtttggtccgaaatcgtttgcaattccgccttttcacgctgtgattgtgcccgaatgatgcgattcatcagttccattcgttgcaatcgaaactcagcaaagtcaccaataattcggtcgattttgcccgggtcgtgcggcaaaatttcaatttcatttttattcgaatttccttctccgattatattttcttctttgaccgtttttagaaatttgtgattttgttgcgtttctttgtgaatgaataatcaaaaattatttatttacttataaatatttattataattaaatctttaaattatattttcttttttaaattacctccgttttggtccttttttcgctttgtgctcactttattctcttgaccattttcattaattttgccatttaaaaaattaaactgaaaataaatttaaaaataattaaattaatttatatttttaaatataaatgccatacattttgttcaatgcttttcaaccattcttcttctttttgcatttcctctgctgatttaaatgggaaatcgtcgcgtgaaaagtcaaaaagtgaattcgaatggtcggaaattccccgggaaaaacggggaaaggcaaaaagagaaggaaaaacgaaaagcagaagaagaagaagcgcaaaagcaatattcatttaaagtgtgaacaataataataaaaaaaaaatttaaggaaaagccaaggaatggaattttcataattaaaagccgagggttttctccttttattgtgttgatgagtgtaggcaaatttgacagtaaaatgaaagcgtggataaaaatgaagacacagaagaaggggcgagagagtaggaaaaggagagagagtgcgaaagaaagagaggaaaagtgaaataaaataataattaaaaatattattttcaaatccatttggcatcgtcatcatcattcaccatcttcatccatcactagatcatggcatgccaaaaggaccgccctcgccatccccaaaagatgttagccaaccgtcagccgaaaaattagatttgcaatattttggcatacaaatcattgaaaaaatatatttttgtattaaatattgcgaaaataaatttagaaaaagtttttctgttaaaatgttactcgataaaa

SEQ ID NO: 1234 - DNA, 3577 bp, Heterodera glycines
aactttgaacaattattaaattaacaattattaaattcattattattttatttaatttgctaaaataaaggctctatgttaattgaggcaaaaattaaaacaaatttttaaatttaaacaaaaagaaacttaattaaattaaatttttatcatttttgaaggtttgcgaaggaattaaaaagggcgaaaatccaaataaaattgcggaaaaaatggcgccgcgactgaaaagaacggtggacgaaatggacaaaagcaaatcggttcagaaagagctgaggaaaatctctgccgaagtgattgatttttgaattttaataaataattaatatttattatttaggaaatgccaaaacgaagccgaaggacaaaacgggcaatttggacgagaaaaaggaagcgaaggggcggcagagggagaagcagcagaaggagggaaaagctgaccatcggaatgcgcagtttcatgaagctcagaccgtacgcggagcattattgtgcgtttttaaatcaaaaagacaaaatgaaaacaatggaaaagaccccgaggggaaataatttgaggaaacttaattaggacaatagtaattaataataatgacatatggtcaaaattaggacaattagaacccttataatttattttgggaattcgtcataattggaacacaaataattttttggttttgtaaattccgaaagaaaatatgggaatgaatgccatgccaatgtaaagtggtgacaataaatgtcatgccaatgccaatggaatgctgcgttttgtttagtgtccgcaaggccgggcagactgaacgcgcgttcgccgggcgcgcgagtgcgcgccaatcggcggaacccgcgaaggcacaaacgcggaagtgcgggtcatttcatctcgtgcacattcttctttctgctggccatgttcttcgccatcaacaccatgtcggcctttttcgccatcttttcgcccgcttttattttcgcaattgtcgccactgttgtgctcggactgatcactggtgagtggggccaatggctgatcagcgtgactcattgggcatttgagtattgttgattagacacacaaaaagggcagacgatggcccaatggttgaactgccaatgggaagaatttgccgattgggttcgattcccatccgccgccggtgcctgacacttacatatttaatcaaaatgattaatctctgttcatcaacaaccactaatttctaatgatccttgtcaattatgacttcttctgtttaggagtggtcacaagtgcgtttatgggcaaatgttccgggcccggcacaatgggaggagcatatgccggctattatcaacaaggtcgagcaagttgaaaacattgattagtgccaccaaattcgtatttgttcccgttaggtcacggagtgccctattctgctcacaatcagaatatcgtcggttttagcggcggacacggtgacggctttggcggcggctttaaatttaaaacgcccaaatccaatcacggatattcctccgcttggggaattccttctcagcacggtaattagtggcaatcacaaacggataaaccgattaacaaaattatatcaatttgatttgcctcacttttatgctatcatcacaatgccccaccgcccgaagtgtatttgctggaggaggagtatgagatgaaacgcggacgcggcttctcctcctccgcttcgtattccgcttcttactcagagtccgacgagtacagcggcggaaggtcagtggagcgcagaaaataccgacggggaggaggaaaacagtacaaaagtcacttcagggagaggagttacggtaaggagggagacacatacggtagactaacaaaacaaatgaacaaaaggaagaacatattaataatggaatactatagtgggaaaataacaaattttaaattaaataatgaaaaaataccgtagggtatggggggagggtaaatccaatggttaaatttggcaaaatgccattccaaatattttcagatgattccggcggggcggaaaaacgcgtggaggaaagtgaggaggagaaaaaagttaggcgaagaacggtgaccacttattcacgtgtacagtactgacaaaagagaagagaaacggtgtcacataagcaaatttactacctttagagagttcaaaggcattttcatccattttattcatttttcccattttatcataaatttgttttaaattttaaatcttaaaaattaaaaaggaaaatgcctaaaaataaataaattcaataaaaacaaataaaatattcagttttagtttcaaaaaattaggtaatagtccaattagcatcattagctacaccattattatcaatcactatgatttaataggttcatttgtttgttttttgtttgtttttttcgcccttttgctccttcttttaatcaaatacgggttttccaattacataatccaaatgaaaaaacagaggtcgcacttttttacaaattttttctccattttacgctaataatgcgcacaattgttcgcacgttccgccgcttcgtccgcacttccccgctcaaattgcgcagaacgaaactgcttggcttgctggctaatccgcattcgacgcattccccggggacggaaggcggcggggggaagggggagcaaatcggggtggggcaaaaagcaaattgcgcgcatagtcgccccagggcatgcccaaaggccttcaaaaggagcgcctcctcggcaagggaaagcgctttccttctcatcgcacaaaggcacaggaagctgaagaaagtcagccagcttctcccgtcacccctctgcaaccgccaattgttatccaaccaccgatttggatttagcgaatagccccctcccaccccctccgcccattcatccatccaacttggtttcctaattccgattgatggtgggtcattatccctcattatccccccccccctccgtcgattgttcccccgcgaaatttgtgggcccactcactcatgggaattgggacaaaagggaggcaaaaaggcagaaatatgctggaacatcgaagcacaaatccaaaaaacagaatcaaactttagggatttacagtaattgggctcatttgtcagggaattgtttttgaaaattcccaaattttgtttaatttaatttctgctgacttttcaatttaccaattatttttttaatcatttaaatcgctttgaccttaccccaccccaaatgaatgaatgtttgttgtgaatgttaacagaattgggctgaatccgtttgttcgttcgttcttttggctggaaccattagcaaaaaagggaggggcaaaaagctgcaataaaagcacaaattggccataattttggccgtttacccttaattagtctgtccccgagcaaataaaaagcggccaaccaaaactcgaaaagtttatttttattttttctgcgtaataacataatgcacctgttaggcagtttaaacatgctaatgcgcgactaaatacaaaatcgcccccttcttttgcaattttggcattttggatttcgaccctc

SEQ ID NO: 1235 - DNA, 4115 bp, Heterodera glycines
  unsure (1)..(4115): unsure at all n locations
ggtcaaataaatgcatacatttttaaatgccaataccttcaatatgtatatttttgnaaaagtgtntcaggcacttaaaatgtatgcaatcggtacnnccttagtaatataattacggcatttgtttgtaattgttgcatgacgaagttgttttttttaaatttttgagttgaccccgccaattgaattgcagggtccccccggncgttcctggcgaagccggcgagcccggacgccccggcaacgaaggacttccgggagctcagggggcaccaggcgccccgggctcagccggatccccgggccaacccggcgaaagtggccaaccgggacatcaggtgaggacgaccaaagcaattcggaaaacaaatcccaaaaatcctttaggggcctcccggcgaacgcggcatttgccccaaatattgtgccttggatggcggagtgtttttcgaagacggcacccgacgttaaaaacaacgaaaaataaaatttatgcgatttgacaattggaaaaaacaaattttaattcacaatagtaaagaatacacataaaagcataatatccattttggtcatcgaagaattaaatatttgccttttgagattgtctccatattggtaaaaacaattcctgaaaataggaatctaatttagaagcgatttcttaattacatttttaggaatttttgaaaatgaatctacccaaaaaaaacttcttaatataattaaatgaattcaaagaatattggtcataaattcgatataaatttttaaaaaccgaaagatgtttgtatttacctagggagcagcccgtttccctctctccctccgagattttctaagatttgttttttaaatttcctcgggtggaactgagccggggggggggggggtacgtagtgcatgcacccatttacccaatttttgtttgttcgtatttgtgcttattcctcccggtcgcggttttttgagtaaaaaccgggaaaaggactaaaatccctgtcaatttcgcttcaaaattccagtctaaaaatgcttgaacaaagacaaattctctggctttttcggcattcccaagtgtttaaataaaagtaaaaaataattctctctcactcggaatcttcgtgccgaaccatcggacaatgagtaatgcaatctaacaaatgcccgtgccatcttcagcctgtgaattttgaccggctgagaaacgtcttccaattctttggtgataaaatctttggccgacaaaaggaaatgggtgtccaaacgagcgtattttatcagacgttcagagaggggcctaaacagagaaaaaccaatcgcaaatcagaaaataaaaatggagaaacttaccgttttgtccaatcgacgcccgcaataaacgatttacttttgtgcaatcgaacgccgcaagaaaaacaaatgagccgatccaaactcagaccattgacatgttcgactgtaaaagaacgatggcattaagaataaaagttggagcaatgctctttttaattgaattgttaccattggcaaggcccacagtgaaagtgtctaaaagtggcacagtcaaaatgccgaaatcgcgcttcatccaatgaacatcattttggccatgggccacctgaaaaagctaatcataaatgctctcatcagcggcgctaataattatcacgaactgtctttcggggctttttcacaaaaatctttcactaattttattaggtattgtcgccccgggagacctcacaaaaataaaggaatggtcaagctctctaagattaagtggaaatgattaaccttcataattccttcgttctcaaaagcctttttcagcaaatgcattctgttgcgcacttgcgggttgagaatgtcaatgataaaatcttcgcgacgtgttgaaatctgtgacaaggaaatttattaaatttatgtaaaattacacgattcagctgaaaatataaatttaattacctgaagaaggcaggtttgttgcgttttatgatttggcaatgtgtgctccaaatcgaaagcaaattcgcgcaccgaattcaaacgaatgccgagtcgctccatttggcgggccgttttgatgtaatggcaaggcacacgggcgagagacgtgtcgacggcatcttccgatgagggagagcgaaactgaaggggaaaagacatgcaaaataaacaaaaatagaccttaaattgggaaagtaaaaataataaacaaaattaaaaattggactttagatttggagacaacggctaattgaggatgagacggtgaaggacaatcggacgaaaaataagaagaaagcattaagtgcttgggagaacattggcaaaacaaagaaggaatggcattgaatcgcaaaaaagttgggcgtctcattaactaaagatttttaaaggaaaagggacaattttggtgcctgagcttaaatttgcaaattaacgaattttattaacgaataaaatgaaatgccaataataataattaaaattcaaatttaactttccaaaagcacaaactttaattagtttctgacgatagcagaaatccttttaaattttaaatgatgttaattgctactaataactaaattttagctttttctctgtatgttaatcgacaaaaatcgcctgcggagtgccttttggcgagtgggctttttcaaacgcatttctcgggacgtggccaaatgtttgctgtgccatcagaaaatttcgacaacgaatgggaacaccaccggactgaaaaaccatttgaagagacggcacgcggaatatgagcattttgtggaacgtgtcaaagaagagccgaatgtgtggcttaatggggccgatggtcagttgcataatttattcccttttattcaatataaaattcttgacatttaatcctgtttcttgatcatattttcgcaaaataaaaaattataattgccgtttttataatttagttgggctaaagtcctttaaatactcgccaaaataattttgtcaagacattcaatcaagtgtaaaagtgggaacaattttcctcgaccttacagccatctcaaaaaatcataaaaatgaattaattaataattaacctttgagtaaaattaaacagttccaaaactcagattttcccctggccaatgggtcggatggaaaggattcttcgcaatttgtcgctggctgtgagtcgtcctctgtgaagcaaacagtcacggaagactgctatattggcaccgcatatactgagcaggaattggccacactttgccacgaacattgcctccgggcaccgcccaatggcacaattgagggcttaaaggtgggctaaccccccacttttaattcctaatcctccatcattttgtttacgatttagcgtgtccatttggtttgctcgtataactctcggccatggctttgcccgtgtcttgcggaatgggtggcggacacgggggcactttacatgcgcggagaacacaacgaacacccaacagaagccaaacccacgggagaagaggaggagaaagagaaagcagagaacaatgaaaacggaaaggaggaaaaggaacggcaccgaagaggagagggggaaagaaagaaatggggcaaaagaacactgaaaaaagagaggagcagcagcagagaggacgaggaacagacagagggacaatgcacggaggagagagcgcgagggaggagagagaaaaacaaacgacaaaattatggggtgaagaaagagcgggtaaagaaagagaggaatgagggcactgctgacaatgaacagatgggacaacacaatgaccagcagagaaatggtaagtcggctggaggatgggccatggcataaggggcacagggaaatttacactttttgtgggggggggggtaaaaagaggtcgcatcgaaaagattttgaggtaaaaaataaacacattttcttaaaagttaaccaaggcctaattcaatataattaaggttatccgaattaattttaagcaatcctaacatctgttttaagggctattcttgaagcgattttaaaaaataattaaaatttggtccggctttcccgacatgcgccgccgggcaaattttgtaaaatgtttggatttctt

SEQ ID NO: 1236 - DNA, 1430 bp, Heterodera glycines
ggggaaagggaagcgaatgcgccgcttttcacatctctctcaaggtcaaaacacggaaatgcctatggcagcagaaggcatttccgtccaatctttgtgccattctccgttcaataaattctgctgtggaaataccccaaaagggagggtcagattttcggtcactcactttcttttatcccattattctttcatttttaattgtcccattttgcatttgctccttttagtgtctttgccgtgccacttggctgtcttcgcaaaattccctctttcaacacggcacccataaccatcccatcaaaatggacaccgaaaatactacaccgattgcccgcagtttggcaccgaaaactttttccgtctcattgtcagagcgtcgtcttgcgccgcattcctccgctgtccgtccgctgctcaacaacggcacttccttctcctcctccgccacatcccaaatttgtcctcctcagttccttaaagcgcataacggtccttgttggcaattgagcgccgttttgccgccttcgttcagtgaaaaaatgatgaccgaaatggcacttccgttgcgctttgtcaacgaaaagaatgtcggccgcgcgtattacaaggcgattgactattgagaaaataacactctcaatgttaattgttggtgttttgctattttcagtgtacaaattccgaatgcaaaacgactggcgttttccttcgctccattcgcgcattttacacacgcggcaagcactcgtgccaaccatcgcatttgaatggtctgtcattgacaaatgttcacaatagtgacattctattgaaacaaaacagttcattgactcttgttcttcgaaacctttacttattctcacatatgttgtttaaaagtggtataattaaattatctgttcttatgtttttacccgtgtaatatgtctgtcccgtatttgcgcctatgttaaaattttcaatggattttattcctttgacgcattagtgaattattaatttaatttgtgcgttaggcaatgagtggcctttcctcgttatttgctttttgggtaaatgccactttttcaacatttggcgtctaaatggaaattcaataacgacgcttccccccatccttcgcttccctccacactcgtcccccttcccaaaggaaggaatgcgggcagtgagtgttgaaagtgtttgggtgtcccttccaatacgtttgtcttgtcatccctctgttgttgctgtgcggtgctaatcctatcatctttttcatttataatcaaaattttatttgctcggttttgattatttttaaccccgaaaattcttattccataatatgcaaatgtatgctatataatcttcaaaatgtgcttattgtgaccccgaattatattttaggaaatgggatgttttggaaagttttcggtacttgt

SEQ ID NO: 1237 - DNA, 3380 bp, Heterodera glycines
aattgggcacttttgctgggcctctgaaaaaaaaattcaagggctcaaccaattacaaatccttacaaaaaagcccccctttggaattttctctcgtgggcctccaacaacagccaaagtgccataatttatttacccaaaatgttctaggcccgttatattgcggcatgcattgacgagatcaaagtggagctacgccaggactccatttttgtgaaggcaaatgccatcgaaaagttggcatatgtaagttttgaaatggattttttatatccattaacacaaaacggagtcgggaggggtggggcagtgaaatttcgagggaggaacgagtgaaattatgaaaaaaatttttttttaaatttcctcatttgttagtaaatcaaaaaaaaggtgcatttttttagttgcaaatgctcggctacgacatttcatgggcagcatttaacatcattgaagtgatgtcgagcacgcgttacagcgaaaaacgcattggttatttggccgcggtgcaagcattcaatgacgaaaccgatgtctgtgtttagggccctgggtttttccaaaaaattaaaaaaaattttttagaaacatacgacacataatgcaagggggtagccagactttttggtgcaaatccgttcagaatttttaccaaaattatcaaattgtttcctggcagcgtctgccggacccctcctttcttgagtttttttttagaggccgaaaagcaaaaaaaaaaaaaaaaaatcgccacccaggacggcctacctccccctccaaagctagggccaaccccctcctcttttgcttttttcacccttttaatttttttaatacgaaaaacccaaaatttaaaaattatgtagggtgcctaatacatacatatccattgtacctcaccttcacccctggaattttcctttgttggccagctcatttcccctcgtatcgccccccccttctccaaatttttgtttttttaatttcaaaatattattttaataaaaaattttttttgcaatttttcccacaacaattctatcgcagtgtcaacaatgtcaccgccgttttggacgcaatgttacgcatcaaattgtccgttgtgcccggcccgttgctcagcgtgttcgtgcaaaacattgccaagctgtacaccttccaactgtgcaaattggaggcggacgacgattgggacagaattgaaacgttggacaatttgctcacctccaaattgcccgagtagttttgcatgatttttggtgtgtgaccccaaggaaattatcttttgggaggtccatgttttaaaacgaaaatcagtggcctaattaaaaaattactattataattctttcagaacaaaaaacccaacccgtcatgcagaatttgtagcaattgacgaagccgatgaatggtgcaaattgcacaacaaaaatttcactcaagtgagtttttgtagagtaaacaacaaaaattggccttgaatttcgctgtaatttgtgagggtaatttgggagattaaaatcagtggcctaattaaaaaatcattgatttttttcatttggatcatgaggcaagcaactgttttcgtgaatcttgagccgtgtgtcatgtgtgccagcgctttgtatcagcttggaatacagcggttggtgtttggcgcaaaaaacccgcgtttcggtggcatttacagcgtggcaagcaacacggactatggccatgaacaccaaattgatgtgcggatttgcttattttcaaaaaaaaattaacacccaataaatttttttacatttttttttgaatttcaagaggagtaccataggctctattttacagtttacacgacatacaaaaatttaaacgattatttcgatagctctgtgagttttttagtctatgaaggtgaaagaatcacccaagaaataaaaaaagtgcgaaaaagcgaattaattttcattttttaaattttctatgatgtccaatttgtttatttgctgtttaagataatttccgaggttgacaaagaccgatgcatcgcattgttgaggacattttacgaccgggaaaatccatttgcgccggaagagaaaagaaagacaaaaaacggcggccaaaatttcgtgacaaattattgatgaatattaattatttttaatggttcaaattattctgaattgattgatgcaaaaatggattaaataggaattgttatacatattcatttatatatttttaataattatcaaattttaattttgtagtgcttaccatcattttattttttttgaccaatggccaccaaaaaaagacaacaaaaaatgtcggaggaaaagcaaattgggcgcaaaaaaccaaggagtttggaggtaattcaatcctttttctcttttgtatttcttaccgaaaaaaactgaatagtgatcacaaattccttatttttaaaatccattaaatttagaaggaaaatgtcgaaacaaaaattgacgacgacgaaacattgttgaaacggttggacaatgtgttcatggtaaagcatccgccggaattgctccatttttggcgacacgcggtcaaactgaaccccaaaaagccattgggtaaatatttttttacaaaaattttaaaaaaatgtaaattttcaaccctttttgtagcggggttggaaaaaaaattttttttttttgttttctattttgttgcatttctccattcttgggataccattggcctacacatatttccccctacacagatgccttttcggaattggactcgttggaattggtcggcccatttttgcttcttgccgccgcccacagcgaacggcacgccaaaaataccaaaaatggcgccacagcaacagcggacgaagacgcacagcaacagaaccaccttttattgggttcacgctttgtcaccgatttgcccgagatggaaactctgctggtgcaccggggcggacgcttttgctattggcgcgatgtgccggaggaaatgccgaacattttggtgcatgtcgccggtggagggggaggggagggacatgtaccggcgatgaccatttgcggagagcgcgacctttttgcggcactccaatttgtgttgaacaacttggtggacacgggtacaacgacgacggcaaaggcgaagagacaacagtccaacaacaccggcaccaccaccaccagcaatactgggtaataatgaagcaactaattgcccaattagaaagggtccgaaattcaatgaaaatttcaacaaaagtttttttagtgttttttcaaagaattatactggtatctctttcaaaaaaaatttcccaattttttttttgtatagaaattttgtgtactttcactaatgaccaagttttatttact

SEQ ID NO: 1238 - DNA, 5721 bp, Heterodera glycines
tgatggtggtcgtcctttgttatcccgcgccggtgccctccaccccgcgacggctcttcttcagatggttgtgccatttctgcttcggtgttgggctgggcagcggctaaaaactgaaaaattatggattttatgaaaaagcaatagaaaaactcacttttctttaccagacgagcttctgtcgccttggccgtttgcgctttcctctcctcccgcttcttttgacgctctttcactccgtttttgccgtgaattttaggtaataattttctttttcccatctaaaatttaaaaaataagaattttagaagagaaaccgttataactttttagttaaccctttttttgctcttaaaaacccttacattttgttcctaatttctttgtctatcgatatgcaaaatgtactgacatttcgcctactcgacatctcgcctaccgacatttcgcctactaagccaaaaacattcatttcgcctactaagccaaaaacattcatttcgcctactaattagtaggcgaaatgaaagtaggcgaaatgtcagtaggcgaaatgaccgattttgggttaccgtatatactctttttatatgccagtctccattaatctgccggcctccaattatatacccccttctgaggaggttgaaaaataatataccagtctccatttatgtgccaggggggataaatagaattttttaaataatttttttggcacattttccaaaaaaaaaattaaactcaattcaacagtaaaaggggctaataaatgaacaattcgttcccatctccgactccatccagccctgcatcatcatcagagtagggtcgctacttttagtgacggaaaatctcgaaatagttaactaaaaaaaaaaattgtgggaagaattttaaagaaaattttccaattcttaggggtgcaggtcgttcgttggcagtcgtgcgattctccattcaaaatctattggccgttgtccatcgctctttcattttgaacgtcttttgtgaccacgagtcgctgcagtgtgaattttggtgaaaaataaattttcgatttttgttcgaatttgggtccggggttcgaaatgggtcgaaacggatgccggattcgtgatcagtggccccaaaaaccccaggagagatgttttaagagatttaaaatttttttattttttttgaataggggggggacaaaccaaagtattaccaaaatgtttaggtcgtttcttaggggtgtattttttgattttattgcatttttgttaaggaatttcctaaatgtcgaaatagtaaattttcactatcgagaccgaaaatttcccgagactcgagaccaattttttatggctctaattttttgactcattttacgaacaaaatctgtacacaaaaataaaaaaggcttcttcgtgatcgttcgaaccctaggggtgtatgtttcgttttagtgcattttgttaataagaaaattagaacttttaggtcttaaaaataaacaagaaaatggttatattataactcgaaaattttattttcgtttgaacgatgagaagtatggaatatgcaaattcttggcaccacaatttctagacaattccattgctttcgccgtctatttcaatgttttttttttgttttatcgataataaaaaaatttgatgaataatatatgaacaaaaataagtttattcgtctctatatcacagctcagcaaactcattcaaaacagtttcctgaaatttcttaaactcagatgccagctttgcatgctcctcgcccaatgtcgccattgcattgtgcaaatatctgaagtcagctcgtaattgcattgcctcggcgtttaatcgttcgttttgggcaattattttttggttgtcatttcgattacgccaaatgctttcgccgatttgcaaaatggtcgccgaaaaagttacagcaagaccaaaagcgcccagaaaaagggcggcacagcccacaaagaaagtcatgcttatactttgcatgtcattttttatcttcgcttcaagtagcaagtcctgggaaggtgtaaaattaaaattgaaaattgctaatctttaccctttctgtaaattccacaccatcaacgacgttgagaagtgcaatcttaaacggcaaaaattgtaatgaagatattacaaagaattctttggtttgtttatagaccgaccaaatacattaaatttcagtttttatttcttatcgcaaaaaggcacattcagtcctatagtttttgtagctgattattgtacccatctttaaatgaagtaaaatattattttgtttacaaaattgaccaaaaaaagaaatccggtgaacaacgccttgacggaaagaagtcgagccgattttggagcagcacggaaacgggttggctgtttcggcacatccatgggcagttgaccagcgtccgacgctcccataatgtaatgcgactcatcagtgaagcgctaaacaacggcaaagtgtcaaatggggttttgttgtcctcttggcactgcttgaactccacctgggccaggctgatacaaatcagtcggtcgccgtgtccatcttcgttcttgaacagtcgccaaatgtcaattttgtcgagcggaatgtcgcgcagtctctcttcagcggatggctcatcatcgtcgtcctcatcggatgaccgtttcgtctttgcgtcgttgaatttttgcgaaaattcctcctgttgaaaaaggggatgggaattaattacatataatcattattaaaattagaaaaataaaaaatccaccaatttaattaaattttggggccccgcttttttagcaatcgtttttcaaatcaaaatatttcggcacttttccattttgcggccatgatgtcatgaaattctgtgccttcaaaatggactcaaaaaaacggacaaaatctcaacaaaaatttgtgccgaaaattgaattggtttggtgatggctgtacattgtagtctttgttgttcttgttgagcgtgatgaacatggctttgctgacgctgatgtaagctcgtctgcagatgatcttcttcactttgctcagtttcatggcgagtggaaggcgtatttcatgggacgaacatttgatggggtctccttctcgggagatgactgaaaaagggggagaaattttatttgaaaatgccaatgtttgtttgtttttgcatgccgttgaatgtaattgcggtgttctccggaattgggatttgcaacgacagcattgtgaacagctcgaacgtcttggacgaatatgtacactctgtgcatctgagctcggagacggactgtccggcgaacaaattgaaaatctgaaaaataaatgccattgtttaaaatgccgtcagaatcgagtggtgctcctcttccttaccacgctgcctttctttggtgcgagcacttcacttctccaatgctgttgcatcatgtcgattgcattgcgccaattctggtcgtcccgttgagcagcaccaccacccgcgccgtcatttttgcgcagaacgcccttcatcgtctcgtgcagtgcgtccacgaagaattggatgaactcctgacagtcatgttggaacgaatcagcgaacaaattggtacggctggagatgacttcctgaaaaaacagcgagtcatgaaacgcaacatcaccatcaccaacggcacactgtgttcaccacaccttcagttcgaatggcgccgccggttgtcgcaacaccaaaatgcttttgatcatttgcacatattccatgacgagtttgatgttggccagtcggttttcgctgaaaaaagaggggtgaaaacataaattgatggcatcggcatttgacaatggcattatttattggcacccacttttgtaacagaaaattgaaaatataacgcggagttgttgggggataaattatacctaattagggcccggatttataagtttttactgattttttctgcgaccttttaatttaaaaattaagcgttttaaaacagagccatagaggcaataaacaaaaacagaattgaaagtataaggaaacattctgctttactgcttaggatataaatgatcaatatcttttgtcttttaaacaaaaatttcacaccaaaactgacagggcagccaacttttgttacacattttcactacataataaaattctttcaatttttgcaaattcggtagatataatactttgtatatttggttaccccaaattctgaagggttctcggggggcgctaaccagggatctgacatccattatatccaattttgaatgtctaacctaaattcaagcaaaaaagcaaactccgaaaaacttagttttctatttcactcgagttcgggtaagagatttgtcaaaattggtataagattcgtgattagctactcccgaaaacccataaaacaagttttcacgaaaaaaagggccctcaccctgtggtttttttcggagtgccccaacagcaaaaaatgcagatatgaattcccagggaaagaacaaattgaaaaattttttaatgggtatttttaaattaaatttgtcacttttttaatctggcataatgttaatagttaaaaaatttgaacgaaatatgactacttctggtagataaaaatcagtgctatcacttcaaaatcacaaattccttttcaaaaatacagacagaccagaaatattcttttgaactttcctttttgataattgtaatggttaagatgcaattggtccctgatggcacttttcgcaaagtccgtaacaacattgaccgattgtttgacaaaaatttgaccgatttaatccgcggcattcggaacaacaaggaaaatgaggtgatgattgattgactgaatgcaaaagccatttgtacatttacaatttgggcacttttgctgggcctctgaaaaaaaaaattcaagggctcaaccaattacaaatccttacaaaaaagcccccctttggaattttctctcgtgggcctccaacaacagccaaagtgccataatttatttacccaaaatgttctaggcccgttatattgcggcatgcattgacgaaatcaaagtggagctacgccaagactctatttttgtgaaggcaaatgccatcgaaaagttggcatatgtaagtttttaaatggacttttttatatccattaacacaaaacggagtcgggaggggtggggcagtgaaatttcgagggaggaacgagtgaaattatgaaaaaattttttttttaaatttcctcatttgttagtaaatcaaaaaaaaggtgcatttttttagttgcaaatgctcggctacgacatttcttgggcagcatttaacatcattgaagtgatgtcgagcacgcgttacagcgaaaaacgcattggttatttggcggcggtgcaagcattcaatgacgaaaccgatgtctgtgtttagggccctgtttttttccaaaaaatttaaattttttagaaatataccacacataatgcaagggggtagccagactttttggtgcaaatccgttcagaatttttaccaaaattatcaaattttttcctggcaatatctgccggacccctactttctcgagttttttttgttagaggcccaaaaagcaaaaaaaaaaaaaaaaaagtttcgtcgccagggcggcctaaaccccggtcccaagatatgactaacctcctcctcttttgcttttttcccctt

SEQ ID NO: 1239 - DNA, 3706 bp, Heterodera glycines
  unsure (1)..(3706): unsure at all n locations
ttttttttttttggcctcgaaattccaaccctgggtacataccncagnaaatttgtcaatttttcttaggggtacaaagtgcggctgtcaatgttgtgtgtgagttggccagaaaaaatccgcgncaattatctcggcctgcaaagcgtgtttttcaaattgttgaacacttcctccaacaattggatgctcatcaaaatcatcaaattgttcggctcactggtaacaaaacaataatgggaacaaattatgagttcgatagtgtcggattgattatttgccgattagaattattttttttttttggaatttttgtctcgtaaaaaattcaaaatttcggccccttaaagtccataaatgatgaactttttgtgtttaggtaccccatgaaccaaaacttggtcgaaaattgttggaaccgttgaccaatttgatcaactccacctcggccatgtcattgctgtacgaagttcgtttgttcattggatcaaatttgcatttgggaattccaaataatttattttttaattttagtgcattaacactgtgatcgccattctcataagcatttcatcagaagggcccggtgattatactccaagtattcaggtagatttttgcataattttttcaacccctacgggaattttcaaaaaaaaaatccaagaaatttcccaattactctcaatttctcaaaagtttcccattttccttgaaccgcaaaaaattgcatatagcaaaaacattgtgcagttttaattatgcatcaaggaaaatcaagaaaaaatttttattacccaattaacacaccaaacatttgacaaagtgtgaaatggttggtccaaaattggggcacaaaatgattgaacaaaaattggaattactcctgtttttgttacccttacttgtgagaaaatgttcgaaaagtgattagcaccactccccctaaaaaaaacttgaaaattctaactttcttacaaattagaggttttttcatattgtgagatttttcaaatgaatttcttccaaaaaaaaaaaaaatttctacatttttttataaaaaatcctacagggattttttgaatttgtttttaattgtctctcctttcagctctgtgtgcaaaagcttggcattttgattgacgattcggaccaaaatttggtgaattcatcattccgttttttttaaatttttcctacttttttccagaaatatttgggtctgctggcgatgggcaaaattttgttgacccatccaaaagcggtgcaagcacataaggacattgtgttgcgctgcttggacgacaaggacgagagcatccgtttgcgtgcgcttgacctgctgtacgggatggtgtccaagaaaaacatcatggaaattgtgcgccgtttgatggaccacgtggacgcggccgaggcatggcacggaagggaagggggagagggcccaaattttttggggttttgaaaaaaaaattgcatatttttcccataaaatttgcttttgaatggtggtggcccaaatttttttttttttttttaaattttgtccggcatttttttttcattggacaaatttttttgtaaaaatgaatattctttcggtaaatttcgatttttgattgctaataactcgaattttgggaaaaattgataggttttttttttgggacggggactggtttttattgttatttgctcgattgaattgagcaaaaattatgtaaattttgtgtcgaaaaaaaaaattttttttttcaaaatttacgctttgccatattttaaagggctcattttatcgggacgaactgctccgacggatcatcgcaatttgttcgcatgacaactacaaatacatcacaaattttgaatggtctaacaacaccgttttgaaagaaaatttacccatttccccatctcattttttgtcaggtacatttccgtgttggtcgaactcaccaaggtggagggcaccaaacatggcattctaattgctgaacaggttgaccattcattcacaatttttcattttcgttcaccatatatacatgcacacagatccaagatgtcactgtccgtgtgcagtcaatccggcacttttccgtctcccaaatggcacttttggtggagaatgcccagccgttgttgaagggcaatggcggccagcgcaacaatgtggccgaagtgttgttggccgctgcgtggatttgtggcgaatttgctcaacagttgcgttttgaaattggcaaatttcggggaccggtggtgacagggcggtcccaaaaatttcggtttggacggcggagggaggggggggggggtaccaaccaaaaaattatgcagggagatgcttagcccagggattttccatgtgaaagcagctcgtttcacttgtatcttttattttcaaatattatttaccatatttatggggcgaggaaacgtactgctcccgtcctcggggtgggacgaattaaccggtcaaaattcattttccccacatttctaccccagtgtcaacaatgtcaccgctgttttggacgcaatgttacgcatcaaattgtccgttgtgcccggcccgttgctcagcgtgttcgtgcaaaacattgccaagctgtacaccttccaactgtgcaaattggaggcggacgacgattgggacggaattgaaacgttggacaatttgctcacctccaaattgcccgagtaccaatacactgaccatttggaggcgcaagaacgggtcagcaacaaattaccgactaattactaggcctataattaggcaaacaaaaatggggcaaattagccaattttccgcatttctttcgctttgaataagtgccattgaggaaattttgataaactcatttccagacatgcaatctgattgccatgctcaaatttgcgtccaaaatgcacacgacaaatgtgaaaattggtgaagcgctcaccaaacattttgacggcgaactgaacccggtggcggcaaaagcgcaacggaaagtgccggtgccggacggactcaatttggacgagtgcatcaatgaaattgatgactcatcagtggaggatgagatggatgaggaggaatacgatgaggaggaagaggaacatgaacaaaaaaaacaccatgatggcattatgccaacatcgacggcacaccgtcaaaatgatcatcaacaacagcattatgccattggtaattcgtcttcgtccattggacgtgccaaaggccagcaaatgaagcaccgtgaacagtctccggatgacgcgtaccatggtggtggtggtggtggcgctccgcgagttgcctcagaataaagggcgagttcatatcgttctcaagaaaaatcgaacacctagtagatttagaagatcccttaccaccaaaatgtacatatgcctatgcatcatagtttagaagatgtacactccatttaacaaaacaatttaacgggtcaattctatccatactacacctttttaaatgccggagaccgtctccacaaatttcgcactccttaatttctcccaaacataaagaacaagtagatcgtgcaataataaaaatggcttgatgaatagtctcctttttcattgaacattcatccagaatcaaattcgcctaaatcataaagtcttatttttacacctaaaaaacacttagcgtacattccaaatcataagctgactatcctatatg

SEQ ID NO: 1240 - DNA, 1520 bp, Heterodera glycines
cctcccctctcgcaacgcgaaaacggcccattttttaaaaaatttgagaccctcttaatattaaataatttttcaccgtttttgtaccattcaaattctttcttttctgcgtcaatctctttttacaatttgtagaaaatgtcaatgcttgcctggtgagatggaaattaatgccagaaattgcgctgataatgaatggatgagtgattaataaaacctcctcaaattatttgaatctgatcagagagttcacttttctgcaatttccatccgcaagtactcccgtggacaagcttttctctaatcaccaaaagagtcagtcagtcattctcgtcatgccatgcttttacgcaattatatgttcaaattatcctaatttcgagaacctaattaattttttgttgttgtctattgcacatctcaattttcaatacattccgaaaatgcaacattttattaattataaataatttgaaattcataaatacaaaaaaataataataataaaacagataagaattaatgatgagtcatcattgatgacgaattggagtaaacccaaaaaaagtaatgtttctgcagctctgttatcagatatcaggcttatcacagttgtccattccaacgtttttcttttctgtccattgctttttcccttttcactcatttctcttcctctttctcctcctccttttcatcataatctgcattcatccatctcatcagtctcttcttcctcctcctcctcctcctcaatgacatcatcatttttctcttccttttcctcctcttcctcctcctcttttcctccttcctccccaattgttgtcactgttgtgatttgtctcgccaaatatccccctcctccaacataattattgttttcaccaccattgttgttcttgatcagttttgccgtcatttcatctcttccaccgccgctgccgatggcaccggcgcccacaccgttccgccatattacggtgtccttttgctgtttctgctgtacaatcaggcccatggttgcggtggaggaggacgtcttccgtgccatcatactcgtgctgctccgttccgcctcctcacttcttcgcgcaccgcttcccacgcgcggtcggacgcctccgccacaaccgcttcccattgcgatgccggaacccaattttccatacgaaaagtggtggaacaacattttccgcttggccaacatttgcttgacaaccttaaaatgaatgaatattttaaactttgttcgaatcagttttacagagttttcgaaattgggttcgaaacggatgccataatcgtggatatcaattccgagaatccctctatttaccccaaaatcccggctttttaaactgctttggaccagaaatttgggcgaaattcggtttcgaaaatttcgggggtttttgtttcgggtttctcggcagatttgattttgctttatccaaaaattccggctttttaacattaagttgacttgtcttacctcacgaaattgggccgacatgccg

SEQ ID NO: 1241 - DNA, 837 bp, Heterodera glycines
tcacttatgcgccaattggacacatctgttgccatctgtgcgttaatccaatttggcacagaatgccaacaaaaaaatattttataccttttgcccccgggcatttctgaggttaatttattaaatcagaaaaagtgcgacatcgaattacattgtgagggagaaacaattatttaaaattgaatgggagtttaaaataattacaaagggtattttgggaaggaactttggttttagtcgaaattcgcaagaaattctcggaaaaccgaaggaaggctaagcccatcgttaggcggcaattcaaatgagaaaaggctcgaattttctggcctaaaaccaacaaaattttcctttttttttcgtttttttggacggaatttctgttgttgtttttgtgagaaagactggtaaatgcgttgtgacttgtgggcccgtcttttgctgtttgttgcgttgtttttgcatcagcccattctgtgccgatgacctttgccgccctcggcgactttgacgaatgaatggaagggaagggaagtgtcgccgttggcattggcattattttggtgatggatgattagtgattaccccaggggggggggaggcgcatccgtaatcattatgatttatagcgcgcctccattctgtgagttatggccgaaagcgcactctgaccacagtcgaactgagcgatcaatcgcccaccctatccatgctgatcagcagcaaatgcacaatagaggacgtggaggcgagaacgcccaacacgcattatatgtaccaatgaaaaaacgggcaaatgccaatgcagcgaatctatctgaagcccaaagagggggg

SEQ ID NO: 1242 - DNA, 1735 bp, Heterodera glycines
ggcaaaatcggcgacaaattgtgacttttcccccgcagttccgtttttgaaatccgaattttcctcggtcgagtcactggaagacaacgattttcgcttttggcggcgttttttgcgagttgttgttcatcttcttttaaagtgtgctcttctaagtgcttctcaacttcaaccaataataaatcccatttgcgaaacagaaaagaaacggaacgtcggaatttctgtcgtcctcttaatttttgtttaaaagttaaaacaaattaattgagccacaccttcgtttgataaagtgaaattgaagccaatgcgaacgaatgaatgagtctaacagcagaaagacggtgtgaaatgtccacaagatcaaacagagaaatagacgaattgtgctcaaatttattttgcttaagtgacgcaaatcctttaaagcatgagagaaaggctttgacacaatgtacgcacgaagaaacagcgaaagtgcatgctccaaatgattttccttcagcagctatgccaactgatcgaacggatgtccgtttttggggtccaatctcatcgcttttttgtaacattcggcagctgctgttaaacatttgtatattttgctcaacaattgtagaggaatatctgtggaggtctcccaaataggtgcagagtcgcgcgaatgtccacgaattgatcgagaagcaaggaatcgacgaaatgctcgctgatataagctgcttaagtaaacggtcctcttcatccaagtcaccgacgatttgtacagacgaatgggttcataaaaacagttgatccaggtgtgtggacatctcgccaactgacacttcgccaactggacatctcgccaactgacacttcgccaaatccggacgtttcgccaactaagccaaatccggacgtttcgccaactcagctaaaaaatgacatttcgccaactgacattttgccaacttaacatctcgccaactgacatctcgccaactgaacatctcaccaactaagccaaattcggacgtttcgccaactcacccaaaaaatgacatttcgccaactaatttcgccaactggactaaaacctatttttaattgtggaaacaataataaaaattcaatataaaagtgcataaatgaatggaaatctttatattataaaaaaataacaaaaaacgtaaaataaaaaatttcaaaagaaatttcattatataaaaaacgtttaataaaaattttaaaatcaatttccatcgccatcatctgtttcttcgccactatcttcatttccacggacgtgaagcccctccacaaagccttgcatgacgagaccaagcagatttaatgtatttgccaatccttcttctgattcaaagtcggcctcggcaagaatccatccgcaccacattctgttcctttatgatgtaccgttgcggacgttttctgcttttctgaagatgttctgcgcgtccgatgtccagctgtttgtcgatgtcccttgtgaatgcagtaatgaagtcactcaatgatgggtgatggttgagctcacgctgaaataccaaaattaatgtttttctaaagtatatgttgtacagcgaagttgaaaaagcgcgccgaacgtaaagtggcggaatgagtgctcaagagagaactgatctgattttgaaaaactaataaatacacataagctaatgaaagacacctggatgctgtgtgaacggatttcctttgaatcggtccttcg

SEQ ID NO: 1243 - DNA, 5999 bp, Heterodera glycines
agttggcgaaatgttcttgtgccgttgatccacattatgtcgaaacagccggttggcggtaaaggcgcgcgaattatctatttttttttggacaaggcgtcggagacaagaaattggacgagttgaaggaggaaggaaaatttgatggttcgaacaacatccaaccgatcaaccaacaacgaacgtcccccccccgccccctttatgcgtgtcacacctcccccattccctcccgccgtactattgttacatggagatggctataaaaatgcgtttgtattcttgtcaatttataattcagtggtgggtccattagtgcccggaatttcgcaagaattttcccgggatcacggccgctttttgcacgacgccttttttcttgtcctttaataattattttttaatttcaaaaatgattaatgcgaaatcactgaaattgagtgaacgctgaatgaatgatgtgacggccaacgaaccaaaaaaaaaagagaaaaaatcagttatacaaaaaaatagtaaagaaaagacaaaatacgggcaaaaggatccttttgaaaaaaatattggcggaggacaaaagaacaaaaaataagaacacggattggcgttatgacaattgtgtttccgtgctccgacttccctcgaatatgtaaaggttgtttgtggcagccaaagcgatgatctgagaaaaagggaaaaataaatggcaaaacggcaaaaaaaaatgtgaacggaatgccaaggaacacacgcacttctgttgtggggtgccaagcgcagtggagaatctgcaaaagggaaaaacgaaagtgaaattaataaaagccagagtaaaagttgtgacatttaaacgctcaaatagggggagggggcttaaactccatttcgattctataaaaaaattccatttcaatactgattttttgtggtagatattgttataagtacaattaaaaagataaatcgtcaactataaattgctcgatttgtaattagtggtgatccattgtgcatcgaaatggggcaaaatcaaaaggcgggaatagacacacaaattgaattttattgaatacttccttaaaacattgatttggaaagagagatttgttctgaaagccctttccgtaaggaatccctccccccttttcacaaaaaatgcgtgccctccccccccttttccgtcacctttttgttaaagtccaaatagtccgcgctgatttcctcccttcgctttttccccggtggcatatttgtgctgctgctgccgtgctgctgctttttgttgccgcctggcgacgaaccgccgctggccatcgccgccgccaattccatccgttcgtggtgcagcaacggccttccgccatagccgcccattctgtacggcttgcacaggtcgaggctggcctcgtacgtggactccaccgaagtgttgcgtttgaaggtgcggaaataattgttgtaggagccggtgatcacatgtctaatgaattaacaaaatatatgttgaaatcacagattgattgagtggggatagaaagaaagcctttggggcccgacgacgccgacagaaaattgcatattttttagaataaaaaagcacaaatttttagggagaaagctcaaaaattttatgaatgctgctcaaaaatggagtgaaaacaaaaacaaaaaatgttgatttatttaactggaagaagtccttcttcaaaacttgattttctttttttgaaattggccatttctgtactttcagttaaggaaaggattaccctttacaaattatttccgaatcaattgttttctatttgaaaagaagataaattgaaaatttaaaaaaactttttaaattttcatattttcccctaatttttggttattatgtcattttctcaccaatcgaaaaaaattttccacagcggcgcctatcggcagcgtcggactacccgccctttccccaaaaattttatgaaaaaggtgcaccgcaaaaaacaacttgaaaagcaaaaggtcgccgatttatatggatgggccggcccccttcgcaaatgttcgccactcaccggtcgtcgccgctccaacagcactcgaatttgtcaaaaattgagtcgttctcgtaaagtgtgcacagctttgagcgcaaatagtcgtgcacatggtacgactcgacaggacgcgactccatgttcaggtcccagaccttaaaaagacgaacaatgaatgaatgaaatgtattgtatgtgattgccctcgcaaatagttaaatccaaatccctcctcaaatgaataatatccgtgtgccattaattacccaaccacggggactaaactcacagattaacagggccatgtgccccaccagtatttaagtaatgcctgaaaactctaatgaacgtacattcactgtcaaatagtcgcgggtcagcaaaaagcggccgttgtgcgaaaatttgacgtccgacacagaagaaatgatttcggagaaaaaggacttcgaagcggggtcctccttctcctcgaatgctcaaatggaagcataaattaaaaccaaatcctaattaatagtgtttaattaattacttttggctggtccgtcacaaagtgccgagtcgcgcatgtcgcacagcctaatgatgcccttggaagagcctaaaaatggatggatacggcatttaatggaaattggattggatttgattgtgtattttttaattcactgtatgcaaaaacatggcacaacgacggatggaactctgccgcagtgatcacctgacaaagtgagaaaaaatgaaagaaaaaataaaaatggaagaagccaacctcggtgagttcctccatgttggcaggtttaatgtccacaatatctgcaaaaaatataatttcgtagggatcttgggaaaaaagaaccagttttaaaaatcattaaaacggacactttccaatgtcacgccaaatgcccattttgacttaaaacattgtgccaaatgtttgtttttgaattccgttctctctgcccactcactgaaactctgattggtgatttcgtggtgccacaaattgatgcgcaaatcgtccgccgagatgaacgtctcctggtccgagttgatgcttatcgaattgatgtggtaagtgtgcgcgttggcgtacacgcggcggggcgacgcttcgacgattaattccatgggcaccaatttgggcagtttcaaaggcatggcacggttgaggaacctcaaaaggcaacataagcacttgaaaacagacagtttaatactgatctaactaatttctcccttcgattaaattttacctccgcgatccgtcgtcacaccgcaaattgtacccgccttccgtcatttttcgttcacgctcagaaatcttccacaattttaccgttttatctgcggaaaaagaaaataattttgaggtgaaaaaatgcgtgggatttgaaacatttgaaagggaaatatgtcaaaatattaaagggcattaaaaatgtctcagccgaataaaattcaaaattaaaaaaacaccattggttgagatgatgaaattggccgcgttctttttcttcatccatttgatttggttgattttctcctcgatttccagcgacttcaaataatcaaattcgggctcatgtgattggaaagttgagtacacattgtactcggaagtgcggacgccgttcagaaacactccctgaaaaggggacaaatcagaagcaaattgaaatggaattgacaaacgctttggtcccgttgaaagatcaccactcgtccgcctttgtcaccggtagcgagcagttcaccatctgtgcgagaaaaacgcaaaagtttttgtatttatttaaaacaaaacaaagaaaacgaaccgtgagaaaactcaacgcacgaaattatgtcagctgaaattaataatgcttttattaatctgttaaaacgtttaaaactaaaagacaattggggggataaagccaaagataaagcaaaaatagaaaaaagtaaacggaaatgaatgaaaagtgaaaagaaaagaaacacgaacagcatggatttacaacttttgttttggatttaccaatccaatcgtattgaaaagttaatttattcactaaaaattgtaaaaaaaaccgtcggttggcgcctcgcccgtctcaatgtttccctttatttgggagaagcgccagtggagttcgtcgccgccaccgctgctgacttcgaaggcggtgccgcaaaacggcggtggagttgccgaggaagaagctggcacatccattttcacaaaatgtagaaattccgcagaatttataacaagtggcgcgccttttttagttcaagccaaatttaggtgcactttttaaaaatttgcgaatagctgacaaaacaaatgaaattagaaaagaccgaaaatatgtaaatggaaattaataaacaaaaaattcgaaatcgatgccggaatcaaatccaccaattgaaaaacttattatttggaacactaaaattaacttatgggtttatgagtcatgcccaattctccatacttaattcatccacagctttgtgggattctggcatttactatgttgcacaacccgtgtcgtgacatttttgtgtaagaattacctagttgggtaagatgttcgaaaacttaggaacattacctaacaaatgacaattaaatacatatatgaaagtaggtacattcgaatttaaaaaaaaagttaagatgatgaaaactgtctctgtctgtgaattttttgcgatgttttcggtgttcgccgctgcgttttgcggaccaaatgtaaaaatgacgccgtccataaattacctaattagaggaggaacaaaaatcaatatgcttttattacgcaattcattgcaaaagtgaaagtgtccaaattttaataagaaagccgaaattcatctttttgagtgtattcaagaacaattttttgtttattacttttagttcagaatttagttatataaaaacttctataaacttcaagctttcgttagataccaagaatataggcattaacaaaataagaaaaagttatggcctaagaaactggagacggacattgattggacagttttgccatggttttccttacaaagggcgcgactttcccccgatgagaatggcctaacaaataaatgccgtcctcttacagaaacataaacatgttcttgaaaatttttttatcagttgaagtttgataaaaaaaaaaagttcccaaattttggcattgtgtgttaattgcttaaatggcgcgaaaacttcagacagaaaccgacgaaatctcatccagaaagaaatgggtactgtaaaaacccgtacattttgttattgcaatcctttaacacggttgtttagagcggtaattacacggcaaatttcccgtgttaacattagacagtaaattacaaacagcggcatattaactcatcaaatgggacaaccaaaaatgtacaaaatgtaattgactgggtgctaattgccaagccaccgtcccctccttcccgctcatttgttgtgatcgataaaaatattaaatggtgatgagagatggcgggggggggggataatccgtgcgtggtccatgttacgagcgttgttagcacgaacagcggtgaaaacaacgccccccgccggggggaagagcggaaggacaggggaaggaggacaccgacgaagacaacgacgacgacggagaccgagtagagacccccacggcacggcacaaaacagcgcagaaatatttgaaagcacaaagtgcgaaggaggcggggggcgaaggcagcagccgctaataaatggccgcttaaagtgtcccctccccccccccccccgctcccccacttttttttgtgtgcgcttaagccccgtcgcgtagtcagagagagagagagacccacagagtcgtcaggatgttgagaaaaacgagcgggaagcgaagatggcggggagagggagaagagccccgggggggggggggg

SEQ ID NO: 1244 - DNA, 1185 bp, Heterodera glycines
cgatggtggaagagaaaatgcgacgggaagggaaaggagggaaaacgaaggtgggaagaggggggggggggaggagagaaagagggaggggaaaattggggagacaaaatcaaaaaatgtgggagaaaaagtacaaagaaaagcgacaacaaaataagcgtggaacagcaaaacaaagggctttcatttgtactaatgtctcgaaagaaggccaatttcgataaatacgcgaaactaaaaattcgcttcattattaatttttcaaatattctaacaaaatctgagcctctccaaatccttcagcgtcttttcaggccaaaggcaagaaatgttaacaatttgcacaattttggcaataaattatttaatctgaaaataagcaaaaatcattttatcaaaatcaaagaaataaaataatcaaaaaaattcggtttaaattcgcactaaaactcccttaccgtaaaacagagggcgaaaaatttaaatttgctgttactgtagcgggatggaactaaaaattttcccaggcaagcaaaacttaataatcctgtagaaattgagtcaaaaactgcgtcatttggtcaattttagacaaaatctgttaacaaatcgcattaaatttcataaaatttctcgcagatgtcgataggcaccaggtatggcacggaaagacttccgatttccgacatttttggggtcggaattccgacttccgaaatttttgatgaaaagtcggaaattttttgaatttaattgaaattttttcgaattttccaaaatcccgcaatcccgcacagggtcccgcaaattttaaatgcgggattaatcccgcgggatcccgtcccgcaaaaaattttgagttccagtcccgcagcgggatccgcaaatttgaaatttccggtctctaataaagaccttcgtaatttggccagggttacccttgaaaatttcccgaaataagaacatcgctggtcaaaaataagattttagggtaaaaaataagtactttttttaaacacgcttccaaaactttaaatcgcatttttatacaacaatgcattttagcaattttgtggaagacatatgcaatttgtaaattatttcagttcatccgggatcaaaaaatcagatttttaaggatttttttgcggcgtatttttccgaaaaaattgaggaatgggcata

SEQ ID NO: 1245 - DNA, 2354 bp, Heterodera glycines
  unsure (1)..(2354): unsure at all n locations
ggtaattagtgatgttttganggtactaaatgagtacataattaaanatatggtaccataattaggcattttaatcattttttattattattaaatgaaacttttttctcaatntagcgtttttgagtttcggttgaaagataagagcaaaaagcatttttggtgtgaatactttctcatgagaaatggcataaaaatgggaccaaaaatggaaatggcaaaacgccaaacaaaaaaaaagtgtgagaatggaattagttaattgttcacactttcttggaaggaattatttgttttattctcccaaaatgccatttcatttggccgatgaatgggcccaaaagttgaccaattttgcctcaaatttgtatgatttttttaattgttcaccattttttggcatttccatattaatttttcattttctcctttttaagcctctattctcttctctctctaattgttttttgttttgttttttttacatttttaaattaattttctgttttttcacgtttaatcgttgattaattagttcttataacttttttctccattttctcattaattttgttattttgcactttgccattaattttgtctttgttttgtatttttcatggcatatttgccattgccattctgcgaatgaatgggtttccccccccccaattcactttcttctcattttctgtcataatatttttgtctttggcattgacaaccgttcattttacaaaaatttatggtaaatgccttttttgaaaattccgcgtggcattgaaaatgttgtcattcgatttgattaaaattaaattaaattaatcgattagcttcgaaaatgaaaaatcatttcttaaaattaattcccatttgcgtttattttcatttatttgttcgtaataatttacggttatttattcatttttttcttttcttttttgaccatattttgggctatttttgtctttaatcatttgctttattttttgaattttctctcctttattaatgccattttgcatatttgtgtttattaatgccatcatcgatcacattagccttttaatcttctccaattagccatttgccattcacaatcagagagatcgtcatgaatacaaattcaccataatttattaaaaaaaaaatataatatggacaaaaagtggtcaaaatatgtacataaatatgaaagaaaaatctcgaaatatgtacaaaaaaccccaaatatgtaccaaatatataaataaaatttttaaaatgattattttttggaaaaaaaattcttcggaaagggtgaaatgggcacaaaatgccataaaaatgacctaaataagcctagaatcacattttagtattttaaaaattagtttggttaatttttatttttcacaagaaattttataaattttcaaaaaacctcaaaatatgcaataaaaatttgaaattatgtacgaaaaatttgccgaaattttgattttttttttgagaatttccgaaaatttctgtaaaaaatccacaaaatatgtaaaaaatgtatgaaaaagtccgaaaaagtccaaaatatgtaccaaatatgtataaaatcccgaaatatgtaaaaatatgtaaataaaagtccaaacttttgttcgcaaacacaaaaaagaaagtgtttttcctactaattaggctatggagaatccagaaaaaatatgtatttacataaaattgacatccccaataataaatatgtgtttaattaataatagatttatttttaattaattaatttatttttaaatttattaagtgagataaataaaaaacagtgatctcatctcattttcactttccgagaaacgaaatggcaattaaaaatgcccaaatgccatttttatcatcgcttttctcttctaattttgtgcaattaccaaacttcttcaagagggattattcagaacaaaaatagaagcgatttttttgataaattaacaaaaaaaattaaaaaattataaaacgttatttattatgcatccaaaaggcaataagcataaaataatacccaaaaaaagcattcaaaactcgagaaaattgaaagccataaataattatcttccagaataagtaaaacctcgagtttcatcttatcaattagtcgaaattaagtaatttaattttaaaaatatttttcccatattttttttaatggtttaacgcggcatgggcccgacagttggccaaattgcggtaattggacaaattgcgatgcatttgacatggaaagtctgcaccatcccactcaatattgtccatgtgtttttgacagcgaatttttatgatttttttttgtttaatgacgtaaaataccg

SEQ ID NO: 1246 - DNA, 879 bp, Heterodera glycines
ttagaactggagtccggttggtgtggccttggaacagcttttgatccttgatgtgagccagttttaaaaaaacgaatggatgggaatgcaatattttcaaatttcaattccacgccgacaaatgatgtcgttgcgccaaaagcgcttcacagggggcggggggtgggcagcgaatgcaacaaagcagcacatgaacaacagaagatagaggaagcggcggagacgggtgcgatgaagtataggcacggggaataccatgggctctgcattttgggtgggacagactaggaaataatcgaagtgttttctcgagactaaaatagctaaatattcatgtcttctccattccttcctttatgagttgatctagttacagtcagcaattaaatctctcttttttcttgtcatatttcccccataaaaataaattcctcataattttccgccacagcgatttttttcacattttctgaataaaattccataaattgtgttatgtgccggatctgaaattcttggcattcagaggaaacgcttggccaaattgggcctgattttatgatcaaagaaaaaccatcgaattgaaactaaaaagaaaactagtggaggggggggggggaggtttggcgttaacggcaaaaaacttcgttgtgatttaatttaatttgtttaattattttttcattaattttccgccaaatactaattgacctttcaacaacattaaatgcataaaaaagataaaagattaagtcataatttcgttcgtttgaattgaactattcagagaatatcccccggtttttccctatttttgtctttggttgccaatgaaaattaaataaaaaataatacaattttaaattaatgctttaaatg

SEQ ID NO: 1247 - DNA, 9269 bp, Heterodera glycines
ttgttgggagagatttggccaaggaggcttttgttttactcccaattaatccccgggtttactcctaagtttgccaagaaatggaaaagaagtttatttaagtaggatgggaaaggtatgaagaaattaaaggtgaaagtgtataagtggtaggattggataggaaaaggaagacaaaaaaaaagccaagagtcaatgggtacaacagagtttaaataggcaaggacaagaagagaggatgccgacataattcttatcagacggggaattcaaagggagagagcaaaggcacacattaaaagggggaaaaattacataataaatttgctgggtcaagagtcgggagtgatcatcaaaggaaacggcaaattggtcaaaaattgcagattggggaacagtccaatccttccctctttttgaaatctgcggctgtttctcagcgcggagcatacggacggaagcggcgtccaaagtggtggttcggcggctgacaatcatggcatcggcaatgtcctggggcaggatgacggtggttgtggtgctggtggtgcgctcgatgtccctggcgcatgttgaaataatggcgcgcatgggcggctgccccagtagcggtcccacggccatgtcccccacgccctctgatgaatgcgcgcccatggccggtgcctcgcccccgctcacgggcggattgctcctgcggcaatgagatgcctttcggtcccgggtggggttctccctgctcattctccccctcagtcgggctctcgggttctttcccggtttctccggcctcaacgctcaccgcttccaactccgggtcatcgagcgacatttgttccatttcttcccgcgctcggctcgcatcaagagcattagccatttggttgatggccgcggtaaagccttccattccccggttaaccgtactcatagcctcgccaatgtattttgaaacggcggaaaggatttcctcctttgcgttgcccagctccgtttggatctcggccatattggccggtgagactttaggcttattcgagcccttcgttttcgaggcttttgctcccgcttcgggatcggcattctccttaggtccgagaatggcatcaattggagaagacattgggagggaacagaaattacaaaaacaggaaattgggtggaggacaaaatctaaattagatagaaaagacaatgcttacaaaatgaggatggaaccaagaaaagaaatgccaaaatgtaaattacggaaagaataaaacttttttttttttttaacgatatcgtatctcctccccttccgggttactgtattccctcctcttcctcgggaggggtggacacaacatcctcggggggttggttcagagtaatgccttgctgccctctggcgagtgccggtctccgcggctttaaatagtggagatggaccggccgatcgggtgattcgtccccttcgacgctaaccacatagataacatcaccctttttccccaccaccattcctggcctccaagttttattaatgtttgcccaaacatagtctcccaattcgaattgcttatctctgattttcggcacttctttttgagccatttgtttacgtttttcctccgttctgacccaaattcggtccaacggggtgcgtatttcccttttgaacatacgctgggcgggcgactccatggtcgaaatacacggatatgatcggtattctctcaaaaatatttgcaaggcttctttaatccttccctcccctctttcggctaatatttttttaactccttttttaaatgtttggacaaatttttccgcttctccgtttgaggacggggtatacggagggcttttcagatgcttagttccgttctcccataaaaatttctcaatttcttccgacacaaactgtggcccattgtcacttacaaaagtgatcggagctccaaattctgaaaaaatgttacctaatgccattataattgcatgggaattcgttgaattcatttggtacacccatggatatttcgaaaaagaatccaccacaattaaaaaattcgtattccatatgggccctgctaagtcagcatgtattctttccatacataattttgcttcgggccattttcttcctttatcagtgatcggtggcaaatcggcatttcgttgacaaatctcacacccattgataaattcctcgatatccttactcattccaggccaccaaaacaattttcgggctttgctttttgttttcaccatcccaaaatgggcggtgtgtaagccctttaaaatgggaatttttagatttccggggactacgatctgtgttggggttttccgaattatatttccctctaagtatagctcgctccggattttgtgatatggctcaatttcttttgttgttgattgccaactatcctttatctctctgatcactttagcaagattctcgtctcgaactgtttcattctcaattatgtttttatcaattacaaaaggttcggttgtcaaaatgtaagggatttcctcccggaaatgcttttccataaccaggtcccattttattccctcggtgctcacaactctcgacaaagcatcagccaccacattattcttcccttccacataattaatttttgggttgatatcctggaaaattagaagccatctgttcaatttgggattggtctttcctttggataacaggaaagtcaaaggtttgtgatcggtataaatggtaatgtcacatccgtaaaaaattggatggaaaacaccaatcgcgtgaacaattgccgccagctccccatgggttggtgggtaacgtgcctcagtttggcttaatattttgctgcaatatgcaactgcgtacagtgtcccttcgttatctttttgcatcaaagcccctccccaagcgatttgtgaagcgtcagtaaataaatgaaactcttttttataatttgggggtcgtaagcttggggactttgtcagctcagtttttagagccaaaaatgctttttgttgttctgtctcccacttaaaattcgcatcgttttcctttcctcttaacaataatgtcaatggggcagcttttgcagcgtaatttggtatgaattttctaaaaaatccaaccagtccaagaaatctttttatttccttaacatttcctggttctgggaaatgctgtatgacttctttgttgctgatggacggctcgtaccccttacagtttagtttatgccccaaataaacaatttcgctcttacaaaattcacatttttgaggcttcaatttcaatttaaagttacgtattcggtcaaaaattttctccaaaataaacatgtgctcttcaaatgtgtccgtatacacaatgatatcgtctatataggcacatgtatgtccaatgtccgacaaaacttcattcataattcgctgaaaaatggcggggctgtttttaagcccaaatggtagctttctcattgtgtagactcccttttctgttattattccacatttatgtgctgtatgtttgtcaaggggtatttgccaaaatccggccgccaaatccaacgtactataaaatgcttttcccgctactttatgcaaaactgtctccatttttgggattgggtaggggtcggttacagtaactctgttcagcgctcgaaagtcaacacacggtcttaaattaccatctgatttctgcactattaccacgggagaaacccatggagtgtttgattctgccaaaactccagttttcaacattttctctaaatgggcatccaattctgtttggtatttttcgggcactcggtatggccgactgtagactggcgtctccgttgtagttaaaataggtggagctgaaatagtgcattcacccaaatcgtaatcatgtttcgagaaaatatcttcatttcgttgcagaagtccaaaaaatttgcttaactcagctttggtttgcaaatcagttttgtgccggctcatcagatttgactttcgaggttcttccactttttcggaaataaaacattccctcgtaattttgtctttttttattaattggcccgtttctaagtccaagaggaggggtaattgtcgcatcgtttttcttcccaaaatcacttgataaagccctcttttgcttacttcatttgggattataatcgccgtggtttcgaactgacacccggctatacataaagttacgactgcctggccaagtgccggaatgactcccggcccaattcccgtgactcccgcaacttccggcgggtaaaattttgttatgcctaaccttttggcactttccagaccaattagtgtaacatgcgcacccgaatcaagcaaaaatataacttttttcccgtttattattcctcctattcgggagtcttcatcacatcttccgagttcaattaccgcaacttcagcgatttgggtctccccgtttgtgaatgccccattacaatttgtccacctttgggttaaaggaatggcactttgccgggccaattgtaactggtcattttcctttgctacacgttttaattccctttttcttctttttgttgtctgaagtgtccgtgtaactcgaactagggactccccaacatttaattggtttgccaattcagccaagaatgggggtaataggaaacgcatcaccgctccaattgtaacatagcagcaaacacaaaaaacccaaatttggtttgctgaaaaaattccacctttcagaaaggagaaaagcccatttgacactatatttccggccaaaaattcgggcttcgctgaattctcgctccaagcgccacttggctttgtcaatctgacaatttcatgatgaatctctgcggcctccagtgtctcggtgaaatgttccggcgaataaagctcactcaaatttgccatcaccttatttttgaacacagtaaaccctatttctggcaaatcaatgtttccataacgggcaattttatgaattgtttcccatggcacttccttgatatctccgttcacttggtcatattgtgttaattttttctctccctgaatgtacaaccatcttcctgactggcaatcaatttcccttgcctcagggtatatgataagggttaccgtatccaaaaacccatgccgttgtgccccgtatatcataaatgtcactggtaatcgattgaaacaaaaccccgatttccaattgtaatgcatctcattcacattcactccaaaacatgggcgaatttccaaggatttctctgtaactaatcgcgcagttattagttgattactcaagaaaaatctggctaatagggttggatttgcgatggctaacgtagccgtttgatccgcgattgattgcaaacttgtgcaaatttgtctaattgcctctgaaaaaagccgttgagtggtatgggttaatcgggcgcttaaggcagttaattgagccgataattgagaagagtatatgagtccaacgggacttttgtccctcgcttgagtcgcttcctgcgttatttcatctaattgtcttctcaatctcactgtttctcggctagccaaatcccttctccttaccaattcttgatactcttctaagggaacagaaaatccttggtccgagattgcaaattctttatttttgcagttttgccgaacagttatgttttcaaatgttagagcaaaatcatttgagcccgaaatccacacctttgttgcgtattcacctgcccatttagctacccacacaaaaggacattgttgtgttgggtccggactccaaatcatactattttgctggcaacgacatgcaccggatttgtactgacaccctgggcaattatttaagggagtactgactccttcaactccgtacctggtgaaaacaaccgtatcataggtataacaatttaagacttccgtcatatgccaaaacattcctacgggccatactcgccatccgacttccaatgagtgattagtggaccggagggttccatttttactgagctctcccgctggggaatggtctaaatccctcattctgtggcaagttgaggtagggatatccaaattctcagtttccacctcctctaatggggctccaaaaactccgactctgcggtgaattttggatttaacacatttacatgcagtagccggtgttttatattggagtgtatttggccggtaaatcgttaattccatcgggatcggactttcagtcggttgccacgtggggcagattggctcctctggcaatttccataaactcgacggagcgtccggtaaacagatcatcggctgccgttttggaacatttgcaaggattgaggttggagagaacaatgccaaaatagcgattattgccaaaaagtaggggctcgccactcgggcacctgctattctgcctcccctagggtttactcttggtgtgggtgttcttgggaaacgattttcttgatcgcattcccgtctagtaccactttggtctctgtatcgccgatagttctgatttgaccgactattttgttggctatttccgcttctccacgtctctcggttcctttcatatccctgtccgaatggccgagaataattcccattgcgttccgttctacggctgttttcatctcttcgccaatttggcccattgtttgcttcccttcttctcgccgcacaatctcttatcacatgccccgcttttttacaataaaaacaaacccggtgatcgcgctgatcagaaaaatttggggcatgtctcacattttgcatggccaacgcctcgactttttcaataagttcattcatggccacatttgaagtcgacttgcgcgacgcctggagaagctcataatgttgagctaattcgtaagccctgctatagtccgttggcctctccgatttcacttcgtattgtagctcgggaattaaccgatccaaaaattcttccaacagtcttttcctaatgtttccctccgtttcccctgccaaagcagtcctaactgcctcacttaaacgagtggcaaaatcaaaaactttttctcccgggtattgtctgcagatcgcgaggttttgtctcgctatactctttgtgttctcattttcgaatctgctctgtaaatgccctagagcagcatccaaagtgacagggggtaaatccattgagtctaattcggcacgggctggccctgatagacaaaagcgcaaacgacttattttctgttcctctgtgagctgagccgtataaagcgataataagtctttaaatttctgtgcccaacgagaaaaggaaatgcttggattgccatcatactgggacaaatgactgccggagagcagaaatgggtcacttatcattacttcacattctcccgttagcccctgattttgctcgtcctcaacattttggtttatgctaaaattattctccccatccacattgtcatgaccattccaaaaatattcttcgttttcatccaaaactttttgttctaggaatgtaatccgttcacgattttcttttacaattccgtctatctccacaactttgcttctcattgccgcgaccttaatttcggtcacatttggtcgtcccatttccgtctgagactcatcccctttgtccaatcttcgggaaatctgatcgactgtcaactccaggtcggtcaatttcgattgagccaaatttaagtcggtttcgattcccactagttgttcacctattcctttatccatttgtctcatcatttcgccaaaaagttccagttttccttcgaggacaatacaattaccgaccttgccatttcctttctctatgtcttcaactttctcgattaattttctcaccgtttcgcaaacggtggcttcaaataggcgcagttgaaccaataaaggggaccaatttcggttttgggacgtagtgaaatgattaggattaaagtcggaccctttgtgatcgtccatggagaattttggattaatttgacaaaaaaaaggtcaaagagaattcggcacacagccacaccaaggagcacacagcttcgactcggcttttcagagggcacacagccgcaccaaggagcacacagcttcgactcggcttttcagagggcacacagccgcaccaaggagcacacagcttcgactcggcttttcagagggcacacagccgcaccaaggagcacacagcttcgacttggctcttttttcgatggcacacagccgccgaggagcacacagctacgactcgacaatcttaggcgttcagcctattgggattttgcctggtttggcaaaatgcgaatgaggaatagtcccgggtcgtggcaccaactgcactgtccgtgcacaatttgttgggagagatttggccaaggaggcttttgttttactcccaattaatccccgggtttactcctaagtttgccaagaaatggaaaagaagtttatttaagtaggatgggaaaggtatgaagaaattaaaggtgaaagtgtataagtggtaggattggataggaaaaggaagacaaaaaaagccaagagtcaatggggacagagtttaaataggcaaggacaagaagagaggatgccgacataattcttatcagacggggaattcaaagggagagagcaaaggcacacattaaaaggggaaaaattacataataaatttgctgggtcaagagtcgggagtgatcatcaaaggaaacggcaaattggtcaaaaattgcagattggggaacagtccaaaatggatgtcagggttcgtaatcagtgatctcgaaagccatcggataaaagtttgtgtttcgaactttttccaacggaaaactttttcacaccttactttgtttgtttacgatccaaattttcaaaaaggaggctttgtttgacactcaaaaaactttttggtataatttttcaaaaaaaaatttacgaaaaaattattttccaataaatcgccaagaagggagaaagcgtgtcactaatcattcaaagcaaaagaaccacgcaaacaaacaaacaagcacatacttaacggtggagagcacatcgccgacgggccatgcccagccttgttgaggaataatgaaccaaaccaagtcactgaaaaatgaaaaatttgataggcctcgaaaaaaatggtttttttaagtaaacgcactcaagcggttgtctgggcacaatgtcatgaatgatggtgagcagcaaaaagttgaggaagacggacacggccaggcacagaaaggcaaccaccgtct

SEQ ID NO: 1248 - DNA, 9519 bp, Heterodera glycines
ataaaataaagaattatttattagtgaaaactatttttttttattaaagttatgtatttgaaaaattctaaaaattgttagttttgtgtcaatttaacatagtattttaaacacataaatattattaaaatatcagtctttctaacaatttgtttacattcaaagcaattactttgccatggaaatcggttcggtgatgagaataacctttaaccctctcggccctccaattgtggtgtgggtcatttctgataaaaatatttggcaaacaaataaaaaggaatgaagagaaggcaaccagcggtcattcttatgattactcccttcattttcctaataaaatgcaagaaaataactcatcatccgacgaagagggtcaattgctttcatcttcatctgggaatgaagaagcggctaaccaagaattaattcaattcatcgaatttaagtcaaagcgtggtgcctcacttcttgcacgtaatgggtttgagtaccaatttgaacgcaattcggccttagttgataatgttgaatattggaagtgtgttaaagtgagtaacaaaataaaatcgaatggatttttctttggtcagaggccaccctactgcgcgggtcgcatacatgtccatgctccttggcaagagcaaaatggcattcggtttaaatttggactgctaaaaaatgatcaacactctcacattgccgaacccgacaaagaatatgtcaaatagttgccaatttctttttgaatttcttaatctcagattcgttccgccatcgaacagttgaaacaatctgcaagagccaataacccaatacagacaagagacgcggttgatgctgcgagggctgcattgagtgaagaagttcgagttaatgctccttctggcagtgccatggccaaagtctttcgttccgcaaggcgcagcgcccaagaacaacacggagacagaggaaaggattagtggggttcatttaggcgctcgcgtttgtacgctggggtcgtatgggcacaataaatgtcttttttcatgacatttccaaaatttttgatattcatagtgattttggagtgtctgatcagtgatcaccgtaaaaaatttttaatggacgtcaaaatttctcgtttcccaaacatgagtgcctaaatgtaattccccaaatgctattttcaaggactggacagcataaatccacttgaaatggtcattcctcaacatttggaggcaaatgtgataacaaatgaaaatgtcaacattggtggccaaatgcgtaaaatcatagttttttcaacacaaagtgcaattgaaatgcttgatcgttaccgtaacgagatagcaattgatgggacttttaaggttaaaaggatcaaatgaattaaaattaaagcttaattggttatttcagaatgcaccgaggggttttgggcagctttttaccattcatgtcgtggttgatgcatgcgctgttccatgtgtgtttgcttgtttacctaccaaacatatgcaggggtatattcgtgtgttcgagtcgattcgcaacagaattcaaaattggtctccgggaagagtaatgtgtgattttgaagcctccgaactctctgctatccggcaaatatttccccaggcaataattacaggttccggtaataaaaaatcatttaatagaccaattttacaagggtgctcctttcacctcggaaatgcaattcataaacacatccaaactctccctgggttgtacaaccgttacagaaataacagggatgaccgacatttatttcgatcacttcaatcgctggcttttgtaccaatcaatgaagtgtacacctttttgtgcattttgatggacaatttgattggccctcccgaaattgaaattttgggtatgaaagggtttttattatttttttttcacctgattttagaattacttaaatattttgtgttaacctacattggtccttcctatgttgttgctcatccccaaataattgctggtgaacaggaagcgaattatggacagggatgtgatggatggttgcgtgcctggatagctcatgagaatttggcacatcgaaatgccttgtttccaatagcggtaaaaaattcttgactatctacttttacatatttctgtaatttagctatggaatctgactcatcgcctcgaaattggtctttcaagaagcaacaattcgttagaagcgtggcataacatttggggggcccttcttgaaccaaacccactgttcagcaaatttgttaagcgaatgcttaaagaatttgaacgttggcagcacattgttgccgattttcacaatgcaccggcaaatgggataaggggaaagggccttaagagaaagtccatttatctacaacaagacaacaatttgcggcaactcttcgctgaattccaacaacgagcgggtcaagacccattgcaatatttaagagcgatttcatatcacttggctcaaatttaatgcttttttattcaaaaaataaaaaaaatatttggcgtattgtttaattttttaaaattttatttcagtgacgaaaggttcagtgacgaaaggttcagtgacgaaacatcagggagcctttttatctgtctccctttaaaatttatacaatacttttaataagcactcatatattcgtaaatttattttaaggaatcatatatataaagaataaaatttaaataatcctaagtatagcattattttatttttatttgtaaaaagttcattgttcagttgtggtatacgatgaatcgttaatacttttctaaatttatacgatttaaaaatacatcttcaatttctacaagattagaaaaagacgcctaagaatgtgttgtgttcttccacttagaacacacaaagaaaaagaaataaataaataattttattgattcggtcggagggcaaattggaaatataaataaatgaatgatgaaagggaagaacaaaaagtgggaggaggtgtccacttttatggacgagggaaggggcggatggacatagaaataacaaataaagtcaataagtcagatcgccataaattcaaattattcactatccaaaagaatgagaatttaaaactcaattaatttcgtagaattcaaaaattataaaaaaaaattatttttttaatcgaaaccgagattatttcctactgaaaaatatttgaaaaataaccatcataaagaatttgaaattattgcaaattatttttttaaatacaagattaattttaaaattagattttaattttataagctagattaaaaaaattattgttatataaacaatctattttataaaaaatactacaatgcattattggtcttctgcagtgaactaattttcacattatcagctttttaagatattttgcaatttatattactgtcgccaaaattttgtccatctgtgtccaatgttccctgtccctatcaaattaaatttgtcattttaagtttttaaaataaagttttaagataaacctttacttctttaaagtatactcaagaaatcggctttcttttattttattctcggtgcttttttttattacttgagaatttgtaatgaatttattttgctaaaactaattatgatatttcgtactttaagccaaatattataatataacatatttttaaaattttattgtatttattattcttttttatgaaattgattgtagttatattttattattaaaacaagaaatatccaaaggtatttatttatttatctttaaaataaaaatctaccgtttaaatgcgtacagtaataaattattgaaaaacacagatggaaaaaagtgcaatttaagggaatttagaaaaaaggtgaaaaatcaattgtcatataagcgcaaatttttttctcgttagaaatatccattaatttccgctcattttggtgacaataatataaattgcaaaatatcttaaaaagctgataatgtgaaaatcttagttcactgcagaagatcaataatgcatgtaaaattaaatctactaaaaaatataatataccattatattatcgtagatcataaaaacaaaaataaataaattatatcagataatcaatagaaaataacagtgagatgtaaattgacaaataaatgttaattttagaatgaaaaataaataatttaagtttttcttaattgaaaacgtttattaattccttaaagtacttaaaagtagagatcatactggtcggtattttattcgttttttcattcagaaaaaatagtatttatttatatataatttttttattactttggctaatgttttttttgagttttaaattaaattttagatgagtttttgaaatttatttcgtatatgtaattatttcttcccgcctcttccctcattggtagcaccggatggttctgttgtctgcccattcagataattaatgcagtgttttaatttcttattctcaaaaaattagctgcgataataagatctcttgtgccttatatttaaaatttaatagtcataaactttctagaaacaataatttattataaattttaatttttattacatttatccacaatgtataaaataatttttatagcctttaagattaatgaatttaattccaaacttaatgttagtgaatttagatttaaattaattactttttaagagtccaaagagatccaaactttttcaatgttaaaacactgcttcaatttttagctttttagattgtagcacattttcaatattttattgctacactatttaacattaatgatgaactactattaattttttattgtaatcattagcattatacatgtaattaataatatttataatttttatattccagtttgaggaaatttaatcgttgtgaaatatgaaaacataataagtttcacattttaaatcgcagtaaaatatgaaaaacataataaatttcaaattcttcgcgtttaaataatgatatcgacttcatcatctgttgagttattgcattgtccaattccactgtaagttgcagaggctgagatcgtaattcgcgccccttgtctactgccactgcacattcttcttaagcgtggctcagttcctgtttttgatttaagttagagaaagattttcacgttaaacctgaaaatttgctatccacctccctaaaaaaaagccgggctggtaaaagtgatgctgacgatcatgatatatgattcagcatgatttattgtacggtgttggtcgacttcaaaaaggtgaaaaaatgaacgattgatactattttaatccatatgtcatcataaaacttcaaaatttacgaaattttctgcattgtgtttcgacatacatagttggtgagaatttcttctgatgctccccgatttgctatctccagtggcgaatcggtaatgagttgccgaatgagttgcagtgaacgcgcgaagtaatttggcggacaaaattgaagcgtccctatttttctgacaatgcgttggaattcagtgttcttctggtatcgattagtcccatcctttgaatgctattgagcgcctattacacgtgaaaaacacactattcgcctgcatcaagagcacacgtagttgcaccttctacgtcggggttggaaaagtcggagttcggggtgaaaattccccgactaaatttgttggggttggctggagaaaattaaaaaatgtcggagcagacaccttttccgggggcaaattttcataaaaagtcggaaaaaagataaaagaaaaagttccttaacaaaaagtcttaaaaactcatttaaagacaattacatctcatttcaagtgcaattatcaactttcgtaaaaccccaaaaatgtcggggtgcaaccctacattatacccctgaaatttcataatttgcggatcccgctttatttattgttatttcttttttttatcataaatattttgatatagaattaaattttcaaaaaatttatgaatttccaacaaattcttgtttcttttcgatattttgtcaaatatttcttgaaatatatttaattttcatgatttattcaatgaaaattaattttttaattttatttgctcacaaaaattaaaaaattattttggctgaggatttaaagtccggttggccttttccttcagttaataagcaaatcattcaagtcatttgtttattataatttacttaaatcataattagaagagagccgtaaaagcatttatctgcttaacaaaaatgcaataaaaacgaaaagatacccacccctaagaaatgaaaaattctcaaaatttatttatttattttcataaccataagattttaaattatttgaattgattatccatgtaatttcggttttctcttagtttattttacttttataataatattatttatattttttataaattttacgctataaattcctaatgaattttttatgagattttttgtaataaaatataaaattaaatcattatttataacttaaattttttttagggaaaaattaatattttttcaacatttttttctaaagggatgtcaatgaattttataatagtatttttactaattttgctaaagcttaaagtcgtaaaatatttttattgcattaatttccaaaaaaatttacgttgcacctatcggcagaaagaccaaaaagataaaaattttaataaaatttatttgatattataaactaggttcagccccgacatgtttcgggaaatgaaattacgaaagtcgtaaattgcacttgaaataagatggaagtatctttaaatgagtttttaagacttttttgttctggattttttatttttgtttttttagactttttatgaaaatttcctccccgacgaaggtgttgctccccgacattttttaaatttctacagccatctccgacaaattatttcggggaatttactccccgttccccgacattttgctccccgaaagcttggggctgaaccctattataaacaatctgatcaatgagcatctattaattttattattaattaaaagaattaattcaaataaaaattaaaattaagaaaaattaaaataataaataagattaaaaattaaattaaaataaataaatgtaattaaaaataaataaaacccaaagccaaatcctattggagaagggaaagggaggcgaaggggagggagtcagctgtcgtgcccatgggggaggggaaggaacgccaggccatctgagcgctcgcgtgtgcaatttgagcacacgcaggggccatttgagagcccgcttgtgataatttgagcgattaaaattcaggttaatttaatgttgaaataaaatttcaaattaatccaaataaaaaataacttaagaaaattaaaatcaaaataggattataattaaaattaaataaaattaattaaaaagattaaaattaaataaaattcaaaataggattaattaaaataatattaaaataagattaaaattatggtaggatttaaactaaataaaagattaataaaaataaaatataaagataaatctcagagaaataaacaattaaaacaatcaaaatttttgaaaatggtgcgggtataatgcaaaggctaaacggtgcacggttaaactgtccttttgtgccgcgttgacaggtaaaatggcctttaggagaggagctggacatttccaacggaaattagagggacaacaaaggacggaccttttatttaactaatatttatcctatcaattcaattattctcttccccaaagggtggaacagttccgatccatatgaattggatagagtttctgataaactccgtaggtttgaacatctttgatcataccccacattgtcacaaggaaattaaattaaataaaattaaaaattaaattcaaatacaaatgaaaataaagtagaaaacaaggtttattgagttcatatagccataacgtttttgaaacttaatgaaattttctgagattttgttgtaaacttgtagagcatatttagtgctatcgaattatatgaataataaaaaattggttgcttttaagccaagttataaataatttatcataaaatcataatgatggttttttaaataacgacctagcaccctttgaaacttcaaatttaaataatgtaataaaaaatcattatatccaaataaaaacttcaattttctttattaaaacagcacaaaaaagtgagatggtttaaaaaatgtatgttttttagaatttaaaagtatcttaaccattaattttactccttttccaattcattcaaaattatgtttctttaatttatataaattatccgaattaaaataaaatgctattaatagaaaagaaatttaattaaattaatattagatatatagaaaaaatgaacaaaattctttagaataaaaataaaacattcaaaactataatttagagaagaaacaaataagataattatgaatatatgtccaaaatatataaaaaatagataaattttaaccaagaatattatttatgtattttacccattatatcaacattaaacgccaaatataatttttatgaaaatgttgaaaaatataatttaaattattagatttaaaagcaatttatctgcttatataaagcaataataaaaaattattttaaaaaatagaaggagtaatctcacgactaagtttaattcatataaaggaattttgtaataaaaatttaaaatatttcatcaattatattttttaaatcaccagttgaattttctagattataaaccacaataatgtttaggataaagtattagcgctgttatttactaaaattaaataaaaaaatcaatcctttctaaattatatgaatatgaaagttattcattttttattcattatctaaataattaaattttgtacatgagtaaaaaatgttcttctttagtttctttgttctagacaatacaatattttaaaacataaaatactacaaaagcaatttaaaattataaaaaaaataataaaattaattcttctaggttcataatttttaaaaccatttaaatgttgtttaaaaattattatttatatttatgtaaatcgtataaattaccaaaattgaacacgaaaaatatctatttgcaaaatagtcgattttcatataaatccaaactgctgtgaaaacagcgtttgtggaaatttattgtttttcaaattgagcgccagtcaactgagagccatgaaactacgctaatagcaaaactaattttattatattaacttttttaataaaaatgattgtattttttctaaatgatttctaacttaaatttagtaatttcattataaacatatgcaatcaagtgtttgattcactttttatgaatcaatgccacgaatgatgcagtaactaaaaagaataaaaatttttcaaaaattaataaaaataattatataattttattttcaaaagaatgaagtgaagcgatatataatcaaaa

SEQ ID NO: 1249 - DNA, 4133 bp, Heterodera glycines
aaaaggcaaatattacactcattaattgaatagtttttgaatttttaattggaaatcgattggtggtgcaaaaagtggtaatttgtatgacataatcgaccgatgaataatgaaatcttatataataaagttgagtgtgtgtgggaatcggtcgttttggcgccgccgttttggcgccgccgttttggcgacagggtcgttttggcgccaaaaaatcagagacgcagaaataagcggcagacaagcgcctcttcaatttggtgcagaattacattccgtgaacccgaacaatgataacgatcacaattaccacattaacccaaatcaaaatcatcatatcattttggaatttcttcgtggcgtttcgcgcaattatcatatgaacccatgaattttcttatttgtcttctttttgtttgttattgttagggccccgacttttagtgacgaaaaatcccaaaatagttaactaaaatagtgacgaaaaagtgccaaatagtgacataatttttagccaaaaattgagtaaaattaatttttattcactgatttcagttgcaaatgaggtacataagtactcaacatttttaaatcaaaatttgcaaagaaaaaaaaattttgggggaaaattttaagaaaattttccaattcttagtggattttttgaaaaaaaattttaggtcgattcttaagggtgtattttttgtttttattgcatttttgttaaggaattttgccaaaaaatgtcgaaaaagtgaattttcactattttaagtgacaaaacgccaaaatagtgatttttagtgacgaaaaatgacgtccaactgaaaaaattttttacgcggaaatgcgttttttgagctcctttcttcaaaacaattgagcaaaaaaaaagttttttcactaaaagtcggggccctagttattgttatttacatttttatgaaaagttttaatttttaaaaattgaaatcgatcttggattcacaattttttaattttggcttggcgccaaaacggcagcgccaaaacgaccctgtcgccaaaacggcgtcgccaaaacagcggcgccaaaacggcggcgccaaaacgatacagactcagtgtgtgggtaacatgtgatttcgtcagaagtgatttcgtcagtaagtgatttcgtcagtaagggatttcgtcatgataaggaatttttttacaaaaaaaacttaaataattcataaattcgttgaaatttattaaacaaatatgtaaattcaatataattttatttgctcaattgtaaaccttggttttttcggccggtcaattatattttaaataattatatgcgtgcctcgtctttgctacttttatttcatttgcatatttttatttctagatgatggccacccattatcattctgcactaacctcaaaatttcttttaaattttttaccagggatggagcgcgatagcgggattttttctgcgacccgtgatttgcgactgcggcaatttttagtccgcgcttcaccccctgtttcttagtaataattttatattatgagttgttgttattggtcttacaattagtcagttttgtccgcgaatcgaatcgttttgcgtcgtcagccgatcacttgtggaggctacttgtacctttttagtagttgaatttcacgcagcccagcagctgacagaataagcgggtaacattaaaagagtaaatcaacattctttggacaagaccaatttggtaatacttgtagattttgcaaatcgtgatctctttagaatatttacaggcttgtatcactcgaatttttgatttttaaataatatttggataggtatacgtatttaagaataaattttcactgacgaaatcactcactgacgaaatcacttactgacgaaatcacttactgacgaaatcactcactgacgaaatcactcactgacgaaatcaccgggaaccagtgtgtgtatgtgtccgtttttgaatttgtgtggcgatttgtttagtttttgcgttaaaaatgatttgaaaaaagaaatgtttggttttgctttttcattttcgttttgtcagtttttgcaaaaagcacagttaaaataaatttctcttttttttgtttttaatgacaaaatagtttttgtatgtttattaatgataatgaaatcgcaatgaatgctttctattgcatttcttaagagaaaaagtttttgtttttgttattatcaaaaagcgtttggaaatgaatgctcttaacacttttgtaaagaaaaagaattgtttttgtatatgcaaagtcaatggaaatgatcttacacttagttttgatattgtattgaaaaagttttggttcgagaaattgtttgaccttgaaatggagttcttttgtttttgtaattaaagcggatgtcaattatgcctcctttaatggatacggttttaattggatggatttatcgcacttattgtttgttttgacaaaaataagtttcttttaacgatataaggtcagtttatttgttctttttttgtatgtagatgtttatgtaaaaggaattattaaaatgtaagagaacaagtatttataatgaaaaggattttctacgcaaattgtatttcataatagaaatacgtttttaaaattccaaaattatgctgaacaggtctgaattaagtcccgtgattgacatgccgatgaatccgtaaaattgagttcattgtttggaatagtgaaggattgagtcctcggtgattggaatggcggagaactgagtcctcggttattacgatgccgaagaatccgtgaaaagtgaaggattgagtcccagtgattggaatgctggtgggattgagtcccgggaataggaatgatggagaattgagtcccggtgattggaatatcgcagaattgagtctcgatgattgcgatgccgaaggaccaggtgaggttaggtcccagtgattggaatgcaagagaattgagtcccagtgattgaaatgctggagggttgagtcccagtgattgaaatgcaggagaatgagtcacggtgattggaatgcataaaaactgagtccgggtgattgaaacgcaggagaatagagtcccagtgattgaagtcctggagatttgagtccctgtgattgaaatgcaagagaattgagtcccagtgattggaatgcaggggaattgagtctcggtggttgcgataccgaagaatcaggtgaggttcggtcccagcgattggaatgatggtgagttgagtcccggtgattggaatgctggagaattgagtcccagtgactggaatgttggagagctgagtcccggtgattggaatgcaggagaacagagtcccagtgactggaatgctggtgggattgagtcccgggaattggaatgatggagaattgagtcccagtgattggaatgtcgcagaattgagttccggtgattggaatttcgcagaattgagtctcgatgattgcgatgccgaaggaccaggtgaggttaggtcccagtgattggaatgcaagagaattgaccagtgattgaaatgcaggagaatgagtcccggtgattggaatgcataaaaactgagtccgggtgattgaaacgcaggagaatagagtcccagtgattgaagtcctggagaattgagtcccggtgattgaaatgctggtgtcttgagtccctgtgattgaaatgcataaaaactgagtcccagtgattgaagtcctggagaattaagtcccggtgattgaaatgctggtgtgttgagtcccagtgattgaaatgcaagagaattgagtcccagtgattgaaatgctggagggttgagtcccagtgattgaaatgcaggagaattgagtcccagtgattggaatgccgaaggaccaggtgaggttaggtcccagtgattggaatgcaagagaattgagtcccagtgattgaaatgctggagggttgagtcccagtgattgaaatgcaggagaattgagtcccagtgattggaatgccgaaggaccaggtgaggttaggtcccagtgattggaatgcaagagaattgagtaccagtgattgaaatgctggtgtgttgagtccccagtgattgaaatgcaagagaattgagtcccagt

SEQ ID NO: 1250 - DNA, 6022 bp, Heterodera glycines
cccccccccctgtcccacaaaattttttgcaaaagcgcggcgcaaaaaaatgcgtttttaaagcagaaaaaagtcgtcgcaaatgaggaaaatgatcagccgaaacaaaaaaaggttggaaaaatccattccgatgacaaatacaagccattaaataaatattaactatttttcattgtatataataaaaaattttaaatgtccttgggtttcatgaatttttcccattatgtccttgcaaatcggcaacccgtccttgaaacggagcatggacgatggcagccctgcattaatttattcacgggagaagatcataagaaaaatgcccaattggaataatgagtcagcatctccattatcaaatcagcagcagattatttggccattcttcgaccaccaccaaatcgcaaatgttttcatgcatttttggttttacatttttgaaaaaatcgaatttcgtttgtcttctttcggttaaacaaatccgggccatattgatgataattggtattttaaagtgagtgactgagagtgaaatcgaattgaatcgggccaagaaaaccgggaaattcaagttttaataaggcaaaatcaagagtcacgacttcggcaatgattaaaatgactaggaaatgtcggctctaatcaatagtatggtgtcagaatgtgtgccgttcttaccagtcgcggctttcgcatcacgtccacggggacgccgcgaaaagcggccaactatttaacatttttgaaaaaaaaactcgaatttgtttatttctggggccctactgatgctaatttacgactccaaactcaaattttcgctatccgaagaactgattcctacatattttgaacaaaaaagtcacaaaatttcaggagagctctctctgtacacattgaaaaacgaaaaccattagtcttacattgtttattcacccacacacacacacatcgacatacaaatacatacattcaaatatgcaattaattgaaatgacaacagtttttgggggattgatcatgtgaacgggggtataatacaatacaacaattggggggtcagacgatccgatttctgcacacgcatcgttcttcgggctggctcttctgctgctgatgacatgttgcactagttctgcgatcctttcgcctgtcgcttcagccagtcgtacaccgcgcccatggagtatcggttgttgcgctccgggtcccagatgtgctgcatgacgaactcgacgaacttcggaggcgcgtcgtggggaaattccagccggaatccgtttgtcacctgcaaaaggggggaaacgattaaaaatggagtttttttggatttaactcacctctgccatgatctcgctcccttgcaagtgtgcgaacggcgtctcgccattgttgaagacttcccagcacagcacgccgaaggcccacgtgtcgtccttcatggtgaagcggtggtccctcagagaattcggcgacatccatttgacgggcagttttgcgcctctctcgatttgctttgaaagtgccttggtcgccaggccgaagtccgagattttcacctgtggggaaaaatgaacaaatttagaagtttcatgacaaaaaaaatttttttttgatgcttttcacccaccactccgttcgtgtagaggcagttcctggcagcgacgtcgcaatggatgatgcccttcgagtggatgtggtccagtccgccagctgcgccgagacacatgtagagtttgacccgcgcgctccgccgctgctgcttcaagtagttggtgaggctgccgtccgacgccagctccatgacgatcatcaggggctcctggccaaccgcgacgccgtagaactggatgacattggggtgtctgagctgccgcatgactcgcgcctcgttcatgaattccaagatcttttaaaaaacggagcaatgtttaatatggacacagcttccccccccttcctcacttgctctttggtgctcgtctgagacacctctttgatggccaccgtcgctcgagtcccctgctgatccacgtagacgccactcttgacgatcccgaacgtgccgcggccaagttcattgttcaggatgattgaagtgtgcgacagctcccagtgcgcgcggggcacggccctgatgagagcgacgtgttgtttctgaaaaaagggaaaatgaaaaaataataagattcaagctgtttgattacggtggtgacggaagctccggtgcgcaggtagtggtcgacgaatcgttcgattgttcggaagcccttgtcgcagttgtccaaggtgtacatcccgttgtgacggcggaagatgacgtggttgaccagtcctccgacgttcacagacaatgcaaagacgcgctctgtgcccgaagtttcttctgtcatgcgcaccaggaagtccccgtcgttcggcagcagctccactacgtcctcgcgcggcagcttaatgttgaaaacaaaaattaaaatgtggagtgggggggggggggggacgtgctcctaccagtccgtggtagtagacttccattgaagtccgcttcgtgtgtgatgaagtgttgtagacgatggacgataataataataataatataatatgagggcgatgaagaattatgtgaggaaaagtgaggaaatgtcgcccttttatacaactttttttcccttaatttcgaaatttttttgcttgtctatataaagggagggattgcaaaatttgctttcattcattgcgcccgtcaaattttaattcttctattatgcgaaagatcgtctacttcaaactgttgcaaattgtgctcagtttggccttcatgtggcaacttctttcccttcaccaattctgcggcacttttgtctctccaaaggtgttgcttttgctttgacaattcatttgaatttaatttattgttccatgcttttcaggccttcctccatgacatctcaggtggccattgcaaacgcttcacgttcatcggaaaggactcaaagacgggcgaattcggcgcagtgttcgacgagcgcaagtggcacaaccaactgttcatgatcagcaccaatggccaaccaatcgaggaacagcaacagaaattcatggacgaattggccgagaaattgccccccgctggacgccactgtattccgataaccgtaagcaaaagctaatcacaacaaatacatgcaaaaataatcccattttgttctttcagctctcgccttttttctggactgagaaagacagaaatgtgctcgactacgttatggaccttttttccggccaactgctcatcgcaatgtgctcgctgctcactcttggcgtcggcttcatccgagtgttacgctctgcggcagaatatgaagtgagttcgatgcgtgaacacagacagcacatcagcccgacaaaaacgtgaccaaattgcttttcagtcgaaatccgagcaattttttgatcaaactgtgatcagtttttcttttgcgtgaccaaattgcttttcagctgaaatccgagcgattttttgatcaaactgtgatcagtttttgtcgtgttgcatgttgtcaaaattgctttgtttgccattgtgtctgtttctaatttgtttttcatttttaagttctacgactgttgcactgccttctattccgtcttctgctggagtgcctctgcttggttctcgtcgtgtttgctgctctattggacgccttcttggtcttgcatcaacttccgtgcggatgacacaaatgtgccgttggtcactttggtgagttttgccgtgcttttcccatttgattctacgtttttcaattgctgtctttcaggtgttcagcatcgtcatggtgtgtacgttcgtcttcgagattttcttcaacaattcgttgctgaaaaaccggcccgtgaatgcttcagtcgccgcagccgatcagaaattgcgcaatgatgtcgccaaggaatgtgccaatgtcgtcattcatcgacagcagcagaagaacggaagtgccatcatgcagacttaagcagaggacgagtggactgaagaatgatgctggtgccaacaaaacagtcaatgcgatgaaacgatatatgtaaagcataatatgtatttctctgctgtattccattgtatattccattatatcgctacatgtgaatgcattgtcttttatgcataaactcacacaggattcggatttatcaatgtttttttgtcagatttggaccatccaaatcagaatatttctgaaattcaaaacatattgcacactgttgcttttttgtatactgaatttttgctggctttctctagcttttaagtgccgtttaggcccgtataaatgtggcaaatgtttgctctgactaatacctatgcattattttattcgtccaagtggatgattaaatgaaaactaaaattaatttaacaatattattgtagaatttgtcaattaaattttgtattcacgggagaaaatacataagaaatgtccgtttgaccaccaaactgcaaactcccgctctttcattctccgatcagttttatttggttctagagcctctctgatcagtgatcatcgccgatcggagagtgaccggcggtcatccccctttggtcggacattgttgattgttgttgtccctctcctcctccgccgttttgctgctcatattttctaatgaattccatcgcttccctttcggctgcttgtgcgtcttcaactgtctgaaatttatcaaaatggatcgattgtcttttcatatgccgaaagtgtctttttgccataaaactggcgccacatatattcgtcaacatatccaggcagtaaattgcgctgcgtgcctgacatggctttgttcttcattttcaagttcttccaaaaattttccacgtggtttgtatgtgcaccggttattgggtccacaaaattctgcacatggttgacagactggtgaaatcggagtgagtgacgaccctctgatcagagtgagtgtcgtagatcaaccgacccacccatgtgctgtgctcaatagccatcagcagcacggagtagtcgatgtgctcgccgatcagattcactcggcccgggcatctgatcagccattgcgggtcgcagttgtcaaaccgttggcggaacagacggacaacggcggacgatgggccgtcgtcgatgcattttgaccgggcaacggaagaccatttttattggaagggacaaatcgattggcaaaaaataaaatgcccacaatttgatggaagtttggaaaagagtgatcagaaaagggcagtgttataatcagaatgtctgtctttgaaagagaggcattggacaaggacgggaattcggcacggcatttcccgggtcactcaaagccccgcaagtgatttgaaaacctaaagcccaatctgccgatttaattgaatgaaattgatgtcaaaatttccttttttctcgtattttcagtgccaatttctcacaaattcccgactttccaacgctttgaacgacacataattaaccttcgaaattaaggaattatttattggaatttaaataagaataaattatggttttcggtgcaaattggatgatttttcttctcccacaaatggaaatttggtgaatcgatttgtcaacaaaaggtccttcactttcgtttccctccgccctttccttctccgtaattattaattaatttaattgcagtgagtaactaaaaggcaaatattacactcattaattgaatagtttttgaatttttaattggaaatcgattggtggtgcaaaaagtggtaatttgtatgacataatcgaccgatgaataatgaaatcttatataataaagttgagtgtgtgtgggaatcggtcgttttggcgccgccgttttggcgacgccgttttggcgccgccgttttggcgacagggtcgttttggcgccaaaaaatcagagacgcagaaataagcggcagacaagcgcctcttcaatttggtgcagaattacattccgtgaacccgaacaatgataa

SEQ ID NO: 1251 - DNA, 1084 bp, Heterodera glycines
cagtactccctttcactgtgtcccctttttacctcctcctcttagtgccttcgtccgctttttcttcttcgtccatttccattggctgcatttcgtcgtcctcttcatcaatgatgaaatggaaagaatgttcgccacgattatcaatggtcactccactttcgctgcgctcattttcacaatctgtaactgatatctgaaaaaagtaaaaattaaaaatttaaataattaaaaataatgccataattaaaataattaattaattttctaaaatttaggcaaattaacaaaatgatcatattctcgagaaagataaaacttagttttttgcttaaaaataatatttcaagaaaaattgaaatgaaaataaattttaaaattaaaaaataaattcaatataataattttaaaaaatatttcccctcacaaattaattttaaaaatattttgatttgaagttaaattttatttaatacataaaatttttgcttcctttaagtgatataaaatactaataaattttctccccatataaatcaaaataccttatttaatttaaaatttaaaattttttttttacaaacacacattttaattatttaaatgattttcaaaattaataaaaataatcccccctttttttacaaaaacatttttaattatttaattaatttaaaaataatattaaaaataattcctcccggccccccgtgtttacccattttttacaaaaactattttgatttaattaattaattaattaaaaattaataattataaaaatcccccccccttacatccgccgcatctgtcgcgtccatttgcatcaccaaaatgtcgtatttcgtgctctcctcctccgtttcggcggccaacaaaattagtgcgctgtgcgcagtgaatgtgcgaaatgttttcgccgcggcttccgtttggtcggcatggccatgccgttgaacttcaacgtaatatacttggccatcctctgccctcgggccaatgaacagcgtgaaaaaggtggggaatctcagctcgtactgctccccattccggatggccaccttccccaccagctcgggctggt

SEQ ID NO: 1252 - DNA, 4050 bp, Heterodera glycines
cccagaaaatgtgtcaggaatacagtagtacataaaataaagtacagcagcattatgtattgtattacaaacagtcaaaaccgtataaaaagttcgttctgaatttgtttttttaagcttcaaaaaagaattggaaaaaatttatgaaatttaccgaattcctaaaaataagtgtactgtaaatggcttcttgtaagcttattcgcataccaatccacgatcatgatttccgctaataacaaaataataatactaccgtatctcttttttcaagaaattctggttcactgacgcattttccgatcacgaaagttttgtgcaaaaattaccatagactaaaaaataaggacaatggactaaaataaggacgacgcatctgagaaataaggacaaattgcatcccctaaaaaacacctcctggttgtcgtctgcgcaatacacgtcgacccggtacaacacttcggccttcttccggtcgctggtgaatgaaaatgccgccgcggccggagccaaattcggcaaaatgaccaatttgaaataattggcaaacgtaatactgaacttttgcatggtacggccaaccaagtttgctggcgagtgggtagtgaacggcttctgtgaaaaagtgccacaaaatgatccgtgataaaaaaaggggttgtgtgccaaaacggaccgggtcaaaacaggacaataaccaaacaaattgtgccaaaagggaaaactgtgccaacgcggtaaaaaatgacagaatggaaagctgtgctaaaacgggaaagctgtgctaaaatgagaaaactgtgccaaaaccggaaaactgtgccaaaacgagaaaactatggcataataggaaaactatgccaaagaagggaaactgtgccaaaacaggaaaaatgtggaacatgggaaaactatgccaaaataggaaaactgtgccaaaatgggacagtagcaaaatgactcatgctacgccaaatcagtaggtaccatttattgggatgccacccgtggctcagtcgttcgagattttagcacggcttacaaagaaagatccgtgggttcgactcccaccgggcgccgccgcatttttttatttttcttatcaacaaatcaaaacacacagccttttcctcacccatgtgtaatagagatgtttactgtccgccacttttgtctgctcattgtgtacaatggaaatggcaattttgtacggtcgccggcacttttccgcgtccgtgccaacattgataatgtactgaccatcgcccattaattccgcaccacgtgtagtgaagagcggcttttcattggagttgggagcaggacagctggtctcaaactgtgaaaaaaggtgcgggagggaattttggttatttttaatttaaaaattttggaaaaatgccggcagagatatatttttaatttttaatgaaaatttttgagaaatttatgtggcaatagagtcaaaaatgcttcttttctttttttgcctggcatttctaccaggtatggcattccggggccccaaaaattttccggaagtcggaaatcggaattccgaccccaaaaacctcggaaatcggaactcagaattctgtgccatccctgatttctaccaaaaaggacattttttcatccgattaacagtaaaccgcggcattcggtaattgccggctactgtaagataaaaattcgtaaaattttgctttaaaatttactgggcagatcaggctcagaggagaccatacaaaaaaaaaatcccgtgtcaaaaaactaatcaaaactaattttgtttatatatttcgattgttttaaagtttttttcgaataaggacaaatttttaaaccaaaaacttttatcaagaaaaaatgattaaattttggggaccaattttgtgaacattttttgtttcaattcttaggcgtgtattttatgaaattttttcagctcttctcaggggtatatttttcgttttaattgcatttttgttaaggatttttccaaaaatcctaaaaaaaggcgccaaaaatggcgaaataggcacaaaaacaggcatttcggcattaagcacaaaaagtccaaaataggcaaagtttggcattataaaagtcatcgtagacaccccaaagcggaaaatgcgtttttcgtgcttttctgtgcgtattaattgcgctgaaattttaggcatttgcctaaaaaacgaagccctaattatttttattattaaaaagaattttacaatgtattcgagttggtcatctccagcaagggacggagtcatcttaattttcaaataatttgatgggctgtcagcaccagcagaacggcagaagaagaatgtggcgattggcacaagacaaaggagaacaacaaaagccgtcatcatttagcaattaattaaagaattcaattaaacttttaaaaaggcaaaactcattagtgaaaattaattgcttctttggaaaatgagactgttttgctctgctttttatgtgtttgtagagagtatttaatgaaaattttcgatcaagtttaaagttttttatgaacttttatcctacatacgattgggcatgtctccgcttcggagcggatacacccgcatatgatttgcacaagggaaggggtgtcatatgtgacggcatatacgtagaaaagggagttaattgaaacgcgcatatgattaatcataggaaaagtcgtatgccgcgtatgacggcgtcgcagatatgatatcatatcggcgatatgatatcatatcggcgatatgataccatggcacaattgaaacacgcctatgacactatgacacgtcatatcatacgccgcatatgacttttggggtggtttaattgaaatagaaattttgtgtatgatatgacaccgtgtcatagagtcatatcgcagatatgacccgaattgaaataggccccaggaaacggagaacgagaccggaagcgaaaaaccgggaaatttcctgagttcgaaaaccgggaaccccgcgcatccttcgcatctatgaaaaagataaaataatacgatagtggtgttcgagagggtcatcggtctaagaacccgactcgagaaaactgtcacggcttttgtcggtctcgagtcgcaagtttttggccttaaaacatcactcagataatagttgctgagtgtaaaaagtcagtctgttttgtgactggttactgtacgctaacagttttggactcaaaaagtggtaaattttgctaaatttagacattttaaaaggtaattgggcgcaaaaaaaggagattattttatagcttttttacgaaaaaaagccagtgaaaattaattttgaacttttaaaaaatgcgcaaaatttcataattttttaaacccgattttttaatcgtaaaaagggaataaaccattttctacccatcttttaaaataaattttattaaaaaaaaattcagattcattgaaatattataatttagtggcgacattgtatgtgtatgtgcgcgttggcaatggattttttgatgacgaaattaatattaaaaattcgcaaaaatcaatagaagttgtaaatttgtatttgttgacaagcctaaaaattattcaattatatatttatgttatattatataatttcgaatattataatttatataattaaacaaacaatggcatgaaaaaagagttcctcgaatgtaattgaaatttattgtaataaacccatcttctacaaagctatgggagaactgtgttaattaacttcaaacttaaaacatgtgaagcaaactttaataaaaacagagaatttttctgaatcagattggcttttaataagaaccgagttttctgagctttttttcttcacaaatttaagcctctcaaaagcaatggttttgtaggcgcattttgtaggcaaaacgattaggaaatattaaggctaataggaataggcacgtacaatggctttgttttgaaaccaattccttcaaaattttggtgagggttctgagaataagaaagctaattcccaaatgggcgcgcaaaagttatgtagg

SEQ ID NO: 1253 - DNA, 1460 bp, Heterodera glycines
  unsure (1)..(1460): unsure at all n locations
gggtccgggttcggaatttagcaaatccgagttaaggtttgtaatcagcnncctcggaaaaccccctaaaactgttttgagcccaaaataaaaaaaaaaattaaaaattagggacacccattcttcaggattgccctaaattgtacatcaaacccacaaatacatacatatataaaccagacatggtaatgaactacttgcatttatgccctcattttttgttgctattttcctccattttgttttctctgttcttttccatccaaaaatgaatgtacctattatgcattttgtgctatttcccctcttttcctcttctgtgagcacttttctcgtaaggatttttggttggaaaattgacgcattttcttttacagaaaatttagtaaaaaattttttattctgaaaatgactcttatccctcgtcagtggatctgccaaggcgcaggctgcaacgacacaagcgaagaatacattccggacgtacagcaatggatgaatggtcggtgttgatgtgatcaattgattcgaatttcttttttcgaatcggatacggaatttataaaaataggcctcgaattacgcacgcattcaaaaagaattcctatttttaaaagttggaacaactttccctgctgatcacgcgaataatgccaacccatttcgacttattcaaaaacccggatccgaattcgaagtaaaagtcgtccatttcgactaattcaaagccccgaattcgaatgaaatgagttggtaattcaaatttcctcccattttcagcgattggtgacatttcgctgtggatgctgaccggcgctgctgcaatgaccggccttgtcatctgcttaagcctactccatctgattttcgtcagcactttgatcagtgacgagaaaatacgctccgaactctattgggtggtgctaatgcctccggtgtgtgcaattaattaaataatttgtctaattagtaattaataccacccccccccccctctcttcaggtgatcgtcgtttgtggcttcaccggcatggttttgccgagggcggcacttttcctatacgcaattgcgctcgtctattacatgatctgcatttttgtgctcgtctgtttgatgaacacggtcaattcaactcattaatgctaattggttttcaatttggtgccaatttcagctgcacggttctcgcaaatcgatgtgcgaaaaactgatggccaaaggcgagcgaatttcgatcagaatttatccgtttgcttgttggttgatctgcttcgaggattttctgccgacagagtgcgttttacatggacattgagagagaaaactgatcagagaatagaccaaatgttttgaaagtgatcggaactgatcaaagaatggttgaaattgatcagaaaagtgctcccattgtttctctgatctaagattcccctcgggaatgaaaaaaactaattttttt

SEQ ID NO: 1254 - DNA, 2095 bp, Heterodera glycines
acggatgcgtcagcgatgtgaagccggaagtggtgccgaggacgggggatgaactgtgggatgacgacgacgttcagcagcagcagcatttgagaagtgatgaatcagagtgataagcaaaatgttgtgatcgaggaaaagtgatcgaaatttgttttattttttcgccaaatttactcataattaaaaagaccattatttaaaaaaagaatgtggatgctgtttttcgatattctcgtagttaaggctatgtgttcgattgactaaaaccctgaacaaatcgccagtcaaattttctatcacttaacttgaagtggctaaaaatgggcgttttatgtattctgagtagtactcggagttttcgaagatcctgaacacgattcttacatctatttcgaatatcgaacccgtactcgaacaaaaattcgatttcaatttcaaaatatttcacaataatgcactaagtaaaatctgacaatgtttattgtgcaaaagattgacggattgtgaaattttaggaaagatggaccatccaacaatgggtggccgacggtgtttgggaaatttgaatttttgactttttgttcggatcctggattcggaattggtcgaaatggataccgaattcgtgatcagtgacccctaaaaccgttgaaaattgaaaaaataaaaatgctcgtttttgggatataatcttttaaagaaattgaaccaattgtaaaatttccccggatttttctgtcggcaccgccggatcgcatttctttgtttaatttgggtctaaatatgcttcaaaaagtggcattcatttttttggccaattccgaacctcggacccgaattcgaacaaagtcgagaattcaaattttccagaatttacttttatgcttgagtctctaaagtaatgatcctttttaaatatttcaatgatttgtgactacatttagacaagtgttattatgacttaaaaattgcaattattaaaaaaaacgtgtggtaccatctaaacacggcgattcaattttgggctcccagtgcaaataagtttattatttatttagtaatcagaacgccaaaactttgcaaaacttgaatttatttgagacaagagccgatctcgagttaaaaacataactttcataaaataaacagggatccgatagagggggtcaaaatattggcctatgcaaaatttcaaaaagttaccaatagggaaaatttttttccaagggcaaacatttcaataattttaattcttttttagccaagtccacaatttaaggtcaaaccaaataaaatttacaatattctccagaattttcccttcaaaatgagcataaaatggttttatttgctctagtattcaccaagttataagctaagaaaatttcataaaattgtcgatgttgtacgtacaacttttttctgagatgtaaaattgcttagcattcgcttagaaaaagattccccttttcaaaatctttttttagataccaaatttgttcagtttagttgggaatgaagcgagttatggcagatcaaaataaaaaatacaattacgccaaatgcgctatttggcgttatgagtaattttgtctaacactgggcttgacccatagtgcacaaataattctgcctcgccgtgtaaactatcctttgaccgggaattcccgtcccggtcccgctctattctatttttaccgtctatgcatggacaggaaaataatacttgattaatttgattgaaacagcagccaaaatggggcctccccatccccgccctttttgactaaataatccgtaaaccaatttttgcgttaaaaaaatctgaccggcgatttatgacacatatgagatattgaaaaacaatccacagcttttttaataattgccttctaaattacgagctttggcgaaaaataaacaaaacgaaatttcgatcactttttcccgatcaccatctgtatgttcttcaaccgctacacttgaatatgatgaatgtccaatccctgcaaaaaataaaataactttaatatgatggtgcaaaataatagcatagaaagcctcaattaaatcatcctgacaactaactaaa

SEQ ID NO: 1255 - DNA, 1402 bp, Heterodera glycines
atcaattatactatctaattggaatgatgtgccattcaaacaacaaaaaaagcccaatttattgttatccgccggactctttttggttcggaatgagcggattccggacattttaaaaaaagccgaaccgaaatagtcgacgaagggggggggggggtcgtaacgaaaaggaaaaagaggaaaacaatcaaattttgaacaaatttacatggacggacggatccttttcaaaaagtaggcgtcgatcccccctttatttgacatatgattgaagacacctttaatagaatgggaaaatcgcttccatttcaatgggttaattagtagtaaataccccctccccctggcactgtccgctctcaccaagttgatgtaaacgcgcgggtggcccaactcgcggtggcccccgtcgcagcgcaccacgcgctcctcgctgggcacgggcgccagctcggcgatcaaatgggccgcattatgcggattcacttgcttcggcgtatactcgaaacgggcattgcgccagtcggttttgtcccaggtctggaaaatgggtgcggttttaaagtgaaatggtggattacttaaagcccgactaagaacgcgttcgccctggtaccaaccggttttgccaagcaaatgctaccaacattcgatagccccaataaatctctattcaaaatttcagattccgttacatttcaaaaaaaaaaagccaggaatatttaatttgggtgcttgtagaaaaaagtacggctctaatgcactttatgagtccaaacaattgacaatgccgggtttttatacaataacttttctatctttttggtatcattcgaaagcacaaagtctgaataatgtaataatacgagaaaacaagagaattctaacatttcaagaaagttacaaacgaaaataatcagcaattacttaattaattaaatcttttcaaagcaatttttggttcaagcaattatacaaaaacgtttgtttttaatagggcgcttgaacggcatcccctcggattacaggaaaaaatgtcgaaaaaataaaaccgaaagcgtagatagagatgctggccattttttaaatttcggcaggaccacattcccgaaaagttattaatagttgtcacattgactcctcccccgtccgcctcaccatcggtgtggtcgcctgcacgtccatgtacaagggacgggcggtggcggcactgctggcatgacgacaactcgccgcaatctccgagggcgtccaatggcaccgcaaaaacagctgtgacaagcgacgcatgagaagagatccgtccgtcggctttcagatacaaatttaattaaaaccgcgctggcaaaacaaacaattcaggggggaacaaaaaatggggcataaatttcaaatagtatga

SEQ ID NO: 1256 - DNA, 2037 bp, Heterodera glycines
  unsure (1)..(2037): unsure at all n locations
aaaattccagtttatgattctttcttaaaagttttaaattttgttattaatgcccagaaagttttattcatccattgaaattagtaccgatcggaaatgacgaaatgcgtgcacttttctgcaaagaatcaaggggtgtactcctttaaaaaaatgccaagcacgtggcactgtatggttagaaatattcggcgaaatacacttgataaaaaaatgtaattacattgagctaggggcagtacaaatacagtaggatttcatttgtgggggttgcttttcattaaaaaattccagtttatgattttttcctaaagtgttttaaattttatttaatgcccagaaagttttaattcatccattgaaattagtaccgatcggaaatgacgaaatgcgtgcacttttctgcaaagaatcagggggtgtactcctttaaaaaaaatgccaagcacgtggcactgtatggttagaaatattcggcgaaatacacttgataaaaaaatgtaattacattgaactaggggcagtacaaatacagtaggatttaatttgtgggtgttgcttttcgttaaaaaattccagtttatgattcttttcttaaaatgttttaaattttgttatttaatgcccagaaagttttaattcatccattgaaattagtaccgatcggaaatgacgaaatgcgtgcacttttctgcaaagaatcaaggggtgtactcctttaaaaaaaatgccaagcacgtggcactgtatggttagaaatattcggcgaaatacacttgataaaaaaatgtaattacattgaactaggggcagtacaaatacagtaggatttaatttgtgggggttgcttttcgttaaaaaattccagtttatgattcttttcttaaaatgttttaaattttgttatttaatgcccagaaagttttgtttcatccattgaaattagtaccgatcggaaatgacgaaatgcgtgcacttttctgcaaagaatcagggggtgtactcctttaaaaaaaatgccaagcacgtggcactgtatggttagaaatattcggcgaaatacacttaataaaaaaatgtaattacattgaactaggggcagtacaaatacagtaggatttaatttgtgggggttgccgcaaatgtcgggcattcccttacatccaagtgaaaaaggggaaataaaattaaaggaaaacggatggaaaatgggagagaaaagggcggggggggggggaagagagaaaagaaaagaatgaaaagggaaaaaatgggaaaaagaaaaaaggtagaaaaagggatacaaggaaaagaaaaagaggaaaagggagaaaaaggaaaaaggtaaaggaaaagagataaaaagaaaagaatgaaaagggaaaagagaaaagagaggaaagtaatcactagggctgccaaaaatatgtacaaaaagtggtccaaatatgtacataaatatgtaagaaaaaaccccaaatatgtaaataaattttttttaatggtattttttgggaaagaaaatccccgtaaagtatgaaatagccacaaaatgacataaaaattactttttgtggtatttttaggcaacattttcaaacttattttttctttataaattttcaaaatatgtaaaaaaatgaaaatatgtacaaaaatatttgccgaaattttggatttttttttgaggatttccaaaaatttccgtaaaaaatactcaaaatatgtaaaaaatgaaaatatatatgaaaaaaatccaaaatatgtacaaatatgtaagaaaatcccgaaatatgtgaaaaatgggtggttgaggagcaaaaaacttttttcccgctgctgggtaaaaactgcacattttcactaaaaactacccaattttggccgttttaaggcaaaaaacttgcaaaaatagtggaaaatggaggttcggcggtgccgataggcgccgccgggaaacatttttggaaatttgagtgctatttgttacganaattgcctattaaattttcgtttgngggggggggaattcgaaaa

SEQ ID NO: 1257 - DNA, 1471 bp, Heterodera glycines
  unsure (1)..(1471): unsure at all n locations
aaaaatgaaactgatcagattcgatcaganaattannagtgaaaggaagacaattgannagcataganaatgaaattatntaattaaaaaaacccgtctaattacacggcaattaattagcaaaaagccaattagtgaatgcattttttaatccactttttttttattcgattcataaatgagacatttcctaatcaaaatattttacacaacgattcatatttatagtgcaaatcactgaaaaacagcgcaacatttctgtatgaccgacgaatgaatgaccgctacacttgaatatgatgaatgtccaattcctgcaaaataaaattttaattagatggtgcaattatagcttagaaaccctcaatagaagccaaaccccactttgcttcgggcgggagaggggctaacatccggtcggggtcgttttcgtacgagcacaagtttttggctataacttttttctttgccaagcaaatccaacaatctttttatcattcaatagtcccaagagtcctttattaatctgcaaaattttgaaaaatttcgttaggttcaaaaaagttatgctcagaaaatttcaaaaaactgggtttctaaacatttttgaaccgtaacagaatttttcgaaagttggcaaattaatagaggactcttagagctatcgaatgataccaagattgttggatttggttgctaaagaaaaaaattataacaaaaaattgagctcgtatgaaacggcttggtccgctaacaaccccgaccctcaggcaaatattttaatatgctctgtaaaattcagccccgtttttcaattccatgccattcgttctgttcgccctgctcacctcggcctttgtcatgtgcacattgtaaaagcgttggccacagtaaccacaagcatgcgtgcccggcttgtccttaaaaagcacccaaaatgattatttagcaatgtataactttttggaatgatttgagtgccatccaaaaatcttaatttattgttaggagggacaaaacggcgccgcaaaaaaaatttatacataaaattaagaaaaaatatcaaaaaatttcagccagcctaattcgatttttttttgttctgcggcagcgttatgtcccagcattccaagtttccggactctttttgttcggaatgagcggattctggacataaaaaaagataaaccgaattatttaattttatttaccaaaattgcaatttcaatgacttaagaggcttttagagtagaaaatttcgttccggtttcaatgggttaattagtagtaaataccccctccccctggcactgtccgctctcaccaagttgatgtaaacgcgcgggtggcccaactcgcggtggcccccgtcacagcgcaccacgcgctcctcgctgggcacgggcgccagctcggcgatcaaatgggccgcaatgttcgggttcacttgcttcggcatgtactcgaaacg

SEQ ID NO: 1258 - DNA, 7263 bp, Heterodera glycines
tgttgtttttatgtgcacgcacccacttttgttcagaaggaacccaatgcgtcaaaacgaacgccttttgttttggcggcggccgctgctgctggtgttgacagtgaggggccaacagttgattgtaagttgccggtccgccgttttttattcttttttatgttgtttgttgacgatgacgacgacgacgacgacttgcgtttgttgttgttgttgttattcacaatctttcgataacgtttaaagtcaaacaggcctccaccacgaccacctctgccggcgcccccgtgattggtagtggcagcggctgcggtggaacgctgcctgctcagattgtccgccgccttgtccagcaagttcttaagtccggcacgtccctcctccgtcatagcctccttcacatttcgcccctcaagcatctgtgagagcacacgtgatccggtctccagtccctggcgaccaatcgccgcgcccgcctgtctaccaattggtaccaagaagcgaaggaagctgcgaaacattgagccaatcccgcccgctccgcgttgatagggaagtccggtgaagacggggtaagacgacgccgatccaccaccaccgccgccacccattgaactccctccaccactcatcaacatggtgtccatgcgcggcggcggttccgcaaagtgggaccagtccaccgccaatgggtcaaaatccacatgcatgtgtgtttctgtatgtgtcacagcaaattgcttcttttccacatctttcgtctatttatgtttttcgttttttggctctctttccaccatcaaaggtcaccaaacacgtgtgtgcggacaaaggcgctgacgagacggtcgggctcggtcctttgcgtctcaatgtgctgaatgatctggtgtagtgtccagccccggcaacggtgatgcaggaagtagatcacatgctttccgcagctggccgacctctcagactgcaggcagcgagcattgtgctgaacggtggtgaagtgtcggtccaagaagtgacgtatgtgctccgatgcgggtggccagtccgcaaaggagtcaaagtagtcagcactgtatggtgactgaacatagatggccacccagtgggtccccccaccggaagccttgtccatgttcaccaccatacagtgtggcatcggagaggaatgggacgggattcgatcacaagggaagcagccaacatactggtggcgagtgacatgacaacgtgacaaaattttgttaatctcatcgctgttcatttttattggacgcgcaaaaacaaataaatgtggtgtgaatgcaaaaaacagacaaacaatatatatgtgtgggtgttcaaaaatatggagttttccgaaaatgaagggtcaacgtgcaggtgccgtattgaaagggcatcagtgcgccggttggggttctgatctcaataaaaatttcggcaatctcttttgtgatcagctgatgatattgaacagcggtgtatgcctcttcaaccatgtcgtccggttgggcactccgaatgcaaaccattcgcagcactggcacgcacacgtcaccgatgatcaccggctcgatgagtccgggtgcgtacacgtagaaggatgagacgccgcccttcatgtccggctggtaacgagccacactcatcggtgcagacaggtggcgcatgtggaagccgagtatgtaggcaagttgctcggacagctccacccgtttgatccgtgccgggtcaatctgcagtcggaaccgttgctgctccacgtcgaagctgaagcggcaggacaggcgtgccttgcgatacgactgcacccacagctctagacccaagggtaaatgtttgttcaacaaattgcgctccgcctcttccattcgttgggcgacaagcgagtccaatgtgtgacgataatgggcattgaactgtgtccgtttccattcctctttctgttcattctgctgcatctgctgtaacatttcatcagattttggttgttgcatttgttgttcatcttcttcattacgtttggtctgatttcttggttgttgttgttgttgttcctccaacgaaagaagacgttccaccttctttttggcgcttgtctctgcctctgcggtaagctgatggtagctgagctggatttgacgcaagcggctggccagctcctcactgccctcacccagtgcgtggtgcaagctgttcagcagctgtgtaggatttcgcacattgctggccggcaccgggatgcgcacctgctcgccggtttgccattcgacgtggacaaactggtcttccgttgtgcccagtgagggccatgaatgcgggtacaacaacaccgccaaacccacactccattgtgagccgaactgaagtttgcgtggcaggcgtacccgaaaggagtttgtacggttgccctccacctgcgtgttagacggtaacacaatgtagaaggaggaggaggaagaggaggtcatttatacttgtaatccgtaccatttgacgtcgttctgctccgcttattatatgattgatgtggccggaatccagctgttatgcgcagctgaatagcccttccatttgacgaagcagtgctccgcaccgtcgcgccccctccgccttctcagcacacgttcaatgtcgtacacaggccccacggtagtagaagcagcagctcccgctttatcagcaatgggttcatctctttttgactgtagcggaggtggaggcggaagaacaaggcacaaatcctgcgcatagaaccagccggtgagcagttcaccgtcgtcatcccgtagcttgtaggtgatcggcagtcgtgaggtgcgtacttctgccaccgtgaacagttcgtcagtgaagcgaggcaggtagccctttttgaacacgtgcttgtgcttttcaatacgcacacggtttcccacacggaaagggggtcgggcgcgtgggctttgtcgctgctgttggccggcagctaatcgctccagctggttgcgtcgtacgcgctccgcgttgccaaaattaatgtcgttgggcctgagaccgaacaatgcacggttcggcgacccgttcagtgcagtcacaatgtgctgtatgacgcctgtccaacactttgcgccgcgatgtgtaaagtagcggtacagcctttccttaaatgtttgttacacatgatggacaacgaaagggaaaaaattgtcatttcgggtaaaccttgatgcttctgatggcacgctccgcaattccggcatgccactggggtgaggtgtgcatgcaatggtgttgcacctcttgatcgaccaaaaagcgttgcactggggcggcggtgaactctttgccctggtccgtcatcagcttccatggcacatagccaacccggcggaatattttctcaaaagcttgaacaatgtccgaggagcgcttgctcttcaacggctccacaaacagctgacggctcaatgtgtccgcgcacaccaacaggtacgcgtggccgcgattgtgccgcttcagcgctgtgaaatcggccagatccgcttgccaatcggtatgcagacctgacgcaagcgtcggcagacgacggaaacgacggacagcccgacggtgcagggtgtacacgcgctggcgggccaaataacggcgcacctcggcccgtctgatgtgtcgcccggggtgttgtcgacgtgcctcaagcagcagcggctccacactggtgaacgcggcattggaccgcgtgtccttgtacagctcatccaacaccttttcaaccaacagctcacgtttttgggcctgcagtgctgcattcttgttgttgctgttgactttgtttgtgcttttcacgcgtagttttctcattgtgcgagtgagtgttgtgtgtcaccaaagttggggcttgaacaaaagagcactaccgatccgcttctttccaaacgccgcctttttaaatgtgtgcagcagtagcgcggaagaggcgccgccgcttccgcgaattttccttccccttgatcttcttgtagcagtaatagcaacagcagcggcattactgcctttgcgtttggtcaatatgcccccacgtccaccaccaccaccaccaccaccaccatgtccctcaccactgatgctgctagtgctagaggtggggaacagcaggtgtgacagctgtgggtgctgcttagcgttagcgatgaacgtttggtagccgggcgggggcttctgccgatggtgttgtggttgttggacagatgtaaaatggtaggtgagtacggcttgcaaactgctgtttttgatcggacggtatgaaccatgcatgaacttgtacacctgctgaccatcaccgatgcccagcgtgcccgcgtgacgtgacgtgtagtcaagggcctgctgttttcgtcgctgctccgcctcacccaggcccttagctccggcaacaacgacggcgcctgttgatgatgatgtagatgcagctgctggctgttgttgttgttcttcttctttttctgctccagaagcggctgacgtatacgatgaggcggtggtggttcgtttccttttccctttttgtccagtaatgccggatttgtctttgtcttgccgccgctctggatgttgaggtgctgcggctgctgcagggggctatggggatactggcggagtcgaatgaacaccagcccgggcagggaccaccgctgttgtacgcctgcgatgctttgtcaaggagggaggtgaatgttgcagttgctgcggtagttgttgttgcaatgttttggccgcctccgtcagcgcatcacgcaacactcctttggaggccggatcattcggcagctgattgaggcggacaggtgccggtcgttcctgctcatctgccaacagctttttgaaccgtttgaactcctgctggtagtggatcaggcgttcatcgtcgttcatcaatgcacgcgttgctggctgctgtgcagtgcgcgccacgcgcgccatgcgtttcgcaacgtgttcaatcggtgttgtggtggtggtgggtgtaatacccaaagcatcggtagcagcagcacctggcgccttttgacacagggagcggtacatttcttccggcaccaacaacattcgggttgagtgcttcattctggtcatgagtgctgttagttgtggttgtgtccttcttgtcgaggttgatgtattgctactgctgctggtttttgatcagcttatcaaccactaggggcagaacgacgctggccaggaggccagccaacgctggcacacccctgcccgtttgttgtcttaacagcactcggcgcgccccgtgtccactccgggttcggacgagcgcacgcacgtgctgggcctgggcacgcagtccgtccaaatgctttccacgaagcggcacccgggagcgtaggatgttcaatgcactttccaccaggcacagcagttgctcaccagtcgcacttctgaccagctttcgataggcccgtccgcgtgccgatcgacacttgctcaacagtttgaagaaggcaagattgcgcgaaatgtatttgctcggccttggccctttgtgtttttgtggtgtttgttgttgtttttgtaatcgatctgttttgctgctgctgttgttgtggcgcctgacgcccctagtgttcttccgcattgaacatgcttgtcgttgctaccgtggctgctgatgcacgtggtgcgtacaccacggtcagctccccggggtatatatgcgttttgagacgcatcagaggtcgtgtggtggggtgcatgtcgatcaacagatagccaaacgggtccgctgttgcgtcatcataggcctccagaaaatggtgcagtgcacccgggcccgggaacagctgtatgcccagggagcgaacctgtagcgcccctgccgggttcctcagcaacaccaaatagtgcgcgttgttgcgcgcgatgcgcagctctcgtgtgaacagatgctgtgtgatcaacacaacgctgacgccccaattgtgggagccacgggtgaacaacagatcaaggaacggggcacgcatgccgaccatcaggtcatccaacaccaatagcagtctgccgccgcacgctttggctgcccgcttcaccgcctcctcatcgggaagcgcgtggcaggggcggacccagcgccgccgcggttgaccccccttgtactcctcctcctcctcctcccccgtctcagtttccagttgttgtagtcgcagcacgtcttcattcacttccccataacagtagagcacacccgaaatgtgtgcggggccaaccagggtgtccaggttggccaacattcgcaatacccatttcgttttgccactgcccgtacacccggacacacacattgtgaacggatgcttgaaaacagggggcacttgttgatggcggagaggttgctcttttgtctgctgctgcttcattatgccgtttagctcttgccccaaaataaaaacaaaagacatttgacacattatatatatatatatatatatatatacatatatacatattaaaaagcaactttacccccccccccccctcccgcacatctcgcatattaacatatataaaaaagtttttagcttccgagtttttgaataatcattcaatggacatgttccggttcaaagttcataacgctgtcaaagacaccgacgacgccgccgccgactctgctgcacacgatcaatgtcaacaacgccaacagcgcgaggttgcgtctcctcgcacaatgccgttgtcgttgttggttgaagagcaagctcatgtgtcagcagcagctgaggctgctgccgaggcagcgagtgctgttgaccaaaagatgtcggcagcgccaaatgacactcccgccatcactgacacgaaaattgattttatgactgatgaacaaacagtggcggcagcgccgccgcctctattcagtgagattgaaccgacgcagcagcagcagcagaaacaacaacaggtttgctctaaattggtgtcggttatttaattttttatcaagaagattcagtggcgtacagcggaaatcatcgcaccgaaagtggagctgtccgccgaggacaatggtgatgatgatgatgatgatgatgatgaggctggacaacaggtcaaacaggaggcggacagaaacggcatggatgcacatcattcaaattgtgcaaaagggccccttttgttcattgatgaacaggagaatgaggaggaggagagtgaggaagatgaggacatttcaacaacgcatcgaaggcaaggcatgactca

SEQ ID NO: 1259 - DNA, 6224 bp, Heterodera glycines
gttttcacatttttaccttaaggatcaatcttgaatttttttcgacatttacagcaagtttttggcatcttttcgacaaccgttggaagtcttcacaaaattaaaccacaggtaaaaaatgacatgcccagaaataaattattaatatttttgctttttaaatttgttgtttatgtgcattaccctcggcttcattagcatcaattccaaaaactctcacataattccataacggctcattaaacagttccatctcaattcgtgggttcaattcccaccacaggctgaccttttacacctccgccatccaccaaattcctacatgaggaacaaataaaattacaataatgagactgaatttttgaaaaaacccggagcctgaaccaggcccaagactatcgggatggtcaaggacagataggtctaaaataatgcagtttgaagagatggcaagtacatgagaattcagattcggatattgtgaactaaatcatctaaatgcttaaatataattaatgtttgaatagttttaattgaaacaaaaaagttataaaaattattttttgttaattaaaaagcaagttacccccccccccccctcccgcacatctcgcatattaacatatataaaaaagtttttagcttccgagtttttgaataatcattcaatggacatgttccggttcaaagttcataacgctgtcaaagacaccgacgacgccgccaccgactctgctgcaccacatgatcaatgtcaacaacgccaacagcgcgaggcgcctccccgcacaatgccgttgtccttgttggctgaagagcaaactcatgcgtcagcagcagctgaggctgctgccgaggcagcgagtgttgttgaccaacagatgtcggtagcgccaaatgacactcccgccattgctggcacgaaaattgattttatgactgatgaacaaacagtggcggcagcgccgccgcctctattcagtgagattgaaccgacgcaccagcagcagcaaaaacaacaacaggtttgctctaaattgatgtcggcaatttaattttttatcaagaagattcaggggggtacagcggaaatcaccacaccgaaagtggagctgtccgccgaggacaatggtgatgatgatgatgaggctggacaacaggtcaaacaagaggcggacaggaacagcatggatgcgcatcattcaaattgtgcaaaggggccccttttgttcattgatgaacaggagaatgaggaggaggatagtgaggaagatgagcacatttcaacaacgcatcgaaggcaaggcatggactcgtcatttgactacgaagacgacgatgatgatgatgacaatgacgatgatgatgatgatgaaatggaatcagtcagcggatgtgcggaatcagacaaatgtggtcactgtcaccacccacatcagctaccacgaaatgctttggaggtgctcaaaatgccgctcattgactacctgtgtgcgctgaaccatggatgcagcgtgggagagctgcaggccttgttcctgtctaagggcgcacatggtcgcatggtcacccatctgcagaagcgctgcctactgcgcactgtccatttgcgccccaccgagcgcaacatcacactacatgcacacaattttagtgcacgaagcgccagtctgacctttgcctgcggtgggtatctgaacctaacggtgagtctcatccgtttatcgcttaaacaatggacaaataaatataatgatggtccatcttcggcttcaggtacgtcaatattttttcgcaaaacatggcgttcggctgcgccatccaagtctgcccactctggtggaatttggaggtggaatgcatgcttcatactacccgcttgagtgcatccaggtgcacgtcgcggtgactgcaccggaggacgctgccagcaccacctccaccaccactaccaccaccaccgcatcaccaactgcgtgtgtccgcctcacaaactaagcacgggcacaatgaccgcaatcaatcaatcaatcaatcacattttttaaaagcccgttatttacgtcttttattgagaagataaacgcattattgtgaaatgccagagcaattagtgatcgtaaacagcacggctacgtttgctgtgtggcgcttaaacggaaacaatcactcaccgtcccagcagcaacagcagtgcttttcccttgcacagtttttggctttggcacgcaacggggtgtgcaccgagtacgcaccccaccgcttccacgccattgttatgcgcatgcgtagcggccctaggcagcaaagtagcgccaccaccgcgaccaccacccaccaccaccaccaccactgcactcatctttcgcagtggtcgcgtggtgctgaccggcattaggggtgtcccgcccaatcaaatccacgccctctgtggcaagcaagccaaaagggtttgccgacgagttggtgcggcactcaaatggggcggatttcccgcactggcgctctcactgagcgtcaacggggtggagatgcgcaatctggtcaccaccctgcacttgccctaccgactgaacattgaacagatggcacaacacttgtcatctcttggccaaaacggtgagagacgggtagggggaggggagggagcgaaagcaagactttggctgttcagatgtgaaacgggtgtgcctcgacttgtgcaccttccccggccttcgctgtacactggtgatacgcaggcattcaaatggtagggggacggcgaaaaaataaccaaaaagaagaaacaaaaaacaggggaaaacacactggcaacatgtctcttcttcatcaccggcactgttattgtgactggtgtgcgacaaccggaagaactggagcaagcagttgcgtcagttcgagcactatgtcaagagcatcaaagaaaatcataattttttaaaattttattgacacatgttaaatggtggaaaattaaaaattatttctacaaatatgttttgtgtgccgtgtggtctgatcccaagtggagcagccggccaccggctccggctctgcatccggctcgcgaagcggtgactgtggtggtgagggcggtggcgccacgcactgttcgaccctggcacgcttccgttccggccctggctcatcatcatcatcttcatcatcaccaatgtcgttcggccaaacatgctcccgccactggtcttcctcctggtcagctgcagagggagccatttgcatgggctcttcctcctcctcgttcatcactgtgctgtcgggtgatgccccgccaccggcacaacagctccatccaaatgggcgagtgcgtatggactgcggcggcacttcatctgaaaaatttaaattgttgctgtgtgtgtgtgtgtgtgtgtggtcatcatagttgctattgtccctattgttttttctgttttattttgtgactcaccaacacactctgctgcaccccgccgaagcacgcgcccctttgtgtacacgggccggtacacgcgggtggagcggcgcgtgaagatgtccgcctggcggttgcgcacaaaccgctggcatggcacagagatggtgcgctcctcctggccatcgcttccgtcagcagcatcagccgcgtgacccctctgttgttgttgttgttgttgttgatgctgctgcctgaaaatcatcaaaattaattgtatggtgtgatcagagtgcctcggtgtcctccccccattcgccccaacatgggggagtggtggcgtatttacccgctgccaaagtggttgatgaccagctggcgcatgcgctcatactgcagctgctggtccgccgcatagttgagctcaaaagagcgcaccttgcgctccgccttcaggtcgccgcccgtgcacgcgtccacgtgttggaacccatagttctttgggccggcggcgaagaagtcgatgatgcgacggccgggcagctcccgcttcatgtcacccaacgcgttgccctcgcgcacaccttcagcgccacgctgcttcacgtacagcacactgtccgtgtcgcagtacagagatcgaccgcccacccgtcggacctcctccaaccagtcgtacaggtacagccgagcatgggacgtcacaaaacatgcgacgcgtgctaaataatgcttttcgggtcgggctaatacactgcttctcctccacaaatatttccaagacggagacaaatcactttatttaaaaccgcaacaataaaatgggagaagagtcggaggaaaataagaacaaaatacaaatatgaaagtgcactgccaacagaatgaattgaagggaagacgggggggggggaacattttctgctgggaagggagtggcaaaatatagattaggcgagagactacaatgacaggcaatgagacaaaaattaagaagggacaacataattactaaataaaatgccaataatcaaacattaacacatcccgaccctccgagaaaaggcgtcccctgccttttgaatccattcggcatccgattggtggtggcgagttaagcctgtgccggcgtccgtctcctaacattccacggtcgggctcttttcggtgcttttctcggcgataaaaaactctttggccaagttttgcgtcattctcgccgcgatggaatggcgattgggaacgacaatcggggtggcggtcgcatagacccaacctacaatttgacgacgaagccatttttgggttcatcttccccctacccaaattttcagttgtccctaactgaatttggcccaaattttgccttttccaaacacacttcatcgccttttcgtttggcacgcccactttcatttgaaccgaattcaatggctgtttgtttgccgcactttttccaaaattttcagaatttttgatcggaatttctttggttttcagttggggcacgaatgttttgttgaataatgggctccttttattgtccacagcatttcgatttgatttcttctccaccactttacctttcttggtaccagtgtcgttttttgggtccgacctatgtttattcccctttttctgcccttctctgttggtactggtgttgccatggcacacgaaggttttgaaagtgatcagaggcgaattttcgggcttcgaagctggcgaaaagtctacaatgcggcagttcactgcgtcaagcattttgaaacctaattggtccatggcatttgtgccgaaaagcaaatcatagccaaatgtagattgggccacaaaaacacggattttcgcttctaatggtcctctctgaattggcaaagcaacaattccaaaagatttcacttcctttccatttatgtcgattatccggctttcagagcgggtgacgatgtccttttggcttactttgtccatgatttctaagaagaatttggccgaaatcaaagaaatttgggagccgccgtcgagcattgcatccaatttacgcccaaacaccgaaactttggctgccaaaattttaccaaccgccgggctttcttcccaaaatctacccttttccgacaaattcgttgtttttccgaagaattgttcgatttcagaccggtgttccaaatttacggctcctataaacaaattttcccttttcggcggttcatcattttgttgaaagtgagaattttggttcctgaatgattctgatggctggaaattgctgcttgggttgtcctggtgcgtctgttgtgtcgactgtgaatagcaattccgagaagtgtgtccgactcggccacaattatagcaaacaacgtgccttcgctgattttgggatgttccatggcttgacaatttagtcattcgccacgtatttcgcgcggcattttgaattgcctctgcccgtgccgcttgtgcgatgaattcgtcgaacgtcgctccaggtttacgtgtcatttccaaaatggtagccaattctgggttagggagggccctaatgaagtgcatggccgaatattcgtcgtacagctgttcagtgaggccgggatatgcacaacggaccattgccgagacacgttctccaagctgatcaatgctttcattcggcaaaagccaaactcctttcatcggttggccaaacgccgtcaattgttttgcatccgtatcgtctaattgccgtatgatcgctgttctgatcagttggtaatcgtggcgattttgatcaatcgcggaattgaaagctctctcagctttgcca

SEQ ID NO: 1260 - DNA, 2816 bp, Heterodera glycines
ctgaaacctgccgctgaaacctacgcctttgagggccttcctggcaagtttccgaaaattctgtttcggtccaacaccctgcgttcagatgtcaaagtccaacagtatttctacataaaacaccggattcgcctactgtaccctcagctcaagtgcattgttgagtaccacaacaagggccattgcaaatactacccattgggtacaaatttttgtccgaaaaaaataaaataaaataaataaataaacccccttaagagttgttggccattgaggagggctgtgagagtgcacccatcgaaaaacctgccgctgaaacggactatctggactacttgaactttcgcagtgggtggcaatcagcactctactgatcaatgaagcgtgcgagacaatcggaaaagttgggcgccttccctgagattgagttcgccgtcaacacaatgggcgtcacggtgtattgcccaaggcacctgcaaacgcctcggtttgtgccatgggaccagcccgggcggtgctcgagctgcagaagcggaactgttgagctggactacatcatccagcccgagggggtgaccatcttttcgaatcggctaaagacggacggcgagaactttgtgccatttgacgcaattggtaagcttctgcatgtgtttgccaaaaacctaacccttttcttaagtggattttgccgatcgtgctaaattccgcataagggcacgaaataaggtgttcactttgccgctgcgacacccggaggtccatgccgcaggcccgagcttggaagaagccgtaaaaggacagaaggaaatgacgcagatgccataagcacttgtccattttttccattgtttttgttcttgttctgatggattacccaagaataatcgaaagtgaactcgcttttcccatcccttcggggattattgtcagcgggccttcctcatcaggcaagacccagctggtccttcgccggttacggcacgccaacgtattgtttgatccccgccaaaggcaataggcatgtgtaaaagggttttatgtgcagtcatttttgtgtctagtgtgggcatacggtgagtactccacgcagattcccgagctagagcggcaggaagttgtccctcacgcaggtgcgccgtctgacgaaatgttgaaaaaaaaaagctgccaaagccttgtctgattgtgtacgatgaccttatgggtgacattgaggccaagaagcaggccgacctgtacacgaaaaaaaaaattgtaccacaacaatttttctgtgattttcctcacccaaaatttgttcgataaggcactacgggtgccaagatccaacgcccagtacatcttcctgatgcagccgcccaacgccatgttgagcacacgtaatttggccagtcaaatgttccctcgggagcagggcattctgatcgatacttaccgacatatgtgtgctctaccgtacggctacctgttcgtgaaccttcactgagccaaaaatgtacggcctttggctaagcgacaacgccaccggtaaggacgagtacaagatcaagctgcgagggaacacccaggacttggggtgatcaggaataaccgacaaagaaatttgtatgatgaatacccctggcgcatgtatttgtctgtacaaccctgacctcgatatgaacctgctctcagaagaagagcacgaccccgaaattattccataatttaatttttatttttcaattcatttcattaattttgtaatattttaacataattcctacttttgtcacctaatttttcccaaaatacaataatttcattaatattttttttttgaactctctctcgttctttgtacttcttttcattttggtatcgtatttgcatcaccttgtacgtagtttaattctggcaaataaaatttccgtttcagctttgaccaattggtgcaggggattggtttagtgggccccattcatggtgtacacgtgatcagattaattttggatatggtatacccttaaaattcaaaaaaaaaatttttttaacagaaaatgttaagactacagtacccttctcaaaaatgtgcttatgctagggaacccacacaattttcaggctaagcttttgtatcatattcgttttgttgagtatttcaccgtagaccccgtttaacacctccctcgcacaggggtttcagcagtcagactaagatcagtcgtgcgacagatctaatcctttagggtatttaaatctttggcagcaaattcggtggctttgatacaaaatcctgctcccaattgggtaacagtcagccggtaaaaaaagactgatcgtacacttgtataaacgaaacacgtgcaaagtgaaaattttttcaatataaagccaatacctaagcatgtctaagcctaaacataaagcagttctaagcctatgcctaagcaagcctaaagctgaagcctatacctaagcaagcctaaaagctaaagcctatacataagctagtctaaaaagctgaagcctaaagctgaatcctatacctaagcaagcctaaagctgaagcttataccaaagcaagcctaaagctgaagcctatacctaagcaagcctaaagctgaagcctaaagctgaagcctatacctaagaaagcctaaagctgaagcctatacctaagcaagcctaaaaagctgaagcctaaagctgaagcctatacccaagcaagcctaaaagctgaagcctatacctaactaagcctaaaagctaaagcctatacataagctagtctaaaaagctgaagcctaaagctgaagcctatacccaagcaa

SEQ ID NO: 1261 - DNA, 2740 bp, Heterodera glycines
gtataggattcagctttaggcttcagctttttagactagcttatgtataggctttagcttttagacttagttaggtataggcttcagctttaggcttcagctttaggcttgcttaggtataggcttcagctttaggcttcagctttttagactagcttatgtataggctttagcttttaggcttagttaggtataggcttcagcttttaggcttgcttgggtataggattcagctttaggcttcagctttttagactagcttatgtataggctttagcttttagacttagttaggtataggcttcagctttaggcttcagctttaggcttgcttaggtataggcttcagctttaggcttcagctttttagactagcttatgtataggctttagcttttaggcttagttaggtataggcttcagcttttaggcttcagctttaggcttgcttaggtataggcttcagctttaggcttcagctttttagactagcttatgtataggctttagcttttagacttagttaggtataggcttcagctttaggcttcagctttaggcttgcttaggtataggcttcagctttaggcttcagctttttagactagcttatgtataggctttagcttttaggcttagttaggtttaggcttcagctttttagactagcttatgtataggctttagcttttagacttagttaggtataggcttcagctttaggcttcagctttaggcttgcttaggtataggcttcagctttaggcttcagctttttagactagcttatgtataggctttagcttttaggcttagttaggtataggcttcagcttttaggcttgcttgggtataggcttcagctttaggcttcagctttttaggcttgcttaggtataggcttcagctttaggctttcttaggtataggcttcagctttaggcttcagctttttaggcttgcttaggtataggcttcagctttaggctttcttaggtataggcttcagctttaggcttgcttaggcataggcttagaactgctttatgtttaggcttagacatgcttaggtattggctttatattgaaaaaattttcactttgcacgtgtttcgtttatacaagtgtacgatcagtctttttttaccggctgactcgttacccaattgggagcaggattttgtatcaaagccaccgaatttgctgccaaagatttaaataccctaaaggattagatctgtcgcacgactgatcttagtctgactggctgaaacccctgtgcgagggaggtgttaaacggggtctacggtgaaatactcaacaaaacgaatatgatacaaaagcttagcctgaaaattgtgtgggttccctagcataagcacatttttgagaagggtactgtagtcttaacattttctgttaaaaaaattttttttttttgaattttaagggtataccatatccaaaattaatctgatcacgtgtacaccatgaatggggcccactaaaccaatcccctgcaccaattggtcaaagctgaaacggaaattttatttgccagaattaaactacgtacaaggggatgcaaatacgataccaaaatgaaaagaagtacaaagaacgagagagagttcaaaaaaaaatattaatgaaattattgtattttgggaaaaattaggtgacaaaagtaggaattatgttaaaatattacaaaattaatgaaatgaattgaaaaataaaaattaaattatggaataatttcggggtcgtgctcttcttctgagagcaggttcatatcgaggtcagggttgtacagacaaatacatgcgccaggggtattcatcatacaaatttctttgtcagttattcctgatcaccccaagtcctgggtgttccctcgcagcttgatcttgtactcgtccttaccggtggcgttgtcgcttagccacaggccgtacatttttggctcagtgaaggttcacgaacaggtagccgtacggtagagcacacatatgtcggtaagtatcgatcagaatgccctgctcccgagggaacatttgactggccaaattacgtgtactcaacatggcgttgggcggctgcatcaggaagatgtactgggcgttggatcttggcacccgtagtgccttatcgaacaaattttgggtgaggaaaatcacagaaaaattgttgtggtacaatttttttcgtgtacaggtcggcctgcttcttggcctcaatgtcacccataaggtcatcgtacacaatcagacaaggctttggcagctttttttcaacatttcgtcagacggcgcacctgcgtgagggacaacttcctgccgctctagctcgggaatctgcgtcgagtactcaccgtatgcccacactagacacaaaaatgactgcacataaaacccttttacacatgccttgcctttggcggggatcaaacaatacgttggcgtgccgtaacaggcgaaggaccagctgggtcttgcctgatgaggaaggcccgctgacaataatccccgaagggatgggaaaagcgagttcactttcgattattcttgggtaatccatcagaacaagaacaaaaataatggaaaaatggacaagtgcttatggcatctgcgtcatttccttctgttcttttacggcttcttccaagctcgggcctgtggcgtggacctccgggtgtcgcagcggcaaagtgaacaccttatttcgtgcccttatgcgg

SEQ ID NO: 1262 - DNA, 2784 bp, Heterodera glycines
  unsure (1)..(2784): unsure at all n locations
tttgagtttttgccacacaggtaggcgttcgctttgttcaccgctcgggnggtgttcaatatttctgctaatttttcgggtttacagcttagcaatttggatagggcggcagtcagagggagtaccatagtctgtaaaaatcaataagttggcttggggttacagtgtgtgtttaacttagtgccctttggtatctttctctaaccactactctatagtccatgtgtttctggatgggcgtggcctatcgattaagaagggactgcccgtctggaggtcgctgcgcgctaacacactcacacgatcaatcaataattatgtgttctttcgcaggtccattttatgtttttttaacaattataatcataaactatttcctaatcgtaatggccccgagaaaaatcaatgatcaattggtgtttgagaacaaaagtaatctttttttttgagtttcttataataataattaaatttgaagaattgcatatggatgagctgaaaaaagaaaaattttcccctcaaaatggtgatgacgtcagcatcattggagacaacaacaacaacaacatcacccaaacactgcttgacctacaaccgggcccctcaaaaaggggacggaagcctcgcctggacaaaatccatgaggaaattgcttctgcagtgaagaaagccaaggccatggaaattgaaggtggttagctttttctgttaatttgctcaaattcgcaaaatttagtggatgaatcgcccaaaaaacaaccgaaaaatgtgtttgattacccttccatattttggaaattgggtcgcccaaaggtttttaacaaaattttgttaaaaattagcaaaatgtttagtatggtgtgttcacgttcatgtgcgatgagtgtcgtggcgaaaatttccggcagggaaagagcagtttcaaactcatcaatcagaatggcgagcaacagcagcgacttgtgttcgcccaatcgttttgccaagactgtgcaaagctgaactttgactgcaccgatctgatcatgaagcacaaaaagaaggatgaatcggcaacgacaacgatggcaaagagtttccgatggaccaaggatgcagaaaaatgaaccgagttggcacaccacatataaggacttttttgaaaattttatacttgttgatcaaatgacaaactttttctttgtaattctgccgagcaatacgccaggctttgttggaaataaaacaaacaaattcaaagtacacttgactaagaagttggtgttcgatagggccgggtagatcgttggactgtcaggcataatttgcccaaacaggctggggaaaaacatgactttggggtcctttttgtgttaagttggctacatggaacccacaatatgtaatagttcacctatacagcagcaggaaatacggtttccgtgtaccaaaaggtaagctttctgtcgccacaattgcatgagaggggcaaactgacacaagaagagtgaaggctaaatgaagagcagcagagaaaactaagagaaaatgaacgtaaacagctcgaggaatatgagaagtggcgcatggcagaataggacattgaaggcagaagaaaaaacggcaagggaaaagaaggcatgggatgagaagttggcaaggcaaaagacggcaggggatgaggctagggaaaagaaggcaggggatgagaaatttggctagggaaaagaaggcaggggatgagaaattggctagtgaaaagaaggaagtgagaaagaagccttgggaaaaagcctgaggttgcgagaatggcaaaggttgaagagtagagagtggcaaaggcagatgaaaaagcacaattaatgtgacacatttttttaaaaataattttcatttatttgtttttccccaaacttaatgatgaaaaacggctcgaaaagggtttggacagtttctcaaatgtgggcgaaaaaactcagcgaaggttagaatgaagtaaaaaatcagcgagcgtccgtcatttttctgtctaacgatggttgtccccaaggccgcggagaaggcacaactgttcgttggtgttgacaaagtggtgtcggttcttctcgcgcagggccccaagcttcgcgatggggtcaagaaagtggatgccctggaaaatttgaggaaaatataattaaatagcaagggtacgaataaatgaaatatagtcaaaccgtggggtttgttggacaacaaaccggaacagcttacccaattttacatgcattattattcactgttaggtgaaaaaaaaattttttgtgtgggtgggaagattcagcctttttaggccggaagcaaaaacgcgcaacggaaagcaaaaatttttttgtagtgcctgttaaggacaaaatttttaaaaaaaggccggcccgggctgattattttagaagtaaaacaacatggtcgacgaatgagcgtgaaaggcgatccatgaccgcctcgggcattcggaacgtgtccacaaacagctcgggcaaccgcagcgaacatgtgtacgcaaacgcagccaaatggagggatacggcggcaacaacggaaggtgggatgtgggccagcgcgtagcagaccatgacaacttcgctgacgaattcgcaaatgcccacacactctttgacggcgaagtgtagaagcgatagcgatgccgaaactgcacagcgtacggcatgctgaggttgaacttgagcccggacaacacctttataatgcgcacacaaagttatgactaattttttgaatttcaagaaaaatcgtgaaaaacat

SEQ ID NO: 1263 - DNA, 2607 bp, Heterodera glycines
actcacacgatcaatcaataattatgtgttctttcgccgttaacagttttatgtttttttaacaattataatcataaactatttcctaatcgtaatgtccccgagaaaaatcaatgatcaattggtgtttgagaacaaaagtaatctttttttttttttttttgagtttcttataataataattaaatttgaagaattgcatatggatgagctgaaaaaagaaaaattttcccctcaaaatggtgatgacgtcagtatcattggagacaacagcaacaacagcatcacccaaacactgcttgacctacaaccgggcccctcaaaaaggggacggaagcctcgcctggacaaaatccatgaggaaatggcttctgcagtgaagaaagccaaggccatggaaattgaaggtggttagctttttctgttaatttgctcaaattcgcaaaatttagtggatgaatcgcccaaaaaacaaccgaaaaatgtgtttgactacccttccatattttggaaattgggtcgcccaaaggtttttaacaaaattttgttaaaaattggtaaaatgtttagtatggtgtgttcacgttcatgtgcgatgagtgtcgtggcgaaaatttccggcagggaaaaagcagtttcaaactcatcaatcagaatggcgagcaacagcagcgacttgtgttcgcccaatcgttttgccaagactgtgcaaagctgaactttgactgcaccgatctgatcatgaagcacaaaaagaaggatgagtcggcaacgacaacgatggcaaagagtttccgatggaccaaggatgaagaaaaatgaaccgagttggcacaccccatataaggacttttttgaaaaattatatttgttggtcaaatgacaaattttctttgtaattctgccgagcaatacgtcaggctttgttggaaataaaacaaacaaaatcaaagtacacttgacaaagaagttggtgttcgatagggccgggtagatggttggactgtcaggcataatttgcccaaacaggctggggaaaaacatggctttggggtcctttttgtgttaagttggctacatggaacccacaatatgtaatagttcacctatacagcagcaggaaataccgtttccgtgtaccaaaaggtaagctttctgtcgccacaattgcatgagaggggcaaacagacacaagaagagtgaaggcaaaatgaagagcagcagagaaaactaagagaaaatgaacgtaaacgctcgaggaatatgagaagtggcgcatggcagaataggacattgaaggcaaaagaaaaaaatgcaaggcaaaagaaggcatgggataagaagttggcaaggcaaaagacggcaggggatgaggctagggaaaagaaggcaggggatgagaaattggctagggaaaagaaggcaggggatgagaaattggctaggaaaagaaggaagtgagaaagaagccttggggaaaaagcctgcggttgcgagaatggcaaaggttgaagagtagagagtggcaaaggcagatgaaaaagtacaattaatgtgacacattttcatttgcgccgaatctctgcggatcagacataatgatggccaacaggtggtccttcttctcgatcaatttttgctgttttgctgctttcttattggtcctgggtgatcgattgcttccctgcgtctggcttgttggggttaaaaactttggcacttcaatttcttcatcttcatcttcgtcggtaaccatcacggacttgtccttcggttcgtccggaccaggccgtacctgcacacccgtctccactgttttatttagcagttgagcgccgttgctgagctgtactcggacgggccgctccttatgttccttgcgcatcttcaggtaccggcgcaggtgctggttgtacattgcgttccgttcgctgacgtttcccttccgcttctgtactgcagcggtcacctgtcgtttgacaaagcccaagtttgtccgctcagcaatgtcgtcggcgtcgtcattctttgtctccctcgctgcaaccagccccttgtagtgctcgtacggcagcagaataagtttattggccattattgctgcgcgaaagcaggtatcgggcagcctcaatcagaatgggggccaacaaaggggcaaaaagtgatccgcctgactgctgcactagttttcgcgctcccctctcacttcgcacacgtgccaactgtctgatgtctttggcaaatggctcaagtctctgcttttgtttcctgctcagacagaaactcccgttcaaaacgttgaaacgaatctcgacaagcgataacagtacctcacaaccggcactgttcaacaaatgacggcgcttcttctccgacgttgtctttcccaacttcttcaaataatcgtagttgtgcacaacccgctcaccgatcttctgttcccgcttaaccatttttgagggaaaaaatgattctctcctcgtcgtctgggaaaatgtttgccattatacgcaaaacgatgcctctgatatcgcgtagagacaccatcaggtatgcgaacaatagggcacatgcctgtcattaggcatccatcaagaatccctgctc

SEQ ID NO: 1264 - DNA, 5413 bp, Heterodera glycines
gttttgctgtgagggttataagactgggaaaatgactcattttaatttgctcttttatcattaatattctaaaaatcatatttttcaaattctttttacaaacatcggctttagggttcaacaccggaatttttgattcatttctgctgtgtactgtcaatgcttttcgaattcggttcatttgttttggtgggttaagtgttgatgatcacccgaaaatggcaaagaataaagaaccttattgacttgaaaaaaaaatagggaaatgaataaggttgttagatgagaacgacggactgccaatgaaaacaaggaaaaatcgaataaacaatgagaaaatttttcaaaataaataataaaatcgtacaaaagtaatcatgtaggtaaataactgttataaaaaaaaatttttatgagaaaaataaataatttatttgtaaatttaaaataaaaaatataattattatttcagaaataacaataatttgataaatctttttaattacttaatttaatttataaatattattttaattatttggtcaaccatttcctttaactttaaagtttggaaaattccgttaattatttgtttattggctcccatcccttttgataatttatttatttatttagttggctcgcttaaggagtactgtaattaattttaacgaatagaaataaaaatttaattatgatgttgagaaaagttcttcaaccataaataaattaatttgttttaataaaatcaaaagttaaactggaggcagtaaattaaattgtattaaaaataaattttattaagaaaaaaaataattttttttaaattatttataagaataaatgaatattttattattaattttagaataataattaattaatcaattttaaattaaatttagtttattaatttttattttacagtccctcaattcgttccattcaaagcgaaatttagtcaaaaataatgttaattgatttgtttatttgacgcccttccagcaccatgcccttttgataattgaaaataaattgtgcatgatattataatatttaattgagaaagaaaaaatatatttgcgaattcaaaatggaatttttttaattaattttagaataattatttataattttatttgtgaattaaaattaaattattatgttgtttagaaataccaatttgataattcttttaattaattaggaaaattccgttaattgatttctttattgggtactcttttctggaaatttttaaaattaattttagaataattaattatttatttaaaatttttttatttgtgaattaaaaattataattattgtttgagaaaaaacaatttaataaaacctattaataaattaggaaaaatccattaattgttttctttattgggtaccattcccccacccttcccttttgataatttatttatttggcgcgcttaaggagtactgtaattaatttgagcgaatagaaatacaaatttgatgatcttgagaaaatttatttaacaataaaccaaataaactgcttttaataaaatgaaatgctaaaaagggacagtataaaatatgtatcaaaaataacattttattaagaaaaaataaataattttagagattttcgagattttataaaatatcattattagttttacaatttaaaatattaattaatcttttaataattaatttaataataataaaatataattttaattatacggacccccattcttttttcattcaaaccaaaattagtcaaaaatccgttaattgatttgtttattggtcacccttcccgcattcgttccatttgaaattgattgtttgttttagccctttttatgggtactggaattaatttgcactgatagaaaattttgataagaaaattcataataaataaatttatttgattgttaataagaacttcaaaagctaaaggcttacggtggctacattgtattaaaaataaaattttattaagaaatataaataatttttaattatttccaaatttaaattgaaattattttattattaattttagaataataattaattaattaaacgtttttaataataaatttaattaataatttttttaattatacggcccccatttcttttttccattttaaaatcgaaaattgtgaaaattcgttaagtgatttgtttatttgacactgttgcagcactcttccctttcttcattgatttgtttattttttcatctttaagggctactgtaattattttggattaaaataatgatgcaaaaaattattcaaaaatcataaattacatttggataaaaaaaaaacattcaaaagccaaagggttagaaaaaataaatgtgcatcaaagtataaacattcattgagtaaataaataattttaattatttgcaaattaattagaacattttttaaaatttaataaataaatattatttaaatatacggccccccatttctttttcgctttaagtcaaaaattgggaaattccgttaattgatttgtttatttgacccccttcccttctcgccacccgaactcgcaatttcccttatccctcgctgcaacccttcctcgccactctcgctgccgagcaatttctcgccatttttctcgttgcaatgtactctcgccacactctcgcccccctgccactcgctgctgcctactctcgcccccctgccactcgctgctgcctgctctcgccccccctttccccgctgatgacgtcattttttccctttatgagagcaaattaatgtttatcatccattgccaatgtggccgagtggttagtgcgtcaggctggccgccccctctggggttcggatccgcttggtgcggggaatttttggagaattttaaatgaatttaaattcaacgtctttgacctttaagacgtttaaaataatttaaaattaaataaatttaattaaaataatttgcataaagtcgcgcagtcaaaaaagtcgcgcacccccctgcaataggtttgggtttgcaagaaaaaagtcgcgcaataggtttgggtttgcaagaaaaactcgcgcaataggtttgggtttgcaaaaaaaagtcgcgcaataggttttggcttcagtactgaaaagtctggcgctcagatggcccgcgctcacttggcggcgctcaaatggctggcgctcagttggccatgcacccctcccacacctatggggggctaccgtaatccggtgaaaaagtgatgtgtaactactgaggcttccaaagagaacggagcgagccaaaagaaaaagaagaaattcttcagaaaagacggacgtggcaaaaagaagaatttcttcgctgtgggagcgaatgtgatcgccagcttgggtgatgagccatggcgtgccggacgtgtgatcagccgaaaagaaggcacttacgacgttcaatttttggacggcacgactggagaattcccggcaaaaggtgtacaaccgtacaagccggatgaagatgaaaatttgaattttcttcttgacgggtttggtctgaagagagcctcatccgtggatctatcgggaagcacggcagcgatggccgacgagatcaaacgaaagatgatcttcgagaagcttccgactgtggacacaaggcataagaacgccgatctgaggatgcggatgatggacggaggcccggcacttttcaagggggagatgttagggttgggacccaattgtccggtgcccattttgaccctttgtttcatttgtatttcccttctcccttcgttaagtcacgcccacttttccgcccataaatacccgcgatgttgacccttccccatcattcttttgcttcttctccatttatttgttccctttgctcccaatcgatatttgaccccgttcgccctgtcccttctttttgaataaatatttattttattcctcttcggactttggggcgtaacacaaataccgttccctctacagtaggttctttctatgaactaactcacccttcttttttggcggtatactttcggaatgtaccgtatgcaaatggttgtttagtgcggtcagccgtctgaagcgcatttggcacccgaagaacacacagacatgcgtttctgcttttggcaaatggcaaacaaagacgtggttgagaagccaatcgatctgagcgcagaaaatcaataaataaaatattaaataaaaaatgtatattaatatttatatcagaattattaacgaaaaattttccaaaataagcaaatcactggtcaaaaataagctaatttttgatttaatataattcaaaaaaaaccagtgttaatacaagaatgtttttcatcaattttcaataagcttagcaattaataaggcatcgagaaggaagtcagaaattttgactctgcttgtaacaaattttacaaaaaaatgaccatttgtggggattttcaacagaataaattttttgatacagttttaaaagatttgaaaattcgttaaaacatactgtagattactgtttactgtaagtttattcccataccaattaacgcttttacgatttggcatggcaaaatatatattaattattcaaaataaataaatttgtgtaacctttctttgagtgttcctccgccgggcaggcaaatcgcagtccttccatttacaagcaaatttttcttcgtcatcagtgttcttcaaattcggaagatcattatcatccattttttctttgtttttttcaattagttcgtcaatatgtgtcttaattttaattgtttaaaattaatttttttttaattaaatttcctttttaaaaaactaaactgttttgaggtgatcatacaatttgttgtcattttcaaatttcaattcacattcagcccattcacactttcttataatattttgtacaacaatttttttgtttctgttaaattttttgttttctttggcaccgttttcattttcatcgttggcactttttattttttcattttccttggcattctgatcattttccaccatttgatcaaactccgaaacttcttctttgatccaaatttgttctttacaacttttgttttctatttgcttgttttcgaccatttcaacttttatcccaccgcttttcttccaattagcaaaatcctcccaatcattgtccaaatgatcaattttggttgatattttgtccattattgccgattcttctgtttctccattcgcattctgaccacaatgatcaaatgatgatgatgatgccgactcattgtcagcactttcgtaaattgaccgctcaaaacttgatgatgttccgacactttctgaattaatcacatttaaacactgacgtcgatcattccaatttggttgaattcgataacaaataatctttttga

SEQ ID NO: 1265 - DNA, 1727 bp, Heterodera glycines
  unsure (1)..(1727): unsure at all n locations
atcaattaaacaacacaaatacaatagtgaatatctgcctggatattattatattatttttcatttacattttcacttttatttgttttgtttatttagttaattataaataaataattaaagtataaataataaaagaatagataattaattctaaaattaaaatagattaataaacgaattaatttatgaaaaaatggaacatagtaaaaaattaaataaaaattaccctaccgtattttggaatttttttcctgctataattttttttcttactgtaataaaaatttaacgataagaaaattactcaaatttattttgcaaaaatacaatcaattaaaagcgactattagcattccttgaaaatacacataacatttactatttgcatctataaagttgaatttatgtagtaaaaatcatattaaaagtaaacaatgaaatcaaaatataagagctcaaaaatccgaaatttaatttgaaattaaattaattttatcaaaaaaattgttagccattttaacagtaatataattatttttaaataatttcataatattttaaatacatatattttttttaatttttaaaaattacaaatatacgaaaagtaaatattaattttgacatttccatttaaaagaattactataaatttataaatgtttcattaaataaaagccggcattggttcgtctgaaataacgacaaaaatgtaattattttttgcttgatttaattttcatagaaattaatcgtaataaattaatttaattatttataaagcctgatataagcagcacattaaaataaatcttataatacattaaatgtaaatgaaaataaattaaatcgaaatagaattgtaaagataaatattattaaaaattatgtttttgaaaattacttatttgaatggccagacaagaagatccacatcatcgagctttcaacgagtttaaaaaaaatgaaaaaaatatcaaagacagataaaaatatatgatgatgatgatgatgagtaattatttaaatcaattttattcaaggaaaaatattttcactaggaaaaatagaacattgaaaaaatctaaaattaaaacaaggactaattatttgaaaatttaactaattgtttgctttaaaagttaaacaatctaaaatgaatcaatgaaaaagttaaaatatttagtcaaattatttaaaattaatatgaataagctaagagtaaaaataaaattacaataatttaaccatacattttttaaataactctacatttataatttggtatccaacttaaaaattctgaagaaatcaaataaaaatccctgataaaaaattttaaaaaagtgcattcatttatttttagacaaaaattcagaaactattgccataattaattaaaattttcttttataaataaaaatattcaagagtttcaaaaatagatattccatagataagggatttacaaggtgtaacaaatcctgaaaaactctgtctaaaattttaaaattaaatctttaatttaaaaaatttaaatgtaattccttaggttggttttaaaggcttaaggaaattaagtttaaatatattgaatgagcaataatggattttataaaatttttacaaaataaagaaatatttctaaacaataatataaaattgtattatgtttttatattttccgtggtatcttttaagctgcactattgnagaaatcatcg

SEQ ID NO: 1266 - DNA, 6023 bp, Heterodera glycines
  unsure (1)..(6023): unsure at all n locations
aaatttttattttttgtttctaatatgtttaatacaaataaaaacgaaattaagaaaataaatttataaaaatttctctggtggtgccgcaattattgctccgccggtacctcatttaaaaaacgaaagaaaagttgtggcaattttaaaaatataatttttctaatagtaaatagctagaataaaaaatgacgtataattaaatatattttatttctaacaataagtaattattattgaataaaaatattcatgaacaattaattagactaagcagtgaagtgattgtaataattttggttatgtaaaattcagtcgcgagtaaagtcgagcttcaaaaaagaatttacattttatttaattaaagcataatgagcgattctgtaaaaattaaaaaaacaaaagataataattaaaaatataatgaaacggtaaatgaattaaaattcatcttttattattttcataagctaaccgcgacgcagacgaagagtttaacgatctacgacaataataatttatttaaataatattgtatttattaatttaaatcaaattaaatatacactgtgtaacattagaatagggacaccctattttttgggagtttgaccacttcccatgagccgatcgagctgaaattttaactgtacgtagcaattctgaaaatatcaagattccgaaagtgagaaaccgaaatgatgacggaaaaatattttacgaattttttttccaattagttcaggttaattttgattattttagaagattttatcaaatgactctagtaaactttttaccttcgttttttctgagcactaattttttaaataattgatgatttcttaaaatagataatattcatctgacttattaaattatattgtaatatatgtacttcgtttaattaaattcatatcactttctccacaaattccatttccacgcaatggcctttgaatgaggtctctacgtcgcgtctccgcgaaggcgcgtcttgttgaaaatggatgtctcaaaaatgaggaaaaatggcttgaattgagccattttttggatagtcggtatttaacaaggcacccctcagcgaatacttgctatagagcaatcattcaaaggccattttgtagagaattttgtgctctttctcttcgtcataatcatcctctacggaaaatttttcccaaccccctagaatttttttttcgaatttactcagattttcgtattttttcaccgcaaaaattttgtgtttaatgccttttttatggcataaaatgaataaaaaatgcttaaaggatgtctgtacgttatcttagtgctgattgctgttagtttgattcggttgggcaaatgtttgaggtgatttaagccttttggcccttaatttctcctgaaaacttagaaaattcaacataactctgcctaaaagacatatttctgttcgcaaaataaacagaaatgtgaaaaaagatttgttctttcttatttacatagtttgttttatctgtttatttttggtagttgttgagattttgttcgtttttatcaagtgtctctattttaaattaacacccctttttcgggaaaaaattcataaaatttttttccgtcgtcatttcgccttctcctttttagaatcttaatattttcagaattgctacgtacagttaaaaattcagctcgatcggttcatgggaagtggtcaaactcccaaaaaacagggtgtctttattttaaattaacacagtgtacaaaatcagaaatctaaaccctctcgttgttttatcatctgttgagaagcagtccttctcttatcacttatcatttccatctccttagaattgttttccgtcaattccctgtttatgtccgtcttttttactatcttgaaaaaataaattttctcgacagaaattaaattaattgttatttattttccatttttaaattgtgacaaatgcctccatttttgggccatattttatttaccctttcacttatttcttcctttattcccattaccattccaatccaagtttcttcctctcattatgtcaatgctaccaatcacaacgtgaacatcgattcgtttttcacttttttcatcattttgaaaatgttcagactgtgtcatcaccatcttcggcattaccatcaccgcaacaatcggtagccccagaagcggtcgttcttccccctgtctttgaggcggtgaccatccaaatccgtcctcaaatctccggtgttcgtgtcgaggcgccactccattcaaatgctttccacacttacgagtaaggaaagggggtcattagtttgcacatttttggaaattattcattaccagggaataaaactttatttattccgactgatatttttcaatgttttggctttgtttgctgttcgattcgtctttttcgtcctaaaggtcttcaggtatttccgtcgttgagcccaatgttcccgtccgtgtggtcgtttttggtctctttttggaccgtatcgctttggttgcctttacaacggataactgcttgaactccggtcttttttcaaaaatttctgtcaatgagctaacaacatggtttttttgtatttagttttcaacatttcgcacaatgaatttttgtctcattcggagaaaatgatcgaaatgagtgcccaattcaaagagttggcgcaacatttaacaattttgaaaaaataattgaaacaacagagacgaagacgcgtaccgaatgtgtttgttggagaaaatagacgaactcggcgaaggcgaggaagaccttattttggtgggtgtttcaccctttttgagttttttcagagttttttcttggcctgaggggctgtattcaaaaattcggtttttatggagtatggttttcgtatgttagaaatggtttcttcatctcctccccttccatttcctagattgacgaaatgcgcacttggatccgtgccacttcggaccccccggtgcattacatgcctgaggaaattcaggtagttttgttcttgtcattgtttttgcagctttttcaaaatttcagcttctgttcatcgtatgccatttttcttttttttggttttcatttgccaattctttcccttcagttcactttgtttcttctgtccgctttgttctccggtctaaacctcggccttatggctttgtccccccaggagctcactctcatcctaaattctcggtgatttttcccccaaaatgatattttattttccccattatccatccgaccgtttgctttaaggctctgaacgcgaacgaaaatatgccaaggtgattttgcctgtccgcaaagcggggaacatgctgctgtgtacgatactcatcgtaatgcacacaattcgattcttatttgatgcccttctcattgtaagatgaatgtcatcgtcaactcggccatctccattctgatggaggacctcacttccggcatcgtcgcctttgtactcgcctcattgggaattgtcgtttttggtgaaattgtgccccaaagtgtgtgcattaagtgagaaggggaaatgttgtaaattactttggcacgtaaattttgttaattttagaaagggtcttcaagttggtgccaaaactatttggctgactcggtattcattgagtttttcaattaattttttccataattagacaatttgtataagtttcttcatgttgatcacacttccactcgcttggcccatcggaaagcttttggattgtattttgggcgaagatttggttggcatggatcacgaaaagttgttggaaatgctgcgaatggcacaccaacacagcgaacaccacgaagaactcgcggaagatttgaaaattgctgttggagcgatggaaattgcggagaaaattgtgcgcgaagtgatgacaccaattgaggtgtggttaattggacaaaaagccaacagtctgttgaatgtgtaatgatttggtccgtaggatgtgttcatgctttccgacgaggccgtgttggactcggattgtgtggcggacgtagttcggcgaggctacagtcgtatccccgtgttcacgaacaacgaccgtaaccaaatcaccgggtgattctttgacccaaataattctaaatttctatggtttattgtcttcatggctttattcggtttcagtttgcttttcatcaaagatttggcccttttaaagcccaacgaacgactgaccgtttccaccatttgcgacttttatgcacgcactttgcgtttcgtcaccgacgacacaccgttgcaaacgatgctcgaggagttcaaggaggtcgaaacgctaaactgactcaaaatggagctaatattcaccattcccagggtgaatatcacttggccattgttttgtcggagaatcacaatcgcgtggtgggcatcatcacattggaggacattgtggaggaaattctgcagtcggaaattgtcgacgaaagtgacgttgtgtacgacaacaaataccgcaccaagcgcctcaccaaatggcttacggtaattaatgatggactaataactacaaaaaactaattacatttaatgacttccagaagggaaagctccgacggattaccgattctgaggacagagagggagacaaatgcaaatggttgtccgagtcactggccaaagtcactgcgcaatggctgagtgccatgcgaccggcactttttggggacaaagctatggacacgaaggctctccatttgctcatccgtctgaatgcgcgcaaagtgggattttggaatcttaaataaattcaaatttctacttttaaaaataccaactttgcagataaaagtaggccaacgctgctcaaaattggacagtgaactgaatttggcaccccaagagcctaaatacctttacaggtaaatacaaaagtacctttttctaagttccatttaatttaaagagctggtcgaccttctgaccattttattcttctcatcgaaggaaatgctgtcgcccatttcccgaaggttcactttcgatttcgtctggtaaattataccctttcagaatcagatgaaatttgacgttggagcatgggaatgtttcggtactgaaattctcgaccaaatggaggcacagatggttaacaattatcagatggacaaaaacatcgggaaaatgcaccaccaaaagacagtggccacaaatggactgttagtccatcgacacagtgcgttcaaaaattcatttttaattttgtccgtttcgacaaatgagtcaggtgcattcgttgaactgagtgagggcattgagtttatttctgactttgacctgctggtgaggaaagattgccgcttcatcgaactcactccctcgtcctatgccaccgcttctcgactttcgactttgcttcgcgctattaggtggggaaagcaattagtaaatactatctaaagcatttttcgctttctatctatgaccatgttttaaaaaatgttttttgcagagatctacgtaaaacggatgggtctcggtttgagcggcgccgaaaactgacaaagcaagactcagtaaagactttggatttggtgaccgaggtagaaacggctcatcataattaattggtggtcattggcatagagtaacgagcgattgctttttggaacgtatataatatttgtgaagcctctcgttacctctactgatcatcagcagataaattaattttccgatccgttcaaacagggctctccgagggtgcagaagcaaaagcgatgcatctcaaccgtcgaaatgccactgctgaagagattaatatagtcatcggcagaaatgacatcggaagaatatttgcaaaataacattttgttattaccatccacttttctttcattgccaacataaaaatgtttatatcattttcaggctctattgcatttaggcgtccaatcaaattttatgcatcagcagattaattattattttttttanattttattcttcgtgtaaaacatattagggcaaatgttaatcgg

SEQ ID NO: 1267 - DNA, 3076 bp, Heterodera glycines
agctcctttatttgttatttaaagcaattgtgacaataaaaaagtaaaaaaaaatgaaaaatgcaaaaaaaaaaaaaagcggacacaaagtccatgagtaccaatgaaacatcacgaagtaaattcggcagtttttctttgttaacaaagataaagaaatagtacgtcaaaatgagagatgcatttttctcttcattctattttttcgttaatccctcgttttttgggacgaatttttcaataattaacgcttaattattgcagttgcagcaaattttctcagattggcagtactaatacgtatcaatgatgttaattttaaacaattgcatttcctagagataaagaaattggagtttgaaatgccaccagatattactccgccgccaactttggaggacaatttggacgacaaatttcagatgaagtgcttggaaaacaaattgagaattatctgtgtttaattttcaggcttgaagacaggacaaaagtcagtggtggtgaaacaagcgaagatgaaattgctgacttttctggcaatgaaatatcttcccgctcctccgaggatccaatgttttggacagcggacgacgaatgcaacttttttaagacattgagtgcattaaaagaacgcgacccaaaaatttacgagcaaaatgcgaacttttttgatgaggaaaatcagaatacaaaaacttacaggtttaagactccggtaaattatttatgccttttgtttcagcgatgcattccaagacattgaggcaaaaaaggggcggaaaacccaacaaaaaatgactcttcgggattacgaacggaaattggtggttgaacgcggcggagagtttagcgaaagtgacgaagaaatgaacatgccaggtccgtcctcttcgccctcgtattttgaccagcaacagcagcttaagaaagcgtaagtcgactttaagaatagtttattcttttccattcatttaatcgtaaaatttagtttcaaaagtgcactcgccgactctgatgacagcggaacggaagaattgctaaggaaacgcgagaaaagtgaacaggaaaaagtgagattgttccaacccaatttacggtgtcatttcgatttttaggtaaaagagcgggaagacttttacgaatggctcaggaacgaaggggcggaggaaagcggggcgatcatcgacaaggatttggtcagttctcactcatttttttgttgttgttaaagtttcctttttaggtcaaattgaaaaaacgatggtccgccagcggaggaaatcaattggacgaagaagaaaagtttttgagggattatctgttgaaccgaaattatgaaaacgatgaggaggaggaagaagaagagggcatcggaggggaaaggtaagggaaaaagccgaattctgttcaatatcaatctgcgaatttctcaacctgacagagtgcccacctatgaacaaatcattcaggaggaggaggacgaagaaatggccgaccaattcgaacgcaaatacaatttccgttttgaggacccggaccaggaatttgtaagtcttataccatatgcctaatgaccgtatgttaattttatgattttgtttagcttaaacaatacccgcgaactgtgcgcgaatcattgcgaacgaacgaatcgaaacggaaacggcggagagaacggcagaaagaacagcgcaaagaggaagaacagcagcagcggggggtgaaggtggaggaggtggacattccattccgatatcgcactgtgctcccaaattcatttgggctgtcaacggaagaggtcagttagaccaaatccaaagccacgaaatcaatttaaaaaaggatggataatggcacctttataaactaaaagtcgtgccagtgcatacttaaacaaggggtgcgccagggcgaggcccatacgacggacgattggcgcaggggcgtgtgccaggaccaatttgtcgtacgaaggcccccaattttctccggcggcgacattttttttcctttttttgctattcaaatcatttttttgcgaccatttttttttgctattcaaaccaccttttttgaggcgcgctttttaaaaaaattatggggaaccggaaccgtggcgccgctgggaaaatttattgattttggaaatttaaatactggcccggttttttgacgactccaacccctccccctccatccgtctctcgtttatccttggcatggatctatggcattaaattttcccatctctcagattatgaacaccgatgacagaaggctgaatgcttgggctccaattaaaaagctgaatcaataccaatcagaggaggaggaacacaagcaattgatgttcttccaacgaaagtcgcaacacattgaaaaaaagcggaaacttttggaagaaattgatttcgcattgtaagataagataaatagaaatatttacaaaataattaaattaaattgcttaaaatttgcaggccgaaaaaggcgcaaaagtcaaaagcaaaaacagaggaacaaaaagaagacaatgcaaagagagaagaagcaactgaatcaaaagatgaagaagaaaaagcatcaaaaagaaaaattaaacagaaaaagacaaaagttgaaaagaagacgaagaaaaggggccgagtggaggaggacggaacggttgacatcgccgagttgggcatggataggctgagggcgtacggagtgagcacgaagaagttgaaaagagctcacttcagcaagaaaaaggcagcagcagcggagagaaatcaaggggaaaagcagcagaagaaatcagaaagaacttaccaaaatgggacggattgacctaatttccaacagtatcatgttctgtttggccactgccatcattgaaacagttacaattttgataaaatattttggtgcttaaaatgacgattcatttatataaagtgctttttcattttttgtcaacatgtgacaatttcttatcattagggcttcgatttttaggtttttacatatttttttcctgagctccccgtggcctgaaacgcacgaaaaacatgtttttttgggctgttgttaa

SEQ ID NO: 1268 - DNA, 3501 bp, Heterodera glycines
aggtttttatttttagcacctaaaaaacctaaaaaaattttaaaaaacttattttcacctattttggcattttgcccaaaatttgttaacaaaaatgcaataaaaaggaaaaacagacccctaagaatcgaccgaaaatttttttcaaaaaatatacccctaagaatcgactcgaaaattttcaaaaatatacctatgaaaaaagaaaaatttctcaaaaatcatctccaaaatttatttgtttattttcttggcgagaattttttattttgaaaattatctatctcattaatgatttggcataatatttttgctttttgaagaaaattttcgattttacaccccaaattcggaactttttggcacctattttcccatttttagcacctattttgggggttttttagaacctaaaacctacttattttggcagtttttagcacctaaaaatcgaagccctacttatcatacctaaattattatttactttttggataaaagaaatttgggaaattatgaaatcattttgcaaatgtttatatatttttgccaaattttcgcaaatcaatctacaattacaatacctatttttaacttgcactaaaatttacgcaatatgtcgttgaacacggcgaatacgccggacggacgtggggttatcatttacagtggtgaaatgtaatgcttttttatatttctttgttccattgtttttctttattttttccgcttaggattttgcttttcgttcgcgaggttaatctttcttttgacaaattcactaacgccgagttcaaaggcacaaagaagggcaacctttacctaaccacgcacagagtttgttttgctataaacaatttgatagtgttaattcatccatttcaactgcggataaaaaatcaaattctttattttaacattgtcagatcattttcaataacactgaaacttcgtctcgcggcaatttcaagtcgttgtcaatgcctttcggatgcattcgaaatgtgaagttggaacagcccatctttggcgccaattatttggctggcgaattggtcgcacagccggacggaaattgggaaggagaagtgaattggaaattgacgttcaatcggggcggatgcatcgaattcggccaagctttgctgaaaaccagcgaaatgggtcggttcaatactttaaagcttttccgtaacgtttgataattggcactcattaagccaataacttttgtcctcggcccgcaaatgcgccgccgccgtacgctccgccgcctggcgcttattactcaccaccacccgcttattattggagcggaggccaattcaacggataccaggcgccggtccacgcgtttccagaccaaccgccgcgtaaatccatctattttgagttatgataaatgtccccttttcaagcggaaagtgtgttcatgtacgagcaaccacctccatatgcggggattgggccaattcgtggtcaaaatccggttccatacccgtcgaatacgcccatgtatccgccacaacagcaagttcagagcgaagttggtagttttttttctaatggatttttttccttatttcattagcctctaccaaccaacactccttccgctccaccagcgttttatccgtcttccagtggcaatggcatcgccaattttgctccctacccggctgctccattgccgtcgtacaaccaggcaaccgaattgccacagaaaccaaaggtcgagtgaaatgaacaagaaaggacagctttggcgtgaaatttatgatgttttttacaatttttggcattccaaaaacgactgtataatacaaaattatatagagggaaacgattttccaaccaactgtaatttcatttgcatatcctttgctctttttgtcatcttaccgtatgacataaataaattggaaattacaatttaagtgttaaaatcgtggttcattggtagcacttatcctttccgacacaattcggggaattcgaaatgtcgtcgattgcactcaaaatcggatgagagtgtctctaattgaatttctatgacttatctgtttgagtagaaaaattgcagttatcttttttttaattttctcgagccttccccgattcatcaaacactcgtgttgtttgttgtaaatttatttttgagttgctcctttttggcattatgttctcaaattaaatgttgctctttcttttcggttttcgcttcgcgaattccattttaaagagaaaaatggaaagaaccgaataaaaggggagggggtaggagaatatgaaaactaaaacaatgcacgtacggtgctaattgcagtcattagttgcttgccttcccataatgattatacaatctttggttgcctttgccgttttttaagtttttaaattttgattttaattaccgagtttgttttttattgattcaaaattcgatttaacatttttaaaagtttagacgttttcttttatatccagaagcggacatgttacggcttttttattgaatggtttgccgtttttagccgaccaattcactgtcccattttcacctgttccatccattcaccgcccttttattaattccattttatttcttattcatttgttttgctcggtttcggcatgtactaagtcattaatttgttggattcatttgtcaacggcaatctcttcagcctcaccatggcgcagcaccaactgcctatgaacagtttgtgtgccgagcgtggaggagcgccggtggacgaagaggcgggcggaaacaattttctcggtccttccccttccgggacgtacgacggtgactcggccaacagaaacaaccatcaccaacgcattcgctctcatgctaatggcaattttcatggccatcagcagtcggtctctttcacgtcgacgccttcctataaaacccatcaccaaactcaggtttaaataattttgcaagtactgtcaactttttttgttgtaatttttgttttcagtaattctgttttatgattttattttggttttacaaaaatactcccagggattatgatcaaaattggccaaattactactaggtcgttgcataaaaaagggcgctttttcaaaatgactttttttaagacttgattaacgtttgttatgtcttttttgtgtgtaattcttttatctgaatgttctcgtcatgtttttgccaaaaattttgattttgtccttttatatctaaagttacagtccaaaaaattgggtaaggtcaaacaaaatttggctaccattttacaccaacgtccataactttgagttaaaattgtcaaaacgacttaaaaacttggtcagattatgaaatttgatgagcttaaccaagaaaaaagcctgaaaaaaaattttttctggaaaaaaaaaaacaaaaattttttggcccatggtttattttggcccaagtttccaaatctatgggcaaaccgaaaagtcaaaacaaaatccaaaaaaattccctcgggg

SEQ ID NO: 1269 - DNA, 1491 bp, Heterodera glycines
tttttaaaaaaggggaaaaacttggggattttttgggcattaactttttttaaaatttgtttgagtgcattaaaaattgccgacatccaattcatctcgttattctgcatcagatgatattaaatttattagaatgtgttacacttttaataaagttacactcaattttctggttatggccaagtccctaattttggcaccaaatttcattggcccatggctgacaggagaacaacttataggacatgctacgtcacccgtcttattccctggaccctatagacttaatttatggctaaattatttctctcaaaaattccttatagggtaggctctttaaagaatatggcaaggtcgtggatccagtgaaaattacctaggttcaaagaatggcacagaattttacaaaaagggcattgttaaactcccatctcggcggcaaaaggttgtagacagtcagggcaattactttgttaagtagctttttgatcggctttgttatgattgttatttttcattttttgttcataaatttttttccttcaaaaagcgcccttttttatgcaacgacctagtaaccttggcaatatttttatcttttcagttgtattcctttgaccttcatttacatatttaaattaatgtattttatttttaggtttttatattccccccttaaaattcacacccattccttttgttcaggacgaccattgctttgtcggttcgaatgctgcctcgggcagtggtgagcatccgccgtccgtctgcactcctccgcccctctccgggtctcttccgccgattacctcacttgggaagcgcccattgcacccgcacaataattcctcacagcatcaaatgcaaaaactgtcctgtcttggagactttaacacacaacaacaaaaccagcagcacaacaatgcttctgtttcgtctctgatgtacaacagtaactaccaccaacagcagcaacatcagaactcgagcggcgccagcagtggcgtgtgttcgcccgcgtcgccgtttccgcctgccggaaggacgccgatgcaatcgcaacaacaacagttgcgaatgaacccgcagcaacaaagcaacgggggcaatgagttcactccgttggtccgaatgggcagcggaaacggtgctgttggacaacatccgtactcctttcggcaacaacatggtggtgggggtacagcggcagcagcgacaaatgcgatggttgcagcatcgtccccaatgatggccgaaaatcaccaccattctcaattggttattaaatgcacatctccgtgttacttactggtttaccataaaataatttaagcaaaaacaattgccgtcacctgcctactcagtccatgggatgaacaacagcaacatgaacaaccatgccaattcggtgatgtcctccaacccaggctcgatcatttccgcgttgcccgagtcgccgctgtccactcattccgtcaataatatcaacaa

SEQ ID NO: 1270 - DNA, 1779 bp, Heterodera glycines
  unsure (1)..(1779): unsure at all n locations
atggtcattattcggcggtaggcccttcgccttgatcatttccacacagcgtgccctcctcctcttctgccgtgtgcggtgccggtggtgaactccaacaacaacttttaatttccgccgcacctccccttccttcggcgtccaaaacgctctcagccgagtcgctgtcttccccaacaaaacgcggtggtcgttcgagggcggttgggtcgacaaggacaaaaatgacggcgacaaattcatcaacagcgcgagtggccggcgccagcacttcagcaccgggcgggtcgtctgctgacactttagccagcacaattgcgtaagggcatgttaaatgaatgactgcgtgtgtaataattgttttgtttattaatgcttttaaatcgatcctttgtttaggtctgtggcttccggaggtggcagttttgaatttgagaaggccattggcacttcgccccttccgtcgtctctgccaaccgccggcgattcctccgccgctttattgacaccgactgttggccctgctgttggtccgagtacttctgcccaaccgcaacagttgacctcttcgcccggtgtgaagagacgaaagaaccaacaaataacgcagacggtcacagccattgtaaatgcattggaacagccgccgattgccgtggagcagcagcagtctcttcccgcttatggcggcggtgcgttgtcccatcctttacaacagcaaacatcacttggcatgcaacagcacgaacaaatggttagttgcacatggatgatgatgattaatgtcaacaagcaacaccattgctgcttcgggagggctaaattcaagggcgtagccaaacccttggcttcgggggggattaaaaaaatccgtttttagaagtgtttttttcttttgttagaaatcccgaattaggaggtgtatttacaggaatttataaccgttttttcgcaaaaaaatgactattttcataataaataattttagaaaataaaagttttttcaagactgtcccatcacaatgtcggatccatgtgcaaaacccgccccaaacgcacggcgattttccgcccacaggcaccaaaatccaagtggtgcacatgcaaccgccagcagccgccatttcacaccatcttcaacagcaaatgtccgacaatctttctcctcaacaacaggttttttgccatttgaactgcttgagtttcgactttccttcccccagatttccgtcgctcgaccgatttcaacgcgtctttcgacattacaacctgaccacaatttgaattcgtcctcctcttctgctctgtgcgattaccatgtggccaatgccaacaacaacgactccattaatggtgttcaccaaattgggccaccatcaattgccgaactgtcgtcctctgccgaaatgagccatcactccacgccgagagttgctgctgcaccgccttactcgccatatcatcaccaacagcaagtcgctgccgcgtttgtttctcctgcgccacaaaatcaacaccatttttatggaagcacaatgccgcaacagttgtcaccatcatcagcatacaaatataataatcaacagcagttgcaacaccattcttatcatgtaatgttggcaatattttcgagtaatgaactttattatattgaatgttgttaatgaattttggaaaatgattttcatttgtctgtttagccgtcagtcaccggctttaagcatcctccgcagccttcacgtggccatttttcaccgggtggcanactttatcgttgga

SEQ ID NO: 1271 - DNA, 1482 bp, Heterodera glycines
  unsure (1)..(1482): unsure at all n locations
ttcgtttgttgtttgactcctgccctcccaataaaacctaaaggaaaacataggcgaaatgaatccctctcctgtatagctcgcctcaacggtaacatgtagcacggttgtaacccttcctataggcgtcccggttcccgagtcgtaaaaaaatcttaaatttctctcaatcatgcagaaacagaagagtggggtgcggcgataggtggcaatataatcagaatagcggctttcgtagtccctgtgtattataattttataatttgatgcctcaattaacaatgcctccacttctgctctgtttttctgccagaaaaactcttctttttcgagagcctcctcaaaatatttttgaaaagagtacattttaactgaaaaattaataaagaaaaaactcgaatagataacgattgtaatcaacaaaaaataaagaaatttaaaaaatttaaaaattatttaacaggaaaggaataagtggcaataattatcgaaattctctggtctaacaaattcacttccccaaatgattgctgtctgtgcatgaactcattgaaaacaatgtctgggttcgaatgttggaaggggcgggcagggatgatcactgggtccgacagggcactgcaatacagatcgactgaaattttctcaattttccagcccggctcagcttcacggttcatcgcatccgtcattaattttttcaggatttttttaaacatttgttcggggtcttcgttttctgggcacttaaaatagaaagtagtcacatgttcttttatcccaaattttttattttcgtttgtgtgactttccacttcttcaaaacattttcccaaattagaactgttcttgaaataattttttgtatttttcgagcggcgaatttcttttgaagtttcttggaaatttttctttgacattctaaaaataggaaacaagtttgattaatttaaaatattaaatgttataaacatgagacaaaattatccaaaaacaaaaattaataatatccaaatggtaaaacattaaagtgatcgtcaataattccttttttctgcactggcgtatattctttttgtacatcttttgagagaacccggaagtcgtttgtcggcccgatcttctccgggtagtgaaaaacttttttgacccctttcttgtaatccagcaccatctctttgaacaaatcatatttaaattcgtttcgcttatccaatgtcatccctnctgatttttggttttgtgccaaataacaccatccttctttcttctgagtttcaaggcgtactgcttcggacccgcggacacaaactccaaaatttcgctgtcggcatactctcgagtcatctcccttaaacccgcattttaatgcgtttcaaaaattatgttttaccccaaaaatttcccctccaccaacggacagcgccccttccgatgagcaaaagctagagaatctaaattttttggtggttattttctttt

SEQ ID NO: 1272 - DNA, 13553 bp, Heterodera glycines
  unsure (1)..(13553): unsure at all n locations
cacctgtgtcacaatagagcagtttacacccctcctttcctgtagactgctnccatgtactcgtacagctntagcctcgcagcactcgtggtccacaatgacaaaacaatatttcgacactttatgctccctgatgaactcctcctttttccggtacacgactctgattaactcttcgcttatttttactgggcgcccaactcaaattgtattgtctctccccaattccatccaacgttccatgctgcccacaatttccgtacttgaaagggtgttgcgcatcgaaaattttccccacaaactgtttaatcccttaaattcgaacattttttagagattttttataatttctcaccaattttgcaatcattcttagtccgggattaaacccaatcttatcataatccaaaccgatgtcatactttgccttgtacatttcgatgaatgctcttttttcatcttcacttttcacctccgccggccaccccgacgcttccacctttatcttcaaaaacatccggacatatcctttgaacagttgactgtcaaactgttcaaaatgatacgctcgatagaatcccacaattctatatcctagctctaaagccttccgcaactcaattgatgtgaatgtccccaaaaatgctctttgcgtgggacgatggttacattttttcacatcttttgtcatcacaaattcattcttggcccttctcgcacaagaccaacaattagggaagaggagcatttcatcgatgtgcacagggaggagggggtacaaaagatttttcggtgggatcacttttactttcaaaagtccatcatagggtacgtcgtcgggtgctgtccaattcacattaaaattcctgctcactacaattttcgggactccaacggggtatggggtgtcttaagcgaaaggaaactaacaaaaattaagcagatttttaccataattaacaaaggggtacaaactaatgatgtcgaacattgatatctcaatttcttccgtagcctttgcgtacaaacaaaatggcatcgttcttcccccggcataagcatccctcggattgatcggtcccttgtccggcacactttcaaagaactttttcatctccttatttttcttcaattcctctctgacatcacactcctaaaactaacaattaataaatatttctaaatgttttattctacccaaacttctccgattgaaaaatttttgcacttttccctcaaaatttccatgcgaatttcggttctactttgattctcttccattgtccgtccgtttggcgctatagtccaaggtaaaaaacatctcggacacccgtgaaatgcacaccccttaagtattgtttaaaaagaaaatattttttcttttacctgaaactcaattatttttttctctgccccaatcacacagtccaccttcagcccaccaaattccacttctcctccgttacacgcatgccgcacttttactccctttttttgggccagccattcgaaatatttcactgcaattttgctctgattctcagctttctcataccctccctcaggcatgatcggaatatgcctgtccttcaaaaattttgccctaaatatctttatcacaacaccagcgattgtcacgctgtccttcatcacatccaaatctcctgttatccccaaaaataactgccgaaacttcaaaattgattccatcaaaatttcaacatcgttttcgcaatacgtcttgagttgttccccttaaattttattttcaaagaaaaaaatgttattttccctacctagttcaaattccgtttgaaaattctcattgtgccatgcttccaattttacggcttcttcctccttcatattgtccgggcagtagtctcccaaagaaggcaggttgggtaatctcttcccaaaattctcattcttattgtatttgtgtggaaaatacaatttagctgcagtttttaaccccaaggtttttggaaggtccgccaatttattctgactaagcatccaaaaatcccgaaagtacactcttcccgcctttatttgataaattttcaaatcagccatcatcaactccgtcgcaatttccttctttgttagctcggacaagacaaagtgtgaatcgaacctcccagcataatgcgcgaaagcaatcgtttcaaatcgttgaaaacccattatccaaacgataaactcgctcattggctcaaaaccatccgctactgaccatgtgattttcttgggtccttcacaaatttcacatttccgctcttctcccgcacaaatgctgcatgttagtgccacactaacaagattaggccgatgttctcccccctctacagtcgtctccaggtcgtatgccacaattctatatgctttctgcggccgcacttgaatttttttgatgaaacattgccgtcctgggtggaaaactttgcaaagtctacaaaacttttccccgcagacgtgtttcgaacgtgtttggtagacttctccacatttttcacattttttgtactcattacaagctcccttcttgtgcgcttcaaaacattccgggttgtagaacttgcgattacattcgccgcagtaaatctattcacagacatccgcgcatggaaagccgaaccccatccggcagcacttcttacatctttctttacattctattctgtgccgttcctttgtttgataattcacttcgcaagccgcgcaaaagttgcgaacgcagaaaaaccaggacaccgattttaacccatcccagtggtccccctctcttatcacgttgatttcatttcttcgaacaccttcccccttgaaaattggcttaagtcgggtcttctaaaaatatgtaacgggatatttttttatgcgaataattaccatttcaaaagcgacgatgcgaaagttgtccgggtattccctgtcccagtatttttgtacggcctcaaggtgttggataccaaaagttttgtcatctgtgctaattcctgccttttccattaattcgatggccaattccctttgtttcttttccgttttcatgagataacgaaaagttttttccgttataccttcgcctataagttggtagcttcgagcaatttccaaagcataaaaaagacctaaacacaagtaaaagtttctaaatttatgcggaatttacgggatttgaaactcactaattttcccctttggtgtgttaagccggcccgattcattgatttgggtgataggacaaaagcgagacattttatgaagggagtaaaaaaaaagccgatgagttgttactgtgagaaaggtcttttttgaaaaatacaatttgtttaattatcaaaaaatattgatcgaaattaatcaaataagaaataaaaaattataattttatttaaatgttattattggtagagtggaaaataaatggggggagtactaacatcgaaaaagaaataaattccggttcttcgggccattggtattgatatatgatctgggcgaaacaatcttctcatcatggaataaaaccgacatttaacaaagtatgccaaaacaaaatttacgcgcaaaagccgatgtgtttttggagggggaagagcatcaattatttccttgatcaattccgcgggaagcgggcagggcatggggacgtgaaatgttttaaaatgaagagaaaaaaccaattaattcattcgacaatatcttactagcaccaaaataatgcacatgaaaaaaaatccatatataataaaaagaaggaacattccaaaaatttcgtcatttcttttcattttttcataatctttgtcaaaggttaggtttagcatctaatttcttaaaattttatgattttcaaacaatttaggtaacgggatttaacccttatcaattcaaaaaattaaaaaacaacaaattttatcaaaatcaaaaattccattcattcattgaggcggacgtcttgggtcccttggtcttcctctccactcacccagccgtcggatcacttccaacactctcggggggttgggatgtatttgcttaagaaaagatgtttcggtgctaggtaaaagacagggtctgaaattaccggtccgtttggcagcgggtggtcgaatagtggcacgtctctcagctgccgcggtcgttgccatggttggattgcctgaatatgcatccgaaaatatgagaaacgcacgaaaaacaagacccaacattaccggaacgttttctggtggatgatacggcacgtttggcggcggatgggcaaattgcggtacggcgtattcacgttgaatttgtcgaacatgaattccctgaagaaacacccagagactgagaaaaagcaaacacaatttgatccaaattgaagtcacatttcgcggtggatggtgaatttgcggcatgtctctcagcggcaacggttgaggcatcggttggacacgaattacctaaaaaatgcattcaggatcttgaaaaaaagtaacaaaagcgagccaaaattaccggcacatttggtggtgggttgacaaatagcggcacgtctctcagtggtatcggttgttgcactggttggacacgaacggcctgaaaaaagcactcggaaatttgagaaaaagcaacgaaaagcgagcccaaattaccggtaaatttagtggccgatgcgcaatttgcggcaaaactctcagcggcatcggttgttgcccatcatgaattggtcccacaccaatttcctgaaaaacaatgcactcgggattttgaaaaagcaaccgaaaacgagactcaagattaccggcgcatttggcggagggttagggaattgtggcacggctcccattggtacgggttgctgcattggttgaacacgaattgcctgaaaaatacactcggaaattgagaaaaagcaatcgaaagaaagacccaaaattaccggcacatttggtggagggttagggaattgtggcacggctcccattggtacgggttgctgcattggttgaacacgaattgcctgaaaaatacactcggaaattgagaaaaagcaatcgaaagaaagacccaaaattaccggcacatttggtggagggtggaaaatttgtggcaggtctctcagcggcaatggttgttgcatcggttggacccgaacagcctgaaaaaaagcacgcagaaatttgagaaaacgcagcgaaaatcgactcaaaattaccggcacattttgcggatggtcctcgaattgtggcaagtctctcagcggcagccgctgctgcccaacatgcattggctgaacacgaacagcctgaaaaaagcactcggaaatttagaaaaagcaacgaaaagcgagaccgaaattaccggcacatttggcggagggtggccaagttgcggggggatcggcggaggtggcaagagaatttcatcatcttccgattcgtacccatcgtcatcggggaacatctgccgccctaaaatggaaaaaatcagacaagatatttgtggaaaaccaaacaattttcatcctgtggacgatttcctgcaaacggaatatttgcaaaatccaaaaaaaaactgaaatttaaactaccaacgatgaccgggattgggaagctgcgcgatggtgaacggggtgtggaaggaggacttggttgcttggatccgtatcggcatccagaaaatcttttctccatttcctacaaagaaaaaaatcaagattggaaaaaatgaatgccattacgaaagttgtccgagtgaatttgggtcgtatgctctgtttgggtcaaaatgcccagtcgaaaattccccatagtcttttgaaaggaacgcgaaagtgccgggggcaataaaaggcatgatgaaagtggatgaaaatggcaactggtgaaaagtgaatttgggatgcgtctccgctgctgacaaattaaaaaagtgggcgaaagtggcaaatgatgagaagagaacttggggatggtgccgctgctgactcctcccactaccatgccgttctgccgtgctgcggtgacagatccagatgatcgatggaaaatttgaatatttgggggcaagcgccccgaggggcaagaatggcccccgaccccccgccttaagcgaaatggaattgaaatgaagtcgcttcggccttcccttcatttatatgattgacagttcccgtgtataaaaactgcggtttgtgtgacgcaattatttttgcatctccgccgcgctttaaattttctagcccaaagaatttgattgacaggtcacgaacataaaaactgcggtaaagtggccgcaattatttttgcatctccgcagcgttttaagttttctcgcccaaagaatttgattgacaggtcgcgaacataaaaactattttgaccttgatgcgtggatggcaccatttttggtgcgccccgcacaaaaatttcgcaacaaacgaaaatgtgaataatcttatctgatcgaaatatgcggggagggaatcgcggtaggggggtcagatgaaagggagggtggggggatcttgggaccaaatttgggccggaatttgaaaagcagaaagaaagggtaggaaaaggcggaggggatggggccaaatttggggtggaatttggcgggggggggggaatttggggcggaataatgggtttggggcggaataatgtgtctgatactacttatgtttattcatcaaaatacataatagccccgagggagtgttaagaaagaccaaaagggggcgggcggggagagaaaacattggcaaacaaacccaagggcaaatgattcatccaaccgtatctttggatcattattttatttttaaaattttttatttttctcattaattaaactaattatttctaaatctgatagggcaaaaagtttttaggcttagttttgatttatttaattattattttcaagaatgaatgaggacggccttacgccgtttgaccaaattccggaattacgggaattacgggactgctttattaaagtcggttttttaatttattattttttaaatattttcattttagttacttcacacccaaattgatatgtggaataagttggagaaggtagtaaatgaccgagagaacatggccaacgagtacaaacaataatgtggagaagcagatgacaaagtcgcgcaattgcaggcgcagctcaatgcggccgagcattgtaagttgacagaaatatttttaattgagaagaatttttttaattttttcaactatcaaaggtcgggacctagcagtaaaacgggaagcggaagagcacttgatgaaaatggaggaggtggtaaagtttttactttaaaagttgctcatttcctgggccaagaatattatattgtaagggcttaagccggcttgctcattatgaaatttttacaagtaacaaaaaaacatttcttatcaaaattcgaaaagtaatcaatatttaaaagtccctgatcagtccgcattgatcactgtttatgctatcaaatccagcttccaaatatgttttattttattttaattttatttattcatagagagagggacgcaatgaaacggaatcggtcagccgaattgcattcaaaggcgccggcggagagcgggcggaagcggagcggccaacctatttccacatttttcgcggcgaggtccaattggcgacggagactgtggcacgggcggactacgaaccgaagggccgcggtgatcgcttcccggacaagaagcacgtggaagcgggtgagtgttgtgtgtttgttttgtgcaattgctaatagccgggacagagtccgcgactgaactgggcggtagcgattaaatttcccaaatatttttatgaccgagcgaggcctgagggtctgggattaaattcctgaaaatttggagccggaacaacataacatttcttgaaatatgttgtcgtgattgagctttggactgactgggacgaacagcaattcaaattagcaaataaaaaatataggattgaattttttagacgtaggcctggcctgagcgaggtccgggcttaaattcaccgaaaaaatttgctaaaattgttataggaaccaattctaaaatttagttgattctcagaaatgactaagtactaccgtatctagtttttaaaaatatagtgtactcctgcattttgcgctcatgatgggatcggacctaccaaattcccggcagattccgtttccatctgggatattcatgaaattcaaggagagtcggtcttgacactcactcaagaacaggataagatgtttagagctgttgcgtcgcgatggaacaattcgtgctgaagggacagttaaccgaagcgactatgccaatgatggaaagcggggggaagggcacgagatcagctgggtcaatggccgcgaagcgtcggcaccgctgtttggtaaagcagctaatattcgaaaataaaactcccatgctgtgtatatatcattaatgttcattagtgagctaatgatcgaaattcggcttttatattgctcatttctcgggtcaataatttttctagattatgggttaattagttgatttgatcacctttaattgcccccctttcagccggacctagatccaattcagcaccatgccgacaacattcatcgtgctgaatttgtcgcgcacgaaagtgggaagcgcaaagtgccgacggaggagggtgctgagcatactccggcgaagagatttatggcaataatttaaataattgtggcaaaaattgtgaaaatacaaaaaggcaaattaaggccacggccacaactaaaaacgccctgaatcaccagcaccaacgccggagccaatccaagctttattgtcccaacgtttgatctacacgatcgcgtatattaatggacgcgtgtgctttgtcttggtggacaccggtagaaacaataattattttttgatttttgttgttcaaggcttcgttggctctctgttgagcgacgaattctacctgggagtcaattatacgccgcgctttggtgcgacattcgacgcgaatgtcgtacgaatttttttttaatcatttttgggacgacgcgcgcgttgtcgggtcggtaagttattggattttaaaaatccaatggcattggacactgaaaatttgtgatggtgatttaaggtttggaacggattttttttcttcattttggtgtcaacgtttgttacgataacaggctgcttcgttttggagaggatcaatttccatttttgttggtaataaccccaattgcgcattgcttgaatgatgataattggagattttttagcaaactcaggcaatggccgctcttggccaagcacatggagaccccaatgtacaacaagcataaagacgtaaaaaaatcataattgtaatttcaatgaaatttttgcagattgtattttgctttttctgctacaattaccatcaatatttgatcattcagtaaaataaagattttttcgtaagtttttgttgcaaaagcaaatacatataacgaaaaaatattaatacgttttagcattcggttttccatattcatcaattgtgcccaaatcggtcggttgccaacgcaataaaatgccaaatatttctttgaattcgtagtcaatattttggtaccactgcgcactttcaccgcttttcaagtccaattggagtccgcgcatctcttgcacgcggcccttgttgaaagaatgccaaatttgagaatttggacccgcaggctatttttgacgaatccgaattttaggaatggaccaaatttttggatcgagaatttcggctttattttttcttttttacatttcgagtattgatttcgggtttatgatttcgctgtccatttgaaaacttaaaaccaacaccataagaaatatttataaaaattatagcttgatattctcatttagaattaaaaaaaacgatatgcctgcatactatttattattattttttttaatctcagaattttaaaagtatttttttggttctggtcggttttatgcgtctcatgccatattatgcgtcccatcacatattatgtgtcccaagaatgatcattcttagtttcttagtttatatccttttttcttacttggtcaatacctatattttggtatcaatcgatagcttaatgactatagaagcttttgtataaatttattttttaactaaaggcaataaaaaaaaattatactcggaaaagttgaattcatatattctcattgtaattttcctttttaatgcctgttattattttttcttgcattataaaatcccgagactttcgtcttcgattgataccaagaatttaggtattgaccaagtaacaaaaaagttatggcctggcctaagaaactaaggattaagatcatcttcttttattacggtccctaatcggattttgtctagacttttttttgagaatgcactcggaccagcagaagaaatccaaaaaaattttagttggttcgtttccttaatccatatatccacataatatggatcagaagaaactctgctgatccgtcctgatcagagttcagaaaaatgtgtaaattttccgagtccaattttaaatgtcatcatttttcaattttattgactcactcgccactcaatgtgaccgttatattatggaaaacagctgaagtgtagtaattaatgggtcccagcagtgtcggctttttgacaccacgggaaaagtgaacggcgaaacgccactcataccgtacccatcaacggatgctttgatttggatactgtaaaccataaaaatattattttaaccaaaatcatgttcggattcggacccgtaatggttaattaaataaattcttttcaatcagaatgcgtacccctattttttccaattatgtaaatataaaatataatctattttattatgaacaaatatgttatacatatttatggtatgctctcccaattttatccaataaatccgtatttataaaagtttcatttaatattcatctatttttggatttttgcaccttactaattcatcctaattatttaaagttttgaatttttccaatttatgtgccttcaaaaactgatttttgattgagtacaatccgtaattaacgacctaaaatcatgaaaatcgttaatcaaaacacagttacattcatcaacttatggatattaattaaatttctacgatattttgcgtgacatcaatcataattatggattgtccttaatcgaaatcaattgtgcccattcattctgggaattgcaacccaacaaaaacgtaattatgtaaaaattaattaaaattcaagatttcccgacttacgtgcccttaaaagctgttcggcgcctttctccccaaaaacatttggacaattgaaaaatctcttcgtaatcaattttcacatttgccgtacagtttttgcttaccccagtgaaacatccgtcaaaaagtgcgagagtgccgaaaatgggaacaaaaatttggcacaaaaaatattcattaattacggcgttttttcggaggatcttctttagggtttttgtccgggtcattttcataaaaataaacctaagaatttcaaaaaattagcagaggcatttttatattttttacaaatgcaattttttgcaaatccctcagacaaatcctccgacttcaattgaatgtgccaaaaacaatgccaaacttctcgttcggcacttgacctttgtactgaaagaaggcacagcttaacagttttgccgtatcaaatgcctaccgtacacgcacagtactcttcccccggtgccatgtcattgctcgcttttgtccccttataacatgcgtagcacgtgttttctccgttgttccgttcattgtcaatgaaaagcggcgaattaagccatggcgggcgcaaatggcgcggcacgaaacccttctgtttgaccaccgccgagtgccggcactgctcgtggaacggagtgccatcgatgggacggcacaattcgtcggcgccatcaatgcattaaattacgaggaataattaaaaatttcaatttcaatgaatttttaattttaatgaccatttgttgtgttgtttttggatgtaaccgcaaaataaatgaacattctgatggccatggcaaagatggaaaaattcggatagaacattttgatgagcaaatatttatttattaaattaattatttacaaattcgagtttgtttaaatcgaaataagaattataattatttacctttactatttattaatttgattttaaaaatctttgaaaatctcatgtccttgaaatttcctcgaaactctaattaattattcaattaccaataaactgagagatttgtcatgtgtaatgatatgcttctgtgaattattttgtttttcaaataattattcatcatcactaatcaaaataattttactgacagctgaaaagtcgatttttttttctgtagtgaaatgaatgagtcaccagatgctgagaaccacaaaaattttttgcttttatttaaacaaaccataatcattctcattcagttgtccatcttttagccaatttcatccgatcattttcattttaattgtaaaatttccaaaataaatattttctttttttttgaacagtaactttttctgatgttgtcgaaccaactcaaactttttattcttattcttgcaacattttccatcacctctgtggagggcgactttttggcttttttttataaaaaagtaatccaaccaatcgtgagttgaagcattttatttgttgaaatttgtaaaaaaaaatatttaaggaaaatgaagttgggaaagccgtggtgacagtcgtgagttgaagagcattttattttttcaaatttgtaaaaaaaatattaaagggaaaagaagttgtcaaagttgccgacaaaatcatcgatcacatccctcttcttgcccaggcgcgcgcgattgcgagagttgccgccaaccgaatattgggcaacaaagaaaaatgggaatgcggacctgaccatgaaattaaagtggttgacgaactgttgcacgtgagtttattttaatttattcctaattatttaccgttttaagcttgatacggagtatttgatttccctgcaaaccagctgctgggaaaaatggggtcatttttgattaagcattattgctcacggccacattgaaaatttaacaaaaaaatggcataagtttgcttaaaagcaatcaaattttacattgttgggtattatttgatagcccagcttttactctattatcttggaaaaattcatataaaatttacaaatttaacataagttatggcatcaaaatagtacttatcttgttttcatataaattttctaaagttcaccaaatttgtttttttaacttttccatactaatagagaaaaagctgggccatcgaatgctaccaagaatgtataatttgattgctttaaataaacatatgccatgttttgtcagaaaaatctttaaaatggcggattttatgaaacgaactagcacctgcaat

SEQ ID NO: 1273 - DNA, 7670 bp, Heterodera glycines
  unsure (1)..(7670): unsure at all n locations
aaaataattttacaccaaattttaccgcatataaccaatggctgcatttgattgtattgtctccaaaattgaataccaatcgtaacagaacatcgcccacttaagcggaaagaatcccaaataatntaataaataaaaagataaaatgtagaaaattgtatatatattatttaattttgaatttaattaactcatttcggtgaattgcgccacttcatgaaacaaataaattttgattactgtggcattacgatccactcgtccttcaattttcactaattctccataattaagcaaagaatacagttccattgaaatgccatcttcggattcgcactgaattaaaaaatattttcaaatttaatctgttgcttgctttaagccccaccccgcccctttttaatggcatttattaatgaaaccaaaactcatctctcattagtacaataaaaatgctaatattattttggagaatgaatatccggtccctttaattacttccgtgaaattcactgatggctcttcgagtagattcacattgccttccaccttttcaataaaagtgttaattgcccaattagtacgttaattacccggacaaaatttattgcccaagccggcgtaatgcttgtgttctgttcgtaaaacaaaattctattcacatagaatttatatgtgtcattgaaaatgagtgtaaactcatattctctctgatcgtcgacattaaaggtaaagtttttgtgcaaagatgttttctttccaaacttaattaatctcattaatgaatagaaaaaaattaattgtaaaaaaatcatacatgctgattggtaaaagtgaactggttctgttttctgcatgggttcactttcatttcaagcagtgtcgaaccaactgaaatttttttaaggtcgttttaaaaaatgccactatggcgtttcgtaaaagtgcctacctaatttacacattttcaagaaaaacatccaacaaaataaataatcttggtatctcatacgacagcccttgggttgctctattagtttaaaaaatttcagaaacattcattgagatttttttaagaaatttgtgatcaaaaattcaaaaaattgccatactttctgaacgcattttcataaaaaaaaaagatttagctgcggtgccgatagacgcagccgcgatttttaaatttttaatgcaatttgttagtaaattttgtccaaaaatgacctgtttttgcgaatttgagccaatttttttttaatagaaataaggattttagggccggcgttacaaataggcgccgccgtactgatttgtcagtgaacttttctaaaattttccatgctaatagagcaacccaagagctatcgaatgactacaagattgtttaatttgatgtattaagaaaagttatgaccacgcacctccgggaaaaaaaagtaaaattttaaagagaaaaaaataaaaccgaagtaattttcttaacaaatctaacaaatatttcaaaaaaatttctgcgtgacccacctttatcgtatcagacttttcctttattttctcaaaaaatttgggccaaaattatttaaggagtaaacaaaaggcaatttttgcttcggcaaggcgccttcgaaatttaaatagaatttacaaaatattatttttgttatgccaagaaaccattttaattccgactatcagtgattagattttcattcatatgaaaaacacctctgatgtgctgttctggtcggttgtgcaacaaactgattgcaaaattgttttcgtttttgcaatttttggcgttgttttccaacaattggacacggaacaaaaattttgttccgatacaaatttgttggtagaatttgctgtaattgagcttcactgggttcataagcttaattcaatttttaattttttaacaaattatgttttcttacatcaatttcaacggttgtcggctcctcaagtaaaagcatttgaccactcaactaaaaagtggaaaattcaaggattaattaaggttcaagccccgcctccggggacgggactgcttttttggcctcacccccgcccccgcgaccttcaccctcgcaggggcgcgggtgataataatacaccgttaagaattaagtttttagattgggtccatctaatgatctggggccttatgctcgtctcgcggtttagtaaaccacggttaacgcattaaccacggtttcgttaaccgtggttaacgaccgaccttaaccggtatgctcgtctttaaccatggttaactcaaccgtggttaagagaatttatcttgaaattgaaaaataattaatattaaaaaaatataattaaattattataataattattttttgtttatattatcaatattagcatagattttattaaaaaaccccgaaaaaactattaaatcaagaattggttttctaaaaatttttggccataacttttttaaacacagcaatttttttttttaattttgcaaattaatagaggactcttggggctatagaatgataccaagaatgtttaatttggatgcttcaagaaaaagtttgctgcattaaaattgtcaaattatttttttatggccgtgtgaactgcaatggagccaacatttcttggtaatagtgcattacaaacaattacgttgttatgcaacatgctacaaacagcagcaattgagtcggggtcgttttggcgcccacgttttggcgccgacgttttggcgccaaggtcgttttggcgccgacgttttggcgcccacgttttggcgccagggtcaggtttttaaattttgtctatgtttgaataaatgaaaatatgtattcgtcagttttctgagtcgctaatcacgaatattgtattcatcttgacaattgcgaagcccggactcgatttaaatgaaatacaatttttgaacatattagatcaggccttctatctgttttgttttatcaaatgttttaatatggtgggtccaaatctgagaaaatgatttaccagattcaaaaccgtagttgtacctgtttcaaaaaatggcctgtacctaaattttgtcaccttttttaaaaagctattttagcggtttgggcgtgtgcaaattttttgatgaaataacactaatccgtcaataatttatatcatagacaaaaataaaagtcagattctttttctgaatgtaaaattaccctagaaaaaatttatttatttattttactatttaaattattaaataaatttacgttaaccacaactcgagttgtggttaagattccttaagaaagattaaaccacggttagatgagcataccggttggaaataaaccacggttaactcaaccgtggtttagccttaaccacggggaagaagggaaggacgagcataccgcggttaaggatttttaaccacggttaacgccgttaaccgtggtttagctctaaaccgcgagacgagcataaggccccagctgtgtcttcgataaatcgtgatccgtgtccaggggcttttcaatggggaaatcaagaaaacatatgcttaacatgccaaacctacacgacaaatgattttcatccctgaaaaaacaaataaaatcagaataaaaatatgaaaaatgttcacaaaatgggcaaattgttgcgaaaatataagcaatgaaagccggaaaattggaccaaattttttacttttatttttttaatatatgaactaaattatttattaatacttttttatgctcttttttgtacatttttttacattcttttgaatgtgttaaagctgtgccacaaacttaaaaataacaaaatggatttgaatttgaattgaaattgtcaaaatttccccttttcggcaattaaaacttacaccaaacggccctttcgccgtaaaacacgcggaagacatccgtttcgctggccaacccttcgtccaatgcaaagccggacattcagcgcccgaaatttgtctgtctgaacaaacttttccatcccatcgtggcctccgatttcctcgtctcaaattgggaaaaaaattcattgccaatttttttcggcattttttgtttctgttacccggcccgaacaaaacgtgcacagtgcgcaggaagggcttgtgcccgttggcattgagaagcaatcgcaatgcctcaatgtattggacaccaacgcttttcatatcctcaacaatttaattcaagaaattaattaaattaatacaaaaaaaataataaaaattacaaaaagacgcgctttacctgtgcccccgggcgtaaatatttccctgcgcgtctttgtgcgcggaatacggcggatgggtccatttgctctaattattttatcaaataaataaattctaattttaaatttaaatatcatgacagtacagcagcagagagggcaaatttggctcagagccggcaaaagtcattccaacaaatgttttgccgggaacgcacttaaaaatacaaagttagtttaatttatataattttaaatattcctacctcatattcccaagcgtttaggccgatttcagcggcgtatttaagcaaaaagtcgcgatttttctctaaataatttggcaatgccaagcagaagacggcataacaaacaaatgattttagccaataattttaataattaaaatagtatttctaccaaaatatttctgttatttcttacgataatcggggttcggctgctccgtatttattcgcaaatattcgcgaaatctcgtgacagccaacggctcctcattcgactaaattttgttattttaaatataaattttaagaaatatttccatttaaaaattgggttaagatcaaaattattttccagcatattcttactcttcattcaccttctgctgctcctctttcttctgcttgttcttccaacttccaattgcgttccaaaatgtttttcgttcttccaattcacttttattttcgattctgtcctttttattggctttccaaaattgtcttaatttaaataatttattgctaattaaatttaactaattaaatatattaattatcatttttggtggcctgaattatttgtgcgctttttgaacgctttgccaaatctgtggcagcaaaagttgcgctgtctttccatggcattttaatgtttttcaactgattttgctcgacgactcccaaaaacggcgtaattatctttgaaaattttctttaattttttcccatcctatataataaagttgagtgtctgtatgtatgtacggatttttgaatttgtgtggcgttttgttattattttgcgttaaaaaatgatttgaaaatgaaaatgtttttgttttgttttgcgttaaaaaagcatttgaaaaatgaaaatgtttgttttttttttgcgttaaaaaatgatttgaaaaatggaaatgtttgattttgatttttcagtttgttttgcaaaaaacattcttagtcatttattcgcttttttgtgtatgttaaatataacgccaaaatcgtccacacctccattcatcattttaattttttgtttttgtctttcattgtttaatttaaaggtttaatattgcttatttttttaaattcaaagtctgtttgtcgtaaaattttatggttatgtattggttagaaaaagtatttatttttgttgtatacacattatttcatatattactttaatttttgttttattttagaattgttaaacaattagagaattgtttttctgccgatacggctcattttttctaccagttttgtcaaaaatctggtgactaaacaatttatcgttgtttttctgccgctacggctcattttttctaccggttcggttttttcaaatctggtgccagcctgttgccatgcttacgactctggaagagctcaaagccacaccatgtggcactcagcttgcgtaagtgcttgaattagtaatttgttttaagtaaaattgttaaggtctttttgtgggcagattgtaagcattttaccgtctgagaagaagttgacggctttgttggcgtgtgcttctgggaagaatgttgttctcacagaatttaagagcgtgtcgtccaaattttcaaaaatttgttcccttggaattgtaagtttgctgtttctatttacagatgcttaccttactaaatacaggtcgtcaaattttacatgctgaaagctcaacgctttcaagagcgtttcgatggaaagacaatttacgttacgccactggattatgaatttgtggtgatgactttcacaagaatggagctgattcaatgtgccattgcgactgcggattcatttgagaaattgacttcgggttgcatttattgtgagttttaatttttttattaatttataatatattacttggtttgtaaaagtgtttataaagcaataatatactcttcgtgcttttgataaacattactgtttgttctgtgactttcgtgtgagacacaaatgtgtgtcatgcttttgataaagcataagtggtttgttctgtgactttcgtgtaagtcactaatgtgtgtcatgcttttgataaaacattagtggtttgttctgtgactttcgtgtaagacactaatgtgcgtcatgtttttgataaacattagtggtttgttctgtgactttcgtgtaagacactaatgtgcgtcatgtttttgataaacattagtgtttgttgtgtgactttcgtgtgagagataaataaatgtttttgacttttaattttttaaagcaatgaattgtgctctcgcttcatcgttttcgccagtcgggaaacatttcgctgcagtcgttgcggacaagaaaggaatgagggctgatttgtacgtcaatggcgaagaattggtagaacgtcttggttcatgcgttaagaacacacagatcgaacttcaaaatttttttgtgaaagttgaaggtaattgtaattgtgtcggcattacctttggttttaatttgagttttcaagtttttttttattatcatagatgaatgccttcagctccattgcgagatttcatccgttaaaattggtgctgggcgcgttaatcttgaggcgattttgacgacaccaattaaacgtcgtagttcggaaactttggagccaattaagaagtcgcaaaaaaatgggtagtatttcgtttgttgtccgttgcttagatttgatttgtgactcataccttttcgattacgtattttatgtttgattcttgatattttgttcgttattgttattaaattatatttgtgatcctcacacattatcaaatacggatataattttcattttgtaattgcgctttaaaattgttgatttgtcagaaaagtgttgaatttattaaatgaattatttgttattatgtattggttagaaaattcattagtgtggtgtgtggcttatgttagtcaatcacattacctgttatatgtaattattagaattgttttgagatccacactaatgtgcctaccaagttttagaaacccacagagtgtgaacttttgtcaaaagaattctttgttagtgaattgttttgcgatgtacactaaaagttttgtaaacccacagaagtgtgaaattttgtccaagttttaaaaatatattgtttgagatgtacactattgtcctctcatccatgagacacagaa

SEQ ID NO: 1274 - DNA, 6838 bp, Heterodera glycines
tttgagtcccagtgtttggaatgccggagatttgactctttgtgtttggaatgccggagatttgagtcccagtgtttggaatgccggagatttgagtcccagtgtttggaatgccgcagatttgagtcccagtgtttagaatgccgcagatttgagtcccagtgtttggaatgccggagatttgagtcccagtgtttggaatgccgcagatttgagtcccagtgtttagaatgccgcagatttgagtcccagtgtttggaatgccggagatttgagtcccagtgtttggaatgccggagatttgagtcccagtgtttggaatgccggagaattgagtcccaaagattgaattgcttgtgggttgagtcccagagattggagaaaaagccaagaaaatgatgcgaggccgcgaagcggccgagccagtcgattttatcattcataattctataacacaatcgtactgcctagcgggggatgcgccgaaggcgctgaccccgctagttattataaataacactttgtggatgaatttgatggcttacaccagtggcgaaagttttcgttccaaaattgacgcaaaaagagcagataaaaattaaggaaatcattttgcgaattttcgaattatttttttccgtcggataataaaaagaaataaataaatttattaattcacatgaaaatattccctttttcattacaaataaaataaaattgaatttttattgttaaaaataactaagaaagaaatggtgtaatatgaattaattactgtaacttttctcggacttttgtaagaattttaatgacataaatccaaaagaaatccctctcaatcggtctcactgaatctgaatttcaagcctcagagtcgtttaaagataaacgaaaactaaattcaaattcatatttacgcaattttgctgaacaacttcccacagaaaaaaactttcaactaatttatttatcaaatatcattctcttgattatagcctttcaaatggtttaataatttcatgatgtaaaagtttcaaaaatttaataaacaatcaacttttgcaatttggctttatccatctctaagtgtcatacataggtatcagtgctaatgattgaattattttcattttccattaagaagcttttcttcttgacagagtgaaaaattaatttggaatttgcggctaagacaatttaatttacacatacctatttattaatgaaataaaaagccagagaaaaatttttcggtcgtacaaagtcctaataaatttaattaatagtaattcggagaatggagcatttgtgccgtccctttttcggcatcagttcgctcctaatcaaacaaatttaattattggacaacgaatatatgcaaagcatttggcgaaacacttcatttccaaggtgattaggtggggcgtgtattctcaatttcacgtaaaatgtggggtctttgctgtgttgtgatgctcctcgagaccgagcgagacagcaaaatcgagagattctcgacttaaggccggcctttgttttattgaacaccaaacttagatcataatttctcttgcctttgttcatctcattgttttcccgttgattatcttcagctgagacggcgaaactttgaacttcgactgttaagccgatcttcgcccgtccttgcttcagttcactcaatggcttcttctccttcttccccctctccgttgttctacgttttgtccgttttggccaattccaatttgttcccttttttcttcgccctttccattggcattccgtctgctttgctgtactgcttggagttggtggtaatcgtcgccaattttgctgatttcaattccgctttttttgttctcgtcgcttttagggtggtttcggtaaatatttaaaaatgaaatgccaataatcaatccgttcactttagagtttgatcaattttgttttttcattttttgcccaacgcttcggcgaaattggcctctttttggcgctttatcttaatttgccccgctttgtgttggcttcgtttttcttctttttttattacacattttatattgaaaatttgctgaccacttttttgctgcttaatcgtttcacggccattttattcccaacaaaatatgaaaaggtaaactaaattaaatgattatttagaataatttctttttcagttatggcgccatggattgccactttttttggctgtcacttttattttgccgttgcccttaacaatcccaattttaaacaagggcacatatatccatgtgcaagatgacaatgccacatttacattggacaattataaaacagacaatgttcgctaattagcctaattagaaaatgatttttaattgttgattaatcattcgtttagaaatttgattctagtgaaattgccacttcgttttccttttttgttggcgtcgtttgtcttctgttaaatttggcctcaattgtagcttataaattgaggaaagttggtcatcaaaatgcaaccattgaacacaaattgactattttcacaatgattacattttttggccatttcatcgccacaatttcttgggtaggaattttaaaattatttaattttccttttaaattctttaattgcaggttttggtttccctgacttcaataaatgaagtggatgagcaaaacaaaccttcttcatatgtccaaatgtggtttggcctcactttcgaggaaaacgaaaccctttttcaagcaaatttcaatcagtttccctgggtcaatgatttgtccatgttggccatcccggcatggtaaaaacaatggcaacttttcaaataatttattaatttaaaaatattttacactgtctttcattttaggcttttgctttgggcatcgtcaaaaatgagggaaattattgccaaaaaatttaattggataagaagaaatggacaacaaaaaaacattgcaattgtaacagtgaaaaggaatgttgtgccaatgtctgccaaagttcagccccaaaagcatttattgaccaaccaacggaattaatgttgtaatttaaacgtatcccaggaatattaagatgaaatccattcaaaaagagcaaatcttttcctaaaattacataaataaattttattttttcattctattgttccgttcattaaaaatttcaatttcagtgattttgtgagaccaaaattaattggctataataatgaagataatttacttcaaatataaagcataagtagtaattcatttttaaaaccaaaaatttgttttacgcaggtggatttttgtaaattatttcatacagattattatttttcaaaataaatgtaaaatgattagaaaaaatttgttgtcaaattactgcattaatttgctttcgcttttctcaacggcaccgtgcaaatgtttttgttggtgtcacgggcatctttctttgcgatttctttggcaacaggcgacgagaatttgcgcgttggtcggtcagccttttccatgcttcttaaatttggcactgatcagctggtttttcaacacaaaagcattgcaaataaatgccggattaattttgaacttttacaaaagttccgatcactcacagactcgccgatcgcactcggccgatgcccggcgtttcgaccgcactcagtgcgccaagtcccttgcagaaaaggatcagcgaccgggccacgcgatcgggctaaagaaatgttttaaaaaagtgcattttttaaattgaatttactgcttcgatcaaaacgtccattttgtcgtcaatgacgagcaaagtgctcttttctcggcgcatattctcgaacatatgtctgacattctgggaaaagccatttttccactggttttgccaatcatttgccttttttacctcaatgtgggaggctcgggaaccggtgacgagaagaatgtcaatgctgaaaagcaaatgagtcaatttaaaaaagaaatttaattcctttttgactttgccaatttttcgccgattgctccgcaaatgtccgtccgtttgttgtacgcgtagagataacggctcaaatttttcgtattcagcacggaactcagctcggcaatgaacgcttctttcaacgttttttcgtgctaaattttgaggaaatattttaaaagaattaattaattattttcaatttttatttcgcattaaattttagacattgaccaatccaaatttgtgcaagaaaaggtaatcccacgcggcattgttcatgttcccgtcctccactcgcaaatttaagaactaaatttgcaaattaatagctattttaattgccaccattcattgattctgtcattgtgtcaatggcaaacgaacaatttgcttgaggctttcgatgattccgtgcgaagtggccaaacaatggatcagaaccagcccaaggacacggtttggccaagccatctgggattaattagccattcgatttttagaaaaagattttgttttttaaattttttatttacagcaaaacggcaaagaatgtccgcgccagcgccctcgccaatgccaacgcaattctgcacatccatggcattcagaacgtgcaccaaatgctcacccatttgctccattgatgggaagctcaaaaaaagaggaataaaggcatttaaattgaaaaattaaccaattatttaattaatttaaaaaatcaaatattagcaaaacgcactccccgtccagcggaggagcgtcctcttcctggcccggcacacaaacatgcaagaacatggcatgatttttgacgctgttcatgggcgaactgttcacaaattcgatgaacgattgggaggtggagccgacgtcatggacagtgagaaaaacctttaaataatatttaatattaattctaattaaattatgccagtttatatagttacagttttgccctccaaattctctctcggtttctgcacataaacagtgaaatgacaattcggtggcacatccacagtgaccagctaaaatgatcaaaatattattaggggcataaaacagtttaaaattacattaatttcgtcagtattcgccatttcctcaaaaatgttgtggaataaaaaagcttaatttacgtattttatcttttcatttgattaatttttatttgtgtttgtatttgaacgttttgtggcttttgaatttagtcgttgatatttaaaaataaaaattcaaaacaaattctctgtttcgggaatgaggttattccatagtcgaccaaaaatgaagaaaaacaatgagtgacgagaggcacttttagcaccaaagccattcccaacgaccgctcgaaggtggttgttgtttacgcggatgttgcctcattttaactcaattctctctctcccatgaaactcataacatttgtgtgtccctttcccgtcgccgcccctccccccggggggaggggtgcacatttatatttgtacaaatattccatttaaataatttaaataaataaaattaataccatcattgttaaaagttaaatagcgaattatttatttgttagtattgattaaataattcaaagtgattgggccaaagatgaagagagtgaacgaacagtaatgactgagactttggggggagaagggaatttggtgcaaattttatgagttttaaaggctcccgactcaaagtactgacaaaatttaaaacaagaaatgagagaagatagaaatggaaaaaagaaaaacataaattattgagagtttaacagcaaatgagcaattaaggaataattgaaacatttttgtatgcctttgaatttgaatggataagtttgataaataaaaaataaaacaaaaatcaaatttagatattcgaatgctctatttaagaaaagacaaaacataaaattgcaaaaaataaataaagaaaaaagctaaataatttttaattcattaaaaaaacgataacaagaaaactaattgtaagataaccaataaaattttaaaaaattttcattaataggcttttcataaggagtttataaagaggagtgagatttagttgtttttacgttttttgtagataacatttaaaagagaagcactaaaaacacattttacactaaattttgtattaaaaataattttggggtttgacacataaaaaaatctgagttatagaaaatatttttcttatggccaagaaatttgctaagaaaatttcataaaacattatttaatagtttaaaattccgaattcttctagacgataaaaataaaatattttaaatattaaaaaaaatatttgaataataccttattcaatcccgattaatatggttacggtttttaaaaagaaaatcccaatcaaatcgtgtcccggctcccggccgtggcattcttgacgagttaacctaggcccgatattttccttacaagcatcctaattgagataattgaacgtttgaaaaaaccgataaagtgattttgtgaagactaatttccgagtctctaatagagactcaatactgttaccatatcgttgatttatttcacttttaaatttagaaataacattatgccaaattcatattaaaaaatcacttttagaaacacttcacactatgggtcaactccactgtgcagagaaaagcctagtactatctcgtcgttactctttttctttataatttctctcactttggcgtactatctcttcattttaatggtgtaaaaaacaacatttacttttctatgtctagctttttttctctatgttaaatccgcaccaaattttgcatagcgatagagaaaaaaattaggaacaaaatgtaagggtttttaagagcaaaaa

SEQ ID NO: 1275 - DNA, 916 bp, Heterodera glycines
ttaatgccttcgttctctttattgctagatgacgctatttcatcaagatcgtcgaacagagaaggcctttgtttttttataggcggcggcgcacagtcaagctcatcaatttccgtaattggtgggctaatgaacacgtcattttcttcccttatccatgataaaatttttgccagaaagatgtttcttcgttcgagcaaaaatttgtctttaaaccgaacgtcaaaaaatgttgatagacaatgaacactaaaacataaaaaatggaattaactaaataaatatgtgtttatgaaccgtttttcgcgtagaccaaagaaatatttttcgatctcattgaccagcgaacaccgaacactgtcaatttctttgttgattaattttgcactaaagagcttgctgtggagtgttacagcaatgggaatttgagctgaaatatgcgacttaacttaaaattaaatcttttgttaacccgacaaaggcgatttcatgagcatttttgaagcttcctcaattggctggagcaaagaaattaattcttcaataagcttccactcttcttcggttaaggtcaaatcaaaactccgattttcgaaagcatattggtaaatagcttctttttgttctaacaaacgcgaaatcattgccaacgccgaattccaacgcacagggatttcctaaacataaatattagatgcaaaaagtttttagaaaaacttgtaaaagtgaatgttcaggaaggtcaagaattgactgaatgttctgcagcatccccaatgctttgttagaatgtttaaaatgcgacaccacttttcgacactgtttgagcaaattagcgattttttcaaccctaatactcttctgaacgacaagattgagtaaatgtgcgccacagctaacattgcaaatgtaaaag

SEQ ID NO: 1276 - DNA, 3163 bp, Heterodera glycines
  unsure (1)..(3163): unsure at all n locations
tgcaggtnnctttcttttctgggaattttaaattgtaattcgtaaattaccacccatccatttgtgtataaatttaatattctgtttaatttatgaaaaataaacacgtattttaacattataccaactttcgtagtcgtacgacccatgcactctttgttttcggtatgctgcttgcgctttgataccttcctcaatgcttttctaaatgtttcccttctaattcaaaattagtccaaacaaacttgaagggctgcaacgttgctttgttcttggaaaaattgcattgatacattctgaatagatgttatttaaaaaaaacaacaaatcaaatcttaacccacaagttcagtttcataaagcttccggtcgggccaaatctattcaaaaaacaaataaatgaggaaaccccaaatttatgaactttgcttatgaggaaatcgaagttcgggtcgggtcttagcgagcgcttggagacaattttcttgcgacatgtcggacattctttgttccctcgcatcaatgccgttgttatgcattcggagcaaaaccgatgcagacattcctatgaatttgaaaagaatatttctatcatacaatgaaattaaagaccctttttttggtcatttttggcgctataaattacgaaattaaaaaggcataaaattttgcgttttttatttcgaaccttagtcgtcattgtacaggtcagcaagtctagacaaatcgggcaacacagctccgttgacaatgtccttacagtcactttgattttggtatcatcgctaatcattttatgtggccttcgaacctaagaaaatttaaattttgaattcgtaaatatccgatagagcactttgtcatatttgcttagctccaacgtttttccaccagttattgtgtccgttgtgtttggtcccggcaatccattgttcattttatttatgaagaggaatgtgcttttatttaatgaatacttaaatcctggtgctacttacataaatgaaacaaaataaaaaaggaaacaaatttgacggatcaaatgtaaaaaaacaaatgcacatggttcttccaataggtaatttagggtgttgacgttataagaattaagcgggtcctttctttgtctcctttcttttgtaattcgttttgccaggcttcttctgccgcctctcccattgattcattcacatcatttcactgtcctccaaattcattcgtcgccttcgctattcgtctcgttgctttcgacaacaagcgacgcacgcacacattcaaacgacatttgtcgttgcttggttagatggaaagggatgaagacgatggtcgggtgggtgtgtccctttgccgctcccttccattgctcccttccttcctttgtgttgtttgtgtgcatcgattcctcccttcaatttctccactcgcccttcgagggctcttaccatcggtaccaacattcggtcttcgttctcactcctactccaccatttccaccttttcagcgccccgaaacgcaagttccacatacatacaacggctgaagccgtttcttttaacttgcaattcatacttcattcagaatccaagtccgcattcaccgagattaattttttaagaataaaaaactatacaacagttgaactaaattaaaacgaagaaatttactgaattatcgctgaattcatgttgagatgacaaggcatggactccgacctcacccaacagacgacttctcatattcattccaccattggttcctccatttctctttcacactgcacccaatattttcacccatacttctgttttctatttgcctccacacacgcacacctatcacaccaatttcaccatcataaaattccactctcctcttttgcatctccatttcgatattttttgcttatacagccattttgttttgcaattgattccctcagaagaaattcaacatcatttacctgcataattatgaaaagtcttaaaatattttcatttaaaaattaagcacttacattattttacttattgcataaaaaaggccagccaagacaacgacagacattcggcaatgtatagccagggccaaggtgtgatgacgccgcagatattaaacatgcagcgtttgatgggtagtcggcctcatagggtcgggtcagccttctacggacctggcgatgtggaaatggtaggtttgacagaattatttttgtaccggacgaggaaaaaggactatgaaatggtattcactcatgtagactagttcttctatggaactcaacgaacagtaccccgtggggatgacacaacacaattttggcacatttggacagacaaaccacatgatggcaggcttccaaaatcgttcttccgacatgggtaaccttcctgctgcgatgggacattctgcggcgacaaatggagggttcaccagcggtttgggaactcggatgccgatcttcaaatgtccggagtgtggcatcgtgaaaaattcaaacgaagagttggaagtgtgtcgaatattacattccattggaaagcaacttcattgatcacaccattttcaggtccatattaaaactgaacaccttggttggcttcccttccaatgtccaatttgcaccgctttgcgtgcttcagaccttcagatgcgcgagcatattcactcccaccacaagaaaagtgagaacaaggtcagttgcgcattgctttggctttgtcggtttaatttgttgcttttttacaattagtacatttacgtggacaacccgcaggccaaggcattgctgcaggaaatgaccgaccgagctttgttcggtgctgcgcaatatgtccagcagcaaatggtccgtaggggaggcggagcagcgggaggttggccaacagaaagggcattttgaagacaatgcatgaaatttagctcaatcaggagtgccacaacaccaaatgcccaagagagctcgtttggacacccaaaacaatggcgcggagcgtcgattcaactcacaatcagttttggcagctaaaaggtgcgattgtgtttacaataacgtttatttgttagctagattttatcctttagaattggtgacgagatggcaccgccacgaaaccaaactcaaaatcgactgctttggcctcaaaggaggcattcaaatggagg

SEQ ID NO: 1277 - DNA, 7768 bp, Heterodera glycines
ttttcttgctttaaaaccgggaaaaactaatttggtgttggacacaacactttttggtgccacgacccgggaccccaaattacatttgttgaaaatttgggggtgaaggctaaaagccacaaataaaagcaggaatttttgagctggtcaaagctgtgtgcttccagccgggctgttgtgccaaaaataacaaagaaaggagaagctggtctaagtgtgttctttccagctaagctgagtgctgtaatctgaataaaggcattaaaaaaaaaaaatggagagcactagccaaaatgctgtctcattgagtggttccgattttgaccccatctatttttcgcccgaggaaaatcagagatggggcaaactgttggacaggatgagaacctttgaacaggccgtgtgtcgtcaattccgaagaattgaacacacatttgtccaaataacaaaccagacccaaattcaagacactgtggagagagtcaaaaatttggagagttctataaaggagctcgagaatgccaccgaattggacacattcgagacaaaggaaaaattgattgatgccgaagaagaggtagaacgggtgaaaatgagaattgatggttacgaaagatttacaaaggtacggtttgggaaaataatagaaaaaatgaaaagtgaagttggacgaattactgaaaatttggacacattgcaaggcagagtgcagctgttggagtatgaacaagacgagtatggaagagatgccgaatggatggaagacgagaattttagaggacaggcactaatttctccggagcaaaatgacaaaagagatgacatttcggtcggagagtgtgaaataatggtctcggacccatttttgggaggaattgccccattagaaggctatgatgggaatccgagtgtttctttttcccgttgggttgcccgattggaggatatgttgtctttgtacccgcaattgacggagccccagaaattaagccggttaaggatccttttgagagggcaagctagagcggaatttgaatcgatagagcctgctccggaaacgttagtggtggccttagaacacttaaaaatgaaattcgaaaacgaaaacacccgatcgatagctcgtcagacaatggtaagttgccggcaggcgcctggcgaaagggtttatgagttcgctaataggcttaatgaggtagtccgaactgccttatcgggggaaagcgaaggaataatcagaaaaagactttttgaggaatttttggaaaaattgacccctgaacttcaatttgaagtgaaagcagggagacccacgagttactcaaatgcttatgaaatcgcccagcattttgaacttcttttggccgccaagaggccttcacaaatctcggtcgcagactcggttgcggagttgtcccaaagggtggaggccttagctgttcatcaacaaacaacaactaagtctggcgctgaccgaagagcatgctattactgtaggcggcctggacatttggttaaggattgtcgggagaaaagaagggacgaagaaaggggaggtcacagagatcaaaggggtggccgatttttcagagaggaaagaagatggagtagagaaagaaatgaaagggaaaaccggcatttcacgccgaggggcggaggacaaaggaatcaccgtttaaatcatcgatctccaaccccctatggggagggcgagggaaataatcccaaccgttgggggcctcaagggagaagggtgaactttcggggccgagtaggcgctgctcgagtggcaagccccatatttttggcattgatggttattttatcaatttttggcaatggaagtgcggttaaccaggctacaaatccaatgatatgtcaccccgagtcaccttcaagtttatggtccataccagtggacccaatttgtccaaattgggcaccaacggagttgcccgtggctatgaatttgccagtttttcgtctaaatacggtaaaatataaaacgaaggcaaccgcatgcagatgcatacagacaaaaatagcgagaagaattggaattgttggagggcgatatgaagaggtggcaacaaatactgttgaagtacctacagcaacttgtcgaagaatgaaagaatttgatgattcgcccgcgggaaaattgtttcaaattaatggtactttcaaagccacccaaaattccttagagcctggatggagaagttggccaatgggaattttctggaaaaccatggaaattctaaattgctatctttatgaaacgattgtttttgctcgtcacggtgcctcagggctgagtaccccactaaatgattgtccagcctgctcttatcaagccggaaaattgctgctgtgcgcaattaagctaatttggagaccagaccatactcactgtgtaattatgtgaaagtcgcagactggaagggggagtactccactgatatttggacagcaaattcgggggattttgctctaacatttgtaaacaggactgacaaggctgattgcgatggaaaatggtttgttgcctctgatcagtcatttgcaattccaagagaaagttatttggaaatgatcgataaaagtgagtgggcaaattcgaagaatcgtaaaaaaagagaaattgacaatgaagactcagtgggcttagtttactcatctcagctggcagcgcagttaaccgcattaagtgcaaaagttacgcaaaatacccaaaaattgttcgcggagaccgttaggaaaatatgtaccagtttaagatttttagctgatcaaacgcttacattagcagaagccaacccgactcttttggcccgtttttacttagataatccgcttttatccgcgaggctagtaacaaaggatgtgttggaaataaagccatgttttggggtaaattacagggaagtacattttcagtggcaaaatggtccctgttttgaaagagtgccagtgatctttactttgtacgggagatatgagcgacaaaaacatggatttttggacccaaagactttaatcatacaccccaatgcgcgggaggcgaattgcaaggaatttcgctatttgtatactcaaacacggggaatagtcacacaatatgaccaagtgacaggggaaatgcacgaattaccacctgattctgtgcattatctctccagacacgggaagattgacttcccagaaataccaatacatttttttagaaataaagtacttgccaatttatccgagctatattccccggaaaattttgaagaaacgatcgaagtggcgaaggttgtgcaggaaattgcaagactctcgcggccaaacgcctgggaaattgtctcagagaaaaatgatcaaatggccacaaatatagtctcgaatggcttattttcatttttaagagggggaataatttcagctaatcaattatgggtttttctttgttgctgctatataacggtgacagtattaattcagtgcttcctaccagcaccaattgcacaggccatacagtatttgggcttaggtggtcttattttaaatggcttaagaatggtgcaaaactttacgggtgagagagtcagaaataatgcagcaatctctcaggaggctgtggaagcgcagctggtcaagtgtaatcccaaaccagtgctgaaaaataagtgcagtatggctggggcaaggccaaatgtgattgaaatggaaaagcacttcgcatgtaacataccgcttactgagaggtggctatcggtcgattcaattccgaccacctcaaaacggagaaaaaacgaaccagccgagcccggaccgtcagaaaatagaaaaatcgttacaatcgcaatgatgcgtgtgaattcatgcgatgaaaagtttagagttatggccagagttaatggatatgaaattaaaatgttgttggacacgggtgcacatgtttcgctgtgtaatgtagaaactgcacgaaaattgggtatcaagcaattaagcccatcagatattgtgggcgttgtcggcataagtgacaaaatgatacccataatcggaaggagtacaataaatttggaagttgcgggctgtcaggtgttaagtacggtttatgttgtgaattctaaaattgggtccacagggtcttacgaaatgatcctaggccgacgaggtttcagacaactgccactatttttagaccttcaaactggcgaattggtaagaaagagcgatggtaaaatatttgtgtgtgaaaaagtggaaacggataaaaacttggtgaaacccatggacaataatttgggaaagcctgtggaattggtcaaatgccttgacagatacagtgacattttttcaaaacacgattatgacttaggaggatgtacaataaaagcacctccaatcataaccacctctgcgacgccggagagagttagaccatatccggtgcccgaaaaatacgagaaagagttaaaagggcacattgaaaaaatgttggaggctggggttataaaggaaagttttacgccatgggcgcataatgttgtgttggtgaagaaatcaaatggccaattgcgtccgtgcgttgattttagaccgctaaataaagtgacagtccctgatccctatcctataccaaggatggacaaaaccatttatcgtgttgctggccgaaaattttactcaactttggatttggcctctggtttttggcaaattcccttggatggaaatagctcctataaatgtggcattgtcaccccttgggggttataccaaatgttaaaactcccatttggtctcagaaatgcaccaagtatattccaaaggacaatggacaaagttttggagggagttagaaacgtcaccgtatacatagatgatatactaattcatacgaatacggtagaagaacacatagaagtgttggggaaggtgttcgatcgactgaggaagagcgggttaaaattaaaaatgaataaatgctctttcctaaaaaagcagtgcacctatttgggccatattttgaatgaaaagggatatcgtccttccctgagtaatcaggaggtaattgaagcttttcccgcaccaaaaaatgccaaggaagttaaacgtttcctaggaatgatgtctttttttcgaaaatttatacctaattttgctgaaattgcaaatccgttacaacaattaacaaaggaaagagcggaatttgtgtggaattccctggagaaaatggcttttgaggagctaaaagggaaattaattgaggccccgtgccttagggccccgaactataaattgcccttttatttatttacagacgcttcatcaattgcgtacgctggcgctttaatgcagtcagaacatgaacaagaaatgtacgcagtcggttattggtcgcggaccttaagcattgcagaaagcaaactgcccgccacgcatggagaattagccgcaattgttaatgccgtccagaattttaggccaataatttatggggccgatttaaccatattgactgaccataggccgctcacattcttattttctaaggcaagtagcaacccaaaaattaaccgatggctgatggcattgcaagaatttgagccccaggttatttacctggagggtaaagctaaccgagttgccgatgctttatcacgggtccctattaagtgggaacaaattgaaatgaagagtaaagaagaaattcccttccttttggttgcggaggaggagacggaagttaataggagcataattgaaaaagaatcggaaaaggacccaattgtctcccaagtaattgcaaaaatccaggaaaattggcaggaacccatccctgaggaattgatgcagtattttagagaaagagataaattgtcgtttgatgggaaaattgtgtggaaaaaccccgggaggcaaatggtgatcccggagaaactgcgtggccaaattctccaaatgcttcatcgagcacattttggaattgtaagaagcaaggcgcgggcaagaagtcttgtttggtggccacaaatgtcggaagaaatcgaaaattttgtcaaagagtgtaatatttgccaaatgaatgcccccagtgtgcccaaaaatgacccggagcataaatggcctgaagcaaaactgccgttcgagagggtgcatgcagaccttgccggacccgtatggggaacaaattttcttgtaattgtagacgcttactcaaaatacccgtttgtagcccaaatgcagtcaactcattcgacagccatcataacttacctcagagagttatttggaatgtttgggtccccaaaaaccctggtaacagataatggccctcaatttgtatcattggaaacggagacatttctgtcaaatgaaggtgtaaaacacttaacttcaccggcatatcacccctcctcaaatggggaggcagaaagatttgtgaggacattcaaagaaggaatgacaaaattgctgcaggagggaaagagcctaaaggttgcgcaatttttactgctgcaggagtaccgggcaacgcagtgccaggcaaacggcggagatactccatcacaaaaattttttggcaggcaaataaggacagcactggaaaaaataaaaatgccgaaaaaagtgcccgaggcaaatgagggggacgaccccccgggtcggacaaatgagaataaagaacgaagtcaaaggcgggacaatccttttagcccaggagatatgatttggttcagagcagcagaaggacagtgggcaccagggatccttttacagccaatgggagaacgaatgtgggaaatagaattggaaggaagtaatgtcccaaggtccgcccatgtggaccagttaaaaggacgaagattgggctcagttcgccataactgaacgcagtttatgtgactaatattttgtacatttgtaaatgcctcgtcctaaattaaataaaaaaaaaaaaaaaatctttacattaaacattttggttgattgggcccatccacaaattagtaaaaccttactttcctcttttagaatttttttttccaattgataaaacattaatttcgccatggatgccgagaatgttccgccccaaaatgagttggagaaattagaaagagaagcgttggactcaaaaaagtcgaagtcgcgcggtcacgaagagagactgaagaatgaaattgcccaaatgatgggccagctgcgggaggccatgaaagaggaagtgcgcggggcagtggaaggactgtgggcaaaaactgagcctttgttggtggcacaaaagcgctcaacggacgcgctcacggaggcgtttgacgaattcacgtcacaagtgcacatcggcggcaaaaacattgacgagtatgaattcacgtcccaagtgtacgtcgctggtaaaagcgtggacgaggagcgatgtgacaatccgcaaccagcggatgacccgtcggaaaagggcggagaaacggacccaccagtgggtggaggggctaacccacccgtgagtggagagcctgtccaggcttcgtcgttgccgccagagcagccaactgtgaatgtgagagcgccccagagagggggcaggggccaatggggcccttcgggatataaaggacaatggaaggcccaaggccaaggctcaggcccaaagcatcagaaacgagttggttatctgatgagacaattggagagggagttgagggaagagcaagcaccggaagggtgcatgtgctggagttgccgtcgtggaaagtggaacggggaccgt

SEQ ID NO: 1278 - DNA, 3229 bp, Heterodera glycines
aaaagtcggaagaaatcgaaaattttgtcaaagagtgtaatatttgccaaatgactgtccccagtgtgcccaaaaatgacccggagcataaatggcctgaagcaaaactgccgttcgagagggtgcatgcagaccttgccggacccgtatggggaacaaattttcttgtaattgtagacgcttactcaaaatacccgtttgtagcccaaatacagtcaactcattcgacagccatcataacttacctcagagagttatttggaatgtttgggtccccaaaaaccctggtaacagataatggccctcaatttgtatcattggaaacggagacatttctgtcaaatgaaggtgtaaaacacttaacttcaccggcatatcacccctcctcaaatggggaggcagaaagatttgtgaggacattcaaagaaggaatgacaaaattgctgcaggagggaaagagcctaaaggttgcgcaatttttactgctgcaggagtaccgggcaacgcagtgccaggcaaacggcggagatactccatcacaaaaattttttggcaggcaaataaggacagcactggaaaaaataaaaatgccgaaaaaagtgcccgaggcaaatgagggggacgaccccccgggtcggacaaatgagaataaagagcgaagtcaaaggcgggacaatccttttagcccaggagatatgatttggttcagagcagcagaaggacagtgggcaccagggatccttttacagccaatgggagaacgaatgtgggaaatagaattggaaggaagtaatgtcccaaggtccgcccatgtggaccagttaaaaggacgaagattgggctcagttcgccataactgaacgcagtttatgtgactaatattttgtacatttgtaaatgcctcgtcctaaattaaattaaaaaaaaaaaaaaaaaaatctttacattaaacatttttgttgattgggaccgtccacaaattagtaaaaccttactttcctcttttagatttttttcaatttgataaaacattaatttcgccatggatgccgagaatgttccgccccaaaatgagttggagaaattagaaagagaagcgttggactcaaaaaagtcgaagtcgcgcagtcacgaagagagactgaagaatgaaattgcccaaatgatgggccagctgcgggaggccatgaaagaggaagtgcgcggggcagtggaaggactgtgggcaaaaactgagcctttgttggtggcacaaaagcgctcaacggacgcgcttacggaggcgtttgacgaattcacgtcacaagtgcacatcggcggcaaaaacatggacgagtatgaattcacgtcccaagtgtacgtcgctggtaaaagcgtggacgaggagcgatgtgacaatccgcaaccagcggatgacccgtcggaaaagggcggagaaacggacccaccagtgggtggaggggctaacccacccgtgagtggagagcctgtccaggcttcgtcgttgccgcccgagcagccaactgtgaatgtgagagcgccccagagagggggcaggggccaatggtgcccttcgggatataagggacaatggaaggcccaaggctcaggcccaaagcatcagaaacgagttggttatctgatgagacaattggagagggagttgagggaagagcaagcaccggaagggtgcatgtgctggagttgccgtcgtggaaagtggaacggggaccgtggtggtcgcggaggaggcatgggacgtggacaccggggagcatatggacgagggcgcacgaattaccagcagcacgcgggcccatcgcaccgtggacactgaggctggcatggaagcatgaaacggtccaggactttgcggaagggggaaggaatgttgcatccacaattttgaataataataattttcttattatatataatcattcttttgctttatttatttgtttttgccttaagtccctctgtttctgtccatcctaaagatcccccaatgatgacctattttccacaactcaacaatttatgtaatgttttgttgtccatctgttcgtctcctcccctttactcatgtcagtatttaagcgatgcctttgccctcacattcaggactttcctttaccatttcttaaacctcaggttccctgcctgaagctttcttatttttgcttaataaacttttggtctttaacaaataagagttttgcttttcttgctttaaaaccgggaaaaactaatttggtgttggacacaacacaaccatgaacatgaaagcggctgaacccaagcccaaatgtgcaaagtccaaacagtgaagctgttcgaagtcccgggaggcaagactctcaacgaaggagctgaagcgtcgtcccggtcgggtaaccgctcgtcgtggcgttgcttccgactcggcccattcaaccggagtctgaaatcaatcctttttcaaaatattttcggcaatttaccaattacctcactcagccaagggcgacgctcctccgagttgattacgttttggggctgattcgtcagaccggcgcttaacaaaaggagacaaatatgttcctccttgagcggactctgcgcgaaaaggcccatgtgttcagcccacgatacacagaagaacatcagtggggcaagacctttgaaaatggcaaaagctccgttgtcaaaatcctgaaaattcaccttcatgtcgaagcacgtaacggttcagcaactgtttgatcgcgcaactgtccgaatggtcccccgtctccgtcccatcagttactgtccgatcagtgccaaaacaacgggcactgaatccttccaactgcgtccgtcgtgcagaaacaaaacgttcaatgtgttcggagatacgttcgccgaacgagtcgaacattgcgctgaacatacgggagcagcttccggtggtggcggtgccaggctggccaagcgcggacatcatgcgcgaacgacgcacggcatcgagcacatcccaactggcaacccacgggaaggaaaggaacttgcgggaaagcgaacctgaaaaagaagagaacgaatgaaaattaacgaagcaaattctattaagtcaaattaaaatgtttaatttcctaaaaacatacagtatccaattgtgtaataagcacacgctagcagtttaagctgatcggacggctccctgcaaatgccctcgtcgtccgtcagagtttccatgtcccctcca

SEQ ID NO: 1279 - DNA, 8847 bp, Heterodera glycines
  unsure (1)..(8847): unsure at all n locations
agacttaattcgaaatataaactnaggcaaaaaatttatacctgttgcagggcgagtaactaaaatttggaaccaactcgataaaaagcttattgaaataaactcattaaatcaatttaaaaataaaactaaaactatttcattcctgtaaaatagaccggaaaaattaaagtcgaatttttaatccattcaaactaaaagtgatttggtcgctatttatttattggtattgatttcatattatattttattttggcggtgatctcgttttaattgttttgcgctttcttgaggacatttttaattaatgttttgtcctcaatgtaagcggattttcccttttgtggactctttttctttactgacaataaaacaataaacagatcgggtagcgtcaacgtaacagagatctttataattttttttttcaattttactcatacattaaaaagacaatagatcttgcctgacattgcgattgtcatacgagacgatgtcctctttggaatgacaaaggccacgttgaaacttcagccccgttcaaagtcggcggttgtttgatggttgtcaaaatttgtaactgcgtttgattcgacaaactccactcccaaatcgtgctctttgtcagttggatttgaaatggtacacttttgaaaaataggatttatgttacttttattttgacttgaatgttttgtgatctgcctcacctaattttgtcctctcaccgtacaaatgcacgagaccgatacgtttgaaaggcttcatcagtcgctgatcgcctcacttctgccaaaagtcgagtgggaaacagtcgcagcttgtctgacaaataacgcttcttccgacttttttttgcagactttcaagtttattcgaatcatttgttcaatcaatgaataacaaaatctgaaacaaaaaacagcatatattttaaccgaattttgagattttcttattcggatgggtctagggttaggtaaggggcaatataaatgtcgtattcgtattcagcgaccctgaaaaccccatagaaaagtgttttacacggcttttttaaaaattttaatttttttcgaaaaatggggggggggataaacttcagtatcagggctggagcgcgaccgcgattcgcggcattttttttttgcgcgatgcgcggtcgctccgcggcaaatttgaatgcgcggtgcgcggccgcgggatttttttgtgcgcggcgcgccgcgcatttttaagcactggtaagaatgggggtctggtgagaaaagagaagggaattggtgaggaatgagaaatttttgagaaaaaaaaattattatttatttcatttaaagcatttttactaatatttgggctagtggctaaaccttctgaccttcagtgtttgctcttgggttcaattccacaacggaacagaaagtttttcatattttctttacattattttaattgaaatttaattaataaagaaaatattccaacttttatttttctttaatttttaaacagcctaaaatcacaaattaaccttggtcattttttgacaaattatgttaactaatctcgctgaaaatatcaaaatattccggcggcgcctatcggcaccgccgccccccccccccccacaatgttcccaaaaagttttttggaaccgcccacaaaaacgcgatttaaaaaattaatagattgttaatttattcaaaaaaaatccagaattttgggactcagaaaatccaagattcccccccccccgcatgaaaatttaaaaaaaaatttctatataatggaaaaattcttcgaatgcctcccccaatgagtacatattttaatataggcaattttcgtaacaaagtgcagtcaaattttttttcaaaaaaactttcacttgggaaaattttattgattaaattgaaaattttgaaaattttgtttttaaatgcgtggtccgcggccgcggcaatttgaatgcgcgatgcgcggtgcgcggccgcggttttttttttgcgcgatgcgcggtcgcggccgcggcaatttgaatgcgcgatgcgcgatgcgcggccgcggtttttttctgtgcgcgctccagccctgccccacagtccccagttttttgaaaaaagcacaccgcgaaaaaaactattttgggattttcacctcaaaaaaacaagcagatattctgatcagaaattaatcttaacaatttttagattggattttttaaatttaaaaattttttaaatttagaaaattttttgaaaattacggattacgccaaattacggcctttttggacctccgtaatgacggattacggatggccgtaactgaaaaaattgccgtaattacggattacggatttccgtaattgaaaatcagttacgtccagccctgatcctaatagaggaatcttagggtttttgaatgataccaacattgttgaatttggttaacaaagaaaaaagttatagctgaagagaggggaaaggagagatacagaaagagatgagaggatgggaaagagagtgaaagaaaaggacagaagaaaagagataaagaggcaaacaaagagagagaaaggaggaaaggtgagagagtgtgaatgaaaaaaagagagaacagagggagatgagatggagagaacgagagcgagagcgaaaaggaacaaaagagagagagaactaaatcgagagatgagagagagaagagagagataaaaagagagcagccttataagtgagagagacgagagtgtgaaaaagagggagagagaggagagggaggggagagaggagaaagggagagagacaaataaattaaaaaatgataagtatatgaagaaagaagaccgaacgtaagaataagagagagggggagagaaagagagaggaagggagagagaaagaaggggagagagagagagaaggggaaagagagagaggagagagaaaaagagaaaaaacgaaagatacaaaaataagtagagcgcaggaaagggagaggagaaggagagaaggtactaaaattgttccctagcaagagtctttttcgtgcaattttgaattttagcgcgtaaaaactaatgtaaatacgctatttggcgaaatcgagaaagatagcgatagagcagagtgaaaagagagaataagataatttcaaaaaaaattttaattaaaaaattccaaaaaaactagttgtgtacctaactaattttgaaatttttaggggctggcagcacatatgaaaagtgatcagggaaagaatttaaaagggtgtctgtccactgatttttaataaaattcaaaacagggtacttgtgggttttgctaccccctacccccccccccataaaaatctttcatggtcccgacaaagcaatgcacttttctagggtacttttagacgctgatcaagaatctaatgtctagcgccactatcatttattaattaatacattcagatattttataatctattaattttatacatttcttatatggaatccatcgctaattctcctcaaattttccatcaaaaacacacccaagtgaccaaattctttgtttccgcgcactcagccgacaacaatccaaaaacagcaggtcccttccctattcgcgttgtgattcgacgagaaaaacgatgccacagcgatgtgccatcgccgcccactgattttaggactctttttgatagaaatgcaaacgctaatcgcttgccgagtgaggagagggcatctcttttggatggtcctttgaagcatttggccgatttcgactccaccattcccacttcggcacattcgacgacttccacaatgacaaatagtgacccgagtttggccacttccgcttttctgactacgaatttcgactcaacaatggacccgctgttttctcctcccccggcaccgattgtgccgattttaacggcagaggagggcaacacattaatgagtgcgggcgactcaaatgacccaccggaactgcgccattgggccaacatcggagaaacaaagtggggggatgatgaatggagatggaataacgaccgatttaagtgccttccatttcttgcatcagctggagaatgagttgaggaggtcgcctccccgttcgcttctttcgcctgacaatttcactcctcgtccgtctgatagcaattggtttgactgtacacatttcaatattcattctcttgaaaattgcctcgtttacagccatcagcctaaacatttgtcaactcaaaagaaaacaaatgtcaaacggagggaccgtcgccgttcgtccgcttttgtgccgtccgctcgttccaaagaagaattggagagtttgctcaatggcaacatcgacccgaacaaaccggtggaaatgggggaaaaggcgaaataacggacacagagagttagttggaaagatgaacaaaacaatgcctgttcaggtgcgcaatgtgttggttgaggcgggcattggggcggagtttggacttcgtctaaagtcatcttcgactcttccgacgctattcgagcgaaattttgtgccggcaattgaagtgccaaagtgccggggaaacataagcaaaggacggaggtcgatggaattggcaaaagcaatgggacaggaggagggggagcgatcagggttcgaatctcattggaccaatttagagcttcttttaattcatttatttgaaaggctccgtccactgtcccacccttctgccgccacaattcttcccatttatttcactcccgctgaattaccaacaaatcatttgcccgtttttactaataagccacccagcgacaaaaggtaaaaataaaatttctttattttttaaaaatacaaccgcttcaaaatttgcctctctcaaattaaagatttacctggtcctgacattttcagttgtgtgccaagctctactcatctgctaaacaatttgggaccttcctcatcgatggaagaacagcggacaaagcgaaagaatcggacggaaagtgttcaaaagatggaccagccaatgttgagctcgcaactgttcacccagaagatcccttgttcttacaaaggatgtcaggtgacccaattaatcgggtgaatttggagtcaaatgaattttcatttcagaaaacatttgtgaaacaaagcgcaatgcgaaagcacttgcaaatccatgggccccgtcagcacatttgccaacagtgttcacgctcattcattgagcgttccaaattgaagcgccatttgttggtccattcgggcgagaaacgtttcgtttgtgactttgaggtgactgaccagtggggttgtaaaaaaggattccttttaggactgtggaaagcgtttctcgttggacttcaatcttaggacgcacattcgcacggtgcacaccggcgaacgcccttttcagtgtccattctgtcataaacaattcgcacaatccgccaatttgcgcatccatcgacgttctcacaactgtcgtcccacggtggacggaggaaaggagaaacagaaaaatggagcaaatcggcaaaaagtcacgtcgtgctgacagtggaagacgcaactgggcaatattggaaaatgagcaattaataggtgttttacacatttacatttcatatatttacttgcaattttttatcggtatttaaagtaataaatgctaaaagaataagatatgcactggctgattggttcaagtcgcttttatgcgtcccatgaccaagcaagaaataagttatggccttagaaactgggtatggtcattcatgggacgcataaaaacgactagaaccggctgattttctgagaaggtgtcaatcaaaaatgttcagaattatgagatgtctcatgtgcaattttgtcactgtggtgattttgtcattccacaacactttgttctctcctccgtccctctgctccaacatctaattttgttaaatgttgatgtgttccatgagatggcgaattgaccgcccattcttggacagtggctgaaaaacaaagaagatttggacgtctgacaaaaataaacccgagccgaagaattggaagagaatccccgtgctgaaaagaattgccgccattcccagaaaggaaaattgccacgcggccttggtcccattagccacgacaattccaatgccgtaaggcgagacaacggaggcaatctgtccaagaagacgcgaaaatgatgcaatggacgaagtgtagcgaggggcaatgcaaaccttaaggggatgagaaagtcaaacggaaattttatttggtttggtcgcgtttagttgattcagtcttgggccggtaattcatgattatgccatctccatcttgtttttcgaaccacggaggtgttgtatccggggataaagccagaactgatgccaattgcacacacggctaatgagatggccaaatagggcgtccgacagtcacacaacgacaacaacacaaaacaaaggccggaaccgaagctggcgatgagattaaacagtttggtgactgatgtggatgacatcagacgacggtccttgaagaacggtcaatttgatgaaacaaatgcggatttcccacaaatttgttacctttagccaatcagcaatagcggcaaacaaaatcttagtgaacagttgaacaatgaaaggaagtgccgacatcagcccattctgattgtgagtcagccgttttaaagtgaataaaatgagaaaaaccaactgaagtcaaatccatgccaaggacattgtgataatacgtcggcaaatacaccacaatgccaacattcataaagttttggcctcaaattattaataaaacacaattaattcatccaactgtattatgtaaactcactgaacgagctgaacccggtggaccaaacgaccattgaacatagaatgcgacgccatggcacttcgtttggacttatctgaacaagagaaaattaaaaaagtaaatgaagtccacaaacagtcggactttttgggaaacgttagcatgtcctccattcaattcgatgagtcgaagttcgtcggaccgaatgtatttggactgggagggataatcacgaaccaaaagcatccaaacagcacaaaaagcgacgccaattagcccttaaaatgaaatgattagaccaggaacggtcccaggaacttgctttagaggaggtaccaccgccctaagcgacgaccttttttctgcttttgtaccttttttttttgttgcggttttatgtatttttggaaaaaatatcgatttgtttagaaatttgtttaagggacgtcttggaaagcgtaagtaaaataggaaatgttggtcagaaataaccccttaggggttgaatcgaagaaatacggcagttaaaaggcagtaccataaatgtaaaaagaagccgtccatccgccgatccatcggacgacacaaagttcagcagttacaaacattgcgagcacaacggaaatttgattgccggtcgtcgaaattgcaattgctgaaaaaaagttacaagaaaacccttgataagttaagttacccgtgcttttttcggacaaagggaaccaatgggcaatgagcacattgacacacggcaccaaaatgcccaaaaacaaagaaagtgatacaaaagagaaataatgccgatgatttatttacttggccacaacccatcagaaaacggacgacgatcaaagcgacggagcccaaatgtcgaacaacgaaaggggtgaaaaaagtgccttaatcggacagaaatgacgcatgaaaagtatcctttagacatgaattcatagctcgaataatgtaaaaacggaccaaaaacgttgagtaatgcaccgtaaaagaccaaatgagcggggcccaaccaatcgcacaaaaaactgccgggcaaaatgatcagcaaaccgccaaggtaaaaggaagtgaatatcagcgactgcatctttttgctgataatcaagtcaccgccttcaaactaaaaaatatttatccactcgaagaaataaataattaaaattcacgattttggggtcccccaatttcgttccgtttgtcagttctgtcaaatgcgcgcattcggccaaatgcaccggcgaagggaaagaaaacgaagcatttccaaagatggcattagaatgatcattttgcgctgccattaatgtaattgccgttttattcaccatgcaaaccatagcctaaacggagatgaaaacaaaatcaaaacatccaaagaggaggaccatattaatgttgctgcgcataagcccctcaatggccaaagaaagtgccaaagcaattgcaatactcagtcgaacagaggccaatgaccaaagaggcggagatggagacgcaacagcaccatctgaagaacacccatagtgataagattggaagtggcgaagaaaggggcaaatggtgggagcttatcggtcacacagagaaattgctggatttttgcaatttcagaaagcctaactcggcatacccatgggtttaaatttagctttagtaaaattccttgtatagaatctaatcgaattctacgatatgggaacaataaacttaacacaatcactgtgagggcatttgctaactaacaatttcagtcttttcccaaatgataggctaaaagaacaagcgtcactggatgtcggtgtacccttaatcgtaccgatggcaccccaatttttctccaaacccttccccaatctgttcagcatataccaaatcttttttaacgtacccggaaccatctccagttcctcgccattgcgttcagcaaccgtcaacagctcattttcaacaatttcgctgtgtttcgactgattgttgttgaaggaaaatgtcatctccg

SEQ ID NO: 1280 - DNA, 4160 bp, Heterodera glycines
caccatgcaaaccatagcctaaacggagatgaaaacaacatttaaacatccaaagaggaggaccatattaatgttgctgcgcataagcccctcaatggccaaagaaagtgccaaagcaattgcaatactcagtcgaacagaggccaatgaccaaagaggcggagatggagacgcaacagcaccatctgaagaacacccatagtgataagattggaagtggcgaagaaaggggcaaatggtgggagcttatcggtcacacagagaaattgctggatttttgcaatttcaaaagcctaactcggtcatacccatgggtttaaatttagctttagtaaaattctttgtattctaatcgaattctacgatatgggaacaataaacttaacacaatcactgtgagggcatttgctaactaacaatttcagtcttttcccaaatgataggctaaaagaacaagcgtcactggatgtcggtgtacccttaatcgtaccgatggcaccccaatttttctccaaacccttccccaatctgttcagcatataccaaatcttttttaacgtacccggaaccatctccagttcctcgccattgcgttcagcaaccgtcaacagctcattttcaacaatttcgctgtgtttcgactgattgttgttgaaggaaatgtcatctccgaccgattggtggcggtgcggcatctgaatttaacagaatcgtatgataatgaaagtgcgaatggaatgcttcaaggccataaatatggaagaactcaagcaatggacattcatttgaaggaagtggggattaaagtcgaatctaatcaatgttaatggacagcgtgcaatggcatttaatttgagcactttcctcctttcttcactggctaaaaataatccaacgaatgaaaaaagatggacgagtatcaaagcgatattatcattcagcggatttccgtcaaattaaagttaaatgccaaaaggagtataacaaacaaaatccattaacaaatgaaataaaaagatggaagtctcacaatggaagtgccaaaagggtgtcgtcatccctcgagggaatggaaacgacgcgagcaaaaaaaaaagacatccatttgcattggaatttgccaaaatgatcatttattttatagtttaaaagtataaatagaaactctctcctaaaaatgcctatagtataagttataacgtagtttatctaagcaatagtttagccaattcctcgtcttctttcccaatgtcaattttttcttcaatcgctgaaccatcgtccatttcactaatatcgacttcgtcttcaattaaatagtccaattccgcaaataaagactcgggagaaatcagtgcggttcttaaaaagtcatcatataattaataaataattttttatacttaaaactgtcaaggaatcgccgcgccgtttgtccttcgattgttcgcgcatcgtagcaaagagtggccccaaatttagtaaccaattttggctttttcgtagtttcatctggttcaaagtgccttcttaaagcaccgattgtcaggctgaaaataaactttcgaatttaaaagggtaatcaatggcactttgctgcctgaggcgaattaatgacagcggtaaagtcggacaccgaatcgaatatgtcaaggctcgaaattctttttttaaaaatgtattattattattgagcatcatattctcacgtaaatgtgccctcttgggattcctccgggcgaagctgaccatcgcgcgcctgagccgtcaattcgcgaagtcgagcagaaatttgaagaagcgacaattggtcaacattggtcagaacgggagtgacaaatccatttggggtggccaaagcaacggaaatgtccacggaagaaaggcgatggatggaagtaccatgccaatggacgtttaactcggggacagaccaaaaccgaaattaacaaattaaatatttaacaaaacaaataatacccgcagggacaaggagcacgcttttatgataaaatcatttaacgacagcttaaaatcgaccctttcagaaagcctattgagcaattccaatattttgttggcagaaatttgggccgacgcataagcatggggaattgaattctgaagaaaacattaattttaaaaatgagaaataaaataagcaaagaaagttgtacccttgactgcacaaattgttttgtttgattctgacgcatttccgacaattgaatgtccacatggacatggcgatgagtcggctcggaccgacccgatgattttagcggaatgatcggatgtgatgacgcggagatcacttcgttttcaagagacatttttgatggtggcttagccgaaaatgctttaatcggagacagttttttgtcatttatgtgactcagcacatcgctaaattaaaatagaaacatattgcaattttgggcgaattggggttcaaattaggtaaaacaagtcaccttttgagaatgtttttctttggccccgatgctctgagcacgctcgttttgatgtcgtaatgaccgagcagaaggcgaacagccggtccaaccaaaagcgaagtttttgtctgatgaagcggagattttgagtggaaagtgcggggaaaagaagagaaaggaccccggaggggaaaaagaggaatcatccaggaaaagaaagcgaattgacctgaaaaggaaaaactacaaaaaggaagaataaaaaagttaaacagagttatcatatccttcataaataagactaacaaaagtaataagtaaattcgccagtgccacattcaaacttggtaataggtaatctttatttcactacttataaaacccaaaaaagaataaacaaaataaataattaaattaatatttatatcaaattaacaaaaggtagttcaaattgctcattcctttttctggtgtccacttgcggcttccttttcgtccttgagatttaggttatattatcgtattttaacatttgtttcttttctctcatttgcccaccttgccggcgatgctaaagtcaagacggaaaagaataacagcagccaaaaacaatgcgccaaatgccaccacaataagcaaaggttcgtacagcatggaaaagcggtcgaattcgtagtaaagcttaaaagactataaaaattggttgggttaatatttcgcacagtgaagggctggatatggttgttgataagattctccttttcaagaacaatcacagggcgaccaaaagtgtccaagtacgttttgtgcacctcgtcgggaagacgcttcacagagtaaggggtgaccagcttaatgttcctaaaagaaaattaatcgttaaacgaagcattagcataaggaaagtcagaacacccgctccccatgtcgtaagcccatcaattcgtcgtaagggggggggggttgtaaatgggggaaattgtcaattcctttataaattaagaagaaaaaaccaaaaatttccaataaagttcatatttgtagggtcgtcaatctgattgtgagcaacccttgtgtgtatatgaacaatgttcagttcaccaagaaatatgaaaatacaactggtctcgtttcgtacttgctcgtttcaggcaatatgattttgacacacagtttttccacaacagcattatcgtagagacgatccatcagtttcattttgatcgcaaaattcgagccggaatgacggagaaaggacgtactgaatataatcaaaatttaagctttccagataaaaatcgtaccttggaacgttgtaacccaaaatgtaatttgtacgccacccgccatacaatgggaaacgcgggcggagctcaacctcaacacgatcggcacggggataaacatttgaggtggagatgttgccgatctcatctcgataataaatgtcattggatgcagccggcaaaattgtctaaaatcaaaccaattttcagatttggcatacttttgatacgcgtatcgctcaccaaaaataaaacgaattgttttttaatttcaaattaacaaaaggattatcagcgaaaacgattttagataagttgactagattattattattatttgattttttgtctttaggtgtgacttttacgcaatattatttttttttttatttaaagacgaccttaaagtttttgatga

SEQ ID NO: 1281 - DNA, 2626 bp, Heterodera glycines
aattcagaaaaactttttaggatgaaagtatatcattactggttttctgactgcaaaatgtccttaggagagggcaccaaatattccgtaagagcataatccaccgaaagttagatattggaaccggacattaacaaatcgagaaactcaattttgtggaaaaccatgtccgatgagacccctttgactctaacctaaatgcaaaaatgatgaaatgacatttataataaaatgacaaacacgagaaatccgtaatttgcccgattctttgccgctctcataagcggacatccaagaaagtcttgcagcctcctcagccgacatggcatgtacaaaactgctcaattcctcgtttcttccatttttcaactcaaagtcagttttaacctgaattaatatataaaattttaaatattttttaataacaaaatgccttgacaatttgagtggtcaaatctacgtttcggactgctgacaaaatttgaacatcagaaggcactgaaatttctggcgactgagttgaaatttgcaacgttaaaacgaataaaataatgagttgaagcggcaagcttccatgttccattgatattcgttatatcaaattaggctaaataaagaaagcttccaagggttgcccttaaacatcctatcgactttggcgtccaattaattagatgtaagacaaacaaaacttcatcagaagtttgaagaatttcaaaaatttataatgaaaacacccaggcggctgaaagtagtctgggctagtgctaatattttaggctctaaaaactcccaaataggcactaaaaaatggaaaataggaactaaaaagcctcaaatttagggggtgtaaaatgacggttgtttttattgcatttgcattttcttagcagggcaaaacgccaaatatgtcaaaatatattttttcaaaatttgtataattttaggctctaaaaataataacctagaaaataggccctaattattcgaaaagtagcttaacaaccacaaaaaaaaacctgtttttcgtgcgttttaggccactagtagcccaggaaaagggataccgacaaataaatgctaatccaaataactgtatttaattaaacaattatcattttttcaaaaaaggatttcttttgaattgagatgatggatttcaatgaggaaacggatatacttcacaggcttggaagtaattcatttaaataacttatcggaattaatattacattttagttcttgcttcaaagttggagtgtcctaacaaacaatttccattgtcaaaagcaaaagataaatcgacaagccgagacacaaatccttccttttgttctgtgacagctgctgaagacggtgacggatggggtgctttttcattggacgaattgagtagctcaagtgatgacagtgaatttcttttcgatcgtagggtgggaaacaattaaaattaattcaaacaccgttttgactttaatttaggagctgaatattaacggtaaagtcaaccggcgagtgcgcacccatcgtcagggatatattccacaccaaagcctcccaagaactggaacaccaaatttatggaaactattagcactgctcagtgttgcttcttttgcggtactttagtttttaacgtgtttggattttttagcattgggtagcaaagacttgggaagggaaggggcggtggggaacctttctcctccccggcacgactttttttttttttgcttttcataccacatttttgcagcgctttttccaattggatttgttggttttccttcctttttgacatgcataactgagtccctgttgaaaatggttactcgttttttacatgaaaaatgcaagcgcgcacttaatttgagcaattttgaatttcggtccttaaataaatatttttctgtcccctttagttttataatttttgaaatttactggctttatgtagaccttaatttattgtcacataaatattttttcccttggaccgcaattcttaaaaattgctaaaatttcatctactcttttttagggtttctcaatggttctttcacatggtctactttccctttggtcttcgtctccaactgaccaaaatattccgttgttttatctgatacgcatttgtggttttcatgcgctcgccctctgggtcggctcaatatatggtttctttttcgttaataataaataaacatttaaaaattaatttagcgtattctgttcttctcaaaaccaacccattctccattttcctcactttaatgctaatttttacatttatttgtgctcaaattcgattggatgaaacagtgactgactcgaaagtgattagtcactcggttgtgctttttctgtgcgtttcgcaggcattagttgagggtgccattcagagaggtcttaattagggcgtaaattgagccaaaatgccttgtctttccctcgcactttcttcgttcgctttaggccttctccttctctcccccctttggactgtccgttttcaccgcgttctcttcctttgttacgctgcgtttgctttcagtgctggcggcgcttttcatatgaaacacattcaatcgcaacacaaatgtcgacacaaaatattacctcactt

SEQ ID NO: 1282 - DNA, 7465 bp, Heterodera glycines
  unsure (1)..(7465): unsure at all n locations
cagaaaaagagatagccaattttccaaatttttcccaccatacgcgccgagaaacaaattccagaacaattagtatcggcgtaattattctgagaatgcggttgtaatccctattactgttgagcagaaaaagagatagccaattttccaaatttttcccaaacaaacgcgccgagaaacaaattccagaacggcgtaattattctgagaatgcggttggaattcctattactgttgagcagaaaaagagatagccaattttccaaatttttcccaaacaaacgcgccgagaaacaaattccagaacggcgtaattattctgagaatgcggttggaattcctattactgttgagcagaaaaagagatagccaattttccaaatttttcccaaacaaacgcgccgagaaacaaattccagaacaattagtatcggcgtaattgttctgagaatgcggttggaattcctattactgttgagcagaaaaagagatagccaattttccaaatttttcccaaacaaacgcgccgagaaacaaattccagaacggcgtaattattctgagaatgcggttggaattcctattactgttgagcagaaaaagagatagccaattttccaaatttttcccaaacaaacgcgccgagaaacaaattccagaacggcgtaattattctgagaatgcggttggaattcctattactgttgagcagaaaaagagatagccaattttccaaatttttcccaaacaaacgcgccgagatgtcgttctgatgacggcaaaaaagtttgaatgggctgggcggacgtattcagagcgagttgacaaaaattaaagaccaaaggcgccaaaaattcactttattttgtaccctcaaactcaaacttgggtaattaaaccataatcaattaatgaacaaatataatccgacatgataaaatgggcacaaaggggaatggtaaggggaaggcgcagggcacggcacagggaaggcgcagggcacggcacggggaaggagcagggcacggggcaggcgcacgggcacggcacgggaaaggcgcaggggcacggcacggggaaggcgcagggcacggcacgggaaaggcggacgggcacggcacggggaaggcgcagggcacggcacagggaaggcgcagagcacggcacgggcaaggaatggaaacttcggagggaaccaatgagcgatctgaaatcactgaaaacccagccccttttatacggcttttttgaaaccatagtacgctccaatttataatttttaattaaaatctgtttttgttatacccgtttgggttctgccattttcccattaattgtttgttttccactttttcctttgcaattccaattcctttaatatatttaattaattattaataatttgtttacgaacgcaatccttaacagaattcgccatttaataaatgtcgaaccaaataacggcgtcggtggaattgaagtcgaagtcagtgtgacagatatagaactattagactcgtcaccaatgtgtgttaaaattccgggtttcaagtcaacagaataggttaattctggattgatagacaatttaattgtcgcctgaatggtccaagatggacagttaacaacttcgaaaatttcgtcaccaactgattcggcataagttctgtaaaatagacatccatcagttgcgaggaaacattgacaatgccatcctccgcacgatggtacacagtatgaataacctggttgattattagcgtgatcattcacttcgggattccggtctgacatttttactgattgacaagtttggccggtacatttcccagcgcctgagcatcttttttgtgatgtcgaagataattcgtaacctctcgtaaaataatcagatttttcggtgcaaattattgttaaagtttctattgtaatttgtagtgtttccatagtggtgttagtttttgtattgtcgagttttaagcaggttaagtgttcaggtgtaatagagagttgggttgtttggtcataagaacattcaatttttccttcttgggttacagcacagtcatttgttccagcgactaaattcgtcacttcatcacaagcaaaaattattttaaataaaattaaactggaagtgattaaataaatcaatggtctttttaaccttggtcttgaagttctagttcgatttacttttggttttcttttaaaacaattaaaaataaattgtaaaatccaatggataaaacgtgtgagtattcgaataatttggaggcttaatgaaataacatataaaattatcattataattacaagcattaatgcccagtgaatctggtctacacattgtgggtttttaagatattccatacaaaatcgacagttaattaattcacatacgggagatgattgacatgtgatttgtttctcatttgatttatctgggttacttataaatttaattacaggtttatattcaaaggatgtaagttttgggggtaaataaattatttcctctttttgggggttcttttttataattgtataattttcaatggaaatttgtaattcttgtatatcatttattgctttaataataatgcctccttttaaacactcaatggttgattcttcagtgattgaagagttttcttctcttttattccgtctattttcaatgaatggttgatttaaattatttggcaagtaaaatattttttcaatagttccccatgctttgatttgaattaattcttcatcagatttaacaaggtaaattttttcgtatggatcgtaaaagcaaaatttcgttccatatatttgtttgaatgaattatttttaaaacagtcatgttctcgacagtaaattggagtaccaatcgtcagattgccctccccaaaacaacgaaaattgtttatcgagtcaatttgggaaaaaagtaaatttaatgttttcactatgtgaattgaattgtcatgaagaaaaattgaattaaataattttcttttcatgattgggcagttttcagttttatttagtgcgcagatatttggtttgaagaacgaaataatgttttggtaattaattttttcaacggattcatttttgattttattgtaagatgcaaagctacataatttgaatccctctggacatttacatttttcaccacaataaggtgggcgtcgtttaataatatgtttgtctttgcataccaattgtttatagcaaaattcttttgttattttattttgtctgattgtaaaaccgttttcgatgcatagagttgtatatttcgttttccatattttaggttcctttggacattcgtatgaataagatgaacataatgaaattaatgtcaataataatgtaattgttaaagatttttgaatcagcctattcattttggtggagactaagggattatccatcttcctttttctgttgaaataattgggtttttgattaattattagattagagagagtttcttgctctttatcatcatttgaattaatttctaacgggtaaattaattttaagggtcgatttagtactgttttatttggaagttcgatattagcgcctcttgcgataccatctgatccagttatgacatttttgacaatgccagtcttccacattgctctgggagtttgatcatgtattattacgatttcattcaattctggaaaagatttcatacaatttcgtggatttttgttttcgattttataacgttctcttaggcttggtatatattcattagtccaaattttccaatagtcatctaatgattttgttgttttcttccataattcaattgcttggtcatatgaagtattttttgggtaataggttgggtctttggtttcctcattttccaaaataggaggaatacataaatttttatgtggaagtatgaaatcgattggtctaagaatctgataagtgttaatttcatcatatataaaggtaattggtcgtgaatttaccagggcttcaatttcacaagtgagagtttgaaaagaatcaaactcaataaatcttttcccgattacttttctcattgctgttttgacattctggttaaggcgttcaattgctccgttttgccaaggggctaattctatagaaaatgtccaatttatattttcatttaaaaagtacgttttaattgactcatccttgaggatttcttttaattttaacacttcgggtaaaatttttgatgcaagttttatttgtgctgcattatcactccatacgtgtttgngtgtgcctcttcttgatataaatcttctgaatgcattgagaaaatgtgaactgataaggaagtgactaattcgagatgaatacctcgtgttgtgaagcatgtaaataaaattatccagcatttttcattgaaattttttatttgtattggtcccatataatctagtccaacgttttgaaatggttcagttatttcactcgtgatttgggtaatggaggcatttgtggttgttgaaaaggtttagcattatatctcctacaatggtagcattgtctccgtatttgatcaacaattcttcttcctttcggtatccaataagtttttcttatttccgataatgttgtcattgtacctgcgtgtaaatttcgtgtgtgataatccatgattatcaaatgagttccatagtgttttcttggtagaaaaattggattgacaccttgaatttgtgcattttttaatcggccttcacatttgagtatcatatcattatcgagataaattcttaactgtctttcttcttctttatttggttccatttccctctgaataattcgaattagcattttttgtgccatgatttttaattgtaatgcattttcgaatttagagtaaataaatttttctttaaattttttagagttctgtaatttgaaaaatatgaattttaataaagtttgacaaatgcgagttattttaagccatgaactgaatttatcccattcgataattccgttatattcgttttttattaaatttatttgagtgttaattatttcctctgtattatctaaatatggagcctcttcttgatcaggactgtaaaagctgtgaggtggccaattttcctcttccagtttaagccattttggtccattccaccataatttgttgtattttaattcactcatggttgctcctcgtgaagccaaatcagccggattatctgctgattttacataatgaaaagtgatatgtaattccaaggcaatttgttttatctcctcaactctattttttataaaaattggtaaattctttttacattttaaccaactgagtacacattttgagtccgaccaaatataggtattttcaaggttcaatttggattccgtttttataaacttggcggctcttgcggctatcaataaccccaataattcgagtttgggaattgttaggcctttcaatggagtaagccttgtttttgcgaatagtagattcacttggtcgtttgtatgtaaataagctgaagtggcataagccaactcggaagcgtcagaaaaaatgtgtaatattgaatgatttaaatattgacttgtgaaaggcgaacgtggtatggttatcatatctgtgtttgaaatattattccattcaataatttcttgatcatctaatttatcgtcccaatctttgtttaatcgccatagtttttggaaaaatagtttatatttcagtattactggtgaaatccatcccatgggatcgaaatttttggcaatcatcgtcaaaatttgtctttttgttgtgtctttactcattagtggaatttttatttggagttcaagttcatctgaatcgacattccattttatacccaacatttttgttacttttggtatctctgatccttccaatttttgaatttctttattactttgttcatgattagagacaaactctctcagattcattgatgctagtttaaatatttctttactccaataatgtttgaattgtatttccttttcatcatcgcacatcattacgaaattatcaacatatgcattttgtttaagttctacgcaaagatttttaaattcttcttctttatcatttagacataattccttgttaacttgaattgtcttgaatttttcaaacatttcatttatttttgacaagtggagattaactacagcagttaataaaaatggtgaagcgttaactccaaatggtatccgtgtgaatcgtctcaattcgatgtctctcatttcaatttctcgataattttgtcttatttcattcaagtacgatttgtttacccataaaaatcgtgttgtgtctctgtctaattcatttaatccaactcgtaaaaatgctttttccaagtcaccaattaatacgtaatttttgagtctaaatcggagaatcaatccacacaaatctggtagtaattttggtccttggtgaatttcatcatttagtgaattatttcctttaagttttgcggacgcatcaaaaactggtcgtattttagttgtatttgagctctcttttattaccggattatgtgggagataatgaagcaaattatttgatttaaattcagcaatttcatttacgtcagtatccatttgttcttgcaatattctgtcataattttccaattgcttggtttttaattagttgtttaacaacatttcttagtcttcccatggcataacccaaaatttgttggtaaattcgggttctctcttttataaggccaccgaacagggtatctggttatttttaaatggtaacatttttatcaaactggtatcatggccgcatcttcattccgtcataggtggtgagtcgataattccaatgttttctaattcccaaaatttctgaagtatttggttcgtttcgtctttttttcttttttcggtcactgagttacaattggtgtcctcaatagttccttttccagataatatttttcctaattttgtatttattgagtaaaatcctgatggaagtaattgaatttgtgaatttggtagcatgaagtgccagtaatagtcgattccaattaaaatttgaggacgtgaattaatcagtaggatgctgacacaaccctgtatttgattttttggtccaggagttattcattcacttcaacttcagctttttgtcgagtctccaatgcagatggactgggggatgctaccttagattaattaatttgtggggaatataaattaaacaaatgtataatattatgctttaaataaaaatagatacaaattcattttatcaaatttatccttaccatgaaatcgtggcgaaaaataatcccatgagctaattacagatcagaattgcggatagatcccaaaaatcctcaacccgcaatcgcatatgaaagcggtacagaaaccccgcaatttccgaaatcctctatccgcaattgc

SEQ ID NO: 1283 - DNA, 5370 bp, Heterodera glycines
tgagtagttacccactccattttcaccggattacggtagccccccataggtgtgggaggggtgcatggccaactgagcgccagccatttgagcgccgccaagtgagcgcgggccatctgagcgccagacttttcagtactgaagccaaaacctattgcgcgacttttttttgcaaacccaaacctattgcgcgagtttttcttgcaaacccaaacctattgcgcgacttttttcttgcaaacccaaacctattgcaggggggtgcgcgacttttttgactacgcgactttatgcaaattattttaattaaatttatttaattttaaattattttaaacgtcttaaaggtcaaagacgttgaatttaaattcatttaaaattctccaaaaattccccgcaccaagcggatccgaaccccaggggggcggccagactgacgcactaaccactcggccacattggcaatggatgataaacattaatttgctctcataaagggaaaaattgacgtcaccagcggcgggaggggggcgagagcaggcggcgagaagggggagggggtcaaataaacaaatcaattattgaattcacaattttctcttttaaaagcaaaaagaaatgggggaccgtataataaaatataatttagaaattaaaataattaaaagggtaattaattaattattattcctaaaataaattttttattacttctaaaataatataaatatttttcagtgaattaacaaatacatttaagtttaattattgatttgtctgttaattttttatctcctcaaaaataattacagcaccctttcaggtgttgggcgtttgtttatttgaccaataatttttaatttcacatctttacgttgcccctccctcacacctgctcatttgtgtaatttgacaccgtttcttttatcttttcgttaaaaattaaaaagattgtctggaatttgtcttgcgccaaaccgctgtgccattcatttatgtaatttgacaccagtctgataataatttcgccaaaatttatttattatttgtccatttattacgaattattttgcatctatcactccaaattttgttaaaaaaaaattttttattgtcccaatttttaccattttgtgttttttcaacaaaataaatatttgttcaaaatttaaagaattaatttttaaaattttagacacaaaaacaaatcatgagccaaaaccgtgacgaaaactcgcagccacctgtactcgatggaccgtacccgctggcacaagagcgcaatgagtttgtggaagatgaagcaccggtgctgcttgagatgttggatcgtctgtcacaaggagtgggttttgttttgaattatttaaattttttaatttttccattttggcttatgctaattgttgattttgtttagggaatttgccaagccatgggcctgttttcgtttgcacttgccgactgtttggccacatttcatacatttgccatactgttcgactgtgagacacctgtgccatttgacgagcagcacaagcgatacgtgttcgaacacagggacaaaccgcggctaatctacgtttcggaagatggtagcgctatacaggttgacggtgtggtgaagcaaggggaatttgtgatgagcatcgagacgatgtatctcgataagcgaaacggagttgatcacttttgcacattcctgcgcacttttggcatttgtttcttgatgtgccattgaatgtgtttatttgttgcctattcagagcagtaaattgtttgcataattctgtttaattattttttgtttacaaccaaaatattgatccgcatttttatgttataattttaattcatttttgaaatttttatttaaatggcaaacgaagacttccgcttgtccgaatgcatccgttttattgagcgaactgcccaagagtatgattgtgttctgccggttccacggcttgggtttgtcacggaaaattttcttaataatttttttaaaaatagctcaaggcgcgatgagcacctggatgcctgtgttcttatggaatcagtgggctcaggccatcggctctacattttcgagtttgaggattgcctccaggtatttttaaaatatgaggtcaattaattaaataaataaataaaacaaaaccccacaggtgaaaggacacatcgaaaacgaagacggaacaagtacacgcgtgatgattgagcactatgataaatacaatgggttatgtggatttgaatcgtttttggcgtcatgtgcttttaccttttttggattttttgttcccgtttcctatgaagatgatgattgatttaattttaaaataatttttattgtatattgcgtttcacaaattcataaacaaattcatccgaattacttggccttttcaaaaattgcataataaactcaaaatcaaatcctaaggacataaaataaataaaaactaaaacataatgaccacaaacattagagaaaatcgattgaaattttcttcgattaaaataaattttccgaaaattatttgccaaatattttttgatcagatcgtttggcatctcgccataggagtcaaaaaagtaggccacccccggcgaacgcgcccatattgcgcaccaatgggttcccggcattcccgacgggtcctgaagtggcaaaatttattttattgaaaatcttttttggcactcaccaaattgacaattagactgcagggaaatttcgtgcactttggcaatcggtcggccggaaaagtgccaacaaaatattttctcgtcgccgggttctcaaagagagctctgtcgatgaaccgattgtccattcctgcgacgaatccgcctctccctcaaaaacaggtaaaatcccgcagccgcagtacctgctgcaccaaacaggtagatgaggcagagaaaaaagttgattggcgacttctcgatcacatccggaaaacacagtacaatcccttcgtgtgcggcattggaggagggcatttgaacaaaatcggaggaataattctcaccattcatactgtaaggtcactagtgattgatctgttccggtcaatcagaatgagcccgtcagcctcggcataggctattaaagtgaccccctcgttcggaaccgcttcggcaaaccgaatgttcaccgctgtacagccctccttgatcagctcaaagcccggcgagtcctcctgcgcattggtcatttggaagacatagaggcagtaggcagtcttgaacatgctgtagctgatcccgttgctctcagttgtacaggccatgccaaggtgctcctgggtgtcatggtacgcccttgcgtacctgttgttcttgtagtccaagttgtacggaaactgtgggtatgtcctgccagaggcggtcagttcaatatcccgcacctgaacattttttctgccagaaatacatgtcaaagcggcacttacgttgtggtggttgaagtaaaaggggttcttctgattgtgcccaatgtaattttggttgggcaccagcccaatgatgaccctccgtggcacttcctcggtgaacagattggcagaaaaatcgtatcgtccaccggtaatgaacagcgacttcatcagcgttttccggatgccgtatctggcgggctccaggtccaacttctttgcaatgtctaggctgagtccgtccatcagatcaaccgtcttcactatcagcctgcagtcgataatctcaagcgtgtacttgtccctatttgcggcttcctgatgtatcataaaatcgtccgactgcagggcgagctcaatgtcaatctcaacattgctgatcatgtacaagtcctggttgaatatgtcggcgctcagcttgcttatcgcttgaaagcccttgctctcctccaccgcctttttccttcgatcgtttactttggtcgggtcactgtcacggaaatagccagccacgccaaagtatgaatcctttgccgttacagggtagctgagctcggtgtccaggaacaccttgtagctgtacagctggtttgagtcgtacacctcccgctggttgatgtgcactttcaggttccggatgaacgttgcgccgggcatttggataaggccgaccgctgcgtttgccggcacatcaaccacaaccccgtcatctgccacttttttgagcttgaactctgtgcacacaaacaccttgctaaggtctacatagctggtgattgggtggatctgaaccaacggatttgtctgctattgtatgtgaaaaccacctaccttaaaatgaaagggcctagagcttattgggttcagcgtcaggtactccctgtagctagagttggacacagcgcagctcgttgggggtatggtgaagaagtccagccccgcatttgccacctcagcacttgacacatccacttttttatacaacattttgctaataataaccgagtgagtcaaatcttttcttctttaacagagctttttggggaacagtttgtccaacaacgtctgagggtttcaaaatgatttcagcttttttcccgcctcctcttctcttccttcttccgcgccccttttgtagtgatgaagagaccttgtccagcaattttttcgctccctcttttccttccgacaccagcgcgtctttgatgttgccgccctttgacacctcgttgaggaatcgtgcacccgtctcgaggccctctttgccaatctcggcagcaatgtttgccgcatagggtcgtgccgctgtgaccattggacgaaggtagcgccacaggttgcgcagcacagagccaactcctgctcccttctgtcgggggacacccaagaaataaccgtatccccgctgaaacgttggtgccccctcaaaaacgctgatcggtccactgcctccactttgcggataaattttctcgagccgtaaatttgagccgtcaaaaatcacgcgaaccatatctctcagaacgttaacacctttttaaactgaagagtcaaaacaacttggccaaactcaaatggcacctcccttaaataagtgattagaaataattgccctgctgaagagcctaacctcccggtcagagtgcgaatctcaacgtcaagcacatccacctcccttgctatgattttgtgaaacaacggcgcctggaagtccttctctaccacactacccgactttccctcaacggcaatcacttggagcagattgccaaaggtgttgccgacaatcatgctctcaatgacgccactgttcaggtaaatgcacaggtggctcacaccaccacccaaatcaaccgcatattttgcaagctcttcatttctgatctgctgctcttgttcatagcccaacacgtaggccagtgatcag

SEQ ID NO: 1284 - DNA, 3449 bp, Heterodera glycines
  unsure (1)..(3449): unsure at all n locations
aatgcaggtatcatagtatttntagtcttaaggaaagaatttataaattggaaacgttttntagagtctaaggtccgcaaaaaactttatttttcacgatttttataaaatttatttatttctacatcgattttcttcgttcgaaatccttacggatcatttcaaatcctccgatcattcggcccagcaattcgcaccctttccattggttttgttcactttccatcggatttgctttcgcttcggccaactttcgataatcagtcgctaatttgggcaaaactcggaggaattggccgggaagcgatgcttggaattgttgcttttgtcgttttacgatgcgttccaatttatttttgctaaatattttatttctcaatagcattttcatgttttttccaacttggcgaaaacttttggcattgtgtttcctcctccttttccgtttcgctgaatttggcgaaattgctcaaatttgtgcacgtaaagtgcgacccattggtccagaaagtgaatgcgcaagctcgagttgacgctggacaacagaagatgtgccaaatcggaaatgccataccctaaagagttaataaacaaattaattaacctaaaggagttcagtggacaaattttaatattctaaataaatctaatgacattttattacctaaataagccaattcccagccgcgaatgtttggccaattgtcagaagatggcaccccttctctgtgctgtgtttcgccttttgggcagataataatattatcgccacaaaaattgccatggcataaaacaattggcaaatctatgagaataaaaaatattaattattaatatttgattaaaatcttttatttaaattcaatttctttttatctcgcctttttctgcgtttgttttttctttctcatcaatcaattcaaatttgacgttttgaagaaagttgcgcaacggtggttcattttttcgaaaatattcgcaatttggaagtgtcagcagcagattaagaagccaatttttaatggctaattccttgagaaatttccttattaataattaattcgattcacaaaacatttttcatgttttggctgagaaaagtgcggaaggacagaatttggcccgaaaaattgaggcgatcccatggacgaagcatgaagccatgccaatgccgtaattgccttctcaacctaatcaagcaaatgacccttattaacgggcattgattcgcctctgctttgtgccacctgatcaccgctgagtccctcttgctgtcccctctgacttttgttaaattggcgtccataagaaataattgccaaatttaggtcgattggttccgcctcaatttcatcttctaattgagcattaaattgttgattttccattggacgacgttcatttgggctcataaatgtgtagaagtgtctcagaatttcatcttctcggtcacaaagtgcgagacgatgtgccaaaagttcgttccgtgttcgaatgtccaaaaaggacggcgagtgatgagtcattgtcacatacaaatttaaaatttccttaagattatgttaaacgttatgcttagcaactttcccgttgatatattgttaatttaaaaaatttaattattttataattttattatcttttaagacacattaaatatcgaagaaattaagtaacaataaaacaacaattaaatgaaagtgttggcggccattcattcactttgtttggctggcgccatgaaattaaggataattagcgtaaatttaaaagtgacacacaaaagaattgtcaaacaatttttaaagtaaaatatttattatatttacatagtgtaagaaaaaaattacatattattatatgtcaacaaagacattagtaaattattcagcaaaagtaatccaactcatttgatttcaacagagttacacgggacagacttttgggaaaattgcaaaaattttaattaattgttttcccaatttttaaaataatattttcctgcttaaaagttaggaaatacataaacctttttttgccattttcattaattttataaaaataaaacacattccgaaaagtttgttctctgaagaccggggattccgagaatattccggtcccgcgcaaccaaaaaacatattaaaaaaatcagtaacacagcgccttttccgtgaattgctgtgatgatttttgttgtttatgagctgctaataatcgccaaaattatggagaagaaaaggagcactaaaaagaataaattcaattttaaattcactaattatggtatgtttagaattaattgtaaatttgtctattaatgattattttaaaaacatttaaataaaatattctattaaatgataaaaatatttactgattaaaaaaatctttgagttaatgctccacttctttaattggttttcctcacttaaaatgatgaaaaagcacaatggcccagctgcgatcagattggagcagttttggcccggatagtctgtttcgttgcacagatcgccaaaacaaacgtaacaatcggactcgccgccattctctaagcaaattgcctcaaaaaattggcagaacgatgccgcctttgccctggcacaacccttgcgcaaattcaccgtgtcattgtcttcaaaggattaactctcgaattcgaaatgtcgccattacaattcaatagaataatttgaacaaccctaccgtatgcacaacgcacactaaaacaaccgtaaccctccctcggacatttttccaatgggtcactttcattttgcgtgtaacagttcaaattgtgctcttctgctgctgctgatgggacatttaattataaaaacatttaacaattaaccgacccccttttgaagagaataaaaaagggagcaaaactagaaaaataacaaatggaaaaacatgcataataaaaaatgggaatttagggagacgcaattattcaaatgctataataaggtgctaattagtggtaaatgattattatttgagaagagtgccgaaaaggagaaatgattaatgaagaatgacctcagctgttgctgctgctgaagtgcaatggattgataagataaagaagaagaatggtgttgttttgaacataaattttcattttctttgcggtttacttcagttgggccctcacgtttgggccccagtatgtttttggctataacttttttctttgtcatccaaatccaacattgttggtatcattcgaaagcttaacatgtttaaaaagttatttctaagactattgcttctcgatttgacaattagcaaaaaaagttataacatgaaaattgcaaaaaagtcaacatttttgaaattttttcttaataactttttcaaaagccaaaaaatacttttgcttttgtaaggctaataaagcttgttaatagctttcgaatgataccaagattgttggattt

SEQ ID NO: 1285 - DNA, 7479 bp, Heterodera glycines
actaattcaaaatttacactggtaaatgccttttttgtattgaatgatttctcatttctcagttacaaatttcttcattttttgctttctttttgctccttttctctccccattttatttctcaaaaagtgacattttcttcagttaaaaacatttaaatgttctgctgatgactgacacttctcaaaatacaaatgcatttgctttttgtttttcccttttcttttctcttttctcttttctcttatgctcaatttcccatttctccgtcccatcgatttgctaagtgaataaaataaacaacacagccaaagaaaggactttcgactttcgcttttccttattttttaatttaaaatatttttgtagttaaatttcaaacattcttttaataccatgtaaaataattaatgcaaatttcaaattttagctgaataaatattattttagctgcgaaatgccttcaaattcgacgcctttcgatgagggaaaacaaaaaatggcagagaaaaagtaacaaaaagcaattacataaatgttcaaaataacatcctaattaaatatttaattgcttttttgaaattaaagcaaaagcattccgtcgtcgtcgtccatttcgaaatttgcccctttttcttcgtctgctgctgctgaaattccccccgaaattgccgcactttctcaactttcgatcagtgattctccgaaagagccttcggtcgtcgtcgccgccaattggactttgtggcgttacgaatgccgcgatttgccggagcacagatgccaagcgaagccgtgccaattctgcgtataattgggggggggggggagaagcatttaatgaatctatttttgaaaaggctttaggagcaagtgagcaaattgaaaggggtggccaaagggaaactcagcgaaagcaccgaccgatgggacagttatttgaagcgggaaaagagctacgatgacgagcacattctgatcaaagtgatggaaggcttttcgcccagcaaattggcaaaggacgtgtgtaagtcacgtcgtcccattatatcccaccattttagcggctaattggcataattgaatttagtctttaacaaaaaattgggcgtcgcattattccgtggggacattgagccgaaaagtgaaagtgccgaaaacgccaacggcatcgtctttcaattgcttctcctcgccacttccgggcgcagaagtgccgcactcgtcagcaaatttgacacaatcttttcgcaaacgcttcgcctgacgctcgatctgccgagttcagtcgggcgccatgtcaacggcattttcttacggtgatttggcgattaagatattttaaaaataataattcaaaaatataaaacaggtgcgagatgaacccgggcaaaaacttggaaaaagaagcaaatgcctatggaaacctgatggatttgccgttcatggcaaagattgaggtggacgaaatgcatacgatagcattcactttgtgatactgtaccaattgaaggtgtggatcagagacagagccgacaaagcattggtgtgggaaaaactgatcacgaagattcaagcgaaggtggacgaattggcacttccgtccaccgcttgtcgaaacttctttccgatgaatcgactcgaaaattgggcgaagaaaaaaggggtcattattagcaattaattaaaaagcgatagagtaaaaaggcgggttaatgtgttcgtctgctcttttggtgacggacggaggacaaaaagttggaaaatcgggtttcagggaagagacggcggggcacagaatttgtccgcacctcgcggaggcaatggcattttggtatttgggctaaacggagaagcgcgagagttggacgaggaggaggagaacgaatgggcgggagggattttcgaatatccgccgataacggcaccgatcgccggaagaggcaaaaagaaaggcgccaaacagaggaaaaaatggcacttctaacaaattaactccccacaattttggcaatttccacaatcgctatttggcagcctttctcaacattatcaggaaacttaccagcaatcattcattttttgatcaattcaaacccagacttatttccgatcagacttgtaatcagagagggaaacggaatttagagaaaggaaaacttttgactccgatggaccaccaatctcctaagatttttctaagatttaaaacaaaagtcctcataatttagtcattttttggaaaataatattgtaaaaaattgggccgacgagcaaaaaaaaggcccacagattgccaagccgaaattattttcttattacgggtctttccaattcttattttgaaaaaacattctcattttgtcatcatttcttgtttaaaatccgtctttttgctcactttttctcccaattctcaaatgtcccttttctccactgtttgttattaacgtttaattgttttttatttctcttcatctttctccatttcaaaattaatcatttcttcgaattcggtgttcgcaatttttgggtcgtttagaacattttatttattttccctattaattttcgcaacttctcactttatacatatttttaaattcttttttttaatttccagaaattcgttggaactgctcaattcggaatcaaaaagcccttccgaaaggtgtgggaattccaagttcttctgatgggtatttattggacaattcatccattttcagaatcacattgttgaacaccgaaacgaaaactgaactaattattcatttgacagatttaatttatttttaaatgttgaaatttttcttttgaaaattaatattcgtattagagaccggacgagggatctcgcgggattaaattcgggacccgaccttgggagccatctcgagccttttttaaattcattgagattgatcgggatttcatcggcatcctaacttgggtccctctcgaccatcgccaatcccgcggattggagtcaaaattttacgacaattttcattttcttattaagatcttgcaacactaaaataaaaaaaatattaaaaaataatattgtcatttgctaatttccttaacaaattccttaaaaattccgagttttatccgcagcgtctaacggcaccgccgttctccacaccctcccttccgccttacaagggaacatatcgaactgtaagtgtccaaatcactttaaaaatgttaatatttctcgatcaagttgatcaattgtaattcagttgtccggtctctagtcctagcattgattttggggttcgatggcgttgataggcgctgccgcgaaaaatttgaaaattatggcccgatttttaacataatttcgcaatatgccatttttggggtcaaattttgaaaattttaggggaatttttggagtcgccgccggggaaaaagtggcgaaatttgtgaatatttgcaaagtcacttttttaaaaagaaaattcaaaactttattttaaaaatataaattcatagcccgatcaaaaaattacaaaatgagtttagaaactcatatctgacacctctagttaaaaaaatcggaagtgatagttcgcgagtgccaaagttctgcaagaaaaacatttaaattaaaatgaaatttatttaaaatcgtatttctatgaaattcagaatgaaaataatttcacatatgtcaaaaaaaaatatcttaaatgggactgagattggcgagatcagtcgatttcgactggtaggataaagtaaatttccgcaaaaattggaaaaaagggatttttggccgagctactgacaacggacgagcctatccgaccctcggcatgcttttcctcaactaaagacagtcgcgccccggccgaggggttaaaatgccgcccatttggaaaagttaaagcaataattttgctattatcgattccctttcatttgtccattctttcgtttttaatttggtactttgttcacaatcttttgtgtgcaaattcggtcccaattggtggcagtttgtgtttgccctcccccattttccataaaccacccaaatttgtccacgacatctgacattaacggcgttcatttgcctcggcccaatttcgtcgtcccatttctcgatgtcaccgataggttgatcaccactttccaatccttatcagcactgaattcctttctcattagtggaaaaatcataaggccgaagttaattgagttaattgccgttggtcggctcatcagaaagtggggcttatcgtttaattatcgcgtttggatatgttgggcccaagaacagtcaaatgacatcagatgagcaagtatttggcaattttgggcctttttaaggggccgaatggaacgggtggcattcattcactcattttgaaacaaagccacccatttaccaattacacctttcaccttctactcccaccaagtccaaaaaccaaaaacaagtcatggaacgcactttcgtctgcattaaacccgaatccgtccgaaggtgcctcgtaggaaagatcattgaacgctttgaagccaacggctttcggctaattgccataaaaatggtacaaatttatggtgtcttttagctgcttattctcatttttcagatcgttgcaactcgcaaacaagcgatggaccattacgtcgcttgtgccggccaaccctttttccccaaagtgatcagttatatgacctcgggtccggtggtggcaatgatctgggaaggtaataaaaaccaatatgaaaaacaaactcagctgtttttgattgccttttcaggtgtcggtgttgtgagaggaatccgcaaaattttgggtgccacccccgacaaagttcctccgcccggcaccctccgtgccgattaccgtaacaacagcgacgtgggcaaataccatgacacggtttgccacggatcggactccgcggaggacgcacagcgcgagtttggcatttggttcgacaaaagtgagatgccggcacctctctcgagggtatcgggctgatgtgatgggccgaccgatcgaacagaaatggacaaaatatttgcaaattcgaaatgctattcattgtttttttgtaattattttttaaagaatattaaataaaatctaaataattgtcgttttattttcaattctttttctcattttatccctccttttgggcatgtccattcgttcgttcgtccgttcattccgtttttccgtgccattcgaataatgagcgaatgcgcggcccaatttcggtcggcaatttctctcattttacattttcccaacttcccctccccatttttttcttagtgtccgatttttttaatttttttttttacaataataaatgcatttaatgccaaagactttttgtgaatgcctacattaacaacttattccaattccttcattgttatttaaagttagcacttttataattaattaataaaaatcatttgtcattttcattatttctgttgtgcctttgctgctgaatacccaaacaatgccaatgcaaatggacccctccccccccccctttcccctccccccgggggttttctctttaaataaataatgcctttgaagaatggggcacagaaaatgagcacatgccataagtacctaagctggttagctgcctttttcaattccattttcttacactttttctgaatccgtaacacttttttttgtctctctctgagaaaataaaaatccaatttattccattttctgtttttttcggattcgctttcttctcagtcctttttggttttatctattatttattgatgtaagtcactgtcattcgcctcaaagcgctaattcgcgtaattagtgaagcggcggcagttccaagacagaagagaggccgtttcgctcgttggcatttggcaacgcgcaaaacagcgcaaaaattcaacccaattgacaccttcccacgagagaatgttcccattcattttcagtgaaaatggcatttattttcactatatttcaaataataagcaaatatttttaaatagtttttattattttactttttctttattactaaaaataattaaatataaaaaactccaaactttttgtttgcattatgatttaattgtttcttatggtcatccccaatttgcttcagtttccccccgcggggactttgtttgtccgctgtcatcggtccatgggatgggattagtgatacaaattgaattttactaatgccattccccacaccctccccgagcatccgaagaagacattggcacgaaaaagagccaagaatcgtgaattaatgtgccaaacaagaaatgggttaggtggggttggcccaatggcaaatggaatttggcaaggaaaagcaagtccggtcccagcagaagcaagtcgtaataagacagaggagttcacctctttggcatgacaatgagcagcaaaagcagcagcacaaaacggaaaaaaacggcaaaagcgaagagccaaacgcagcagcagcagccgcagcagagcatgtccatgtccaactcgagccggtggagcgggcacagccgggggcacagcggaagacgcaagcaagtccgactgcagaggcaacgctgtgtgacatcaggtgggggcattggagcaagcaataattaagcaaatgactaattgggccataattaaggaaattgcaaatttagggcttgataatgaaagtaattattaaagcctaagtaatgaaataactactaattagggacgaaaatacctaattaagaggaggggtaatttgtagttcttaccaggcaggattatttgggcaatgaatctttttgcacagatgaccagtcaacgtttggcgaagcggggtcaaatagtgccgaagcggacgatggcaattactggattggcgttgctcctttgttggacatgtccggcacagcacgcgtgcttggtaattggcattttctatcctttcgtttgtaagcgtatttaattgcattaattttgtttataatcatatcataataatattatttaatttcattttatttttttaatcccatgggatacgattaattttctttctttcacttccaagtgagtgagctccgcttaattattcgcaagtgttttgttgcccaaattggcagccaaaataacctttcattgccacaatattaattggatttccttcacaatacccggcatatcctcggtttcttttaaccattcattgcctttcaatttttattacatttttttgttcggtttgcttttcaatttatggaaggatttgctacattaaataaataaacttaattattttatttgatttaatgttaactcttaattcacagtaattaacagcattcttttttcatagcttttcatttcttttctgccattttccatgattaattttgggtgttttttctccattttctccaattttcctccgttttttcttttctttttccccgtctcattt

SEQ ID NO: 1286 - DNA, 2890 bp, Heterodera glycines
gagcggtggcgacaaaagaggcggaaattccctgcttggaactgccggacgatttggcgcagacgacggaaatggacgcccgactgctgaggtgattggcagtggaaaagtcatgacaacgagtggtcaaaaatgagaccgaaatgctctcgggttggtaagcaagtagaggagcagcttggaaacgagggaaattatgaaaatcacaattgaaaaaggggtggtgcataagattgagaattacattgcaattttatgaaaattcgaatcttacttcgtgaacaaattatgctcagatttccgttatcacactattgcaaataaaataataatattggaaatacgacagtcgctttcgattccagccgaaatagaggcgctttctcccaatggaaccgttcgaaagtgcagcttccgaatgtcgtcaattgtgccgatgaccaaattttcaccgtcagacacagcaaggcaatcaagatagaattccgagttcaatggtacatgatttgcctcactcgatcgcaggggggacggggaaatgcacttctgcggctgaaacctttcccctcggggcgttcaatttgttggatgttttcggttgtatttgcaactgaatttattcccttacttttccttattttattattttttgcattttattttttattaaattaacatttattagacgctctcttttggcattttttcaaataccaaaagattttaagtgagtttttgcattctttcctcaattccttgcattttttcacctattccccgacactcatttagtgccatcattctccgaattgtgccaatctttcgtaagtaatttttgccgtctttgtccgctgtaatttcggagtttactcgtgcaaggagagggggcgggggagggcggtgaagaaaatttggctagatgaggaaatggccacggcagcgtaatgagtcccatcagaccattgttgggcccgaggcgctgatgggccacacaaataattgcgccctcggcactttggttgggggaggagaacagctaaaattttaactccttatgggaattggttttttttcttacatgaactgaatttaacaaaattaaataatttttcccattagcatgtaaagctgcgaatatttcgtcggccatgttggcccaccgtcgcaaatcctcggcaatggtcgccggtttatccaccgcgacagttccctcatcaatgggtgccgcctcttcagcagcattcggcactcggcacaaaaaaccgtcaacccccagaagctcaacgaccagcccaaaaggggtggcgaagcaggcgagaaatcacaacgcaaattgggagattgccacggaaaaaatgatcacttatagttcattaatgagtgttttacttaattagacctatcatttaaacgttaattaatgagctttacctaattgggcccactctttgaatcgtttccgccgcccccgcgccctctgtaaatcatccaattctcgcgcactttctttccgcaggatgccccatcacaaatgggcgctgctaccgcttcaactccattgccatcatcgccaccaaatgcaacgggggagaaacaacagccgacaaacaaccgacgccaaactgctcgagaatcgatggccgttttgtccgagaattggggcgtgttcagcatggacccctcgggggcaggtgttcagggagaaataacaggcaatcaaccagtaaaccaactctctccgcccctctatttccctcacttaattcccgtcttccgagcattgcttccatcattggctatctttgatgtgtatgaagttttgggatgttttttagtaattttctttaaattcctttttgccatgtaaattttctgagcacaaaattggaaaatacaaagaattcgaaacgaattaatattttaaatttaaatcaaatttaataaaataattgatgtattcgctataattaaaaataaatagcctaataattgaagaataactttggttggttgcaaagaaaaactgcgacttataaagtttggcactgaaccaacgggaactgattggactgttcaattgtgaaattttggaggtgtgtgtttctaattgaggcaaatcatgaatcattttgattgataacaatttcaatcaaaattcatttggccataaattggtgagaaaagaacaaaaactcatccgatatcaaattgatgccaaatgaatttcattgtcacaaatgaaaaaataaaattcgaagaaaaaaacaaacaaaaatctggacaaaaaaacatagcaaaacattattttaaatcaaatgtggtcagaaaaagagctacgccgacaacgtttttgctttatattttggctttcatcttctgttttcctgcaccgattggcgggtaaatgattttaccctttgaaatacgaatttcattctgaaaataattcttttgtatgagaaaataaacttctttttgcccatcacatttcacctgaacttcgcgccaaacgagatgctcgtcgaagtacaggccgtgcagtttcagcattttgacgaggtaatggagcattggcgtgttcgggtagtacttttcgcttagcttggcttgctgctcctgaaatcaaatgaaaattcgcatactcaacttatccaacccgtggctaaatttgaataataatattagataataatctgattttcctttgcttacccatggctcagaggccataatttcagcaacgcgcaacgatttgatatcagtcggtcgtgtgatctgtgagcagcagaattgagtttatttttattgtaaaaatgaatgatcgcagtaacttgcgaaggtaacaatttctacccctggaaattatttttgctggcaactcccccccccc

SEQ ID NO: 1287 - DNA, 1144 bp, Heterodera glycines
cgctgtccaaagaacaactcatcttctaatacgaagcgcgtctccgaaaacgcctacaaaacccagctccgatggcaccggcaactcagctcccacagacaaatgccccgactcccgttgtcgaagatggaccaaaccagaagaagaccagtgatgacattcccaaacaaccggaggtttttgacgaaacaatcctcgtctgttatgaagcactaaactcatttccacccaccgacaaaattgttcaccaaattcaatcgctcaaaaaacaataccctcatcttttcaacaaatagttctaccagacctccaacaatttcttcaaataaaaatatccctcaaaatttctctaaaaattttacccaaaaaaaaaaaaatttttttttcctcttttacaacccctaaaaaaacaacaacaattttccctttgttggaggtctgacttttctaatttctgcttcttcattcaaaatttcaattatcttttatcactacctttcatttcacctcatttccgccaaaagtataagtggcacatgcccttcttttggttatttttattttatttttttattttttttatttttgagattcatttacgagagcaaattgaaggttttttaattaaaaagagagcaacccaatggcaaattgtataagagataatcaagtaacacatgtatttcacttaatttgttattacttacctatattactttttttatgcgagctatagtcatgattagggcgtcaaattatatggatataaaatcgcaaaatatggccataaaatatggacaacaaatcgcaaaatatggacataaaattgcaaaaatctcaaaatatggacataaatttttccaaatttagggtataatttctcaaaatttcttcaaatttattggttgaaattgcatataagatacatttccaaattttgagctgaaaaactcattcgattgtcggcaaatttaaatttattcaatatttttcgtgaaaattttgctaaaaaattattttttggaaaattttccggtttttgaggtcaaaaggccaattttcctgttgggggccgttctattagaggttttttgaaaaaatgccaaaatatggacataaatgccaaaatatggatataaatcgc

SEQ ID NO: 1288 - DNA, 4470 bp, Heterodera glycines
aagcacacagtctaacgaagctaaaatatataaaaccccagcgttcaggcaattaccaaaaaagatttgattaattaagtaattgctgattattttcgtttgtaactttcttgaaatgttagaattctcttgttttctcgtattattacattattcagactttgcgctttcaaatgataccaaaaagatagggtttgttcgaacatgaacaaagtgattgtataaaaccccgggattgtcaattgattggactcataaagtgcattagagcccaattttttaaagcaaaagaacaaacttcgcgtgctttcccgacccactgaactcgtaagtttggggcgctgatttttggcagacaatacattcaacggtgacccgaacggcgtgatgccgaaacaccttgtgtggctcgactttgttcgtttggtgtgccaaaatagatgcgtttgtgcatatgtaatttgtcgacaaatcgctgcacatcgacgcattgtaccactgggataacgaagccgtatccggattgctgctgtcagaggaagtagaacgagaacgggccatttatcggtactaattcagtttgggtcccccttttgggtcgaaatttttcaaaaaattttttggttatcttatttttttattttttttcggtttttgtgcttactttgccattttcatccttatttcttgcttaggtaatttagcattgtttgatgctgaaaaatccggtctctactggtgaaagtgggattggttgatgaaaacgcacatttaaatactccttttggtgctcacaaaaaataagatttttttgtctgttgacagatttttctatttaagtgctgtctcgttgctgcccttttcctcattcctttggcaatttctttgcccattcattactactcccgttccgaattttatttagtcattcattttttcttacaaaatcacttatgctagggtaaaaaaaggcgctgatcacgaatccgagttcgggttttgcaaaatcactgattttgtcaatgatttttcatcataacatttttacagaataatgaccacgggctcggaccgaacacaactccaaatgcaattacattttaacgcaaataattcttccgaggcatcccaatcacaaaattcctccgaacaaatgcaaaattgttcaagtatgcatttcctaatctttcataataatctgttgaccattgtttagccaatgaaagagtcgctggagaagattcggtgccattcatcgacagagagacttttggagacgcggagaatgacataggaaggcgaccgccgcccgatcggtttcgactggtctatctgatcgtgcttctccatggaatgggcatgttgctgccgtggaacactttcattacgatcgcaggggatgtaaggcaaaaaaatttcgaaaaacaaacttcaattaaatgttttaatgggctttaaggcacttttataactgcttttttaagtattatttgcaattcaaattcgctaatgtgagcaatgaagacaattacaaagtgtacttcttcaattatctgacggtttgtgcccaaattcccgtgagtttattcatgtttatctgattgtgagcatttttctgcctttttcctattttagaatttgctgctaacttttctgaatttatttggcgtcataagaggcggcttttaccgtcgcatttacttcactttggccgtcatttttggcatatgtctcgtcacaattgcgatggtttacgttccaaccgataactgtgccttgccattccttatcttttcttttcttagggactttcggctttttcctcttcacaatgctttccgttgtgcttctgaatagcgccagtggtgtttatcaaaacagtatttggggattgttcgctgattttcccggggaattcgccggtgccattattattggcaacaatttgtgcgggattctgatggcagtgctagacatcctcatcattgtgttaggtttgcgattcgtccacttcgcttttgttcggttcgcttttagtcggtgccaatgccgcactcgccgcaacagtttacttcggtctcgctctgtttaccgtcgtcctttgcattttttctttccattttcttcaaaaattggttctattctatttattttcaaactttcatctctttaaacattaagaatttctacaattactatgtccaaaaagcggcgaaagctcgcgcgaacaatggaatgaatattctgcacgaggaaacgggcgaagcgaaggccaatagaaaagtgacgcatccgcccgtaaaaacatacatcgcagttttctctgaggtaagcaccaattaaagcatgatatgctgtgaaaatatcattttggcaacttataggtccgtcgccagttgctcgatttttggcttgtcttttttgtcactttggctctgtttccgaccgttttgttgaaagtgtctttaattagtccgttcaacgaccagaaaacttccggtgacattttacacattaattgctttttgacatttctcttaagaatcgctctacaagcagctgacagttttcctcaatttcaaactgccgatttgcctccgtctgctctttcttccgttgatttggttttgcgattaccaatatgacaatttgactccgcgtcgcttcgtgttcatccacaaccaatgggtgttcactgttctgatcactcttatggcactcagtcacggctattgcagttcgttggcgatggtttacgcgccgaagtaacataattcattttaatacttttctcagaaagaaatttatgcagaaaagtcaatgaatccaagtcccaagttgttggcatgatgtccggctttttcctcgttctcggcattgcatctggcattctgttcactttcgttgagcctagccttgtcgatgcggcggaagactttttcggcattttttattaatgggactttaactagtcgactttccatctaacttttcgtcctctccctaatttcctgtcatttttgtgccattatttttgaaattataaattcgttcatttattcttgtaaaatttattgttttcacatacctaactttaataaaaccgattaattttcttagaaattaccagaattcgtttgtttcgtgcgataagcataaaaatacaattttataaactaaaaaatttttctatttttttaaaaacacccttcctcatcaaaataaacatataaattagtttattccagggctcgcagatctgaggctttagcctcattttgtggttttttgatataggtcaatgaggctaaattttcaaaatgagtcgatttttcatagtcagattttcacaaaatgcttatttcaaataaaaaattgctcaaattgatcatggacagtcaaaaatacaacatttgaacattttaaacgtgttttgaataaatttgtaaaaatgaggctttttgacccaaatgaggcttttttgcttgccgaatgaggcttttgaaaattttcatctgcgagccctgggcatatatatacataattatttacacaatctgttgaatatcgttgttgtatgcataatatcgtccatctgattggtcagtcagttcggcactttcttctcaggccgtcttggtgtggctgccgccctccggtgtccacaattccatgttttccctcatcatgcgcaagttgagcgaggcgtcatcagccaatggcaccgtcaatgtggcaatctccgcctgggccaagtcaattgcctaaaaatccggggagaatttagccacattatacaatgaaagaaaaagcatgatgaaaatcatcaaattggtcccactttttgggccaatttgcgcgcctcgtccaccgattttaagatttcgaagttgaacacggagaagttgagtgcaaggccaagacgagtcggattgatcgctgcaattttggaggtggcgatgtccatggcttcttggtaagcgccctttgcgagttcgacgacacctgcggatcaaaaaaatatacgatataatcggaaaatgtgttaattttcctacattttatgagtccaatcaactaactgacggtacttatgtcgtttacagaccataaaaaaatagtttttaataaatcatatatttaaacatttctaggggttttcggggtcgctgatcatgaatctgacaccctgtacaaaatgttacaatttttggctctaatgcactttgagtccaatcgacttttatgagtccaaaagtattttatgagtccaatcaattgacaatcccgggtttttatacaataactttttccatgttcgaacaaaccctatatttttggtatcattcgaaagcacacagtctaacgaagctaaaatatataaaaccgcagcgttcaggcaattaccaaaaaagatttgattaattaagtaattgctgattattttcgtttgtaactttcttgaaatgt

SEQ ID NO: 1289 - DNA, 5808 bp, Heterodera glycines
  unsure (1)..(5808): unsure at all n locations
ggcaatcaagaaggagtttcgccngaaaaaatggagctgatcaacancactctgacaanaatgtacaatgacccatcctccccagtgcgttttcaggtgttacagcactgtgaaagaagcgcggaaaaagattaaacatttacgaaaagaagaagtgcagagatatttggagggacatcgcacctatacattgatgcgccnccgcagggtgcggtttccaagagcaaaaactatagctgccggattcatgaccgatgtccaggtggatttggctgattttcaagccctttctcgtcataatggaggccaccggtatctgctcgtggcggttgatgtcctgtcaaaacgtttgtttgtcgtcccactgaaaaataagagggctgaagagatgttggaggcattcaaggagcttattgagcaaatgcccatgttcccccatcgaatattctccgacaaaggcactgaattcaaaaacaaactggtcaaagaattctttgaggagcacgagattgcgaagcacgagcccgtgcattcatcagtgaaagcctcagttgctgagcgagccatcagaaatgttaagcagcgactatacagatattttgcggaaaagcagactctcaactgggtggatactgtacagcaaattgttgatggaattaacagtgcaccgtctcgtgttcacgggatgcgaccaattgatgtcaattttcggaatgctcaaaaggtgtggaaacgaatgtatggacaacaattacttaaaatttcacaaaggcgagcaccacgtttccgtaaaaatgaatttgtgcgcatgagcagagagaaggggcagttcgagaaggggtacctgcccaattacggcgatgaaattcttgaggttgaccaagtgttgaaggcagtgcgtccaattcggtacaaacttcgtgatgatcgcggcgaaaagttcaggggcactttttatgagcaggagttggcacgcgtacgtaaggatgatgagacaagctaccgaatagagaaggtcttcaggaagagaagaaaacccgatgggtcagttgagatacttgtaaaattcataggctatcccgagagggaatggatcgatgaatctcagcttgtataaaagcattcagtttgttcattattttttacatttggataaatctttttctaatgacatcaaatagcttctttgtgtttttgccaagtaatgtatcagattaccccgacaatcaaccgaacaaatatagggtacgtcttccaaaacctctacattttagtgggtcgtgggtttgtgggctgcatagcatcagttatccctattcctggcactctacaattggtacattggatgaccaatggattgacattcatttcaccaatctccattccgttgatgatgaccgacagcgtgtcatcagagtacctgtcccacaggcgtcacacaaaaaagttgagcaactcagggattttttacaagcaacattgaagagtcaagaaaaagtcagacttaagccgcttgcgcatgaagaagggtacttcgataaaccggtagtgctcggctcgcctccacacgccaagcgccttaagagatcaacaattgatgatctctcttcactgccctctcccccgagatatgatgagacagatgagcaacaatcacagcagcagcagcctcagtctccccccagattcgatgagacagagaaagaggataaaaaagtcaaagaaacaacccctccttctgccgctaagcaaccgataccgccggctccaatacttgctcctccttcacatcctcctaccgaagcgccaaaggcagtcacagcaacgaaacaggcagctccaaaatctgccacagcaccgcccccaaagccaagtgtgacatctactattactgctgccaaaacaaccccgcctcccgctcccattccacccattaagcaagctccatcggccccgaagccttctccgtccaaaacagcggctgtgccgaagccaactccaacacccactccagcatctaaatcaactattccgactcctgcttcatcgaccaaggcgcagaatatccctaaaataccaccacctctggcagctaaaccaaaggagccaaatgtcgcaaagaagtccactgtaccaactaccgtatctacaacatctatttctagtttaacttctcagattgggcctacaccaacaacaccgaaaccaccgccgcctcctattaagcctattcctacttcaattccggcaccatcaccaccaccaccaccaccaccaccaccaccaccaccacagagtatagcaaaggacgctaaacgatcagtcgaagccccaaacgaaagcaataaggaatcaaagagattggatgtggatgataggttttttggcggtttagctgccggagacgagtttcccgacgacgatgacaaagagtccgaatggccatatgatcctttcaaaaacattgtcgatgatgtagaaatacaatatcttgatgactttgagcgattcaaggtggtgttcaaaaatccagtgatcagtcacttgtcattctcacctcagctaggctatgtgcttggatttgaaaacccccaacacgttgggcctcaagaaatctcaaaatacggctgcgacttacggggtggcttctcaagtttcgcagtctactcaaaaggactgaccgagaacatgattgttggtaattcgctgagttcgctgcttcgcgttgtgtcagtgagcggtgccacacccggtgactacaatgagaagatttatgattcgccaatatacgctcgagtgctgccacgggagatcagcgaaattgaaattgagttgcgcacgatggacaagggacgactggtgccattcgcctatggcacgaccatggtggtattaatatttaagaaagtgataaatttttaaaacccactcatttttgtattcattcactcattttacgcaaataaaatggttcatattgtgtttgacccaagcattatcggatatgatgagtacatgcaatacggaagtggcatagaaagcgaggattacttccgagggtccagccccttccaacgagggtatggacaacgaggcgcaggggtgggggatgtgtttcgcggactttggcgctttttccttcccatttttcgtcgtgttggcactacagtaggatcggaggcactgagcacggggcagcgagtgctggagagagtgggaaacgaaggagtgccatttaaggaggcatttgtcagcgagggaaagaaaggaattgatacggtacatgagaagggcggcctgccaaaacagtttggcggtggtcgaagaaagagtataaaaagaaagaaatctcatgcaccaagccatcagaccataattggacggacaatcagcaaaccagtaaacaaacgtattcgttcagacgcatttggactttactaaataaatggctttccataaaattgataatgacagtgcaaactcaatcaccaatgccttagacttttttcgtattccacccaccaatgtgagcgtctcttcatcaaaagtgtttgagctgcttcccagtaacccactgacggacactccctaccacttcaagcttcactccagccaaaactttattgatttgtccaaatgctacttacaaagtgaattccgaattcgcaaagaaaatgagcatggtcagctggttgacctcacagcagacgaagttgctccgatccagatgatcggtcaaactttcatccgaaacatcaaaatgagcataaatggacgtgaagttttcaactccaattcactaatggcctacaaaacatacttctcacatgagctgtcctattccaatacggcaaaggactcgcatttgaatgcggcgggctattaccgtgacattggcggctcgcttgagaccggggacggatgcattgcgcgacgcaacctgtttgcgagaagcagaacagcgcaattcattgccaaaattgacgccgatttgttcaaccaacctctctacttgatcaacttctgtgagttggacattgaaattttacccaacgacaacgagtttgtcctaatcactacgcccattgttgcccagggtgctgcagctgctcctcgttaccgcttcgaggttgtaagtttgaaaatgtatgtgaaaaagtctcattgatggatggactggcgttggacattgcgcgaaaacttgaagtgaaaccggcacgatatgctgtgaggaaaacgctgatgaaatcaatgttcattagtcatggacgtttcgagtttacagccaatttgttcatggatcaaatcccccgccgtatcacaatggggttagtggctaattctgactatattggaacaatttcgcgcagtccgttcaatttcaaccgtttaatgtgcgcgaaatctcaattattgctaatggccgctcctttccccaagcgccatacgacttggactacccaaattggaaatatgttcgccctttcaatgacatgaacgaagcagtgggattcgccaactcattggaaagcaatggaattagctatgaacagttcggaaaaacccactgcatttatgtgttcaatttgaccaacagtggagatgatcaagctgcgctgtttgacctgataaagaacggacaacagcggtgagcattaaattcaaccaggcagtgcccgccggagggataatgctggtggtgatgggcgaatgcgactctcttgtgatgttagacaaaaatcgatcaattagcacagacattactatttaaggctgtcatttttttcgtatgccactatcatttgaataaagatgaattacaaaaatgttggaattattttcttcatacttcgaattaatttcgatgttgtgtcctgtcaaacaaccgaggtatcagcatcatattccgaatatataaaaagactaaaaatgggatggcccaaaagcagccctcaacccagtacaacgcgtgtcccagagtatctaagacgtaaattattgagacgacttcccagtacaacttcgacccggttggttacgacttcaagtccagcaaccaccacaacaacccatccacaaccccctaagcaagagaagctgatagatgaacaagtgtcctcaattttgcctccactgattcaattgtgcaaagactcctcaaaggaaaataatttcttccaacaaatcatttgctgggcactgaaggctctgtatttgatgcttatcattagtttggtcctacaacaattgtgctctgttttttggttgaaacgtaatggacagcacacaaatcaccaaaatattgagagaaaaccaacggacgtcacaaatttttcgaggatgtttcgccagtgaccaattgcctttgccggccaccctacagtatcctgcggcactcattgtgaaccgtgacccccatcacaaaggcggctcccattggtgtgccatttacgccagggacttggacgcgccagtgatttattttgatagccttgcccttcccctaccaccaagtatttcatcatcctttttatataaatttcccaaaggtttacacaaaaacattgaagcctaccagtcccaattgacatcaacatgtgccccacattgtattgtgtttgtttaccacatgtcccatggaaaatcattcgataaatttatacatattctcaaaacttgttcaaaccctgacatgtattcattaataatgttaaataaatgttgaacagntaattatattttcattttattttttttaaattgtgtcttcccctactattatgcattatctacctaaaagtacatttt

SEQ ID NO: 1290 - DNA, 5348 bp, Heterodera glycines
gagtataaaagaaagaaacctcatgccccaagccatcagaccataatcggacgacatcatcagctagccaggaaacaaacgtattcgttcagacgcatttggactttactaaataaatggctttccataaaattgataatgacagtgcaaactcaatcaccaatgccttagacttttttcgtattccacccaccaatgtgagcgtctcttcatcaaaagtgtttgagctgcttcccagtaacccactgacggacactccctaccacttcaagcttcactccagccaaaactttattgatttgtccaaatgctacttacaaagtgaattccgaattcgcaaagaaaatgagcatggtcagctggttgacctcgcagctgacgaagttgctccgatccagatgatcggtcaaactttcatccgaaacatcaaaatgagcataaatggacgtgaagttttcaactccaattcactaatggcctacaaaacatacttctcacatgagctgtcctattccaatacggcaaaggactcgcatttgaatgcggcgggctattaccgtgacatcggcggctcgcttgagacaggggacggatgcattgcgcgacgcaacctgtttgcgagaagcagaacagcgcaattcattgccaaaattgacgccgatttgttcaaccaacctctctacttgatcaacttctgtgagttggacattgaaattttacccaacgacaacgagtttgtcctaatcactacgcccattgttgcccagggtgctgcagctgctcctcgttatcgcttcgaggttgtcggcttgaaaatgtatgtgaaaaaagtctcattgatggatggactggcgttggacattgcgcgaaaacttgaagtaaaaccagcacgatatgctgtgaggaaaacgctgatgaaatcaatgttcattagtcatggacgtttcgagtttacagccaatttgttcatggaccaaattccccgtcgtatcacaatggggttagtggctaattctgactatattggaacaatttcgcgcagtccgttcaattttcaaccgttcaatgtgcgcgaaatctcaattattgctaatggacgctcctttccccaagcgccatacgacttggactaccctaattggaaatatgttcgccctttcaatgacatgaacgaagcagtgggattcgccaactcattggaaagcaatggaattagctatgaacagttcggaaaaacccactgcatttatgtgttcaatttgaccaacagtggagatgatcaagctgcgctgtttgacctgataaagaacgggacaacagcggtgagcattaaattcaaccaggcagtgcccgccggagggataatgctggtggtgatgggcgaatgcgactctcttgtgatgttagacaaaaatcgatcaattagcacagacattactatttaaggctgtcatttttttcgtatgccactatcatttgaataaagatgaattacaaaaatgttggaattattttcttcatacttcgaattaatttcgatgttgtgtcctgtcaaacaaccgaggtatcagcatcatattccgaatatataaaaagactaaaaatgggatggcccaaaagcagccctcaacccagtacaacgcgtgtcccagagtatctaagacgtaaattattgacacgacttcccagtacaacttcgacccggttggttacgacttcaagtccagcaaccaccacaacaacccatcctcaaccccctaagcaagagaaactgatagatgaacaagtgtcctcaattttgcctccactgattcaattgtgcaaagactcctcaaaggaaaataatttcttccaacaaatcatttgctgggcactgttggctctgtatttgatgcttatcgtcagtttggtcctacaccaattgtgctctgttttttggttgaaacgtaatggacagcacacaaatcaccaaaatattgagagaaaaccaacggacgtcacaaatttttcgaggatgtttcgccagtgaccaattgccttcgccggccaccctacagtatcctgcggcactcattgtgaaccgtgacccccatcacaaaggcggctcccattggtgtgccatttacgccagggacttggacgcgccagtgatttattttgatagccttgcccttcccataccaccaagtatttcatcatcctttttaaataaatttcccaaaggtttacacaaaaacattgaagcctaccagtccccattgacatcaacatgtgccccccattgtattgtgtttgtttaccacatgtcccacggaaaatcattcgataaatttatacatattctcaaaacttgttcaaaccctgacatgtattcattaataatgttaaataaaatgttgaacagttaaattatattttcaattttaattttttcaaaattgtgtcttccacctactaattatgcattattctacctaaaagttacattttccaacgcttaattattttcgtaatttattttccattcattaattatgcatgcaataaaataaaaaggggcggagcttatccatttgagttggaacaccggtataaaagccgctcgaatttcttcattcagacataaaaaaatctgaaatggttctcgtcagcgaattttgtgctcaatttctctcctgcccgacaaagtcacttcgtgatcgactgaaccacccagaggaccgagtccgagttttgcagcaattgattgggaaaaaggtccagacaacatacaaggatcggaatggaatgtgcaagtgttttttcgttggtggaatgactgaacgaggcgcggcatttgaaccagcatatggacgtctgcgtaagccgttcaacattaacgtggcagcgcatttttacgctcgccaccgtgtcaaattgcactacccctatgtgccatgcatcattgaaggctttacccgtggtgaggaccgttattatccgatggaactgcttgaaattgtcgacgacaaaaagggagggcgattatttggtcgattgttcactgaaattgaggagcaggaggaggaggacaccaaaagtgattgttcacactcttcaaacacttcctatttacaatttaacggtaaaggattcaaatggtatgaaagcactgacgaaattgccaacactgggcgtggtgagtgcagccaaccatcgtcatcatcaccatcacacacgtattggtgaacacatatacacacaaattccccacaaaatttatattttcgtaaatatattttcaatttcttaattatgcatttttccacctaaaaacatatactcccaatcattaattatgttatgcttaaaaaatgtgtcttctaatccttaatttttttaaaactttattttcaaatcgttaattatgcattttttctacctaaaaattacatcttccaacgcttaattattttcgtattttattttccattcattaattatgcgcacaataaaataaaatacaaaatgaaagtgcaaaaaaattacagagtgtgaccaaagtcgaaaatttgaaagtcggctccgacaatacctttgccgacaaatggtttataaattttttgtagtggacaggagatgactcgcccatctttgatgcttggtcgtaggaaatttggatacatcacattgattggttgtggctcacccgtctcagcaaaccgtagcactttgtccttgaacgtctcgtagcgaagtccttggttctggatgacgtcatagctaagcgtcataccgcgcactttcagcacatattcgttgtctgcgtcggctggtgcgtcttttctgcgcagcttgagtccatactaaaattaaacaattaaaaatctaaattttaaaaatgaaaatttacttgtttggcacctcccgaacagaattccaaaatctcatgttttgggtattcgtcggtgaactgcccgaggtgagggccagtttgaagcggacacagcccaatcggatgggcaaaaatgaggctgtcagtatctgtgtagagcagcacgcagccttgtgttcgcacaactttttgcattgccctcaacagaaggagtcgggcggcagatgttgtccacagcgaaattactaaaaaacttaattttattttaaaagcaaattgatgaatttttaccgatattcgaacaggcatgttcctccacccactcctttttcttttcatagctgatcagcatgtgttcgtcgtcaagttgatcgattgccgtcacatccagtgagcgattgtccaggtattccgcgaaaaccgcaggatcgccggtgatcaaagtttgggacaatccaaagttcctcaaagagaatcgtcccccttaaaattttatcaatgatcaaattccattatgtcactcacataagttgttgaggcacaatttcgcgatggatcgtttccctttgttcggctgcatttttgccttgtcgatggtgatgccgtatttttcgtaacattcccggacgaattgatcctccaagtcggcattgcctttgatgtttgcgtcaaagccggttgcttgtattttttgtgccatgaattcacggatgtacgatttgaagagttgatcatcactgctctcgtactgcaacacccggaacaatttggtgacgtggtacccttcgtcgagtgctgcgttcaactccaatgatgtacatgtcgaaacccatcctctctgctgatcattgtgggtgcagctgtactcgttgtcaacgcctccgtttgggtagtcaacagcacacttgatgcagagagggaaacacagccgatcgcccactttaacaggaagaactggcacatcgcagcgccgcgggggcaccacccacactttgagaagtgacagatcgtacggattgtcggtagcgcaacgccagtccacttgttggttgagaacatggacttttggatggccggttgggtagcgggtctcaaaacttaaatgtcaaattaatgcaaaaatttgcacaaatatggcaacaaacttgacaaaggggtacagtgacgtgaagtcaaagtacgatatcttctcgccctccttcgccttgtggaaaagtttgcgtggccccgttcgcccacccatgaaggacgctcggatctcaagtgggccgtcgtccacatagctgccaaacatttgtcgcatctcagggtctgctgccaacatttggttaatttcacattcccagtacacatccacgcggccaatttgattgcgcagaaagtccagccgcttcgcgagccggtctcgcacttcgccggctgattttccattggtcagaagcatattgtcttccgggaaacatttgatgcaccc

SEQ ID NO: 1291 - DNA, 1258 bp, Heterodera glycines
tgaaagtgtgcgaatttggcactttctgttttcattagtattttcgccacttttcccttttcttcgcgtgacatcgaaaggcacagagtcccgaaattccatgtcacttttgtttttgttttggactaaaaatgtccctgggggattaaaggaagcggcggcacattctgccaaacgacggatcttttggtctgtttgctgcgggtggcaccgatgaaaacagtgataatggccggggaaggcgaacagaacgggaaacaaacattcccggggggggggaaggtttgatggatatgaatgagaaaaagtgagggaggggggggggtattttaaaaataaaaatacaaaaatgaaaagaaagaagcattaaattggatggaaaagatgtaagactaatgctactggattacttagacgatatctacccgagactgaacattcgccgaaaccaatgccaacacaaatgccataaaacactggtcaagtcctacccaatagaactgctgcggcaaggctagccaaaaactaaacgcaaaacataagcattgttagactaaaagtgagaatagggaccaaaagcaattcgaacttgtcgaggccgaagaaccgaaattggcatgaaaaaagaattaatagttttttgattaaacattttctgatctgtgctttttctccgtaacatcgtcactaaaatatgtgatgaatgattttgatttgatgatggtgattagtgtttcctttcctttctttcattctcccgacatcatttccataaattctaaaagggctccaacaaaagtcaacgcaattttttggcaaatgcaccgtcaaaatcgaccgtccccgagcctaaatcagcgtattggatactacaaatgccgacaactttaacccaccgtccgtgtcgatttcggcaatcttaaaatggtgacattttaattgcccattctcccatcatttccctcccccccccccctcccaccatttcgtccaattcgtcttccgttattttgtcgtccaacgcccgcagtatttctcgcaggtcgctcacatttatatagccatttccctaaagcagcttttgcccatttcccttcctttccaactgtttccctccatcgcatttttggtgataaatgctttttcttctgttttcgtccgatcattaaatttggcaaagggacgggggtaccgtatgcgagtgtccccctcgtaccgtatcccatgttgtttgtcagtcactaccgtattccgcccg

SEQ ID NO: 1292 - DNA, 940 bp, Heterodera glycines
  unsure (1)..(940): unsure at all n locations
ttcggctctaaaggcactttatgagtccaatcaattgacaaaacctggcttcttagacaataactttgttcgtattcgaacaaaccctattaaagaaagttacaaacgaaaataatcagcaattaattaattaatcaaatcttttttggtaattgcctgacttcgttagactttgcattttgttttatgggataatttctgtgttccaagcggaaacaatgccaaaaataccaaaatattggcacatttgacggcattgtttcccatccgtcaaattgtgccacaaaaaggaatccctttttccaaatgcctttccaagtgtctcccccgcccacccatggcacctcaaattcgatttcgcccgacccgtccgagtcgaactcgcggatcagctgcttcaggtcgcgttcctcgaatgcttggcccattgtccgcagaatttggcccacctattcttgacggaatgtttgtcatttgtgttttaatgcgctttttcatttcctatgccaaaatggcatttctaatgttatgctttttttggctttattttcaaaatgccattgcgacccccccaattccatccaatggcattcacttttttcttcacctgagttgctttgatgaaccctttgccctccttgtcgaacatgttgaagtactttcggaactctgtgcgtttttcttttggcttttcgcccttttgtccccccccccatttctcccattttccccctccgtcctcacgttcgatttggtccgatgtgagttgttccaatgcctccgtaactcgagaatccgtctgatagatgaatggaaaactttttgattttccaaggcaattctcaccatttttgagttaaggagagaatttgacagatttattaatgcaaattttgttggaatgtgccaaaaatcacttttaagcactcanaaattttgg

SEQ ID NO: 1293 - DNA, 1581 bp, Heterodera glycines
accctttgccctccttgtcgaacatgttgaagtactttcggaactctgtgcgtttttcttttggcttttcgcccttttgtcccccccccccccccatttctcccattttccccctccgtcctcacgttcgatttggtccgatgtgagttgttccaatgcctccgtaactcgagaatccgtctgatagatgaatggaaaactttttgattttataaggcaattctcaccatttttgagttaaggagagaatttgacagagatttattaatgcaaattttgttggaatgtgccaaaaatcactttaagcactcaaaattttggaacgcttttccctttgatcggagaaaagggagaagaaattcagtggagggaaggaaaagcgaaaacaatggacaaaagtgagggaaatcaaacaaacaaaaacccctcggggattttgacacgcgtcgcccaccgccagcgcacattttgcgcaaacaatgcccgcgggggggaggggcgatcggcgaggatttccgaaccttcgcttctcatccattggcggatcggatcagctttcctccccctcggctgattgtgattttgtactcttttcgtttcagttgatcaatgcatttttatttttgtgtgccgtccattcagaaagaaaattaaaaaattgagaggaaaaacgatgcgtaaaaatgatgttaccgaaaaggagaaagtgaaaaaggaacgattgtaaagagagagcatttgcccaacactgcccataaaagggatgctgttgtatgaatttgcgcctacgtccaaaattggtttcaagttaacattaactatcaaaaaatttcaacgcaactttaattaattttaactaaaaaggcctaaatttataaacccaaaaatgtcattttaaacagaagagtcttttatagccgcggtaacaaccaaacaaaaacaacaatatgatgacataggaacctcatcagtcgctgattttcttcagcacttcctgcaagtcattcttcgcctcttcgtcacgtccgtagtctttgaccaccgccaccgaacagccgacgattttgcgcgcttttccgtctttgtcgtatttgcactggccaaccatttgaccgagttcggccttgtcctccacctccaaaatcggaatggtgtgctctttgcacaatgagcgcaccaatttctcaaaggacgcctcgtcacagcttttggccagcacacaaaagtgcgcttcacgcctgaaatagtgcagaaaaaaagcaattttaaaaaatggtgcagaaggaatttcgtaatacttgtccaaagtctgtgccgcttcgtttagaccccgtgccactccgtcgacaatcagcgcagacttaaggacccgcttcaacacttcgctcgtctcgagtgtttcactgaacaattcaaatttgaaaatgaaaagaaaaataaaatgcccaaactcacatcattttaattaaatacttctgcaagacaatttatgagctaaaaaaataatgaaaatatagatcaaaacggttctaggacgcatcgataaacatttccggagctcttcaggtaattgaccactaa

SEQ ID NO: 1294 - DNA, 2291 bp, Heterodera glycines
aaattcaggtaaacgaccctatggagtgtcacttctctatgccggttgggacacgcaccacggctttcagctctaccaatctgaccccagtggaaattacggtggttggaaggcgacttgcatcggaaagggccaccaaaatgcactttcaattctcaaacaagagtacaaggacgaggacatgacgctggaaaaggccaaggatttggcgatgaaggtggggcgtaaatcattaaaattctatcaaaaagccatcatattggttttttggaccggtcgtcatggatcctgtgtcgcttgcgacccatttcaagccctgtagacgaactcgaacaacaatttaaaaaaataataattttattaacaaaattcacatttattgcccaaaagtccgaaatgggtctgtttgagtaagaaccggaatttgtgcccaaaaatacccaaagtgccatttattgtattcattgttcaaatcgtttttaatacaaaaaaagataatgtgtttcaatccccgaaatttaaggtgctctccaaaacaatcgaagccaaaatgttgcccgagcagttggagatggctcagctcacccttgacgaaaagggcagacccgagttgcgcatactcgaggaggcggaaaggaagcaactgaccgataaatgggaagccagcgaagaggccaaacagccgtgacgggaaaaattgtgttgtgctttggggcacctttggtcggactttggctcggttaatctatatgttttgtttatttgcgccttgatttgataaaaaatgaattctaacatgtcttttttgcccatttaccactcaaaaaaggcatttaatccactgacttacaattaactcggtgttatttgtcgacttatttttggttcatttgttctttcacaaaaccatcttctaattattgcttttgactttgtcacccgccaatgccgacctttccgtggagtaaaaagagaaaggcatccgacgatgaggtggtcgagagtgggatgacggtacgccaaatattggaggagcgggaggagtacgtgaaaaacattggcattgagtatcgattcggctgctacgaggaaaagcgcgccgattcgtgccaatatttgggcgaatatttcgaggccgtccaaaccgacttcaaatccgccttcgacactttccgccaaaattgtgagcagcgaaagttcccccgcagttgcttcaaatacggccaatatttggccgctgggagggcgtgcgaggcgagcttcaaaaaggtcggatggatgaagaggggggtggggggggggggaaggtgatatttgcacaaaaatggccatgagtgttgcagaccttaaattgcaaaattctataaagggtttaattaaggcgatcgaaccgctcagattgtcctgcgatgcgggcatcgccaagggctgtcgcgtgttggcgctgattttgtggaacggggagtcggaccgtccgccggactcagcccaggccgagcagttcatgaaacgggcggccgaactgggcgattacgaggcgagctggacattaagcacttggtggtcaatggagggggctaaataaacatttccaggaggggtgaatcatttttttgtgtaccattcttttccagggcatggattaatcattccaaaaaacaaatttaagttggaattctttctaatgcaattttctttattttaaaatttaaaggtatttgggtgatacaataaaataccaacgtgaaaagtcggcgccctatggtcacaaaatgggggaattgtccagggatatgcaaaaggcgcttatgtacggactcaaagcgtgcgacgagggcgacctttttcaggtcgcataattaaacaaatttagggcatttattttaaaattcttcttttatttcagtcttgtgtaaatgtgtcgctaatgtatcgaaatggagaaggaatcccaaaggacgagaaaaagtaagaaaaggacaaattattttaatatcgggtaataatgtactttgtaccccccccccccttttacgaaaaaaaattttcaaaattttttcgtagtaatgtgtttttttggggccgaaaaattcgattctgatatctatttcggcccattacaaacccctgacccggactcgaacaaaaattcgaaaattcaattttcgaaaaaattttaagttttgcaaccaaatgcatgaaataaaaagtagaatcgattcagaaagcaatatatagtatttagtgcattttaaccggttgtgttgcacatgtagattttttcggaaatt

SEQ ID NO: 1295 - DNA, 5504 bp, Heterodera glycines
aaacaactttacttctaaaagaattttttaattttttctttttcaaaaaggggggtacaaagtacactatagtattacctaatatcgtcgtaaagagaaactttttggcagggcaaaacaataccaagaaagggccaaagaactgaacaatatgctcaagaagggatggaatgcagggtttactgcatgatagtgaccccaaaaagcgctgaccggattaaaagaaaataaaacaagtcataaatatttattcgattataaaaataaaaaaataaataatgtctaggctctattgtgatttttcgaaattgattgcttcgccaatgggaaaatccaattctcaatcttttgggttcgtttttcacatgttgtttggattgaaaatctcaatccaatagccgtccgggtccgtgatgaatgccaagcctctcaagttgtgcggagatttgaaggccaaatacaaacggactttgaccatgcgaaaaaccgtcttatgaatgatactaaaattgcttttgttttaattatgtaattcactcactctgactcaaagagccaaactttgtcttcaaaacggaaggaattcgtgtcgaggaacgccaccaaatttttgtaggagccgtgcaacagtttaggcatctgaaatgatcttttgacaaattcgaatgtatgaaaattatgcacaattgactcaccgccttgtaaacaaaagattgccgaaaagtcggcgccccctcccccgcccaaaagtggctgccacaccttcaaaattcataagtgggaacatttaattaaatttaaataccgtttcctcttccggggtcaggagcggtggcatctgttcacgaggaatgatttcgtgcattcctcgtcgcgcaaccacgctcacctaggaatggatttttggggtctctattatgaaatgcattaaaatttcaaaaatcgcaagttgatgtccctgcaaaaattttggttgcgctcccccttttttacgtgctcacgtccaaccttccgaggcccattgggctcgctggtggctcgcggcgccccaccgtctcgtcgaagcacttcatccactatctcttcttcacgaagccactgttcgcctaggaatagattttatgcattaaaattccacaaattttggttgccccccccacttttttataaactcacgctggaagtcgcggtaggcttccttctcccggcgccgctggttcgcggcggcgcgggccgccgccaagggcacaaacaccttaatttttaaaagttatttttctaattagcaatttataccatgaggattattttaataatccttttcttttgtcctttttgttgcccattgggctcgctggcggctcgcggcgctccatccgtcccgccagaagcgccccctttcccgcccacggggggctgccacaccttaaaaattcatgtgggaagacataattaaatttaaataccgtctccccctccgggggcggggtcggggggcggcgcggcgccccaccgtctcggaggatgatggcatccacaatctcctcctccctcatccattgctcgcctaggaatagattttatgcattaaaattccacaaattttggttgcccccacttttttataaactcacgctggaagtcgcgataggcttctttctcccgccgccgctgtttcgcggcggcgggggcggccgccattggcgttattaccttaatttttaaaagttatttttctaattagcaatttataccattaaaattattttaatgatgttccgcttggtttttttgtttgcgttctgttggtgctgacccgcacagtcaccggtttcaaaaaatcgtaaaatattgaaaacttgacttatctatacattcaatagctcattcgaaagctctttttaggctctgcaggatctgtgtatgagtttttatgccctactaattttcttaaaattttggaaaaaatcaagtagttgatgaaaaatcatagataaaaatcaatgattttcaaaatctgagttcagattcgtgataagcgcattttttaggcctagaaaaaatagctgcgaaatttttaacatttttttcgtctgggcaccaattcttgaccattgccaaaaaaatcgcaaattaaccaaatatttggtcatttttttggcaaattcaaaattttccggtcgcgcctaccggcaccgccggactccctcccccaatgttcccaaaaagttttttgaaaaaacagcgccacaaaaaaagaaaattaaaagcaaaaaaaattaagagttgtcaatttatttttattgtaaaaaattccagaaattttgggactcagaaaattccaaagttttaccggacctttgaaaagattggtacttttttaaaccaataaattcagaaaattaaatttattaactttttttatttttttgtccattaaattaaaaaatactcaataatttacatagagagatattttaaactagtttaaattattattactctacgaattttaatgaaaattttttgaatttttcaaattttttcaaaaaatttttacccagggttgttgtgtgcccgtgggcgggggtggcttttgcgggggcgggatgagcaaatgtctctcccccggggagtattagctcaaaaatctcacaaaaaattaatttttaagaatgatgtgtttggctccatattcatttagtcgatatatcgcctcgattcaattccttttggcataaattgcacagattttgtctaaaaaataaccaaatttagggattttgggttaattttttaagaaaaaatagttttttttggggggggggggggcggcggtgccggttggcgccgctgggcgaattttgaaattttctttattttctaacagttctggcctagtggtctatgccttccattccttttttcttctgaagttcaattcccccaccctgcaaataattgtttttgttttttcctatctaaaatattttttaaactttttagcattaataaatttgttcataatattttttgcataaatttttgcgaatatttaacgatgttttgcatataaaaattcgttccctatttaaattttggctcccagacatttcgacaatgaccgtttcgccaataaaattaaatatatttcttaaaataaaattcaaatttctgctaaatgatatggacgatgcggatttgggatcaatataaaatagtttttttttcgttttgttcaaaatagcattatgagaatggctttagttttcgaattttgcgtttatgatgcatcggctatattcgacatcttcgaccatcgccgagtctttttcaaaagcgtattcgaatccatccgtccctcaagaacaatgaagcgcctttttttgactttactcagcaaattcaataatctcccggtttttagcctataaatggctgaactgtttgaactatgccattcacatcctctggggatcaataattttgccttgggtaaataaggcattacaataatttaaataaatgagtcaattttggatttctattaccgtatttgctctttttatatgccatggtatattatttttcaacctcctcagaaaggggtagataattggagactggtagactaaaggagactgggagattatttttcggctgatttatttagtggaaaatttttgacgccaaaaatgtcattgcgtcaaaaaaataatttttattacatttttgttaaagaacttctgtaaattgaccccaaaatggcaaaaatgtgtcattttcttgcttccgatatgcataaaaattagaaaaacgaatgagactcgacggagctggtcgcccagttcaccgtccggacatcaacactaaacttgtggaaacggtttttatccctggcggctgcactaaattaggtaatcttgcagaattgcggtcccgactaaaaataaatttaaaaatttttgttcttatctttcctggggtaaaagggggtactgattaccaatatgagctcagatttagcaaatctttgatttttgtctatggcttttcatcaagtacttgtttttttcaaaatttttattattaaaaaaatttaagtgccaattttttagtttctaaaaaacccccaaaatagttgctaaaaagctaaaaagtttcaaatttagagatgtaaaatctaaaatgtttccaaaaaggtaacaaattaaaccaaatcagtattgagataaataattttaaaatcaaaaattgttgttaaaaaataaataaataaatttggagatgaatttttgagaaattttaaatttctcaggggtgtatttttgaaaattttcgggtcgattcttaggggtgtattttttgaaaaaattttttaagtcgattcttaggggtttatttttgaaaaaaatttttaagtcgattcttaggggtatatttttcgtttttattgcatttttattagacaaattttgggaaaaacccaaaaatagttgaaaaagtttttatcaaaaattttatagttttttagttgctaaaaataaaaaaactagaaaatagttgctaataactcgaaaagtagcttaacaacagccgaaaaaaacatgtttttcgtgcatttcaggccacggggagctcaggaaaaaaataatgaaaaaactataaatcgtatccctaccgttgaattgattttatttttttgaaaaatgtgccaactaaattattaaaaaattctatttatcccccctggcacataaatggagactgggagattatttttcaacctagttcgaaaggggtatataattggagaccggcagattaatggagactggcacataaaaagagcaaatacggtatgcgtcccgcgccggtctctaccgtcgtgttaggatggctgatattttgctgatctaaaaaattttcaaaaatgtttgtggagcacaagtctctggaatgcagattttttgcacttttcccttaaattggaatacacacaaaacactcattaatagggatgcgatttttaggtaagaaaaatcccagaataggtacttaaataggtaaaaaaaaatctctaaataggtacaaaaattccaaaataggtaccaaaataggtaaataaaatttttattaacgattttttagtggaaaaaagcaaacaaagatggaaaattttggttctacatatctctttgtaaacgaaaatttaaatatattaatattttcttagataatattgacattttaaattaaaaattttgtcaattgaaaaaaatacataaattttgggataaatttttgagaaattttcccaattcttacggtggaattttgaaaatttttttggccgattcttatgggtatattttttgattttattgcatttttgttactaattttttgaaaatccttaaaataggtaacaaaaatgccgaaataggtataaaaataggtacctaggtactacgttgaaaaacccccaaataggtaaaaatagg

SEQ ID NO: 1296 - DNA, 6821 bp, Heterodera glycines
gctaaacccttctgattttattatttctcgcttgggttcaattccccactgggatagaatattcttcatattttctttaccattattttaattgaaattttaatttaaaaaaatattccaactttttttctttcattttaagcatcctaaaaacccaaaaattaatcaattggtctttttttacaaattctgttaacaaatcgcattaaaaaatacaaaagttttcccggcggcgcctatcggcaccgccggccctccttgttccccaaaagtcttgagaaaaacgtgccgcgaaaaaagcggtgttgaaagcaaaaaaggtcattgatttacattaatttacatggtcggagaccccttcgcaaaattggaaaattggccgctgatcccttgtttttcaataatctgaattttgaggtctacatctgaattttagtgttctttattctgaatttgaaaaaaaaacttggtcaccctcaatatacatatacttctgaacaattctaatgctaaaaaacaggcactcgcgcgaaaactgaataaaaattttgtatttgaaaaattttgtccaaaaatttttacgttggaaaattaccggtttttaccggtaccggtaccggtaccggtggaaaaagttggtaccggtaccggtaccggtttttgcattaccggtcagtaccggtaccggttttttagcaattaccgattaccgagcaactctagtcttagagaatcacattttagtattgtggaatctgccattcgtaattttaaaccatttttcccaatttctcttgaattccctttactcacatttcactcacaatttgctatgtaatgtccttctgttcgcccctcccaatttgtgtcactatttaagcttttgcttctctcattctgctggacgacttcttcccctcctcacattcccaactcagaacaatcctaaaagcgatctttttcaactgttaatttatttctttgcattaatcacatttaatcttttctttttacttttgctttctgacttgaataaactcttttccaaaaacctcttgtcaaaagaaaaagggctaaaaaccgagaagtccaagtgtttggacacaacaagtattttataattaatttttgatatctatttaaaaaaaaactgatttaaggggtacgcctccaaaaattttttttaacaataatttctataaattctcaaaaattctcaaaatatgtaaaaaaaaatgaaatatgtatggaaaaattgcgaaattttggatttttgggcatttaataaaaaaatttccttaaaaactcctcaaaaatgaaaaaaatgtaggaaaaaagctaagaaatccgaagggtacgaagattaaaaatcacggaatttgtataggggacgtaacccgtactttttcaggctgattcaagttcttacggattgaggatttttaacccgtaacccgtattaatgtcaagcccgtaactcttacctgtactcatagaattgggaaatcccggcctctgacaattaccgaccaaatcagtcctgccccactcacttacccgattccaatttgccctgaatacaagcgagaaaaagcagcttctgctcgtcaattccctcaacatctgcagtttgcatggcttgcgcttctgctgataaaattgataataacgccaaaatgccaattgaaacaactgctaatttggtagaatttgctgacaatggcattccaaagggacaaatttcgatgcgttaatattaaaaaaaataaaataggagcttttttgttatatttacaaaaaaaaagcaaaacatttaaattgttgttttaattgggttaataataattttttttttaatttccgaagtcacaaaaaatttcggaagtctgaattcggaacccaaaaataaggggaactcggagttcggtaaagtcggaattccgcacaatcccttcaatacatgtaaatgcacaaaattataggcgctttaaatgcgtcccataatggtaaataaaaaaagatccaggcaaaaacaaataaaggttttatgggtcaaacacaagaaatttattacaaaaacaatttcgttaaatcaaccctttcaataaacttttttattaaaaataatggcgcacaaaatgattatgggacacataatattatacatagcaaagaccgcaaaaaaaagtcaccaaaaatcgcgaaaaaggcaaataatagtcaacaaaaaatagaaaaaaaaggcatgaaaaggctggaaaatcccgaaaaaggcatgaaaaaaggcatttaaaattttttatgaaggctttttagggagcaaaacacgtaaaacttaatcaaaaaacttaattttggccatttaaatgattattaaatattttataatgtttttcgaataaggaaaatttttaaacctaaactttttatcaataaaaaaaatgaaattttagcgatcaatttttgagaaaattttttaattcttaggggtgtattttttgaaaatttttcaactaattttttaggggtgtattttcccgatgttattgcatttttaatggaatttttcagaaaaaaggcaccaaaagggcaaaatgccaaaaaggcatttaaggcacgaaaattccgaaataggcaaaaaaaggcataataaaagtcaacgaagaagcctcaaacgaagtggaaacaacgttttttatgcttaatataccgaaactagtgcgcagaaaaaaggcatatgtctcaaaatgcggtctctaattatggcatgggatacagaaaaccgacaagagccaatttggtaaatattcatcatattcatagctcccaaacttaaaactgctctaactgttggaattgattcagtccatttttgagctttgagtttgggagctatgaattaataataatatttaccaaattttcgactaaaaagctataaattttatttttaattaaaaaaaaatttaaagtagtagcacaaataaaattaaataataaatacataaccacaaaatggtctgtctccccatcgcattttggcctttgctcggtcggacgcacccaaccaacaacaacaccaatggattgaatccaaacgcttgtcttttttctatatcgtggcgttctgcccaaccgtctcccccctcgttctttttctgctatttttacgtttgtttgggtggtcttcgccccccttctctcctccctcgtgccagtcgattgtcctcccaccccccttccgctggtgtcagcttccaccgaaaaatggaaaagtgtagtttttgtaatgcaatatattcaattcaattcaattcaattcaatttatacgcaaaagcgtgacaccgacattaaaacaaaataaataaaataaaattggtcactgaatgagatggggcggtttcaaaagtaaaacatcaatatcataggtgtcaagaagtttagcaaactcagtagaattaagtaacctcgcctctttaggcaaactcctatagaggcgagaggtacgaataaaaaacgaatgaaaccgaacattggttgaacaataagcggtttttataatataatcgtttttcagtcctgaatatatttttgaaaaagaatcattatgctgaatatggatctttcccaaaattatatcatggaaaagttttaaatcgatttttgttctgcgttttaaaagggattcttgtttaaagagttgaagaagttcgttatacccgggtatatcatccttattattattacgtctaaaaacaatacgtaaaaatgttttttggacattttcaagagcatcgatgtcttttttcatatatggattaaaaaccggagaaccaaattccaaaatggaccgacaataaatattaaatatatttataagaatttttgggtttttcgttttaagtgacttgagtaaagcaaaagatgttcttattgcttttttggtaataaattctatatgtttttcccattttaagtcatttgaaaaataaatgccaaggtctctaactggttcacctttttcactttttaaaattggaatattatttataaagtaacattcattagggtttttaggcccaatatgtgaaactaagcatttgttaggagcgattttaaggccatttaattcacaataattccgaaatttattaatgaaagaatggagtggagaaatagtattttttgagagtatagaataggccttaagatcgtcagcaaaaagcttaatttcaacattttcagttttacaaaaattaggaagatctgatatgtaaattaaaaataaaagcggacccaaatttgatccctgcggaacaccacttaagcatgggaattcatcagaaaacgcagagccaactctaacgaaaaatgtacgattttgtagataattttgaagccattttagtaaagtaccatttataccaatatttttgagtttagaaactaatctttcgtgcggaacagtatcaaatgccttcgctagatcaaaatatataacatcaattgattttttgttttccaaagccaaactaaagtcatcaatgacttccaaaagttgagttgtaacagagtgttttctcctaaagccatgttggcaattcggaagtacatcatttgtctcaacaaaattagtgattttctgggtaatattttcttctaaaatttttgagatggagcataaaagcgaaattggccgaaagtcaatgggatttattgggttcggtatttttggaacaggacaaataattgattttttccaaatgtttgggacttggccagtcatcattgaaaaacaaaaaatatgaaatagtggataaaccaaattttctttacagtttttgagaaaaatattcgggatgctgtcaatggaagtattattactgttttctagtttattaagagccaaataaatttcattaagtgtcattgtgaaaaagtcaatattttttttaggggtgacttcacatgaaacaggaattttttggtcagtgaagaccgagtaaaattgttcggctaataaattggatttagctttttcggaaaaggcaattttgttttcgctatttttaagagggggaatttttgtgtttttagtttttaaaaaagaaccaatatatcgaaatcgttgtttagggtctaaaccacttaaaaatttattttcacgatttgtaaggtatttctttatttcatattcaagttttttagaggtttctttaaatttttctctaattttatcttttttaaggtctttccaaagttgtcgacgataaatcataatttttttaatatgatctgggaaattatgtttagaatttgatactgttaatggaacatatttcgatattaaaaaatgcaaaaatgctgcgaatttgttataaatttggtcaatttctatacagtccgaaaaaaaggtaacccaatcagtagaagagagcatggcatttatttccaagtaactagcttttttaaagttaaagtgtttaaattttttacaaggaaaaacatttagtcttaaatcaaattttatagtgttgtgatcactaagtgagaatggggggccaattgaaatgtcttttatgagaaatttattatttgttaaaattaaatccaaaaaattgcattccctggtgggttctttaatcatttgatcaagtcgtaaaccttcaacaaaaccaaggaaattactttcataatttgtcaaattatttaggatagagaaagggccattttggttccagtgaatattagtaaaattaaaatctccaagaatgacaaaattttctgtcgagactgctagtgaggaaattaattctagaagttgcataaaattttcgaaagtttcggtagttacaggcctataaaccaaaataagacggatttttgattcggaaatgggcgaaaaaacatcaatacaaagtatatcagaattttgtatattttgagtttttataatttcaaacggtatttcattagaaatgacaaacgctacccctcctccttttttattctttctatcttttcttattaaagagaaaggaaaattttctaaaatttgcgagtcgtttattttattattcaaccaactttcggttatcgcgataattttatacctattttctaaaagtaaaagcttaaactcattcattttgttcactaaacttcttgagttaaaataaagacaattgagaaaattttgtgacctcaaaagttttttcccatgttgcctccacgccgcgtcgtcaccatttcattctttttgctttcttcataattcatccgcctctgttcacgaatctcccgctcagccgccaattcttctttcgtcagagagggcctgacgagaagtcgctgccaaccaacatgctgcttcagttccgtccggttgcgcccccattgtgccaatgcaaaacgttggaacgtcgtcgctggcaagacaactttgaccaaacgcggcccctttcgcttctcatcaatccgccgccccattctatacaccatctgcgggcaaacctccacatccaaagcgtccaacacttccgcaactgtttccgcgtgctctttggcgcgttctgacggctttgcagccacagcctccggcaggccaatcaaaacgaggcttcgtttgcgttctttttcctccgcactggaattgtcgttattgttgctgttgattttgcgctcaatttcgttgaggcgttcagcaatggcgttgaattgttctgccatttgcgttgccaaagtgttgttgttgttgtttgataataacgtttcaattgaagacagtcgatttaagatgtttttaatatcggttgccatt

SEQ ID NO: 1297 - DNA, 2302 bp, Heterodera glycines
ttggaggagttttttatgaaaatttcttaaaattcctaaaatatgcatcaaaaagtactttattaattaaaacatgagaaaaacactaagtgtgttgactaaactaagaataaaccaaaagattagttgctattgcaaaaggccttaatattttaggtcgctgatcctgaatatgcaattaggtttcatttattacatcgataacgctacagattgaagcatcattctgagggaggggggggagggttaggtccggatcaggacgggcgaaacttcgagcttcgtgcttcaagcttcgaaaactttgcgtttttgggcttcgagcttcgggtaatttacccgaagtttcgggaaattacacccctaaagatcgagttttcaaattgaaaatacacccctaattattggcttttgctaagcttagatttatatctatcattagtttttcatgcgtggtcaaattggttgtgctcttggtttccttctctatttttgcgtttgatcagttcacctctaagtaattgtttttcttttaatttttcaaatatattaaaaatatcatttacatcatttttttcaaaatgtaatgatgaatgtatatttttaatatacaggtccaaaattagcactttttcacaccaacgcctaaaactcgtgcttcgaaaaaatgggcttcgccttcggcttcgaaaactacgccgagcttcgaccgtcgaactttgtgcttcggcttcggatattttacccgaagtttcgggaaaaatacacccctaaagattgagttttcaatgagaaaatgcaccactagtgaaaaatatcgatagtcaaatttatgaaccgttaataatttgatttccgatcaactttttaccgtcggatccaatcgaaaaatcttagtcgacccatcagcccctataaatttattttcagcattttttgatttttggaaattttttgaatttaattgaaattttttcgaattttccaaaatcccgcaatcccgcacgggatcccacaaatttaaatgcgggatttgcgggattaattccgcgggatcccgtcccgcaaaaaattttgagttccagtcccgcagcgggatccgcaaatttgaaatttccggtctctactagaaactgcgtcaattgattaaatttgatatctaaccgaaattatgtgatgaaaaaaattttggaattaaaaaaaatttgaaaaaacttcggcttcggcttcgaaaacttcgggttttttgggcttcgagcttcggacttcggcttcgaataaaaattgggcttcgccttcggcttcggcttcgagtgctaagccgagcttcgcccagccctggttcggatcccggtgaattcgatttagtattcattaatttttattaaaatattaaaataaatattttttagaaaaaaaaattgatttatccccctggacgataaatagagacggggagattatttttcaataatggagacgggcgatatatctactcctttgaattttcataatacaattgtttactttgttttggaccgtaggcactgcttacaaaaattagctgcccttttttatacaaaatttgtacaaaattacgatattttggtgtttgttatgctgcattcataacattatccgggttttaaggcatttttattccgcgttcaatctaatagaaaattgacaaattattcaataatcttttggcatcagttttttttcttattttttgtgtgtaatttatgcattggttgtctgctggtgtctgtcctgtcggagtgacggcttttaactggcaattttagccaaaattcatcaatgatgcctaattatggtgcggaaaggaaaaatgcgtaagtgccaaaaattagaaataaaaaaacacagagaaggtgttaatggtgttgatcaagcaaaattggacaatgaaagagatgcgaaagtgagtgatgaaaaaaataattaaattttgtaaatttattattcgagttgaatcaattataaatactagataagcaattgaataaattttggcacaacatggaaaaaattgagtttaagcaaattccgataataccacggaattctgaaaaaatgcatagagattaaccgggaccgaaatttggacgggacggaccctaactcgggatccctctcgattgtttttccaaaatcttcgggattgatcgggattccgactcgggattcccatcattttttgccgaaaaggaaactgaaaacggaaacttttaattcattaaatattttaattttttttacaaactttgataaattactg

SEQ ID NO: 1298 - DNA, 2254 bp, Heterodera glycines
atttgtctttttcttgaatttggacaaatttttgatgggctgtatgtttaatacgttacttatttgtatggcgtcgattcaaaatcaattttatttatttttgtattgcatatttatttaacatatattacaatagaagtataagtgtaaaaatgtatgcgggtcaatcactgaatgtctgatcaatttttcaatcattttttaccgtacccggagccgccgaaaccgccaaatgaaccaccgtaaccgccatacccagatgctgaataaattggatatggatatatgtagacaaacaatttatgaagcgcaaaggcttcaacaattataaattgatatttaatactaaattaatatattatttctaatttttattaaaaactcgattattgttaaattgttatttaagactaaattattattattatttataagaaatggaaattttagcacttacgcccgtaatttctgaaaaacggagcaggcggagggggaaaaagtggcggtgccgcgccaaatgccgaagtgccaaatggcgaaatgccaaaggagccgccgtcgaaaggaccaccagcggaagtggaactgatgaacaacaaaagaatgccaaggccggcggcaagcagtttcggcacgaaatcgaacattttgatgctgtgaaaatgagaaaaaaaaaacaataaagcggttgaccacagcagggcttcaatagaaaaataagaccaaaaatagtaaatctttgcgtttataaaaattcttgatctggtgaagagaatttctgtcctaaaaattgaatgtttttttgagaggaggtgaaagctttggcatttttatttggtttattttgacatcgtttgagaaaattccttgttttgggtgcaataataaaacaaatcatccgtatgatatatggatttataattttttttaaacatgaaaattgactttttgctccattctttttttatttgtcaattttcagtccgtaaatattcgaattttaatttcaagaaacaaaaaaaattatctctggagaaattttttgcaaaataataattataattaaaaaaatattttaggcaattaaatgcaaatgtgtacacattttgaaaaggcactttctatttatgccatcgcctcctcatcggggcacagaattgtaattggcccaattccccccgccctttcgcgtgttgcgcttcttttcgccttttcgctttaccatttcccttcctttttttctgcgctatttttacaccttttatttattgtaaaaaaaggtttattttccctttttaattgggcaaaaaattgccttattcgctgtaaaaataaagggaaaattattttggaattgtaacaaattttgtgagcggaaaatgtgtcaggaatcaaaaattcatgaaaaaaacgagaaatgttagtatgatgattcaaaattttattttaattgggaataaacctacaatggccaattattcacagtatgtttatttttaacagcttttcataaattttctaaattttttataactttggaattaaaaaaactgaaatgataaattcagcaattataatttgtcatgctacagaatgatttttaaaaatattttattactgacgcatttttcctgaagccgcaaattttctctgtttatcgaaaagttaaagattcctgaaaaatatgtatccatgtgaaaatggtgatatagtgaatgaaaatggttttttcgaaattcggcttcaaaatttgcaaagtggttttttggtacaaatatggcaactagggctaatatttttaggttttatttatttttttcttgacaaatgagctctctatggtctgaaatgcacgaaaaaacgtttttttagtggttgttaagctattttctagttataagcacctattttctagctttttatttttagtacctaaaaatctaaaaaaaaatttgtaaaaaaacctaaaaaattttttttttgactagaatttttggtttcaaaaattatatataatatctcaatatattgatttagtttaattttgttcatctctttggataaaattttaggatttacacctctaaatttgaaacttttcgtacctattttccaattttggggtttttagaaccaaaaactaactattttggaagtttttagcacctaaaactcatatccaggttaaaacaattggtagagttcatgtgtaaaatatactattttaaaaatatttttgtaagcttttattttc

SEQ ID NO: 1299 - DNA, 6837 bp, Heterodera glycines
  unsure (1)..(6837): unsure at all n locations
gaacgggaattggggtgtctacataaattgggatgggtacgggaatcgggttggggacaaaggagaaatattgacaagcataaaaaataacctatccagactaatcataataatcatttttaaataaagccgaattgtcttttatttttttaaattcaatcaatcggaaaatttagtaaaaaaataaatttaaataaattcatttttctttcatcttcccaatcagcagtcttttccgctttacaataatcatcatcatcatccgcagaagcatcagttttgacgacggcgatcatccagctgtccttgcgccaattgacgcaatgcttccacaatttgttgcggcgtgccgttcaagccaacctgtgaagaaattgttatggaaatgtcttgtaaattataatgagcaaattaccaggacgccatgttgttggagtacgttcatgatgtctcgcagttgagcatcattgaccagttgttcagcaaacggtggttgtctgtgtccgggggcgtcattccccgcgttgttgctctgtccttcacgtggtggcattttctttaaaattaaaaacaaataagacaaaataaaatgaaaagcatcatcccctttaccttaagggtattgagcgtgggaagggattgttggcttgaaatgaatcctgctaagccatcggtacctcttaaatattcacaaatgacgcacatattttgagcccgccccctgaattaagaatattttgcggaatggatatttggcagctccaaacaacagcactagtgccgcgcacaaatttgcataatccttcgttgccggaaattccacaccctttagcagaactgtcaatcacccaccctcccatccatgggattaggattggtcacccccgcgtccccccgaccctgctcaaaaattcagccaaacaaattgttgaaatgcagtaaacaattaattcgtgttaccaatttgtcagcaatatccccataggttttggctttttccccacccaaataattaattaattaattgaccacccccccccaattagtcacccgaaaaccctcccataggttttgattttaattccccccatctgtcacttttccctttgaccagctgtcaatcaattagctaattagcccccctccactggtcagctgtcacttttaattagtgtcatgctgcagaggtggcgtatggtttactactgaagtatgaaaaaatcaaagaattttaattattagttacagttgttaaatcaatttttgggtaatttaattaagaaccaattaatcattaaaatgcgggaaaattattaacaaagttttgatcgagatgttttacatatgtgttttggtatggtcgaatcccatgctaaaatactccaattgctaatagggtatgacatctgcattaattataattataaccaattattctttaatttttacaaactgaatatttctggggaaagaagggttatgatggaacttaaattatgtgccacatttttgttgtaattcaatgaagcagaatacttgaagctgagacaaaggaaatgatgaacactaaatgagtatgataattgttgacagattaacttagttatggtattgatggctaggaaatatggcaattaattctaaaatatctgaaaaagaatgcaactttttgggtagcgataaaccttttttaagtaagtaactaattattacagccgcaaggattttagaaatgtataaaaacaaggaaaataataaaagatgaattttcggtagccaatactcggctctccggtcaccaatacctcacaaggctcggatctccggtagccaatacctaattaagcttgccccgccagtaaccaatacctcacaaggctcggctctccggtagccaatacctaattaagcttggcccgccagtaaccaatacctcacaaggctcggctctccggtagccaatacctaattaagcttggcccgccagtaaccaatacctctcaaggctctgacaccaaacactgaaaacttcattcttttgactatgaatttttatttttatgcaaattgttatcctcgtggtctaaaatttatatgagaataaaatatacctttcctattgatttggcaaaacgcataggatggaaaacggagtgggtaaactgagtttgcgatggtaaggagcaataatgaccgaatatgtgttggagaggaagggcagagctgaggaaaccaaataagtgaaggagaggggggtgaggtcacggcgtcatcttatcctgtaaatcgattcctctaaaaggaacaaatggaaagaggctaacgccaactgctttcttaacaaaatccaatatttagagattttggtttcgggtttatttggattattttccttttctctgtaatacactttctctactcttctatatctgtttactttcactgttattccttattaatttcagacctacatattgtctaaataatcgtttccgttagctatttttcaatatcttttcttccaacactatgttttattctcgaaccgttatcttccaagtgttcgtattcttgttctttatcaaactattctcttctctatacattacctaatgtttgccttactaactcacattaaattctcactatttaatattgactctcttcaaccacatttctgagttctctatctctatctcttacacccattattaattgtcattgattctatggtgcactacaatatcctcatatgatttcttcatttattcctattacaagacctgcttcacgcatacatttagcccttatctaccctttctcgtctgttccttattataattagaattattttacgttgaattaggcaaggagcattgtttgtgtttatgattaaaattaactagttttatataagttaataaatattatgcagaactttcaaacacacttatcctcacgctcgaaaaaacatacaatacacacacatacgcacacgcatagacacgcacacacgcgcacatgcatacatacgcatacacacacacacacacacaaacacacacacacacacacacacacacacacacacacacacacacacacacacacgcacacttacacatatacacatgcacacacacataccccatgtgtaatttttacagatttttgagtaattccttcatttaatcattatttttcttaatttttgttaaattgtatattctattccttaataatttacaaattgtgtcttctttctcttaattctgcatatttctacctaaaaacgacgttcccaaatgcttaataatttacaaattgtaacttccattgcttaattctgtatgcatgttcactccttaattatgcacttttctacctaaaaacgacatgcttgtgcatattttaaaattgtatcttctattccttaataatttacaaattgtaacttctttctcttaattctgcacttttctacctaaaaatgacgttcccaaatgcttaataatttacaaattgtaacttccattgcttaattctgcatgcatgttcactccttaattatgcacttttctacctaaaaatgacaagttcgtgcactttttaaaattgtatcttctattccttaataatttacaaattgtaacttctttctcttaattctgcacttttctacctaaaaatgacgttcccaaatgcttaataatttacaaattgtaacttccattgcttaattctgcatgcattttcactccttaattatgcatttttctacctaaaaacgacaagttcgtgcacataatcaaaatgtatcttcaactccttaattatttacaaattgtaacttctttcgcttaataatgcatttttctacctaaaaatgacgttcccaaatgcttaataatttacaaattgtgtcttccattgcttaattatgtatgcatttttattaaaaacgtgaataaaacgacaaaataacacaatttttggtataaaatagagaaataaaaggggtacatgtttgtgtacgtgtgtatggggtatatgtttatgcgtgtggaagagagatacaataaatggtgaacaaaatacaaaagggtacatatgtgtatgtgtgagagagatacaatgattggtgaagaaggtattacaatgtgtgaacaattacaatgaatggtaaaaagacattataatgggtgagcaattacaaagtgtgtccaaaattgagaacattataatcggctcctacaatacccttcccaatataaggctgataacatttttgcatagagcttgatattacagatccaccatcacgaatattgggtctaataaagtttgggtatattacattaattggttcaatctctcctgtttgagcataacgtttgacttgctgtttttatatctaaagccttggttgttgatcacatcataattgagtgtcaatccacggagtttaagcacgtattccatttccgcatcatgtagaacatttatttgtcttaaagccaacgcatactattttgcaccagcagtgcagaattctacgatttccatcaattaactgcttatagtgtcgatcttattcagctaaaaagcatcgcgtagatgtgagaaaacaagactatccgtgtcggtggagagtacttaacgccccggctatatcatcatttctgaatagttttattacccactttttttattttcgtaggtaatcaaaacatgatacacctttcaatcctcgatggccattacgtctattgaacgattatcccaaatattctccaaaatcaagtacatcattattgaagtaaagtctgttaaaggctgtaatttcgtaaagaaatatgtcgcacaaattgttcaagcatagtttaacaatcctactcttcttggttcacagctatctttgttgggttaagatctctaatttctctttgcactctcttacaaattcagcttccttctcaccatttccttttatgtcagtatcaattggtaaatgggtaaccttcttcaaccgtagtaacattaatttcgattgaaatgcagattgctcagccatctcattgtttgtgtttgcatatgtatttacgtctatcctgcctttttgattgtttttggtgcacttcataaataaagagaatcagagcctaccattcactttgacgggcaaaacagaatatcgaattttctaaagaaatcacccaaactttgagtattgtcaaggggtagtgtttatcttccgggtatttaactcgacttattcattcagcacatgtacattggtttaccaatcgagtagtgtgtagtaaaattaacgaaggggtagagagaaatgaagtcacatagaaaattttcattccgtcttcaaatccgctcatttatttgttgctcattaacattttcgcgatctcgcagcctaatacacttacaactggatggacaacttgacttcgtataaattcataacgttttacattcctctcccgcactttatcagttatttttttcaattagacattaatatacatcttctaggtagcgctaattgcaggcatgctaaacatatccgcttacttctattgcagttctctctgtttccaactattcatccacagaataatgatcaatttgccaagtgttcagttgaaaagttattgatctagaaatatcgcatacaggccgtatactagtcatacattcctttagtacatcaatggatactaaaagacgctgccttcccttaataatgccttagttcctttgagacatcaaataattccctcctaaacgataccagcgctgtcattaaaattttgaatgtcattacattttttctcattaattgcctctgtaaatacaaattttccagttgagaagatagttgtggtagaatttgtacctagacccttcattatatttgaaagatttatgtggttgtttttagtggatggggatattaaataaattgaggagaaaagttttactatttattgtcagtaacaccataaattgaatttaattttagatataatttacttaattttaatcaatactattgtatttattatttttattatattttaatacaactttaatttaattttttttattttatttttatttaacatttattttatttttaattttaatcttttttatttttattttactttttatttgaattaatttgaattttattttactttatttattattcagttaatttaaaggagttgttcagaacctctatccaataaaggctatttcgccgctcagcacggcataaaaggtattttaaccgtgcaccgtttagcattgtatgatatcctcatattttcaggatggtaagggattttaggccacctgatcgctattaatatgtcacacacacacacacacacacacacacacacacacacacacacacacatatatatacacatgcacacacacacacacacacacacacacacacacacacacacacttacacatatacacatgcacacacacacttacacatatacacatgcacacacacacacacaccccatgtgtaatttttacagatttttgagtaattccttcatttaatcattatttttcttaatttttgttaaattgtatattctattccttaataatttacaaattgtgtcttctttctcttaattctgcatatttctacctaaaaacgacgttcccaaatgcttaataatttancaattgtaacttccattgcttaatcctgtatgcatgttcactctttaattatgcacttttctacgtaaaaacgacatgctcgtgcatatttaaaattgt

SEQ ID NO: 1300 - DNA, 3246 bp, Heterodera glycines
ccggttatattcaattttcccctcgaaaaacaaatgatggagactgtggggtttttattccgatagacaagaccggggaatagttcaggagtgaaggaacaatattttgcgcctagaaagtcggacagaggtcctaagcgtatatgaaaaccaacgtctgctgtcgcaatcaaattcttcaccacaaattcgtgaattcgtgcctcgtagtacccaaattgtcgtattctttcggtgacctgctccgcagcttgcttacattctttctcattagctgctcctgtacatacgaattttccagttgagaaaattatggcggtagcatttggattatacactttcataatcacagcatgaattttacgtggattatattttgtggatggagatattaaataaattttttcaatatcaaggggtattttgaggtctacaacagaaacgcaatttttaatcgttggaaaaaacattttaaatgaataatgggagaaaatttttaggtatttatactaaaataaattgaatttatttatattttaactttaactttattataattcatttttaattttaaattctttatttaatcattgactcacagctgaaactcaacaggcaattgagcagctgtctcaagcacagaatatctgatgttgggttttgcataggcacaactgtcacaattaatcattgactcacagcttgacctctatttccagtggtatattaccgacacttccgtgggcattatacagtcaaaatgcatccaagggattattaatgaccattccattggctttggctcggtcagaaatgcaccaaaagaattcccaagggataattaatgaccactagcttcggttggacagacatgttcacaaaagaatggttaatggcgctcagttggcttttggtacaacagactccacatttcctaaggggatatttatgacactttcggaggcattagttagaaatgcactcaaacgaatgattaatgaccctccgtaggcttaggcttcggcaaaaatgcactcaaaagaattattaaagaccctccgtagactttgggtactcaataggctttgggtctcagaactgaaatatcccgtgggcactgggagtgaaatggctaaacttaaaaaataactctggggctcaaatggcggcactgtaaaaataactctggggctcaaatggctgcgcagtaaaaataaatctggggctcaaatggttgcactgtaaaaataaatctggggctcaaatggcatacgcgagcgtttaaatggcaaacacgcgggcgctcaggtggcatgcgtcccttccctataaggcatgacagctgacgcctatcctctgcctccctttccttctctaataggatttgacctcgggttttatccttcagatgttttttcaattatttacctcttctgggattggatatatttattataggtgttttttaaaggtttaaatttggtactgaaatgtccctttccactgggactgaaatggcggggctgaaaattaagggccaaaatctgcatgggtaactattctgataatttaatttgccatttatgcacatttttatcgaaaatttattttaaaactgaagaaaaatcattgcatttcactttggaaattttatttatttatgagtcgtaatttgatcaattttttctccctttctgctgcttgttgttctcccttttcttccgtttgatatgagtcatttctctctctgtgtgtgatacacagcacatttattggtggaaaatgtggcttaaatcacacacccatttttgttctcgaggctcatcacaatctttgcccgatcagttgcttgctttttgactaatttaccaccaaaacattttctccttcattttttggggttttatatgtcaaaaatatgaataaattcaatagaattatttaaaaatatgtgataaaattcaggattttagctgataaatttatgaaacataaagaatcagcagaacgcctggacaattttgaactcgtcaaccccaacgagttcaggtccttttgtttcaggttggccaaattttccaatttcccggttttttttttaaattttcaaaattttagaggcgaaggttgctgtaatctcgtgatcagtgcaaaaggacgccatgatgggaccaggttggggccaacattttcgaatttggttgcccaattcatccgtaattcattggttttttagaattgtttggaggttggccaaaaaacggaacaccgccatcattagtcataagccaaagtgggctttttttttgaaatattccacattttttatttattaacggaaaaaatgagtccctaaatattgtaaaaatgattttttctttttgattagatgtcgtttgctcaacatttttctggaaatgttcatttctccatttttgtgcaacagttacttgatcaaagcccgtcttgtctacatttccgtctctgaccttcaccatttggccaaagtttgataattatttacattattcgtattgtcttaaaataaaaatccaacaaaagcattttataaaatattttatttcgattcaaatggaaatgatgttgtcgaattttctatttttgttttgacagattcccgttttgccacacaacatgaagttggaggagttcagcgagttgttcgacgccaccaaacacccggcacagagttcacgttttcagctggcaaacaaaaggagcaacaacaacattgaaaacggtcgcactgcttccgctccgtgttggtccgccgccgctgttgtgcccgcgttggaaatgccggacgcgacgcgcatccctcggcccgtgccatttgcctgtggtccgacaataacggtggagctgaagccaaagcagggctttcgccaggcccatcccggcattgacctgcccttctgcaacaattgcatattgcaggtggcacttttttgggaaaaatttttttgtatttttgacaaattctttattttggtaaaattaagaaaaaaatctcaggggtaataaaaatttgttccgtttttttttctgattttttatgagaacttttgggcaaaataatatatttttaccctggccgtcagccaactgaaaaatggaatttaaatatgaaaattttattgttttgtttgcaaaaattttcttgaaaaaaaatcgagtaaaatttatgaaataaattttaattttgtccattcattattgtgaggg

SEQ ID NO: 1301 - DNA, 3276 bp, Heterodera glycines
  unsure (1)..(3276): unsure at all n locations
ttcgttcancaattcgaatggcaccatttgtatggacggcgcacgaacagtaaaacgaatttcgtaatggacggaagaaatggcatgngcacgagganaatgctattaaaaaacgacttttttacatttcctgaattnttcttaataatttttttcgaatttatctatttttttttgatttaggctaggtaactaaattttaaataatttttttaattaaaataaaaatttgcggctacgttttgtcccccccccccggaccacacctccttgaaattgttgatccaatcagtgttcgcttgtgcgttgtaatcttcgcaacgcaatcgcttgggttggccatcttttctcggagagtgcaaccatttggacaatgcttggccagcagaaattgttgaatttggcccatcaaaatcgtcaccaatcgcagcgggcaaccgaccaaatgaatggattgaaaccaattggttaagatcgatgagaattgtcggcgaaatttgacgaagcaaattgtccaaatgatcaccacgggaaaagcccaaacagcgaatgtttgtcgaaaaaatgggccaaatttcacgtgtcaaaatatcccaaatccgctggccatccgtggtgtgtggtgaagaaatccaaaacaactgtaaattggtgcctcttttgtcgaaaatttggtgatttaaacgaagaaaagcgatgacggagtgatcgatgtaactgtgaaaatggaaggaatgcttttattgccataaagctttgatttttaattactaaatctcaaggctcttaaaacggattttgctgggcaacggacggtcgtccggcaatggaaattccacaaatttgtcatcgattcgtacagatagtttcgggtttgttacactgtccagcttcggttctggtcctttgtccttgctaattccgattgatctccaaattgtcaattcgcttttccattgaaatgtttgtccaccaacgcattgaaacgtggcgaaagaagtgccaatttgaggccgagttgaggacggtcaaaggatgggaaaatgtccatccaaacgtcgttgcaaatccaactgaaatgggaatcaaataaacgacgaatttgtgacttttaatttaattaccgtcggttcatttttggcagaaataagcacaatttggacgagttccgaatgatgtcacacaaatagcagaagaattaattgcgttggaaactttatttttatataatgagaaaagcggaaaaccaaaaattctaacgaaaatcacattttatccaaacaacttttgaattttgtttgccttaaattgttgcaaatgggcccgaggggttggacaatatgccaatgggagacgaaaaatcattgacaaaaagcgagcagaaaaagggaatggcagtgctttggaatggaaggaacgcacgcaacagaggagaatatattttgcaaaatgatgacatttgccgggcgttttagcccctacccccaaatcaatcaataaaaaatcaatttgacggattatttttatccaactttcatttgcaaatgttagacgcgcatttgttttttgaaatttgaaaactgaccaacgtaataataaatagggcttacatttttagatttttacctatttacgagaatttttgattttaaaaattatttttctcaatttgtcttaatatttgttgacggatttttaataaaatttttgtcattttacacccctaagttcggaactttttggcacctattttcccatttttgcacctatttttggggttttttagaacctaaaacctacctattttggcagtttttagcacctaaaaatgtaagccctaataataaagtcaaactaccgtatttctctaattatatgcaagtcaccaataatctacccctttcgaagtaggttgaaaaataatctccccttctctatttatctgcccgggggataaatagaatttatatttttttcgaaaaaataacttcttttctatttttataataattaattaattccaagttgaaattctttaaacaattttttttaaaattttcaaacagaaatttttcttgaaaaagcctgcgaaaaatttttctttgaaaattcggtaatagttaagaatgttccccacctttttctgaaaaaaattttcaaaatttttttttcgagaaaatggcgtttttagggttttcagggtcgaggaatccgattctgagactcaattcgacccattccgaaccacgaacccggattcgaacaaaaattgaaaattcgatttttcaaaaaattaccatttactcaacaaaatcgaacggaaatgcgcgcaaacaacttcttggttttataaatgatgttatagatttttattattgtaatatggctgcatggaagagcttcgaaatttcaatattaaaaaattgcatgaaaagttggcgctagaagacaatgagttcgagcaatggcttgagagtagttactagccccctttttcggggttggaaaaccaccgttccaaaccaaagcctattggtttaaaccaaagcctattggatgggtgcgggggtgaacctaaacctattgaagggtttttattgattaaaaaataaataaattaattaataaattaattaaaataaataaattaattaaaattaattaattaaaattaaaaataataaatcccaaaaccaaagcctattggatgggtaaataaagataaattataataaagaaaaattaaattaatataaatacaaaaattaataattaaaaagaaaaaaaaattaatgtgtttaaattataaaaaataattataaatgaataaaaacgctagatagagcgctgctatttgagtccgaccatttcagtccctgagtagttaaccctaggctggcgttacaattttgaatttggcgccaaaattcaaattttggcgctatttttgaatttgaattttggcgtggcgtccttttttccatgcctattgggtgttttgtgtgtgtgtgtgtgtgtgtgtgggttcgcggaccttttgaagtttgttttactttaattaatataatttaattattattctcttaaagccaaagtctattggagaagggagggaaggggagggcgtcagctgtcgcgccctttggggagggaagcgacgccgtgccatttgagcgctcgcgcgtgccatttgaccgcacgcaggggccctttgagcgcccactggtggcaatggaaggcaccagctgttggtcagagggcaactcaaattctatt

SEQ ID NO: 1302 - DNA, 12221 bp, Heterodera glycines
acgaacaacaaagggaaaagggcgaccgcctgtctccgcacagtcgcatatcttcaaagttaacaacaaccacgacaactactgccttttttacgcgctggaacttatgcgccactattcattgtataaacgtgggacaattacccaagacagatggcggtggattaacaaaaaccaaaccacggttcttcaacaaaaggcgctgcaactactccgcgaggcggggatccctacaacagagacagagtacgacgcggaagtttatatacatcaagtgcaagggttgtggaacgtcaagtatcccggcgagtacaaaatatttatttttaatgactaccagatacgaccaatcaccaaatctgatgtcaccgactaccaattccccattcttctctaccacaacaacaatcactttgatggcatcaaaacgatctccaaatttttcaacaaaaagaactactgtctctcctgcgagtcgccgtactacaagaaaatcgcacattcatcaaactgctcttcactctgtcacgggtgccgtgaggtgggcgttgactatccctgcgagccacaacaaggatacatcaaaaaatgtgatcactgtaacaacaccttttacaacaacagctgttatgagcgccacctccacaaggatttgtgcaccaaatttcagcgctgcgaagattgtggggtaatttataacattatggttcatgggagtgttgggcataaatgtggggaacagttttgtaaactttgcaaacaattccatataaaagaagacgacgacgacgggatgaacccctgcacgaaatgcttcatccaacccctgaagcaacaacgaattaagccatacaggatcatcgtgtatgactttgaggcgacacaggacaaaaaagtggagaaccggttcgagcatgaagttaactttgcagcggctaccatcatctgcaccgactgcattatcaacggcgactggaacaaatcactgcaggggaaaaagtgccaaatttgcggtcctcaccgctcaatcaccttttcaccttttgactacatggagacaacagtcgaccaaaaagtcgtcactcagcaaccgctgtgcgaattcgtccagtggcttcttttcgaccacaacaaaaagtttccaacagtcgcgtttgcacactttggggggcgctacgacatgacgatgatcataaaggaggttttggcgcaaggaattcacaatccggacatcatcaaacaaggaaatcgcctctacgagctgaaaatcagggaaaacgagcatggccccctcaccatctttcacgacagctacaacctaatgcccatcaaactatctggtctcatcaaatcttttgggcttcatataaaagataagcagcactttccccacatgttcaacaaatcagctaactacttcaacgtcctaccacaccttcctccacgtgatgactactgtcccaaccaaaagaagaaggcggacctgcagaaattcgacgactggtacaacaacaacctgtgccaaaaattcaacttgaaagaaaaattgcccgaatattgctgcaacgatgtaaaaatcctcacccacgccctcgtcgaactacgccgggaattcaaacaacttacacaacggaacggaaaacacggtggaatcgacattttgtggcaagccatgaccatcgccagcgcctgcgtcaaaaattttgcactcaaccatttgaagcccaactcgctcgccatcgtcccggagaaaggctacacgccacaacagaaccaaagtgcacttgccatcaaatatcttgactggtactcccacgtcaacaacgttaacatccaaactgctcactcccggtacggcgaatatgtgtttaagcgtgaagggcaggtataccaagtggacggctacatcaaaggaacagacgggaggcgggacaaaataatcgaggtgaatggttgtctgtggcacggttgtgaggagtgttttgatgacttgggcgacgaaacgaggatgccgaacggaaagacgctgcgggagattagggagcgagaagagaagaaacatgaaatattgagcaggtacgtcgacttggaggttgtttgggagcacgagatcaacgagaagctgaagaaggacaagcagatgagggagtttttcgccaactggaaggaccactcaccaatcaaaatcagagacgcgttccacggcggacggactgggccaatgaagctactccacacagctaagccgggacaaaaaatcagctacaaggactttaccagcctctacccgtggaccaactttacgacaaactaccctcttggccacccaaaaatcgtcagtgtcccaccaaatgagcagacggtcaactggcgcaccccatccgacaatccctacaaaggccttctcaaagtgctgcttctacctccaaacaacaacgtcagcgtcacggttatgcccgtaaaatttgatcaacgcctcctcttcccccctctgtgagaagtgcgccaaacacatcaccaacaaatacccaaatggcctcaaggacgacaactactcctgcccacacttcaaccctaacgaccgggccttcgtttctacttgcacccatcttgagctaaacgccgcgttggatgccggctatacagtgcgcaaactttttcacgtcttgcaatacgaccagtggagtgacaacgtattcaaatcctacgtgagtgaaatgatggccctgaaaatccacgccaccggcttcccgtcaacgtgcggcagtgagaggcaaaaggacgaatacattgaggagtgttggcgaaattttggaattcatctggagaaggagaagatgaaaccggagccgggaaagcgctacatcgccaagctctgcctcaactcgctttggggacgattctccatgaggaatctactttccaaggcggtaatcaacaatgacccttgcgtcctccgccaatacactgacgacaagaaaattgacctaatggacattgagctgatggatgaggacaacgacgtattcatgctcacctacaaaccaaaggaggagtttgtcgacgaaaacaaatactccaatgtagtcatatcgctctacacaacatcaatggcgcggctctatctctatgaagtgttaaaaaaagtggccaacacgcccggatgcgaaattctctactacgacacggacagcatcatctacgttcacaccgagggtaacgacccactcccgacaggaaagggtcatctcggtgagctgactgacgaaaagccggaccacaacattttggagttcatcagcgctggctgcaaaaactacggactgaagctggaacgtaaggacaatggggaaattgagtacgacttgaagataagggggataacactggatgaacaaactgtgcaaactatccattatgacagtgtgaaagatcaaattatgcgttatgggtccgatgaccccgcggaccccattattgtaacatacccccattttattcgccctaatctaatccaaggcaaagtgtacactcaatctctaactaagcattatcaacctgtcttcacaaaaggcattattaataacgccttccaagtcctcgaattcggctaccgtaattcacgtttgtaaggattgtgcactctcacactctcttttattatcccgttttccactatttttttcaatgcactgcaggacggaatgacccctggttgatcctccccagcactccaggccctccatctgagatgaaggtggacgagctgctcattattgtaatgcgcagcctggtgcgtgagtgtttgggttggggaccgaagggcgaagccgattcacgggtgcagacactttttccatttagtaggttcggaatcataatttattttctgagaacgttcttccgtcaattgtatatatataatttatttcgttattatatttatcacttgtatgttgtgattgcaataaattgtgaattgagacacaaattttgggtataatagtatttaagacagcaattggttgggactagcaaactttacgataattataatgagttcggcttcatcaaagaaagcgcttcaatcggtggtggtggtggcacagaagccagaaatacaaagcagcgaaaaacccaacaaggaaaaacacgaaaagagtgaacggagtaaatcaacacactctgaatataacttgattgaccatcaacgcttcttctggaaattggcccggccaaagtttgctgtgatcaactttctctgcccagggtgtcgtcgaatcaactacaagcacaaggaccagttcaagttgatgggagaagacgagttccactttacacaagtgatgtgtccgggctgtgtgaagtacaatatgacgcaaacagatatatataataagcatacaaagaaccctcattaattatatttaaagaatttgttaaatataagtaacaacaacaaaaataactaaataaaaatgattgatgacaccgtttttagttcaaacgacttaaagttaaaattgccttttggaatggtcatcagtggaccgtcgagtagtggcaaaacaacatttttgttaaaatttttaagagagagaaatgaattgattagcccacaaccaaagtcagtgctatattgttatggacaatttaatgatagtattcctatactacaaaaaatgggtgtacatgtgcacagagggccacccacagatgaattgctgagctctctaaagaagccgctcttattgattctagatgaccttttaacaataattgatgagaaaagtctatccgaattattcattaaaaaggcccaccatttgaatattggagttatatttataacacaaaatttgttcgagagaaaggtgaaggtagcccgaattaattctcaatatattgttttaatgtcggcaccgaatgccgcgctacaaatacgtaatttgggtgtacagttgttccctaagaggctttccttcttcctaagtgcctatagagatgcaaccgcatcaccgtatgggtacttacttttggatttacaccctgcttcgagcccattactgagaatttgcacgaggatatttaaagaggatgacgagaaaactgtgtatataaataatcaaaatgactaactacataccacaaaacgtagttggaaacttggaattcctgaagaagttagcggcaacaaagtcttataaaaagagacaacaaatatttaaagaagcgaccagtgaacaaattgcattattagtggaaatttgctataatatattaaagggatacttcccactaacgaggcaacaaaaatttcgtcttgtgccttacgtaaatattgtgagaaaattaggaagagttagaactgagaaaggtgcaaagaaaattattcaacaaaacggaggcggtggtttccttaatttggctccattactattaccagtcattattgccgccttaaaatatggagaataaatttatactcgttccatctgacttgtataaaaatttattaaagcctgacactggggagattaatgttgaaaatgctaaaaataaattgaactcacttttgaagcagcgaaaattagattcgggtacaaaaaatttactttataatcaggaattgaggcgtttcttgaaactaaggaaggaaattgaagacaaacccgtaaaggttgagctcaccgacggctcattgatggtgtttaatccaaagcagcgcgaaaggaatatgaaaataattcctacacaaattgttaatgacgaaggattggatgaaacgggctccatgccaacgcttgaagacccttacactactgctgaagagagtgatgctgagttgacaacaacaacaacaccaaaggcgagaccactgttaaggcctttacgagttgggacaagtaaatttcgtcaaaaacaaaaatcttttatagttaggaaacaacaaaaaattatgtcgattataaatgatgaccctgagaaatttggtatcggtgctaaaggacacatacttagagctaatggaacggcatatttaaaaagtaatgttaatcaagcgctagagcgaatattgagacggtcacccgagaatgctccatcgccggttggtacaaaagtgttagagcaacgactgagaaacgacccgaggaccagcggaatattaaaacaaaactttagtgatcaatcgggatcgggccttaaaagtaaacaacgaaaatttgtaatcaaaaaatggataaaaagaagttactgaacaaattatataatgaccctaattcacctgcgtgttatgcagggcaggaaagactttatgaagaggcactaaaatatgactcttcgattacaaggaaagacgttgaacactttctcgagggagacagaacatatacattacataaacctagacgtgttaggtttaagaggtcacgaacagtgcctgctggattcatgactgatgttcaggttgacttggcagattttcaaaaattatcaagagaaaatagcggattcaattatatattgttgggtattgatgtgttgagtaagcgggtctttgctgcacccgtaaagtcaaagaatttcaaacatatgagagaagcgcttgacaacttaatcagtcaaatgccaatggttcctcatagaattttttcagatcggggaacggaattcgaaaatagagaaatacataaatatttcaaagatatgaacatacaaaagcacaaggctcacactagtacggttaaggctgcactagccgaacgctgtataaggacacttaaacaacgactataccgttattttagtcaaaaacatacaatcaaatgggttgacgtgttgccaaaactagtgaatgctttaaataactcaaaatcacgaatcaccggaatgaaaccggtcgacataaacccggataacgcgcaaaaaatttgggaaagagtatatggcgatgaacatgcacaaacaacatatagaaaaccaaggttcaaggagggtgaccatgtgcgactcgcaaagtataaatccagctttgaaaagtcttaccttcccaattattcggatgaaattttccaagtttacgatgttaaaagggggaatcctcatcggtatggaataaaggacgacaatgaagagccgtttgacacccgcttttatgctgaagacttgaccaaaaccagaaaggacgcagagacaacatacagaattgagaaagttttgaagactcgcacaaagaagagtgggcagaaagaacatttggtaaaattttacgggtacaaagaaccagagtggatcaaagacagagatattgagcgatagcaagtatttaagtgtatttattgtctatattttgtgattaaataaaatgtcaaatttattttatgtccttttacctagtgataccccgggttacaccaacaataagcccaataagtttagagtgcatttacccaggactctaacttttggaggtcaatggctgtgcggactgcacagtataatatatacaaattcttggcctgctgtgggaacaaatgagaaccaatgggttaaggtacatttaaaaaacggagaaacaattaagatcgacattcccacggggtcgtatcaaaatgagcaagaattggaaaatgcaatgaatgacgctataagaaatgttataaagcaaccgattaaaagagctaaaagacacttggaagatggagtggatttgttttttcattacaatccggatgattactgggataaaattgaggaagaaaggcagcgatataacgaattgttgaagttgatagagacaaagtcaagcgagcgtgataatgagaccgacacacataggaagagaaaaatagaagaggaaattgctcctcttcaaaatcgatcattggctaagaaggcacggatagatgaattagaagagcaagcacgtcagcgtgacgagggaaaggaagaaaaagaggagagaactgggcaagaattcatcctaatgtaccctgataactatagggagaggctaaacgaagtacgtttggatctgataagagatttattcaatatacaggatcatatggaaaaatatcaaggcgttacagacggtcgcacaattcaggctctgaatgaggaagcattaagaatgagaacagcaatgaaacatagaagaaaaaatctgaatgcttttagtaaggcagtaatgaaaaaagatttacagttatctactgaagaatatgagaggactagctatgaacaaaataaggattatgttgaaccattttttgatagccatccatcagattattgggaatacattcacaaaaaatatgaaggacttcagaaagattataaaaagattcgtgagctacgtgagcagcaacaattcctaaccgatgaacagaaaaaacagtcaattcgggatgacattgatcggcttcgtcgacttattgactataggaggaaacgattcgcagcgttggaatacgaagctaaaaagagagacgcactactgcaacaacatcaaaaccacagtggcactagcattgacccatgacgaagtactgaaggaacgaattggaaaaatagacgggttccacccccccccccccccccaccccaccagacaacatggggaagagacaaaaactcacggacagtccattagtggagttaatagatcaggtacagaaagaacggtcagagactaaggctgccgatactggtatgacccgaggagaaattttgggccaaaaattaaagcataatgtggatgaagatgtagaaaaaataacacatgcggatattttaaaaaacagacttcaacaaatttcacgtgctgaagatggaagcgaagctggacaaacacgtggagaaattttgggctctttattaaaagccaatgtcatagaaaaagaagctaatcaagaagaaaaaacacctagtgaagtaccaaaaaataaacttgatgaaattgcgggtgagcagcaaggaaagacacacggagaaatattaaaagaaaaaattgaaagcagtaggaaagcaacgggtactgaaaataaagtaggagataaaactcatggagatagtctgaaacaattaattgacattagacacgcagaacgagtcttattcaaatatatcagagagcgaagaaaattttcaatttattttaatgaactaagtattgaatttattgagttgtcggctcaactcggctacattctcggattcgaggacccgacaaagattctgaatggagatattgcaaagtatcattgtgatctgaagggtggcattgacagtttgtgtgtgtacattaacggtataactgagaatgtgatagttggagataaattggctgcacttttacgaattgttgtcgttgaaggaaaattcggagacgtaatagaaaaaatttataacaccccaatgtacattaaggtggcagtaaaggaaattaatgagattgaaatagaaattacgaccagggagggaaggcttattccattccaatggggtaatacactacttgtattggcatttaaaaagtcaattgtattttagtatttaaatatttttgttcacatctttttgtgtatattttattaaataaatatggttcatcaaatatttgaccccaattctgttgattttgatgattttatgctagtagagcaggttggatcgggagaaacctataattattttcgtgggattcccccataccaacgagggtacggaaggcagcgtgggggaggagtaggagatattctaaggttattatggagaacaattctaccaaaattaaaatccgctggcacggtattgggtagagaagcactagacaccggaacacgtgtattggacactatagagaaatctgaagcaccaaataaaccatcaataatcgccgaagtgaagaagggagtggataatattctcgaaaagggaggagttggtcgtcaattcggaacgggaagacgaagaaagagtattaaaaggaacgcgataattggaaaaactgtacctaaaacagtgataaacaagagaaaaagatcggacgtatttggaaaactattttaaaatggtctttaagaaaatagacaaagagtcggtaaactctataacttcagctttatcaatattcagccttccaccaactaatgtgtctgtgagtagttcttcagtgcgcgaatatttaccccttaaccccttaacggacattcctttccactttaaaattcaccctagcgccagtttcatagacctaaacaaatgttacatcttaaccgaaatgtccattaaaaggttcgacaccgacaccaataaatatgttaatttgaaagtgaatgagcaagtggcgacaatcaacatgatcggtgtgacatggataaagaatataaaaatcacggtccaggggcgtgagatttatgactcaaattcactttatgcttataaagcatacttagacaccgagctttcttattccaaaaacgtaaaggaatcagacatgcaggcaagcgggtattacgtggatagcgagaatcaggacggtacggatctttcccaaccgggtttcgaactgagaagaaaattgttttcacaaagtcaaactgcacaatttattacaaagttggatgcagatgtgttcaaccaggacagatatatggtgaatggtgttgagattgatatacaacttacccctaatgataatgagtttatgatcatggcggcgtcaaacgataaatatagaatagaaattaccgcttgcaagctttacgtaaagaatcttgaagtcgttgatggtctcgcactggacattcagaaaatattggaaaacaaagaggcaaaatatgcacaccgtaaaacattgatcaaatccatatttataagtgagaatcggactgaatataatggaacgctatttacgggtcaattgcctaaacgggtcattctcggaatggttgagaactctgcgtatgtaggcaaccaaaagaaaagcccatttaactttaggccgtttgatgttcgatccgttacattgacggccaatggaaaacaatggcccgcagcaccatttgagcttaatttcagcaaaaacttatatacccgggcattccacgaaatgaacgaggcgctgggtatggccagttcaaccgacagtaacggaattactctcgagaagtacagaaaggggtggacaattttcgctttcaatatgacgaatagcatggaggagaacgaatgcatagatcttatcacagagggcacaacgacagtgtccatactatttaggtcaccggtcccagcgggtgggatctcactaatcgctatgagtgaaatggactcaattttgatcttggataaaaaccgaactgttatgactgatacaaccgtttgaaatgtatatttaagtgctttttgttagatgacaatttactcttttggaaatgtattttattctatatactttatttttgataaatttttcttcgagttataatagccctattctctaccctgaacgatccagggacaccgaaatgactgacatttattataaaatagcctctttcgaccagtcatacttaaacaacatgaaccaaagtgaacttttctcgacaattgaggaaattgtgaataaactacaactatgtaacgacgctaaagcaagctcattagcgcgatgggtatactgtatgctgttagttttgctgtggatagctattgttatgaccggaatttttctctattttaattccttgattcgaaatatgtgtaagcttatgcgtttatgtagagaagaaaatggacacaatgacgataagtcggattctaacgggaaacacaaagaccagagaacactacttgggatgcttcccttgcgacaagctccccgacaaaatcatcaggtacccttcagcattggtggcgaacaatgacccatccaataaagagggaacgcattggatagcaatgttcatcgttgacgacagaaccgtctactactttgacagttttgggcgtactccgaacagatgtatcagccactttttgcggaattatgaaggcgtgatttcaaacaagccccctcctattcagtcagcgctcagtgaaaattgcgggtattattgtattattttatttattgatgtgttcattgggaagaaaaaattatgacagccatttttgaaaaaatgacaaaaacactgaaaggagaaggataatcc

SEQ ID NO: 1303 - DNA, 4729 bp, Heterodera glycines
  unsure (1)..(4729): unsure at all n locations
tttgaagtgagtcaaacacngtattagtgctttgctgtgccgagaccgcanggncaatggatggctttaatctgcaagaatannaatggcnaataagtggttgtaaaaaactgntgtaaggaattattttttgaagtgaatcaaacaccctattagtgctntgctgtgccgagaaccggcaggcaatggatggctttcaatctgcaagaaattagattggcaatatgtggttgtattgggtatggaattattttttgaagtgagtcaaacaccctattagtgctttgctgtgccgagaaccggcaggcaatggatggctttcaatctgcaagaaattagattggcaatatgtggttgtaaaaaacttttgggtaatgaattattttttgaagtgagtcaaacaccctattagtgctttgctgtgccgagaaccggcaggcaatgaatggctttcaatctgcaagaaattagattggcaatatgtggttgtaaaaaacttttgggtatggaattattttttgaagtgagtcaaacaccctattagtgctttgctgtgccgagaccggcaggcaatggatagctttaaatctgcaagaaattatattggcaataagtggttgtaaaaaacttttgggtaatgaattattttttgaagtgagtcaaacaccgtattagtgctttgctgtgccgagaaccggcaggcaatggatggctttaaatctgcaagaaattaaattggcaataagtggttgtaaaaaacttgtgtaaggaattattttttgaagtgaatcaaacaccctattagtgctttgctgtgccgagaaccggcaggcaatggatggctttcaatctgcaagaattagattggcaatatgtggttgtaaaaaacttttgggtatggtgtcgaggaagcgagtgaggtgcgggtttgctggactggtcggttgcgcttcggctgtcggtttgcacacgctccgcgacaatgttattgaacttagcgaatgggacggggttttcgctcttggaatggacttgtgggatggacagcccctttagacttagttggactgtcctggtggacttcgggataatcgagcttagacaaatgcaaacacggaactctgagttccgggaatgtcgaaaccgtagagaacaaggaacaccttcggaacaaaaaacttcttagacaagaagtagtttatttgtcggaatagcgcacaatcaaaggatggaataatgatttttcgagagacattctaaagggaaatattcgggtttatatatgagatttggacagggagggaaaattctaaaacacacctgaaaggaaatgaaaaatggggaaacttcgggaatattaatcacaaaaatcacaagggaacattcgagaatcttcttccgttctccacaggacttcctcatttctttcctccgggcggtcctccaaacggtcctccgagcggtcctccgggctgtcctccgagcgatcctccgggctgtcccccaatttccacgcgttcagtcgccagcggcgacactccgggcggagacgaaagttcacgacgcagaaccgagattttgaggcgcaacgactgcatgaatgctgccgcctggcgatgttccagcgcgtcgcggtcggctctttcctgttcgttggccttcagcacttcgcccaatttgcgcgtccactccacgtacatttgtccgatttgcgccccctgagcgatgacttcgtcgagtgctgccacggcgcgttttccacgttgttgcaattcctcagccatgctcaaatgattgtctcgctcgcggtcgattcgtgccccgatttcgctgagtccattcagcacggcatttgtctccattggcacttggagacccggtcgggctgccgccttcttttccgccaaactgatggctgccgccttgggtttttccattgcggccatcaattcttggcgcgctctttccttcgatgcgcgaaatgcgccctcagctgatgcgcgtccaccggcgaccattgatgcagcaacgcctccagctctggccgcacgtgcctgtccaccacctttgactggcagttgaatgatcggaggtgccgagcattccatagttgcttccgcgcgtttggcaaatgctgccgccttctttcgatccatctccgctttgaccagggcattggtctttgggcagcgagcctcgtcgccagacaaatggccaagcaatccacatttgttgcaacgcgatttctgcgcattcagcgggccttctatgcgcgctcgcttcacgaatggtccctcagctgccgccactcgtttggtcttcggtgcctccataggtccctgaattcgaggctttttggcctcttggacaaccggcgatggtgcggcactggctaccgctgcttcgagtgctgccgccgcttcttcctcatcgtcgtcgtcctcctcctccgactcactctccgaaatgtcgattcgaagcgcttcgttgtcactttcttcatcaatttttacgaaacggacgacttgttgtttctgctgctgctgttgttgttgttgttgctgttgttgatggtgttgctgttgctgctgaacgaattcttcgctttcatccaataacttttcaatatccatgttcggtaggagttccgttgatataaggggcaggaataaggaaatgtaagtgactttttgcccatttccctcctccttatatagctgccgccagagggcagaggacacaattttgtgtccctgattcatgccataggcgcacaaaaacggatgactcatgttcgttcccttcattcggaaggaagcatctccatcaacagcgctcatcggcccatgattcaccgcctcttcttcgcttcccgggtgcacatctccgccgaagccgtgcagaaagatctgattcatcggcgcttctcgcattttcaatgaagaaggaccgcgggaaggcaaatgaatcagcgccgatggcaattcttttgcgccgaccgagtgaatcataataaatgcggacaacacaagcaaaattattttgcatttaagcggcccgatcaattcaatcttcgaattcgccggaacattcatcacaattgatcgttcctccgatctcggtggatctccgcgcatttccaccggatttcccgtcggactattagagtcaatttcttggataatcaccgagtggttatccggtgagatcccttccattggattacccgcccccgactgtggagtgccatgatattccacagtaatggaactccccttgctgcttatggataaccgtttcggggatttttctccctcttggggtcccgtgttgacagtttctggattgtcatcccatggcattcgggttccaaagtcaaacgggggatcgcgatcgaacgtttctcgtacttcgatcagttccaatgggtagtagctcacatggtttcgccctcctttctcacacagacatggagcctccgggaacatcaaattccggttgtgccgagtccgaaagtattggatgacagtcgggcctcgtccattgaaggcacccaattcatcggcaccgtgtgccgtaatggtcgtgccgaagagaatcatgtttgcattctccggtttcaaatgcgtggtgaccaatttcgctccactttcctggatactttccagcttctcttcaatttgggtcctcgttccaggaattccgcgaatggcacgggcaagcaaatgtggttgcattttgacgtgtcgcgacagaatgtaaagcaaatttgaatcggaggagatgttggaattcattttcggagagaatattagaatagaatagaatgagtgaggatcggtctttccatgcccttttaaaggcacctctaaccaatcagactccgccacgtatttaatgttcgagaatgttcgatgggccacgcccatcccaccggggggtactttaagaaattcgttttccccgtattcccggctctcttccatcatttgtatcatcagaatcagcataatccatcttgctattcttctccatacgatgaatgctggattacaacgtattatcaatatgatcacggcacctgcgaggattcccgccaatattatgacgattatgttcgggaatccagccatgaatctgataatgtcaatccaatcgaaattcagatcaggccatccaatgccttttggacttttcaacgtgtcggaaatccgaacgcccatttcaatttgttgctggattgggacatatatcaaatgtcctttcacacggaatttcgattttcctccactgcattcgattgtgcagtttgtgtcgatttccgcctggtcaaaggattctgatcttccgcttttgaccggcatggtaccgtgaaacgtgttccatcaacacagtagacatctgacaatgctgaaccgtattccgtccaacatctaagcttcaattgggctcccgactgacacttataacaacctttaagtgtttttgtttgtgcccaacacttggtgaagtcttcctcgatgccaagacggagaccctcgaattgcaccatcacttgtattggtgtgtagtgggtttccgagaaaatttcgccatctttgtatcggatattcaaattgcgcagacttaacggtagcctttttttcgggntgntgaattccttttctcaggatgagtcgcggcattgacaatcaactctctgggcctcttcatcgaccccacatttcgg

SEQ ID NO: 1304 - DNA, 5704 bp, Heterodera glycines
  unsure (1)..(5704): unsure at all n locations
gtatcatcagaatcagcataatccatcttgctattcttctccataggatgaatgctggattacaacgtattatcaatatgatcacggcaactgcgaggattcccgccaatattatgacgattatgttcgggaatccagccatgaatctgataatgtcaatccaatcgaaattcagatcaggccatccaatgccttttgggcttttcaacgtgtcggaaatccgagcgcccatttcaatttgttgctggattgggacatatataaaatgtcctttcatacggaatttcgattttcctccactgcattcgattgtgcagtttgtgtcgatttccgcctggtcaaaggataatgtcacattttggacttccgcttttgaccggcatggtaccgtgaaacgtgttccatcaacacagtagacatctgccaatgctgaaccgtattccgtccaacatctaagcttcaattgggctcccgactgacacttataacaacctttaagtgtttttgtttgtgcccaacacttggtgaagtcttcctcgatgccaagacggagaccctcgaattgcaccatcacttgtattggcgtgtagtgggtttccgagaaaatttcgccatctttgtatcggatattcaatttgcgcagacttaacggtagccttttttccgggttgttgaattcattctcaaggattgagtcgcggcattggcaatcaactctctgggcctcttcatcgacccaacatttcgggcacgcttctttcgacaaagtgcagccggaaaaattgcttgctatttctctatcttggcagagaagatttgtattaacttggtccaccattgagaaagatgttccatctgacaggaacttatgccctaagataggaactggtgcttgtgataccgcaactggtgtcagtttcacctccttccatttgaaggtaatccctggtatcaacgacatctcaatttcacccttaaagtttcctccggattcggctttaagtttcgcattgattcgatactcccacgttggacacgaaattaattcgtatataattttcgactcaggcacagcgtgtactcagtagaatatgcaactcgcagtcggaagtttgcatccacagttccaaaatgaacacgattctcggcaacttgtaaatccaggatctttttgaacacttcccagttcttgtacaaatgcactgtatcctttcatgtaatcctcatgcactctctggcaaaatttgccaaagcaactgccttctcgtgggcagctcttcactgatgtggtccgaacggtatatgaccgtaaccatctctcagtttttgngatacatacaatgctgagtgacagtaatttcatctcaacgactcccatgactcgctcttccgggtctctaaggataagtcgaactggttgtcctgctggcagtagagtgacatctgtcgagctttcaatccggcattccgagccatttgcctttctcagacagttttctgctactgcgcttatcgaaacaacacgggctgagccttcagcatgctcaattagcagtgagcttgccgccaatgcgagtaagctcatgcccattttcgaaagttttttggctctgttcggggtcatcttccgcttattcggttccctttggactactctggcatcatctctttgtagccttttttcaatgccttggatgaccatttttattggagttatgatgatccatcgaataagccaaaatagatttgaggtaacttgccgcagtattgaaagtatccaacagagtgcgattatcccagtgaaagtgaacaatccatacactcctgtggacacatctggacggcagtccgggttggctatcctttcaatacaaaaccaacagtcaatcaatgtgcatgggtcctgtggtgggcattccacttctccaatgttgacttttccatctcttagccaatacgttgccccgcactggtaatccgcgattagttgctctcgacgcagctcataaataagtttatccggagtatatcggtgtaccaaacagctgctggttgcaccacaacatacttcgaatttggtcacttttcttggtacagtgactttaatgcctctctcagcacactctaacttgcacattttacaaggaggaaattgtattcccctatgtaacttcgggatatccggtgggtttggaacaaatcgagtttctacaaaacaaatgttgtccaaatcaccagcatgaacattaatcccaagatggaagctgctttcgtcatggacctggtcatcattccgtggtttctgatctgtccttgttggacatttctcgctctttccgcctgcttcccatccttttttgggattggctcttgaagtcctatttttccgttcggaacttcttcttcttcttggtcttcagactcgtcaacttttggtacttcgagcctatacagacggtttatcggacgcgaaatttcacgccatgaaattcgctcgccatttgcctttggtattttgagtttggcacttcgcacaatattgtccgatccttggagttcaacaattctgcccaacggccagcagttcctcggagttttttcttcttcgataattactacctctccgatttttggttggtccgccaggcaacttcttggtcctttatgctcccattgtaatctgttccgaagcattaacaggtactcttttttccatctggtccaaaattcatccaatgtggctagagtaccttcccagcgcatctgcaattgcttctggagatttttaggttcattttcgaactccgtgtccgacgattgttggttcctccggacatccaaactcaatatggcctttggcattatgaaatcgaccggtctcaatggctggacagcatttggtccttcatcaacgtaggtgatcggtctttgatttattgtcgcttcaacttctgcgacaaacgttctcaattggtcatagggcaaaattcgacgcccaaggactcttttgaaggccgcttttactccagcgacttggcgttcaagaaatccattactccaaggtcttagtgatggattaaatcgccatttgattccttcgttggccaggtgctcttcgagcggacatgtgggtgtcttcccagcttctaatgctgccgctactttagctgccagtacaaattgtgtgccattgtcagtgatgattctttttggagttcctctcctactagtgaatcgacggaacacttgaaggaatgcctcagcgcttaagtcaagcactggttccaaataaatagccctcgtacttaggcaagtgaacaaagcaatccatgccttctgaagctcaccattaattttggtattcgttggtccaagataatcgatcccaatgctttcaaatggtgccgtccgcctcacgcggtcctcaggaagaggaggcatcgtcggcaatttatatgccgggcattggatcctgcgacaacgaccgcatgctcgaatgaccttctttatggtcagtctcgctctgggtgtccaatattttcccataaattctgtcaaagtggattcaactccagaatgggcaagggactcatgtaccgactgtgcaattagtcgggttattggacaattctcaggaaggataatgggattaaccatatcttctgatgcattgctcattgcgagccgtgttgacagtcggacaagaccatttttcctcgatgtctttacaagttcttgtggttgctttttccacattggccaacatttttgtgccatttttacaagtaagatctcggcgtactggtaatcttcactgctcataggaacaccctctgaaatctcgaatattcgagtcttcctcatcttgtttattgcacggagaaaccaaaccacagtgcggcgtagtttagtccaactgctaaatcgacaagggtcaatccatggattgtcttcactcgttgttgctgatactgcaactacattgtccaattctgaactttcttgtccatccttcatggctccctttggggtgacctcgaagtcgatcggccaacttttcattggttctcggagccatgttggtccattccaccaaagatgatgggatctcagctcttctggagtgcatcctcttgatgctacatccgctggattttcgtgcgttctgatatgcagaaatctggcattttctgatatcctccggatttctctcaaccgattctccacaaatctgggctgggaatcttttgactcaatccagctcaagacgggttttgaatctccccaaataaatttttcatttattgggattctcagctgattttccgcaaatttcagcatcctcgccccaattagcattgccaagagttccattcttggaattgttacttcagctttccggggcttgagtctactctttgcatagagtaactgtacattggtttcttctcctttctgagaccttatgaaaagtgccgctgcataagcgtccttgctcgcgtccacaaatgcatggagttggaccatttcatcttgcagcacggatcgtctcggaaatttgaatggttcggtcttccattctctgatgacagcaaaccattctgctgtttcatcagctggtaagatttcgtcccatccaagggttctgtcccacaatcgttgtaggaacaattttgcttggagaaggcaaggtgcgaccattcccaatgggtcaaatatgcttgctaatgttttcaaaacaatgcgttttgaaatcttcccggcttcattcgtcggtgggaatccaatgctcaattcgtccttttgaatgtcccaagggatgcccagtactttagtccctggtttattaagccggtcctcttcgggaatttgctccatcgctttcattgagttgcaaattaattccctcaggttcatttgtgcttcagcaaacaatgctttcccttctcgatacttctttaagacttctccagcgtctttgcatgaagtcattagattgtccacaaaggcattcccagcgaattccaacgccaagggggaagctttctccttcagatgcttctggacaactgcagccaaaataaatggcgaagaaattactccgaagggaatccgagcccaacggaagatctgcaaatcttagaaggattcccacgagatcgggaatcatcacgggtcctctgaacatacactcgttcaaagatttctctccccgtgggtgtgctgaagcatcaaaaacaattcgaagtttatgagttactactccatgatgtggcaggaagtgttcaggaaaaccctcccttctttcgccaagttcaaagaatccgagattgaactctctcgagattgactcgtggtatttgtccaataactcgggagtcttgcgcagtttttcaaggaggttgaccaatctcctatatgacatattgtaattcgatggcaaatcgggcgggaactctttccatggccatcccgaactataacgtccatcagcgagtctcttggctttcttttcgaagatttccatcgctgtgtcgtcatcattttcttttgggtcatcttttattcctatcagttgtaggtcccaaaagttttttgcagtgtcgatgcctgtttctgcaattcacaatcagcttttgctgacatgactgcgcaaatttgtctcgtttctccgatctcctgtgggatatcttttccacatacg

SEQ ID NO: 1305 - DNA, 1398 bp, Heterodera glycines
cgcgacagaatgtaaagcaaattggaatcggaggagaagtggaattcattttcggagagaatattagaatagaatagaatgagtgaggatcggtctttccatgcccttttaaaggcacttctaaccaatcagactccgccacgtatttaatgttcgagaatgttcgatggcccacgcccatcccacccggggggtactttaagaaattcgttttccccgtattcccggctctcttccatcatttgtatcatcagaatcagcataatccatcttgctatttttctccatacgatgaatgctggattacaacgtattatcaatatgatcacggcaactgcgaggattcccgccaatattatgacgattatgttcggaaatccagccatgaatctgataatgtcaatccaatcgaaattcagatcaggccatccaatgccttttgggcttttcaacgtgtcggaaatccgaacgcccatttcaatttgttgctggattgggacatatatcaaatgtcctttcatacggaatttcgattttcctccactgcattcgattgtgcagtttgtgtcgatttccgcctggtcaaaggataatatcacgttctgatcttccgcttttgaccggcatggtaccgtgaaacgtgttccatcaacacagtagacatctgccaatgctgaaccgtattccgtccaacatctaagcttcaattgggctcccgactgacacttataacaacctttaagtgtttttgtttgtgcccaacacttggtgaagtcttcctcgatgccaagacggagaccctcgaattgcaccatcacttgtattggtgtgtagtgggtttccgagaaaatttcgccatctttgtatcggatattcaaattgcgcagacttaacggtagccttttttccgggttgttgaattccttctcaaggattgagtcgcggcattggcaatcaactctctgggcctcttcatcgacccaacatttcgggcacgcttctttcgacaaagtacagccggaaaaattgcttgctatttctctatcttggcagagaagatttgtattaacttggtccaccattgagaaagatgttccatctgacaggaacttatgccctaagataggaactggtgcttgtgataccgcaactggtgtcagtttcacctccttccatttgaaggtaatccctggtatcaacgacatctccatttcacccttaaagtttcctccggattcggctttaagtttcgcattgattcgatactcccacgttggacacgaaattaattcgtatataattttcgactcaggcacagcgtgtactctgtagaatatgcaactcgcagtcggaagtttgcattcacagttccaaaatgaacacgattctcggcaactt

SEQ ID NO: 1306 - DNA, 1039 bp, Heterodera glycines
ctccgcttaatcccacgaggtcaatttttggcaaaatatttctaattttaacagtacggtgtgttcaaacatacggtagggaccggtttagtaaggctttggttttacgcatatttcataagtcacaactgttttggtttcttacaattagtcaaccaatttagaaaacgtttacactcgaaagctcttccttcacgagttttattatttaaatgtcctaaatcaaatttggttttcctaaagtaaaaagtaactaaattctgctggattttttcacggttacgaaatatttttattttacgtcgagcttcgaatgccaccaattgcaagagttggcttgataattaaaataagctaagcttatggatgctgcttccttcgttaactccaccgtatatttttctcgttaattcggcaccttcttgttgctcgtacggactctgatcaaatgactgatcaaatctctgtgtgtgttgtcttaagtcgtcgcttccaccgatcggaaagttttcctcctcaaagaatggcatcggccgatgtctttttggcgtcggcccataatcgctgtcgccttcgtacggtggtgcgttcattgtctgtacatcaatttggtgttgtctgtgactcgcatttggtgagaatttttgaggagaaagttgcggagcattgccacgaaaattcctgaaaatgcaggctttggtcggttcggaaaagtcgaaatattttttcgatttttattcccccaatttcaattcgcatttgcgttattccgtctcatttcaatccatcaacttttttctcatctctttaatattcactttcatttctcattttttaccacttcatactcatcaccatcgaataaatctcttcaattcatcgatcttttcataaaaattttcaaatttcaatccacttttccccttcgaattttcctcttccccattcccttttcacatcatttccatcaattaactctttataaccttttctcagaaaatcttccgaaagaatttcggcggaagtcgttgtcgtcgtc

SEQ ID NO: 1307 - DNA, 3292 bp, Heterodera glycines
ccttctctccccctccccctcccttctcttccattcccttccctcttttccctcactcgctctttcctctctctctctttctccctttctcaccatcgcccttcccttttcctttccctccccttttctcttctttcgttttcatacatttccttcgtcattttttctctttctctctcttttctcccttctcttttttccaaattttcacattttctgttatttgtaatttgtaaacccattctttcgtaccaaaattgctcgtgaatcgtggtccctgtatcgtccgcctgttcctcgtccaaaatgttgtttccccgccccaaaattgtgatcagaatgtccgcgattatttaacgctggaaacggatgttttgatttatcatttgttccttgctgttcggtttgtccctacatctgcgccacgaagaccctccggcatctcctcgagagtctttgctgccactttccgttttgctgttcgatggagtgttctgctgttgcggcgttggcatggctcggtcactctcttccgcttcagttttcatcgtaatgactttccccttgtgttgctgttcttcttcgtccatgatttcgccctcctctggcaactctccttcctcgacatcgttcgcagaattccctcccattttgtcactttgctcatgtgaacccgtcattattaaaaattcttcacacttcgctgacttaattcaagaaagggctatcagttgacttattttatcttaaagacgtgcgatattttttttcttattttaaaaacgcaattaatgtcgtatataatgacgcgcagatctaacgccacacacacactgatattaagcaggttttacatcgcagtatttttacgtgctatcgcgactaacttcttgggaggggggggggggggcaaagaatccgacaaaaatgcataaaattcatgagtaagcgcgttctttaaattctcacatttggatttgggattcctgtaataacaggaagcttaacaatgttagttgacaggaagcttaattttagacaaggctatttttcctattgagctcctagggacctgcaaacaaagaaaaaatgtattaaggtatatttccaaagaatcggtaaaacccgagtcgtattggaccatactgttttccagaccaaaatttggaacctttcaattaatgatatcttgacaatctaaatgttctctatcctgcaaaatctcaaaatttgttgattaatttaaaaaaacctataggcattgtcaaaaattgaatttttgcaacttccttgaaacgaaacattttcttgttaaaatagagaacattagatccggaaaattggtaaaattttgacattttttaggacgaaaacagtacaaattggccttatatgtatgaacaaccttcgttatcgacctgtatgtttttgaaaagttacccaaaaggtttttcagttaatgctttaaaaatttacaattagtgtattttactctagtttttattttggtcaattggataaggaatgacgaattaattaagatacagataagccgatatacacagtcctaatttatgactttttaaggcttgttttttgttcttaaggtctaaggactaaccgttttagcaatttttagtctaaaaatcggagccctattcaagatcgtagaatttaacccaacatatgaatgaaaatgagataatggcttatcgaaataataaaaaagaacgttgcaaaatctcataaaattattgtttccaccgttattaaaaaaaattgtttgtcttcttaattactttatattctctaacagaaaccttcaaggattgttttgatttaagatgatggacttttaaaatttgatttttttttctatctcgccgttggcgtttttcggcggtcggcgccatcgaatacccaattccttttaggtctccaaaaagcatcgccgccaaacgcttaaatttcgaaaattccccagtggcatttatccgtaatatagtcaagaaaataaataaagccaagtatttttagcgaaaatcctatttgggttgatgttccttctcgaaaaatgactttgtttttactaaaattaaatctcccaaatcattggtttggggacatcaaatacttcgaaccatcgcagaactaaaagcctaaagcattttagtctcagacacgaaaagttcaaaaaaggactaggagctggctgagtttgaaggtgatttccttgtcttaaattccttgagaaatttcttggattacaatatgagattttgcaaattcaacaaaattttcgctttctttaacccggagacaaacttatgtagtgattacatatattgatattccatcattctcatttcaattttgttgatattatgtacaaacctttggataaccttccaaataacatacattggagtaactttcattaagagtgataaaatgcattatatgtaaattttcaaattcgtcttctcgttcagtgagcaataatgaaagagcccccaaccaacgagaacgacaacacacataagacataagtttgtcatcagtcgattttctctttttgctggttggtgaataaatgtggatggcgaagcgagtagcgaggagaaagaagtgcacgcacacacacagcacaatcccaccgatgttgggggggaggggggggtggaatttgcgaagggttggggggctaagcggacgaagggacgcgagcggtcgaccgccacagcagcaaaatgtggaaattggggttaaaggaatgggaagacaatccaatctcaccacagcgcaaagcctagagtaaaagagaagcgaaacgaaaagagagagagagagagggtgactgagaagcagaggaattagggaagagcaataacgagagagaagcagagaaagaaggcactgatcgatatttcagagcaaatttatcttcaaacgcgatgatagagaatggaaaaatatatgattatacggtatctgaatgcccgcatatacagtggggagcaaaagttagaccgctctcaggtaaaaaatgttatactgtatgtgtaaacctaacttgaataaaaaatccgttttgccaaaactaaaaatgcaataaaaacataaaataggtacgagtctgtatcgtttcggcgccgccgtttcggcgccagggtcgtttcggcgccaagccaaaattaaaaactcatgaatcagtgggaaatttttaagctgatttaaattttcaaaattttttaattttaacaaaaatgtagaataacaataaactaataaa

SEQ ID NO: 1308 - DNA, 6557 bp, Heterodera glycines
  unsure (1)..(6557): unsure at all n locations
tttaacaagaaattttgatttttaaaattaaatatctatccttaatactgatttgtagggtttccaatttttttcctggactgtgaggggcccgcacgaaaaacatgtttttagcttggtgcttctaagattttttttatacatacagtatcttcgatatttttccatatttcacgattcatgtttattggcattatgtccataaaatttttttccaaaattttttcgagtttaaatgccgacccagatttgatggcaataatgcagaaagtagttattagcctaattcaggaccaaagctctgcatgtcctatttaaacaataagaatcaattaccatataaaagatgaaataccctactgaaaccacagatataataacattttccttttatatttctgttatttaaataaatataattttcaataatattttcatcggtattcgtaatacatatgtaatagctgacgatgagggaaaattgtacgctttgagcgcttcagagaaacaacgtacgaaagagcaaaacaaataaagcaaattaaaagcgaataatttaatacgcgaggggaaaggatatctttgaaaattcggaaagaaagatccggaaaagagcaacgattcaaaagccgggaatgaacaacgtaataaaacagaataacagggaaaataaattaatttattattgtaattgtgcctcacagtcagtcaatttccgttggtcacttccttcatattcggcataaagtcaagggccatcatacacgcgaacaccgtcatcaccattttggatttgacctgggccatcgtttaaaataacaaccaaacccgtgatccatcatcaatccacctcaacgatgtcctccggtaatgcgtaaattttcgctccaatttttcgtcccgaagtgatggcgtattttgcattttccaaattgctctaaatttgtatataattacaaactggctcataaaggttaattctccaaacctcggctgacacatcgttcttaaccaagtcgtagttgatcgttcccggtttgatagcatcgatcaaatcgatcagaactcttccatccgcaattgtctgatcctggaaactcttcagtcggcttgtctaaaataaaccccacttcaaatagatgtcaattagttgcagcccgacaaaccttgcctgactcttccaattttttgttgacccaaacaataatttctttttctgtggccaaactttcgccgctttgtgtgcattgtgccaaaatagtcaaagtgtacgcccgcataagctgccagacgagtgctaaaagataactttttgtaaaaagaatacaaagagtgtcgacccaaagtgagtgtggggttcgcgtcgtaaatgtccttgccctgaatgccgaccagggaaaagcgcaactgtttgcccaattcgaccgcgtagttacagttttgtatttggtccatcatgctttgtaacttgcggaactgcttcaccacccgcttccactggacaattccaggacgaatgcattcgtacaactgacacattttggacagaacgtaaaatatactctgaccgataatgctttgaattaaaagttaaaatcacttgaaaaatcacgaggccattctgcagatccgagtaaatgtggttgacaaaagggtccactcccaaactgttcatccaattccgataagttttctcttcgcgcgtctcttccgtcacttcggtaatttgtgctgaattaaaaagccattcgcacatttttactcatttttttcatacgaatttcatcagcgcccggctcgggaagggcggggaatttgttgaacagattggcaacgaaggcaaggttcagtttgtagttgcccttggccacatcgtcggcagtgacaaattcgcggcatgcgattttgtccgcttcgcgaagcattgcgtcggcacgtggcacatcacccttggcaaatcgtaatcataacacccaaaaacaaaacgtacgtgcacattcaaagggctaagcgaaacggcggctgctttcggtgcgatttgatgcagcaaatacgtgtaaatttccgagtcggtcacatcggtggtgaaatttgtcaaccgattattgacaccggcctaaaaaccttcgtacaaaatagggaaggggaccacaaccttttccatgtgataattaacccaacgcattagaatttgctcgggcgaaaggcgccgcaaatcgtccaaagtttcgccttcctttagcaaacgaaaaagaccgggcacgtggacaaggtcaatttcgcggaagagtccaatctaagggcacaaagtgtcgatttaatggtcgaaagaaatcattactcggatgatttgccaaagcaaaccgagcaccaaatgaggcttccccttggccaagtcatccgcatcaatgttgacgatggcacaaccaatggcacgagcggaattcaacgccaatgtgaggttctcaagcctggtgtacgtgttcaacacactcgtgttcaatgcacgctcatcaatggtctccggaacagccaaattgatcattttactgaaatagttagtatccaatgtttggtcagtagtttggcagtttcacttgccaaatgatcagtccgtcctttactttcccgtaaaggtcgccacctttcagcgggagaagtcccttcaggtgttggtcctctgacaaactgctgtttatccaattggcaaatgcgacctcttcctataacaaatgatattctgctctcggcctgtacccttcaaaaaacaccaaatggcgattctgaattgccgaaattttcgaaatgggggtgtccttcccatcctccgtctcatattcgcttttgtcccacctccactctgatggtgtgtacaatttcctcagccccatgctccgcaatgccctgcacttggtaagcgcctgtaacactgccaatgcgctttttccatcgcgccgtctccgcatttcgctgagtgtccaagtccatgtaaatggcttcgaattcagaacaattcaaatgttttgggtcgccatgacgcgataaaagttcacgaatcttaaaacaaaagttacttatggcattaagcaacgaatgactgagtccaaagtcgacctggtacccaggaaggtcaatacccaacagtttcagcgccccttggacttcggtggaagaaatgaaaccacttcctccattttgcagaagctaaaacaataaaattaggtaaggaagaaacaaaggaggttatagagtataccgtggggtagtgttcccgtaattcttcaatctgatcgccagcaaaagccatataatgatttattagaattgcaaaaatcctaaaaatcaaagttcgaaaagagagaccacaattaaacaaaattaaatggcagagaatgcaaatctacaaaataaaataaatgaagaatgtcaattaagcaaagccctatatatgtcccgcattactgtcaaaactaaacgatttatgcaggcataaaaagtgatgggatatggcgccgaaaagccaggaaaaaatgtaggctcgcattttaggcacccaattgacttttaagcgtcctatcaagatcatcttcaattttttaagccttaactttttcttatttggtcaaggtcacattcttggtatcaaacgaaagctaagactcgggaatctataaatacaagagagcaaactttttttttacaataatggtgtctatcagaaagaggacaaattcggtaatacagtagtttcccgctcccctctcattgaaaaatttcaaaaattatctcataaaacacctagagagtttttagcatcgttgaacacgaatcagaaatccatatgcttatatgtatatgaactgatccgctaatggaatggcaattactcattcccattgaagcggctgaaaaaagcattagaaacatcttttcagttaggctacacaacccctttttctccccttgcaggggactctctcctcgcgaagtaaattcggtacaggcgacgcatggtcagacaaaagcactttggggctatggaggaagggaattttttgtgagtggatggacagcgaaatcgaatgaatcgaattgatggtgacggagaacagtaaaactttgggaggatgggcagggcatggaaaggatataaaatggagaggtgggaagaaggattgcgcattatgtccggttgggcagacaaagcgaaggagtgaacacaaaacaacatcagcaggacgaacaatcgcacactcttcaacaaaaaagacaaaatgcccattaaaaacaaacactttcatctaatcatcgtgggaataataatcataattatctcacaaattgagcgaaaagatctgttccggtagaataatttatatcaaaaaagatgtttacattaaaaaaaaaattgccaaacgctcaatggaagagaatatggggaacaaaaacaacatttgtaatgtttagagagaaaatgatcagcgaagaatgtttatttcgagaaaaaaaatggaattacaaagtgaatgggggaaagggtgattaataaggaacggatcgattgacgaagaatgtgaaattatttgtgtatttatgcatgactcatcaacatcgctaatgcattcattcccttcgcttaacatcccattctcgactttatgtcgacatttttcgttttcggacatataaccgaaattattgggaatttacacatactttagaataatgaatcagcaatttgaaaatgaactatttgagtgttcgtataaaatggaattaattaattaatttttattatgccttctttacacagcgtccgggaaatgagctcctgtgccagaaaagatttgcatgtgtggcgaagtggtttttgtaagatagtaaagggacaaagggtggtggttcgagtccgttgtgcaacatgaatattttcatttatttttgtccaaaatattaaaaaatcacgatatttgggaattatttttgaaggtttttgccaaccaaattggataatcttggtatctttcgaaagctcttgataatgagaagctttttctaagcaaatgctaagcgatttggtgtaccagagaaaagttatgaggctttaaattttgtttttcttataacttttgaaatagagcattaacaaaaataaattcagcattaatcgatgcagaatttttttctctaacgatatgcaaaatttcctgtggatctaacatatagaaaagaagctaaacatagcgaagtaaatgttgtttttcctaataataaaaatattagatagcacgccaaaaggagacaaaaaattagagaaaaaaagataatgtttttctctggcactctctatttattggtacacatctcgttttttcggacggtgtgtttaattaaccttagaaatattgatggttttgatgggattttacgaataataaatgaatgagaatggcgaattctgcgggagagtgacccttttctgaagggcttaaaagggaatgataaactcacaatgaaacactgctaaagtgaggggagggaatggacaacgccgtctttacattggccatcccccggggggggggggaattcgaagccaatgcatttggcatgcccaattcgccagcagctgtcagttgggactgacaaaaattaaataaaaatggccgaatgaatgagtgaaaacactaatatgtggcctttggcaaaagcaaaaattacacaattatttgaaattgcaatggttggggtcggcggtgtcagaagatttgcttaatctctgccggagccgctgatctcttttaatctttgtcggccgtcatcaaaatgagaagatgagcgtgctgctaatgctatggaaaaagtggtgatggaaattaaatgaatattattgtaattagggtttgaaatttttttttgtgagtagcgacagccgaatttacaaagaagcatttgaaaataccattgaataatcaaatgaaatatttatggaaataaaaaaacaattagcgaatggatgttaccttaaangctcggaattttgaaaaacctaatcaaaaatcgtgaatctcaacctgacttaaaaattctatttatcctctcctggtccgggcgcttttttcaaaaattcgtaacacccttggaaattttgacagggtccggcgagctccgatttctgatagttataaattaaatatttttggaaatatttaaaattaaattaaaataattcttttatttttctctctttcttttcattttctctttgcttgtccgatggtttccatggcttccgttggtgttgtaaacattcagcagaataaatcctttgcattttcccctttaaatttcttatggtcctttcggatcgaatggctcttcgtattgtcaatgttttgctgttcgccgtcacttattttgcttggttttgtgcatttatcgcaggttaatccattcatttttcgaccgatttgcttaaaattctgacaaatcatctcccccccccccccacttaagcctaacggaattccaatgcttttttgagtgcttctcaaagt

SEQ ID NO: 1309 - DNA, 1187 bp, Heterodera glycines
cgctttttgtcgattttttttctcgatttccttatcacttttgctatgttttgcaagccaggccagaaaaaaagaaatctctaaggattttaagcttttagggtctttggcgtcggtccaacacttttcttgagaagccaaatgtccaattcaatgaacacactttgttcacctttgaatcactctcacaaaatgaggtcgtccaataacggtcacttattaattattttagattaattaatttacagaaaaaaatatttttttggagtccaatggccaaagtgaatgaaaatgtgacagatcaatttgagttacttgtgccaataattgaaactattcacaacgattgggacggggactggcgagcggacgaagttttttttttttttggctatttccatctaaaaatgttaaaaccaattaagatcgaaattcgggtcgctttccgacacaaaacaaattcgaattcttcgccgtcattttcgcttaatttcaccgcattttcttatgcattgttttttgatgtaaaattggagaaaagaacattagttgaggtgattgtgaaaaatattatgccacaaattctatctttcagctcaaagggacgccaatttttggaaaaattcaatcgaaaaatccattcaacgaaatacagtaagaaaaaggaatgtttctttaatttaaattacttttatccattcaaatttttagtgtaatcggctcaatggattttgttcagcgtaattttttgccagcctttggaaatttaacttttgctcaatggtccgcacaattttctgcggatggatttccttcaaaatcctcaccagaggaaattgactggcaaatgcgcaaatggtcgatggaacagaattttagcattgttttgggcaggtgaaaacacttaaattataaaacaaaaatatgaaaaaatagaaaaattgaacgcgttcggatgacaactcatcagagacttggcggtggcattctttgccaattcgtttttcatattcgaataagcgaacagaccctacagtacaggtttacttggaatttggtacttgattacataattttcatacagaaccaatgcttgggagatggtcaaatgggcgtgggtacagtacttggctctgtttgtcgttgtacggtatctggccaatacactttcttcatttctttatcag

SEQ ID NO: 1310 - DNA, 2131 bp, Heterodera glycines
cttcttttaggcaaatgtccaaaatttcttaaaatagaaaataaccaaattaaatttttatttggttttctccttaagttttaatataaaaaaatataaattttgtatgcctattttgtttttcgccatttttgtgccgaaaaaattcctattaattaggtatttcttgatttgtataagcataaaaaagactccaatgagtttatctgtcttcttaattgatcatacataggtgcacagcattaaaatttcttaagtgtcaatatcaagtaattttactaaatttaaagctaaaaaatgcttaatcgatatcaattaatataacttaatttctcatcaatgatttttaatccttgataggattttgataaaggataaatttttggccattaaaaataacaaagaatgaaacagttttaattattgaaactaatttttggtcaaaacatttaaaaaagcgaaagatttcaattttcgttttttttatctgggatataatattatatttaaatttaattgtaggagagaatgtcaccgaagtatgaaatgcccgtgaaataattattcttttagaatgaaaatattaaaaattgtctacaaatacatatgtctctgtctaataatttcccaatataaattcataattatttcacggggaaatgttagttttttcgtaaattgatttacaaacaaattttaattagttttattgatttaattaattaattattccaatgacccatttcctgccaaaaaaatataaaagttcattatttaaattaaaatttatagaaaaattataatatataaatgaaatattttatgaacatttttatttgttttatccatttttacgaatgtcaaacgattgaagaggatatttttgaagaactttggaaacacataaacaaggttgaccacaaatttgaaagtgaaagtgtgctaccaaaagtcaaagaagagccaatcgaaattgccaaaaacggagtgccaacaatcaaaactgaaccctatgaattgccaatgaattatggaaaaactgtcgtaaaaaatgaaccttgtgaaaatgaaatgccaaaaactaaaaatgatcaacaaattcaaagagaaaagactcatttgacaaattatggaagaatcgtaaaagtaaaaaaggaaaaattcaatgctgaagagcccctgtataaagaagaggacaatagggatttaaaatgtgaaaatgaatgctatgaaaacagttcaacaggtaaaattaaatttaaataattaatcagatgtatttataaattaggatcagatacgaccgatgataattatgaaattgaggaaagtgctaatgatgattatgataacagcgaagatgatgctgatatcaataatgttcctaatgagggtaagtcgatttttcacatttagaaattatgattatgaaatttttctttaacagattcctcgttgacagatagtgaacaagaaaaaagagtgcatttaacaaaaaagagattaagagggattttcactaaaaaagatggcccaaaaaatggtaagaatggagcttggatttgagtgagaggatggaagaaatacattaatttttaagtaaaatcagttgagtattatatgaaattgaggtaaatttcctttttttatgaaaaatttgctcaatatttagcgattattcttaaaataatctacttttggaaaatatccttattttcggggttctttcgtctaaaaaaaaccttttagccaaattgttccgagcaatgagctccacggaagagaaagtgcgtttggctcaggcaaaagcaaccaaaagtacataatttaaatatacttaactttgaatccttctcctccttctctgtaaaaggaatctatttaaatttaatttttcaaaatttttatattaacataaaaaaaattttaaaatcaattgaaaattgtatttttttattttgggaaatcatcactaaaatttatgttttttttaaattttaaatgcttaaatttcagctaaaaaattgtctgacaaagaaaagaagagaattacgaaacaatttttcaacttaaaagaacatttggaaaatgaaaaaatgccaacgaaaatgttagagaaagaaattgccaa

SEQ ID NO: 1311 - DNA, 1437 bp, Heterodera glycines
  unsure (1)..(1437): unsure at all n locations
gaaaaaggactnttggcatgacaagtaaattcaatactttctttaataaaatttctgactattttttttattttttggttttttaattttcgaaaagttaatttttcaagtgaaaatttaaaattttgtaggtcaatttttattctgccatttaaaataattattttttgatgacatatttacccaatacaattttatttcgttgaaaattttgtttttctttttattaaaagtaatatttttatttcttgctgcattagtttttattattttttcaatttgaaatttttgtaaaagggatttttaagaaataaaatatataaattgagactttttttaaagaaattcaatataatcacatttcttactcagattaattagtaaaaataaattattaaaaaattggttttttcagttattttgaaaaattatttttttcagatagcaatcattgtcatgacgattcagagaaaataaaaattgtcaaaaaatatttcaaaatgataaagctgaatcctcatctttctaaaaattcctttgctgagcaatttaatattagtcaccgaacacttaataattggatcaacaaatttgcgatgaaaaatgtaaataataacaaaagtaaaataaatttaaatttttgatttagcaacaaaatggcgttctcttctgctgaaatgatcgatcgtttaaaaattgtttgaattattaattgctattattagttgccgctaagaaaaaaaactaaagtttagaaataagttttttagtttattgaaaaattgtaaataatttattttattttttcttataaaagtttaatatatttaaataattttcatattgtattcgttgcaaagtttttttttacaaaaaataaaaatttttcaatttaaataaaactcaatgttacggtgggtgccttcaaaattcagtattagttagtgactacactatctataaattcatctatttattaaataaattttcatttaaaaattaaaaatgtaattttttttaatagtatcacaaaaaataaatcagtattataaatttttttatcccaatgttaataaaaccttaaaatttaagaatttgaatgtgaaatacttatataattcttccctccctggcgattttgtttttctcttaattacaattaaattaagacttaaaaaatatttaatgtggccaatgaataaagttaattaattaaagtgggttcgttttacttctaaacaaaaataataatcataatttaaaacttttgttcagctgttgttgcggaaatcgcctagttcggcgccgtttgttataaattatgtcgattatcaacaaaactaaaaaatttttgttcatttgatagctcttaaggttgattggccacttgtgaaactgtaatttttgatacgaaaaatatgaaaaagtggataattt

SEQ ID NO: 1312 - DNA, 5011 bp, Heterodera glycines
gcacttccattcccatttcttcggaattaattcgtcactcatcttcgggtttgcttcttttatttcaaaatatcgcttcatcttcatcaattcgtcctcatcggtacgacgttcttaaagaaaaagtacaatttaatttcactaaaataattcttacttttacttttatcgtattttggtgccaattcttttttccatttccaaaatgtcacttcagaaatgcccaattccttcacaaattctttctgtttgccatgggcatataaatctttaaattcatcaaatcgttcaatgaattctttctttttctcctcataaaaactctttcccatctttttaattatatttaattcaattcatttttccatttttgtattaattgcagatttgttcctaataattttgcaatttttctctcaattttgtcataatctttccttttgtattttattttttccttcaacttttctttaattgcttcaaattttttaattatttctctctttttgtgatcatttttcatttgatcatttcggtcatttcccatttcttcacccatttgatcaactgctgctgattgtgagttctcatttcgttcattttgttcaattttcactgtttgttcactttcttttttgtcccatccgttgccaaatatttcatcaaaatttgggtcggattttgccggattcaattacaaaaacaaagaaatatataataaatattaaatacaacaaattcatttttacaaataatgaaaaaaataataatattacttatttattgcccattttttttcgttttattggcattaatttgcaaatcgataattcactgattttttaaatatgaaaaaacatttattttttaaaataaaatcagctcttctctactttgaaacacactgcttctactggtgaataataggctaacattggctttttttccagtccgttgattttcacttttatagtgaatgcgtgtaatttgtaatttaatgcaatgtttttgccgcccgcaggcggggcaaatgaccgctaagttttaaaattaatggtatttaatcgtaaaaagaaaaaaagaatatgcattttatttaaaataaatgtacaggaaaatccaggttgccgaaaaatggcctgtgcctgtacctggatccaggaaaaatacagggctggatccaggtacatgttgttctctaatctacacccataaaacacagttaaaatcgggaaggttgagaaaaaattctagggggttgtgaattttttgaaaatttgaaaaacccattggaaggtaaaagtttttcacttttttttgtaaaatttttgattaaatttttaccttttttaatttttggcttcgcgccaaaacatgggcgccaaatcgtcggcgccaaaacgtgggcgccaaaacgacccagtcccccattcctgcacaaaattggctgtgctataaccaggctgccagataaaaatttgaaatctatcattttgccaaaaaaatcagcatttggcgttaaaaagcattattttcaaaaattttattccaattaaaaaatataataaaaggttttttttgctgtacgtttttccaaaaaattttttttgcgcattgaataggcacagataagcacgaaaaaaattattttccacttggattggggtcaatacgatgactttcataatacctattcttacctatttgggagtttttctacctattacctaggtacttatttttatacctaaccatttggatcccgatttttttttacattttatgtacttattttgaccactttttgtacatatttttgccagccctatctatttgttgtttctttaatctaaatcctttccctcttcttttttttctttttaaagtttctgtgtaataggtacgtaaatgctgaaataggtagaaaaatgggtaaaaacaaaattgttgttaacaaatttctgatagtaaataagttgatttaatgcttttttgttaaggatttttccggaaatcctgaaaaatgcccaaaaattgcgaaataggcactaaaattggcattaaatttttgaaaattttcagcattcgcttaaaaaagcacgcccaaatttaaaaattttcccagtggcgcctatcggcaccgccggaccctattttcccatatttttgataaatgctccccaaaaaggcaaaaaagaaggtgtgatcaaagaacaaccacccactagaagagagagacaattttagacataaaataaaaaagtattatagatcaaacacaaaagaaatggtaaaataattgaataaaatgatgtttttatattgtcatgatgttcaatcaaataaaaatcactgctcaattagtggtagctaattgtttcttccaatttataagcgtgtttcgtgaaatttccaattctttagcaattattacatcgctcatttttggatttttttcttttatttcgtaatattttttcagcttttctaatctgtcctcattgttatggttttcttaaataaaagttacatttaacttcataaaaaatatattcttactttgacttttataatattttggcaacaattcttttttccatttctgaaatgtaaattcacaaattcccaattccttcataaattctttctgtttgccttgaccatttaattctataaattcatcaattcgttcaatgaatttgcgctttttcgcatcatagaagcgctttttaattttacttttatttaaatttaattcatttttccatttttgtattaattttctatttgtgcctaataattttgcaatttttgtctcaattttgctttggtcttttctttgatattttcctttttctctgaacttttctttaattgcatcaaattttttaacagtttctctcttttgctgatcagtttcattctttttataactctgaacacttttgagaatgttttgatcattcaaaccgttcatttgatcaattgggtcatttcccatttcatcaccgtttggttgaagaaaattaacaaatttcaaatttttattttgcttcttttgttcattttactgtttgatcactcccatctttgtcccatccgtcgccaaatatttcatcaaagtttggtcgaattttggcggattcaattttataaacaaagaaaattatggaaaatatgaaatgccataaaagcatttttgtggaaatcaaatttattgctgtaaatgattatatttaatgttatattcgcatttcaataatattatttccacttcaacaaatatttttaaaattaatacatgaataattcctaacagagaaatcaattttttactcagatttaacaaataaatttcgcaaaaaataataaaaattaataaaataaagttgattgcttcaaattgtttattgaatccacttgcctgtaaaattttcaaaattatttttggtgtttgttttttcgttaaataaattgtgcaaagcccttcagatgctctattagcctgcaaaattccaaaacatttcgaaaaagttcgagccaaaaaagttggaaaatttggttttttgaactctactgaaaatattatatcttggactgtttgaggcttgaaacggacgaagacatatttttatcttggtttgaagcttcaggatggagtttctatatccatattttctttatttcgcgaattatgtcatattttctttcatatttgtccatattttgtaaagttcattttatagtaaatttttctctttgacatagtttaaattcaaattctcttaaagattgataaatctgttcaaaaataaacaaaattttgtaattaggttgttttttcgttaaataaattgtgcctttatttttttattaaatgattttaaatacctatttagcctttgtgaagcgtttactttatatttagcgaatctgaagaaattttgagaaattatacccttaattttgaaaaattgtgtccatattcttgcaattactttccatatttcatgttttttggtcaatactttatgaccattataaattcccagcctagttatgacttttatatgtagctaaccggtgaaaatttgtcaattttgctttttcacggaaaaaattgtgccattaattggtttaggaaatatcaatgataattttgacaatttttctaaaaagcaaaagcttacttttcatttatcaattaacacaaatattttgattgcaacatttattgttattttctctcattctcatcacagcaaattatgtaattgccatcaattaacggtcattctgcaatttttgccacagcggtgctgctaaaagaaacaaaaaacgttcagcattgtttcgcatcagatcatcatcatgttcctcataatccgcagtagatggaagcaaggaacgttgttgtccttgttgttgcgcttctaacggaggttgtaatggttgaccattttcaatttgttgttgcatttctaataaaatgaatgatttattcaaattaggtcataattttgaataattgaaaacacaaaatccttaagagaatcaaatttccttttttttgaaacactgaaaaatatttttctattttttcaattttctttttttgatttatttttgaacatttcgccaataatgcaataaaaaacttgcccggtgtcaatggcacttctaatcgttccggcaaattgtactttttttgttgttcctcattcaatttgaaaatcacaagattggacgccgagtcgacgatgtaatgaacatttttggaaaaaagctgcccaattttgccagcaattcttggcagaaatttgaatagtttagaggcaatgttgagtaaaccccgatcaacagcgcttaattggtccaaatcaaaaccatcccgtggtggaaattcttggtcttcaatgagattgaagcgttcatcttcttcatcatcattaagaccatattttgcatgattaatttttgggttcaatcatttgccggtgccgtcgccaat

SEQ ID NO: 1313 - DNA, 7419 bp, Heterodera glycines
agcactggtaagaatgggggtctggtgagaaaagagaaggaaattggtggagatggagaaatttttagagaaaaaaaaataaattaaattatatatatttcatttacagatagaatatttttcatattttctttaccatttttatgtaattgaaattctaattaataaaaatatatcaatttttttttctttaatttttattcaatagtaggaatggtccgaccttaacttttgcaaaaactaatctttttactaatagccgtaagcggaatttcatataaaaattgagtcatctcaaaggtaacatataaaattattgaaatttatttcttaaatttttttttgaatttttattaaaagttaaaaattgcacaaagtttcaaagaaagcatatcgtttatatttttaaccaaaatttatccggatgatgcttttaaaatttaaattttaatcagaaatctatttaggtctaagtaatttcttcttcacttattcatcacaaaataaatagaaaataaaacaaaatattctcttactttgatttttatttgccttggccatgtaaatttttaattttgagaatttttgaaaaattatagaatttttttgcaaaaaataaaaaaaattcttttttttaaatgtatccctaaaaaataccaaaaataaatttttaaaatacttaaagatgtttataagcctaggttgcatgcctatttcaccctctacgaagaaattttatccaaaaaaataacaatttaaaaaattatttacatagtttgtacatattttgaccatttttatacatatttttgacatccctagtgttaatgaaactaaattttaatattaataaaaagattttcttagcaattttatttaattttttttcattcgctaagacaacgttttaaaattggcgaaaatttgaagaccgttcttttgctgaccaaaatattcccactgatctgcttgaactttctctcaattttgtgctttaaaactttgctttggctttgctttgacgcagctgaaactaatgctaacaaacaaaaacttttgtttaaatatcattgcttataattaggttttttgtctcaatttgatttttccttttgtattttcctttttttctcaactttactttattataatcggcataattcctcatctgattaatttgtgcgtttccattttatcagcattatgagcaaaaatgaataaattgagaattttctttttcgtccttaaagtatcgttaattgttggcattaatgtatcattcttatttgtcctcattatgtatttaaaatttaaaattaaacatactctcttgcttctatatcattttgttgagaacggttcaaaattttttatttgtttaaattgttcagattcaattaaatttctgtgagttttttggggtcaatgtcaactcgtacaaagggcaactcgtacaaaaaaatttctaagaattttcaagtaaaacttagaatttttagattaaaaaaatctaaatggattttttagcctagaaaaactttttaaaattttcaaaaaatttaagaaattaaaaaaatcagctgaaaattagtaaaacttaaaaatttttttaaaagttttactaggctaaaaaatccatttagatttttttttatctaaaaattctgttttagttgaaaattcttagaaatgtttttttgtacgttgccctttgtacgagttgccttttgtacgagttgactgtgtacgagttgccatgacaccagttttttgagacaagctgttatttataaatttaacatagtgttcgagccccgtgggcaggggtggcttttcgcgggggcgggggttggcgggggtcagagtcgcgggggcgggggcacgataattccgccctcgcgggggcggggtacacggcctttcttaagatcgaagggtgaagcgcaattgcttttattgaaaaaacgacacaacgaacggactctaaggcaactaaaaggatgagcgatttgaagagtattataaatcatgtagcttaattacctggtcgtttgttggtggtgccgcatcgggaatttggttagtgccagacatatacgccgatgcaatgccctttaaattacaaaatttttaaatgcattttgcttttgcattgtttgctcacaaaagttaaatgacgaggctgcggcactctggggaagaagccggctcgaagccgaaattggcaaagatggcggtgccgactgaagtggcgatggaagccgatggatgtgccaatggaagtggcgatggaattgccaatggatgtgccgatggaagtggcgatggatgtgccggtggtactggcgaaccgctgttgttcaccttaataatttttgttaaaaaatttccgactttttctaactccgttctttgaatgcttttttagctgctttaatgcattaaaattactttaaagggtttctgcactttatctgatgcttctaacatacagttttacattttatttgactttttcctactttttagatgttaatggttttgtttccactttttaagccaaatcaattgaggaaattccattcaattaaggaaattccagaaaataagtcaatcaaagagatcggtactgaaatcggagaccatatggactgaaatgtttaaactgcaaaatatcaaacaaaatttggcgtaataacaacattcaaaaaagttttttgttgcgttcaaaataatcattttttgtgttgtttgcacttctattcattcttaaaaaagcgtttttgatttagttacttttgtttagtttttcattgtctttttatgactttttagtgcctttttggcgatttttatcactttttaatcgacttttaaatttaaattttcagcaataccaattttgttaaacttaaaacgcaccatttttgtactcggctgcagccagtagtcgcgtgatggcctgcgacttagcatcgagtacaaaagggccgcggcgagtgccagccccaacttcaacagcatcgacgatttcggcgcggctttcgattgatggtcgtcgttcggccgtgcagtcgtcgtcgtaactgctgatgttgttgctgatggagtcgtcgatgtttgcgacgtacatcccgcacccggacacggcccaatggcaaatggcgttgggtccagcttctccaatgcgcttggccctatttttattgtattaactaatttttgccttttcatatattgctatttattaattaataaaaaacatcttagctcaaaaaaaccacattaatttcacttttgaacaaattctctcaacaatttctatagataaaaaaatattgaaatttaaaaaatacaaaaatttaccgaaattgtagcaataaattggtaaaaaaaatagaaagtattttggtattaactatttttgcctttttttagtcaaaatctgtgcaatttatgtcaaaataaatagtatcgaggcgatcaacgaataaaggaatgtggagccaaagaaatcattcataaaaattaatttttttatgagttttttggagctaattcaaagcaaacccccgcccccgcgggggcggaattatcgtgcccccgccaccgcccccgcgactctgacccccgccactcgtacaaaaaggcaactcgtacaaaagggcaacgtacaaaaaaaaattgatatatttttattaattagaatttcaattacataaaaatggtaaagaaaatatgaaaaatattctatctgtaattaaaatatatataatttaattttttttttctcaaaaatttctccatctccaccaatttccttctcttttctcaccagacccccattcttaccagtgcttattaagtgtcataaacataatttttatttcttgtttgatgcattaatcttccaaacttctatttatttgaagaatatttcattaaattttcaaaaaatcgaaaaattaaaaatttgatagttattttcagttttttggtcatttcatagttcgtttctcagctttacacacatcaaaacgcagaataattagccgagaattaattaaaatgctatcgctaagttccgggtttttcataaaaaaaattatattaaaaagaatatatttaccgattattttatcataattttatttacttaatgaattttattgaaacgtacattttttattactttcagaaccaaagtttcatttaaattaaataattttaaaaaaaattaaaattttagactgattaagattaatttaacattttttgagcttattattaacaaaattttttggcgaaataaaatggcgactgatacggtaacgacaccgtttttgtccgtccattactgtatgtgctgtggcaaattgcacaataaaaacgattcattggcgtgtgagggtgacatgttgcgcgaatattgggacgactatttacacattcaatgaatgtttttattaaatttgcaaattcgtgttataaaaattggaaatctttatttattttcttttaaaaatttcatttttctttttgcactgtaataaaaaaaatcaaaaaaaaatttcaatggactgaattttgactgaatattttgatggtttttcttttgcaaaaataaaatgttttgattatatttctatggttaattgccataaattttttaactgccattaaacggtaataaaaatccaataaattcgactataaatttatctctaaaaatgaataaaaatgaacaaaaaatactggctaaattcagattcattctaaatttaaccaaaagaaataaaatgcatattcttttttctctttttatgattaaataccattaattttaaaactttcataaaaaggtaataaaaaagccaataaattcgactataaatttatctctatagatcacctcatgaattttcatttttaagatgaaaaaatgaataaataacagaaaatttactggattaattcattctaaatttaatcgaaagaaacaaaatgcattttctctttttgagcgtcttttcactctttttggccaaggtttttttttattattatcaattaatttcttatgtttaatttttaaattaagcactgttcaaatgccattccgatcggtgctggtaaccaacgggatgtgcggcgatcaatggtcattgatcttcttaatgccaatcaagagtttgatcagttgcgaagtcaattggcgactgcatcggcaaatgatttgaacgctgaagacagggtttttggcgaccttttcaaaaaaattggaaacattgctggaaacattgggaactattttggtaagttttttattacattattagcgaaatgttcaaaaataaatcaaaaaagacaaatggaaaatcttttgcaacgtttcaaaaaatgaacttagatcgaaaaaaacctggaaatggtgaacctttacaacccccgcaagaaccaccacaaccaggacaaggacaatggcagccacaaccaggacagggacaaggacagggagaaggacaacaatatccaggacaaggactgcaacaaccaggacaaggacaatggcagccacaaccaggacaaggacaacaatatccaggacaaggactgcaacaaccaggacaaggacaatggcagcaacgttccttgctaccatctgctgcggattatgagtagcttttgcagaatgaccgttaattgatggcaattacataatttgctgtgatgagaatgagagaaaatgacaataaatgttgcaatcaaagatttgtgttaattgataaatgaaaagcatgattttttttttttttagaaaaattgccagaatatccattaccattgatatttcgtaaccccgccaaaggctcatttttcttagagaaattttttccgctgatgagttaaaaaaatcgtcactcaaggggcaattttttttttgacaattcagtatcaaaaaaattaagctatactaaaatgaagaaaagtattataacattataacttttgattaagaattagggctgtgagagaaggtttttaccgaggaccgagaccgagaaatgaccccgggaaacgatacgagaaccaagacccaaaaaaccagagaatttctcgactcgggaatcaagaaattaaaatacaattgattcaaatgtatttttaaaaataaaaattacattaaaaatggggtaggtcaatcagaatttttgccaagagtctggagggcgggggaggggggggggggggggtaaggggccaattttgcgagtgcttccaacaccgaattcgacgaacttttctgaacaaaatgagtcaatataactttttattactgagaatgtcgaatcttctaaacatttaagtcttcgagtttgctgatttgctgagttttattaacaaagaaaaagatagatttttgaactttgctgagactgagttggctagacggagttcacccaatattcacatgaccatggcaaaaaacatagcctgttcaatgctttattactttttttcagaagcaattagagtaaatttttctttttagaatttgaagtcctctatttaatgtatttatctttaaaatttcaaaaaatttcatagagtttcaaaaaagatcaggacaaaaaattccgacttaaggttttgtggaattaaataagcttaacttttttttatacttaatgtaaaaaaatttaataaaattatattctgatatagaacacctagatctattgaaagatatcacaaaaatttaatttgattgaatttgagccaagttatgaatttataggtcttacatttttttattttcctacaacttggcagtatttaagaaacgcccatggtgtcagtttttaagaaacgacctggcacttttaagaaacgcacccccaacccgcggcacgatgccctttctatttatggatcttatcaacccccgttttacgtattttaagcgcccgagcgagcttctttcttagaatgatatcatcatatcgaaatagaagcaattatttattaatgatgttgaattcgatacgatggagaaggctaaatagcctggggttttaatgcgcgaggagtctgtctggagtggaatggatgtaaaatggcacggatctgcacttttttctcgcaactcgatcctatgaaaatatggatttgaaaccgttgaatcgaaggcgattaatttatttatcgaacgatctcctctctgtttgtaatgaaagaattggcggcgaaaattctatttctaatatgcgaagcgtggaaaattccacgatagcgagagaagagcgactcgagaatgccgaaaaaaatcgtaagatgtctaaaccgaacctctgtgggagagatgcaccggaaaatatttttattattccgaatgatttttgtgcccgaatacttgaa

SEQ ID NO: 1314 - DNA, 2260 bp, Heterodera glycines
acgaaggagcaacttaagtgcatcatcctcgtgattgcacttcgcgacgagcaccacgatttgcgccaaaagtgcctaaaaatgctcgaagaagcaaataaaaacggcacgcaagtcacgctcaagcaaattgaagaggaattaaggaccattcagctggtgaaggacagcgcactcactttggcaaatcctcctgttgcaacccatgccattcacacccggccacaacagtggagggacccgaaaggcaaaacaccgcaacaacccaagagggccaacaatgcaaaggagcaacccgcgcgtccaccaaacaccaattatggcaaggcaagccgcggatcaccaacgcatccgtgcggctcatgtggagaatcggatcattggcgtacggattgccgattcaaggacgccacatgccataagtgccaaggacaagggcacattgcaaaggcatgccgacgcagctccaaccaagcgaaaaatcgcagagagcgatccgtccacactgtcgttgtcaaatcccactgcatgggaattggaaccgcagcaggccgctggtggcgactcacgttcatcatcaatggaattaagattttgatgaacatcgacactggtgctcaggccaccattctcacactcaaaacgtggaaaaagctgggttctccaaaattggacaaacccgacatcgaaacacggaactgcaatgaagtgccgttcaacatcgaaggaaaatttgtttgcgacgtttgccaacccaatcaagcacccaaaaagcttgtggcatacgtcagttccgaaatcaattacgatcttttcggactgccctggattgaggctttggaagtcatcccgcgtgaaatcatgcaccccgacatccacccaaaagctcaaccagccccagcagaaatcaacgccatggccattcctcagccaacccacaaaattttggatttggaatcgctcacaaaggcactccaggctgatttttcggatgtttttggccccggattaggccattgcactaaagccaaggcccatttgattctcaaacccgatgctcacccaatattctgcaaagcacgccccgtcccacacggcgccctcaatgccgtcaacgaagagttggaccggcttttgcagattggagccatcaaaccgattgagttcagccattgggcagcaccgattttggccgtaatgaaaaagaatggaaagacccgagtttgcatcgacttttccaccggcctcaacaattcgctcgagttgaatagacaccctttgccccggcctgaagacatttacacggccatcagcggctccgtctatttctccaatctcgacctccgagacgcgtatttgcagatggaattggatgaggaatccaaacacctttgtggaataaacacccaccgtggcctcttccaatgccagcgcctcccatttggcgtcaaatctgcgccgtctattttccaacatttgatggaccaaatcgtctcaggcatcccaggcgcgtttgcctacctcgacgacggcataatcgcctccaaaacgcttgaagagcacatttgtttcctttacaaactcttcaaacgaatccaggaatttggcctcaaaatccaattggaaaagtgcaaattcctccagcccgaattgctatttctcggccacgtcatctctgcgaaaggaattcgccccgaccccggacgatcagaagcaattcgccaaatgccgccaccacatgacttgagcacacttcgctcgttcctaggcgcattgaattattatggaaggtttataaagtccatgcgcgaaatccgcgaaccactggaccagcttctgcgaaaggacgtgaaatgggaatggaccgacgaacagcaaactgccttccaaaaggccaaagaaatcatgctgtcggaccttttgctcactcatttcgacccgtctcttccaatcgtcgtggctgcagacgcctcaaaagacggaattggcaccacaatcagccacatttttccggacaaatcagaaaaagtcattgagcacgcgtcctgcaccctcaacgacgcgcagaaaaactacagccaaatcgaaaaggaagcattggccctcgtttttgcggccccaaaaattccaccgaatgctatttggtcggaaatttactcttctcacggaccacaagccattgttggcgatttttggctccaaaaagggaataccgatttatgcggcgagtcgtcttcacgctgggcactgatcatgtcca

SEQ ID NO: 1315 - DNA, 6079 bp, Heterodera glycines
ttcaacgctgggcactgatcatgtccaatttcgaattcgacataaagtacatcaacacgtcatcctttggacaagccgatgtactgtcccgcttaatcgccaattatccccggccggaagaagacattttgataacaaatatctgcacagagacagattgctacatcaacaccatcctccaaactgcaactgatcaattgccgatcacgaaagcagaaatttcagaatggacgccaaaagacgaagtcctccgaaaaatttctgatcacaccaaaaacggctggcctcaaaagtgcaccgaccccgatatctcacattattttcctaagcgaaaggaaattttagagattgatggagttttgctctacggaaagcgagtgatcgttccgacccaacttcgtgaacgcatcatcaaggctctacacatggcacaccccggaattgtgcgcatgaaagccctcgcccgtcagcacgtgtactggccaggattggacttggaaatcgagcgtatggtcaggcaatgcgaagattgccagagcgcccaaaagagtccacccaaagcaccgctcgctccatggacgtcttgctcacgaccattccaacgcattcacattgatttcgccggtccctgttcagatggccactcctatttgattttgatcgactcattttcaaaatggccggaagtatacagaatggaccgaatttcgacaccagcaacgctccaagtcctccgatccattgtctaccgcctcggatttccagaagaaatcgtgtcagacaatgccactcaattccatgccgcagaatttaaggaattttgcagcgagtttggcatcaaacataccttcaccccgccgtatcacccgcaatccaatggccaagcggagagattcgttgatacgttcaaaagggccatgaagaaatgcgccaaagatggaaaattttgggcagaaaagatgcttctcgcctacaggacaaccccgaattcggcactcaacggactttcgcccgatcaattgttcttcggtcgaaggcttcgaactcagctgtctctcgtccatccgaaggaagaacaagccgaagtcatcaacccagccaaaatccgcaaatcacaagctgattatgcgcgaaaaatggcccgtcaatttgatcaacaccacggatcaaaatcggttgagtttttgccaaaagatcccgttttgcttttgaactttaatcgtggaaaacgattttggcttaatgggaccatcatcgaacgattggaaaaatccccgacgtatcgtgtccacgttccggcactcggaagaaacgtccaccggcacgcaaaccaactgcgacgccgttatcctcttgaggaggacggtaatgatacggtaaggatcccaccccaggctcaagaagagcaagactggacccatcgccgatccgcgagcctcctccgcaaccggcaccaattcgacggactcaggcaaagcgacgatctccgagtcctcctttggccccgcgtcgatcgcaacgccaacggaaagcgccgatccgcttctcgccaaacccctgagggttcagcttaaagaagggaggtgttggagtgttaaagaatttgaatttggcgcgcatcgattattgattaatgttgtgacgtgtcaatccctcccccttattcattttgtttatttaaacactccctccttccccacatggttccttctccattcatttgctattttacattttatattttgtactgcatttctcctccgacataaattgtgtttattattttattgtgtgtccaaagttgagacacaacaggttcattactatttttattctttagcctttagcaacgaaagaaaaatgaattgcaaattaattcaaataattaaatttttaagtttaatttttaataagccaacgaagtaatgacatgccatttcagaatttgttcttccatccatcataatttattaatcggttgatcaaaaattgttttggcacgtcctttgctcgtcctctcttttcttttccaagtccaatgtgccaatgtcgaatattttttgggctctgccgctatgaatgaattcgggtggcactttgatcacaaaaaggcgatggcacggctaaatgtgctttcagaatgcctttgtcgcctctcatttgtccctttcccccctctcactttaatatcgtccgcacagtcgtggattattcgcaattcgggctcaatttgactcaattcgcgtgtggtcccatccaaaacaaagcgtcctttgccatcggtatggcccaaaagtgaattttgcgattatttttattcgaaattcatttcatttgcgtggcacttgggccgcaggaattttcgcgcaacccccgcgccgtggcaatttttcggccattgcgctttttcctcagttgtcccccccccctttaaacaacctttgtccagtaaatcatccgaatctcccgggttccgatcaacgtcaaaaatggccaaattagtgtgtgctgcgaatgcgccgttacacaacaaaacgcccttaacgccaacgccttgaagccgaaaggaaatggcaaaagatggaaaattggacaaaaataaaaggagagaagggaaaggcaattgtgtgaagagaggaaacatcgaaagggaaaatgggaaaaaaagaaacaaattaattaatgggaaattaatttttaaggatcagctaatgaggcaatcaatgataatgggaaacattttgaaaattgcaattaatgaacgatatgagagaaaacgggcacaaaataaatggttgcctctcttctgatcagaaatcctttcaattggtggcattcgttcgccgctttgttcgtctcgcctctctctctctcttccccacactctttcctctcctactcgccaatgaataacagctgtttaatcgttttttgtacgttcaataaaggcaccgctaatcgaatcaaaaaaatcaaatttattgatagggaataacttttgatctttcgagagcttgattcttttaggggatgaaattttcatttatttatttttgttatgaaatgggcaaaatgtcaacaggggcagggaacctattttaggcatgaaaaattcaaaaataggcattttaatagccgagtcatagcgcaatttccggcaaataaaaaacactgtatgtgaataaactgatgaatacaattatgtccatactgaattctttcccctcatttgtcagtggactctgtccatactgaattggctgatcgcttcttcccccgtttccgcgtcattgtaaatgtataaaacgacccgaaatttgatgttttctttgtgcaaattgtcaatttgccattcttccaatcgccaatcgttcgtttctcttctgatcagtcgcactttctccgacgccgtcaaacttttggttggaattggcaattctctttggcggtgaaaagaaggaacgaagcgaatcgaagggaccattttttcagcgtttaaacctttggcggcatgcttaattagtttggacgtttaaaaagagcaaattgctcaattaatttgaatttcgacctcaatcagccgatcggtgaagtcgtcgccacaattgatcacccagcgagtgctaaatgcttttatgtgcggatttccattgaacaaaaggtggagcagttcatccgagaagatcgtcccgttcgctttgtccataatttccgtttggagatgtttcaaattgaattggacgtccaactgaaaaggccgtgactttgtcaattatcctttgaaatgccagaacaatcgcttttaatcctcacttggtcaaatggctcataatcgcagcagctaaacgttttgcatcggaggcggagaatttggtccaatttgttgaggttaagccattccaaaaagcgaggacaaaatttgggcattcctcgaatttcttcttcgaaaaacacttccgatatttgatgaagccaaaaaattaatgaggcggcattttgggcggtgacaaaagggccaatttgaacgaagaatttgtggccagagacgaactcgaacagaaggaaagtgggctcagtctcattgagaaacagcggaatttggccatccgccgcggggggccaacggagtgacgcgagccgagcggacaaatttggctgagaatttggtgggggaggggggggggggtaattaggtctaattagatgaaaatccactaaatgttctctaataattataaaaattattaccggtaattcgacgggaaaatcgctgagattatccgcgcggcagagagttttaagggcgaagaactgaaaaaggcaattgaccggcaattatcagatgtgaaatcacctcgagaaaggtcaatcggtagcacctgtgcaggggccaatacagggaattgtcgttgacaaatttgcaaagtcggcggtcggcgaattggagagagaccaaatgggcacgggggaggaatttgcaaatgtccaaaaggacttcgtaaggaaacatggccaagaatgagggaaatgaagcaaacgccaaacggaaacttaagagggcgagagggatttgtgggaagtgatgaaacagcgccggggggcaaaaggcaaaaagcaaaaagcaactgctggccaaagcaaaggatgggacgaagagagaattgatcaaacagcagtcaaaaccaatggatggatagagcatttatctgctgatccgaaagtgagtgaaaaccaaacaaaacgctgtgggggggggggtcatttgtcgtggaaagaaagaaaagaaagaaagcgtccgtccgtccgtttgatcgatcgtccgtttcaattttcgtctccgatttcgacatttgatttgctttttgtcctcctgccattcaaaggtatgaactggccaaacttgagccgagaaagctctgagccgtgacgctttgctgactcggcgagtccgaacggatggttttcgacttggaccgtgcgcgcgaacctcgcctttgactttggcgcgactgcggcatcggcgccggacgcacgggaaagtcgtcgttcacttcggcgcctaaaaattaatttcatttgaaggaaaaagcgaagggaccaatgctctgaaccatttaccgacatcagacactcgaaatataaacataagctaattgagtgatcaatcgacaaattaaacgggccaaacggaaaaatgcccaaaattaccgagcatttgcctttggacgagttgtttgtacagtccctcttgcgcaatcagttccctgtgtactccctgctgcaccactcttcctgcactaaccaccacaattttgtccgcattttccacggtactcagtcggtgcgcaatcaaaaggacagtccgtccttaattttgcttaattatgccttccatccttaatttctcttgggcttttttctccttttacaatgtcgtcccaatggcttttcctttttctgcgcacctttcaaatttttttggattgcttcttggacaagatgttctgattccgaatccaacgctgaggtcgcttcgtccaataaaagcaccgccggctctctcaccaaagctcgagcaatggcaattcgctgtttttggcctcctgtcacggcaaaattcggaatgtcttccgaatgctctctctcaccagacatttgaccgcccttctctcccacgtccgtctcatagccttgctgagtgtccataataaagccatgcgcattggcatgtttcgctgaccgttgcacagcctcaggcgttgcgttttcatagctatttaatcaatcttccttttattttccattctctttttcttttccgataacacaacttcaccactcctctcccccatccctccgtctccctccccctcctctctcctctcccctccttccctcctcttctcccctccttccctccctttctttcccttctcccctccattattctccctccgttcccccttctctcctttacctccttccccctctcccttcctctcttcatccccttgtctctcctcttcccttcctactcttctccatcgcacttttccccttctcttcttacccctcttcc

SEQ ID NO: 1316 - DNA, 1597 bp, Heterodera glycines
attccgtccaagcagcacttcgcccgagtcgggctcgtaaaagtgttcgatcagtccgatgcacgaactcttcccactgccactggggccaaccaaagcgaccgcttggccaggctcgacagtgaaggaaaggtcctcaagagaggtgatcaaatgtgttggaagctgtccgccgcttacgtttagcaccggcacattcggtcgggtcgggtaacgaaagcgcacttttctgaattctatgcgcccctcaatttttgcattgcgtccgtccggcgcaattcgcccgtcattttgcaccaacggacggcgatcgatcaattcgaaaactttgcgagacgcgccgaccgcctgcataagtccgttccaaacttcgcctaattccttaataattaattcttcacttccttttttctgttctgagttaaactctgaggttttcgcccaattggaattggtagagcataaaggagacgagcaatcccgagctgatctgatcagaaacaaaggctgattgatgaggggccattgacaactctttcttatgacacaatgccaaatttgagtggcatcggtctcagagaaactcataaaattcataacggcatggacaaacctttccttggatgaccaaatgtcctccgtagaagagtaccatcgtgaggattcccatttggaggaactgaaacaatgccaaatgaatttccccaattagcaggattaattgccaaattgattgcccaattcgccaagtaattaattaattaattagtctctgccttccgccactttgactcgcctctgtggtgagaagaaagccgatgtgtgccacagcttttcgcgctccaatgccgagggtaatgttcaaaaagctgaggaagcgaagcgactcgaaccgttcgcaggcgaaacttttcaccgtccgaatggaactgagcacttcctcggccacgtcgttggaatttgccactgagtgctgattttcttccgcaattcgcttaattaatcaattttaagctttgaattcttttttggatgacttacgtcgtaataaacgccaaaaactttggaaatgagaaaaataattggcacggcgatgaaagtgataacggagagacgccaagagagagaaaacatgaaaatcagagagccgaacagcatcacaatgttacgactgaagtgatccattggagtgatcagacaacagagacaaactgaccaaaacacgttcatgtacaaggatagagtgttggacattgtctgacagtcggcattcagacgagagcaaatctcgccttaggggaagatcggtgagggtacggtaataagtgcatgggtagggaatgggagtacggtcattgggacggaaaaacaaaactaagcaatgggtaattaataataatgacctgttttatttgcatcgaaaaaaccgatctaaaagagaatcttttcaaattgcaattgcctttcaaatgggcgccgacctcttgagaaacgagcgatcggaacaaatcgctgcgaatacggcgatcgattcgggccaaagaatagcaaaagaaaccgacgcgaaagccagcggaaacggcggcagacaatgaca

SEQ ID NO: 1317 - DNA, 3435 bp, Heterodera glycines
gtaaccgaacagtcgccacagcatggccatcgtctcgcgcttctgcgcgtccatttcgctctcgcgcttttgcatctccgcgaagtattcgttgtccacctgctcgaacattcgctggtgccgcacgtcgccgcgcgtgaccatcgattcgcgcacttttgcgaaaacggtcacccaaatgccctgaagcaattgggtgtgccgaaaaacgatcggccagggacctggacaaaaagggcggcgacgatacaccaaaccatcaaaatccaatcgccaacggcgaattgcatctcctcgtgttcatagaaagcgagtaattttatgggggagaaggcgacaatgaccaaaacgaaggcgaaagtcaaattggagaaggtggcacacgcctcggcaccgccctttgggttgaaatatacgccaagggcaccgccgagaaggacgcaaacgcggagaatggcaacagcctaaggcattttgggacgcatcgagaaaagcccccgggggacagaccaaaaaatccacggggttcagtgtgaagttataatagcggaagtcgaaccagtggtaaatgttatcgatggtgaaaaagcgaccatcccaagccaagccgagcacctgcggggaagtaaaacgatgatggaaaattgaaattagtcttggcattatcacattgacgagaatgtccagacaggcaaaacagcaagccaagccaagggcttgcccaggtgagtaccaagaggatgactcgaccatggcaagtaaaaatgggaagaggacaagcggagaaaaacagcaaaaggaagaagctgcggatctgaggaaaagcgatcagacaaaagagtcggggcggaaagtatcaagcaaaagaaagaagaaaagtgatcggagtgatcgggcaaaaaagtcgaatgtttcggtgcgcccattccctccacacccaaaatattcccctccttcgacctctcaattttccgttgtccgtcagtccagtgaatgaatcttatcaaagaaagacaaaaattagggggggggggggtaattagcaataaaatggcgaaggaaagacgaaaatatttgggagagaacaaaatagtacagagatgagaagagggaggggacaaactgataaaaaatgacccaaaaaagaaaatagcgacaaaaaatatatgaagaagccaaagcatagcaaaatttgcaatttaaacgcattttaatggaaaggaaattttcatattttttgatcactgatcaaagccatcgtaactaatgatcactaattaaagctatctgactgttcaatcgctaatcattcacgcatttaccattcactcaaatgttctcgacccgagtcggggaacatcgcgaaattgggacagaattgggaagcgctgaacaaaagcaatgggaggaaaaggaaaaaagaaataaatggccgcgggcaatgaaacattttgagggaggggagggggcgggaattagagctaaaatgtaaaattagcagagcaaactgcgaattgtaagcagcgaatgacagccaaagcaaatgaggagagaatgtccaattggacagcccaataaaaattagaaacatttaatatttcaaatagtgaaatagaaattgaaatcaaaattcaaataaaatagcacaaataatcggtccgctttttcctctcattcttctcaatattcgccgtatcctccgcccgttccccgtgggcagcattcgtacccacaacattcctgaatttttatacgcttttaataattgactttttgagttcgattccccccccccccccccctctgagttttgccaaatttcgacaaagctgtgctatttattgtttaagatgagttgaatttgtctcgacgtaacctcgtgcatctcgcaactccacacgatctccttgggcctggtgctgtccggcatgtacacttggccaagcaccgggtcactcgggtcgatggccattcggcacattgtgcgcgaggccatgccgtggcgttggtggtgggacgggtaatactgaggccctaattggcaatgcgtttggtatttagtgtggtaatgccaattgcttattaccccagtagtattgccggttgttccacctaaaaaatgacagaataatgcaaaatttttgccaattgttgcgaagggttggcgatgccctccccggaaactgacatcattggcgccgccacattccgaatgatcgctttgccggccttataagccaagaaaccggcagctgccccgacaatcatattctgttaaatgggaattcgtaatggtctcctgctttaattaatgaatttgacctcctcccccttcctctttttaccccttcccaaaatcactctttttaagtggtgccatagtccccttccccctcccatccgagtgccctctcatccaatggatgccattcttcccccgtgcggcgcctcactttgaacgtgttcgatcgtgagcgggagcccattccgctgttgcggaacatcgatgttttgtagcctcctcctcctccacccaacccgcgatggcgagaacggctcagtcccccgagaagccccccaccggcgacgccgcgtccgaccgcacctcggccaccgccccccaaaagtcccgcgccttttcccccgtatttgcctgtcccataacggtcataaccaccataattatgccgatttttatgtccaaataatcttccggttattcctccgcctctgtcacgtccatagcctcctatcgggtaatttgagccggaatttcgtccaagagcggaagaaatccttcaaaattcggggtaattttcgaattttgggtttagtaaataaaagtttaagcgccaaaaaacaattttttccatttgatgggatttaagcggtccgatcagaaataaattaagagccataattgacggatgagtgattggcacctgctccgtatcgaagttccgcgcgacggcgacccgcccctgccaaaggacgaaagaaaagtaaagagacggaccgatccaatccaattcagatacgatggaaataaaaaaatacgtaattgggcagtacagtaagcgatggtacactagtcaagtgagtacggtattgcccacctcccataagtgccacttcgcttgcagacaacaaaaggctcggcaataagggcgaggaccaaaatgagaacaaagaattttttcgaagaattcattttgaaagaaaatgtcaaattgcttcgaaaatttaatatttgggatgggacatcaaagggaaggaaccgacccatttgagtcgccgtcgacgctcttctgatggaggaaaggcaaggaaagccgaaaagaaaatcatctgtcgatgtgatacatgtcaaattgcaactaatgataagttcctcacctattgaaaccctgagatatgactgcatcaagacctgca

SEQ ID NO: 1318 - DNA, 2873 bp, Heterodera glycines
  unsure (1)..(2873): unsure at all n locations
cccccccccgggggggggggggggggggggtgggggctcagttagatacgatagcatgccaaaagggaaacaaccacagccaaagaggaagcagttcatatgtgaaaaggaatttgtggttcattaaaagggaatcgtaatggtgacaaatcatttcattgatcaatttgcaccccaatcgaattttgtccaatttggctgttgcgatgttgacgttgcgctccactgctgcagagactgcggctgatgttgttgttgaagcgcgcttagtgaagaaatgtttggctgcaaattggcgggtaccaaagacggagtcgaaatcaccgaacgttgaaccgtcggttggccttgggcggctcgaaaaagcgacataaggtcatcgtaacgctccttttcccggttaagctccctcttcagactttccacttcagtgctgccaatgaacaaagaaattaggcaatttttaggatttaaattaacactaaaaatcgaattttttttgaatgcgtattcaaaaaatactttttttaagaactaacaaggtgttcagatatttgcttgcaaaagcagacatttgggattttgcgcccgatttcgtatggttatattttcggacatttgcgagtttaaatgaataaagagctaatgaattttaacaaagccgcaaatattcgggacgcaagtggggggtatccactagcaatgccatgtactaatccatttttacgttaattccgcgtttcgacgttccaactcaatgactaattgaggggacgggtgagacggtgcggttggtgctgacgttggagccatctgtccgggaatcgttgcaaacggctgattgtgagcaaaagatcgtttggagggcggtgcaaaatcttcactgacgaactcgtcacctcttcgtctgctgagttgcgctaaataaatgaagttttgacaatagattgagcattgctacagacacatttcctttttaaaataattttattaagggcatcttccagtggcattaatttgggttaaaatgcgctgttttcactgttaaaggttcgacctcctgccggaggcaccgccgggtaagcgccgaacgcaagcgacgaaggcgaaccgccgcagttcctgccgccgccaaagcgtttgcgtcgctcttcgtcgcgattgatatgccaatagcgacattgcgggccgcgcgcgcagtgtccattttggaactctttgcaaagcggaattccatttatcgtatcgcctttcaacagcgctgccaaagctcgcgccaacccaagcgtcacgtcgccgctgcgcttgtaacgatcgacatcctcgcgaaacgcgtgaacataacgacaattttcgcggtaacagccctggttctgaaattgcagcataaatggacttttagccgccaccgcagaaagtgaaagcaaatattcctatttatgcgcctgtccatttaaggaaaaatcttgagcgaacataatagacagatagtaataaataaaataagtgatacaattatttagtcttggtttgagttaatcgaactttaatgccaatacggcaatcctgaagaatgggtgttcctaatttaacttttttattttgggctcaaaaccagataggggttttaaagggtgctgattacggaaggggttttaaagggtgctgattacggatcttaactcggattttcccaattccgaaccctaattcgaacaaaaaaatgaatgtttttttcaataatgtattttttgggtaaaagcttctaatacattaaaaactatttattttgatgtaaaacaatgcttcaattgttaattggaaaaatatgcaatttgcgctaaaaatttgaccgattttaacgtatattttggaaaaaaaattttcaactttttgttcgaattcggacccggggttcggaataaggcaaatcagagttcagattcgtaatcagcatcctcgaaaactgattttgagctcaaaataaaaaaaagttaaattagggacacccattctccaggattgccataaatacgaaccttcccaccctcccaacactttgttatggcaaccaacgttatggcaaaaattgaggttgctgggatgacaggaaaacgagtacaaattatcgctaatcgactataaagttttgcgcaaaagcaattaagagaaagaagcataacaaacctgaaaatcaatgcagaactgataaggctcatccgccgagttttgattcttttcgacactgtcttccggatgataaaatttgcatcgattcccctcaaatatttagtgtttgatttgtaataaaataaaagtgagagagaacataccctgctgcaaatattattcagaaaatcacggcagatgtcctttcttttggctgcgtctttactgtcgccattggtcccaatagcgttgttaatgtggtcatcgtgagaaaaatcacgctcatttgtcatttctcgaaaaacctaaaaaaaattataaacgaaagtttgacaatagataatgttggaatagatgatggacaaacgctcccaaacgctccacagaaaacacaactcaacagcacaacacacatatttttttttgttttattttggaatgaacattttgccaaatttttattttttattaatttttcagttggaaagtggtttccatcttttgttttaactttccttttggttctttaagcatttccttttgttacacttagagatcgcttgactattcgcaagaatgactaaagccgaacaagctgcggaaaaaaggagaagagttgngaaacccatgagagattaaagatcaaaactctgtctcacatttgcgtcggtgagtctggtgaccgtctcactcgtgctgcaaag

SEQ ID NO: 1319 - DNA, 971 bp, Heterodera glycines
gcttttattgtctgcagtcaaggaatatgagcttaccgcgagaattttcggacactggcattttgggttcggcattcaggagcacatcgatttgggcataaagtacgacccgtcgattggtatctacggaatggacttttatgtggtgctcggtcgtgctggtttgcgggtggcaaaacgtcgacgaatccaaggacgaattggcgcatcgcatcgtgtgcaaaaggaggaagcggtcaaatggttccaacaaaaggcaattattttgggttaagtgggactaaattgcgtattttttacttgacttaaacttacccatctaatggaaattaatttttgttgtaaatctcacccttttcagtatgacggtgttattttgccacccaaaccgaaggaatcccgtaagggtggtcaccgcggacgtaagcgctaattttggatcgttttgttgaatgctattttcccttgttgataaattactatttgttgaatttggtacagtaaatttcttattatttgttaaagttgacaattttccttaaatacatcatctttgtttagccaacatgcatttcggtaaactcaaaaattaagattaattcgtgttaacaaatgatataatgaagcctctgaaaattgacgtggatttcccctcgaatagtcatcccacttcccaagaattaaaccaagattgtattcctttgtacgaaatgcttgaattcgaggaacttcaattcccaaactattacctttccgaacaattgggaaggggtgcccatgcgacagtgatgccgtgccatttccatgggaagccggcagcggccaaacttttcaatgccaacgtggacttcaaaacgatccaaaaggaggccaagctgttgcacgagtttcgccatgaaaacatcatcgaattgtatgttagccgaaatgtgtgacactttgaaatggcaaatagaaaggtacgctctttt

SEQ ID NO: 1320 - DNA, 2880 bp, Heterodera glycines
atgttggagtccctatgtcggatcggagtccccaagtatccggggtttccaattgtcgggtcccaagttataaatccctaaatgtcgttttgcccccaaatgcccaagtcccaaatgtcgaagtctccaagtttcgggatgtccaattgtcgggtcccaagtcacaaatccctaaatgtcgggtagccccatctgccgacaaatctgtatcccaccaaaactaattgatgtattatctgactaattaatgtacccaaataaaagggggatttgatcaattgtagggatatcagaccacacacacacacaccttgcgttcgattcttgaaatatttttcataaaaattcgcatttgacttttcttcgccttcatttccaaactggcactcacagtacacagcgggcaattgtgttgcatttttcagtttaacttctatatcattacaaatgttcaccttgtcaattgcatgcatacagtccaattggattaacttttctttaccttaaaattttggaaaaaaatcatgtagttgatgaaaaattattgacaaaaaatcaatgatttccaaaatctgagctaagatccgtgatcagcgcattttttaagcctagaaaaaatacgtgccaaatttttaagaattttttttttcgtcgggatgacacgggatttcggattctgttttccgacatttttgaggtcggaattccggtttccaaaattttttatgaaaggtcggaaatttttttttttgatttttttaaaataattaacaatttgtgtacaatttctgttaataaattgcactgaaattttaaaatttattatattttttcaaaaattttcgatttccgacgtttttggggtcgaaattcagaattctgagttccgaaaaatttttgggcctcggaatgccatccctaatccgtaccatccggtgagctgcatcctatgccataacacatggtcatgtctggagcaccgcaataatttccaagattcacactagggtgacggatgttgtcagggtccaacgtctgtttgaacttcatcgaatttgtttccaaaaactctccgcaactgaaagcgccactgaaaaattttacaaaaaattgaaaatctttttttttcttacggtaaaagtttggaattttaatttattttaatgtttgattttttgtttcactcttagtcttacattgaaaggacaaagttggcgaggaaaagaaggacgttgaagaaattcattgttttttttgttgattttttaaatcaaaaatatttcgatgtggcaatgcttaaaataaattaggaagaatatatgtaagccgaacaaagtttaatgaaaattgtttactagtaattagttaaccacatctcattagtagaaacttagccaggcctagtcgggattggcaaaaatgccctggttttgggcgcctgtttgatagcgaaattctcgacagaacagcaaagtgcggttaaaatttcgcgcacttttgttaaacggatttactttggggaattaatcggaaaaaatatattctttaacaaaaattaatgagatttgtgagaaattgaaaatcacataactataatcaaaatttcatctatgaaattaagtttattatctccaaattctccgaaagggtgtcaccgatccccgacaatttttcgttcgccgatcccggacaattttgagctgcttgatccacgagaattttcttgcccaaggggccctggcttaaccctaggattgagtatcgcccggccaaaaagtggagaagttatttttgtggtataggcaaaagccaaatgaatgcacagagaaacaggaagcactttgtgatcagaggtgattcagagaatttttgtacattttcattactaattattctcccattaacaatttgtccatcaattgaccgataaattcactttttaatgcactaaaagtaatgattattgttcattatttatccataaaattatttcctggcaaaaaaatttattcggaaaaaaggaaaaaaattcattaacaatgcaagcaccaatttgtgtggtgaaatgagaatgaaaatgatgtggttaatgctaaaaaaagaataaataaatgtttttttggtaaaaaatattattttgtttcaaaaataattttttatatacttttttttttttactgaaagctcggtttgaatctgattcattaaaaaaaaaataaaaaaataaaaatcgtctcttttaattgttaaatttaaaaaaaaaattccttttttttcattttcaaactctgttcaaatacaaaatcctatttttgtcattcattttccgtgtgcaaaagattattcgtctatgttgtgaatctgtgtatggcggaaataactcgcgagaaaaaagtagaatccggtccatacggtataaggaacggtacagtaacaggccacttcatcaattttgtagaaagctaaggatgtagttacagctgtgcaaaggatgtaggtatagaccaaaatctaaatggaatttttatatatatagatattatttatgtatgtataggtaatataaagtagaaaaattattttattttattttactttacacatttcatattttcggcgccagaccaagtttttgggctatcactttttttctttataaccaaatctaacattcttagtatcattagaaagcccttcacatgctctattagatttacaaaaagcaaaaagatttcctagcttgtaaaaaagatttataaagaaaaaacttaaaaaatttcgatttttttccaattttaaatttataacttttttggtaattcgaatcgagaagcgatagcttagaaactgcttttaaacatgtagagctttagaatgata

SEQ ID NO: 1321 - DNA, 928 bp, Heterodera glycines
ttttaatggtatttttgggccacagcttttaaaatattaaattttttttaaatttctgaggctaataaagataaacaatcaatggccggccacagaattacaccaaagcagattcatatatatatatatatatatatatatatatatatatatatatatatatatatatatatatatatatatatttttttttaatcataacctcctccgttttgatagacaagatgggcggcataaccgaatggaacagcaagagttaggtcaatggcggtgaagatgcgcgggtccatccacttaagagaggagcttccctaataaacgaaattatagtattggtcacataggagggatatactgaagtgtcggggtcggttttggcacggaaattattttaatccattccttaagccataccgatttaaagtttttaggtgttttaggcatattttcaaattttttgaaatcgctgaaaaatatattggaaaattcctcaaaatgacgaaacaacacaaaaaagcactaaaatgccaaaagcacgaaaaattaaaaaattgagaaagcaacaatataagcaggaaaaatataggtttaaaagcacgcgtttttcatgccgcttagctcgaccgaaattagcattacctatttttctacctattttgagattttttttatacttaattaatagggcttccttttttaggcaaatgcctaaaattttgcgcacttgatatgcaaaaataagcacgaaagacgcgttttccgcttggttagagatatctacaatgacctttataatgcctaacttttcctattttcgggttttttgtgcctaatgtgcctattttaaggtttttgaaaaaatctttaacaaaaatgcaataaaaacggaaaaacactccccccaagaaaaaaccccaaaaaaaatttt

SEQ ID NO: 1322 - DNA, 2236 bp, Heterodera glycines
taaaatttttggtttaaaaaattgtccttatttggataaaactttaaactatttaataaatcatttacagttgaaatatattttattaacaatatattatttgcgcatttttcattggctttgcacaatttcaaacaatttcgccaattcgaaattctaaaaactatattcggggtgaacgtatcattttatgtctcactgtactgtatctcaccttactgctgaaggcctcaagatcgcgtcgatggctggatgacatgacaaaagccggtaagactggtaaaagtgaggaaacaattgcgttggttgtactccagaagaaagacattttagtagacacactttttgggaagtttcaatattaattaatacacaaaattaagttaagttcatgaaaacttcaacttttcgagaatttttttaagtgccatttatgctataacttatgttaaatttggtaattttatttgaagttacttttgcaagctaatagagaaaaagctgtactatcgaatggtaaaaagaatgtagaatttgattgcctttaagcaaaattatggcatgtattgtcgaaaaaactaaaatggcggattttacgaaacgcccaaggtgccggatttacgaagtacgcgaccaagcccaaccagataaatataaatttatcgcaagattataaaattattgaatgaagagagcaaataattagggtagaaatgcaaatggggcggctactaatggacgctgtgtgtgacagctgtcccaattttatatccctctcggcaacacaaaataaatcaaatgcgaagcgcaaatagatgcgccgccaggcacgacatttgtgagagctaaaagggctgtaaaagtgcaaacattttaggattatttgatagcctttggtaatttcgaatggtgctaggtcgtttcttaaaactgccagggcgtttcttaaatactgccaagtgggcgtttcttaaatactgccaagttgtagtaaaataaaaaatgtaagacatataaattcgtatcttggcccaatttcatccaaattaataattattggtattattcaatagcattaagtgttgtctatcagaatagaaattttgaaaatttttttacaaaattaaaaaaaagttatggtcataaattttcaatgaattttcagtcaaattattttaccagaacttttttaaaactcgatggaattttttgaaattttattcataaatagagaattcttaggactatcgaatatataaatttattttctcttaattgcattttaatgccttgaaaattttaattttttctggacaaaaaattccgacttaaggttttgtggagttgaataaccatatctttttatatacttaagtaaaaaatttaataaaattatattctgatagagaacacctatagctattgaatgataccaagaattattaatttggttgtatttgagctaagttatgaatttatatgtcttacattttttattttactacaacttggcagtatttaagaaacgcccacttggcagtttttaagaaacgccctggcagttttaagaaacgcccatcgtggcagtttttaagaaacgacccagcacgtccccgctggtcctccgtcgtcacagtttcggtgtcactcggcgaatccctgccaacgctatgccgggggaggtcgtgtataaaattcttaattctgaaagagagttcacacattcgcaattttttgcattacaagagatattttattttatttttacctcttttttgaagaaatttttattaaggggagggttatgtttggatccgggtgtgtcgcgactacacgaaaaatagaaaaattaaattaaaaaataaaaagcattaaacccaaaaagaaaatatttaaattaattttaaattagagagacaaaaattaattaattaaatgtgaacgaaatgaaggaatgagtgaaggaaggaaaattattagtcatattagtcacaatttttccattcgaaaaattgtcaaatgttaaaaattaattatgaataatcgcaacgttaaaagaaataacaaattataaagaaatgttaaaatgggacaaaatgtgaatgataataaagaaattgtaaaatgttagaaaattgggaaatgctaaagtggcacaaaagagaaaaatgagaaatgttaaagaaattggcaaatgttatggacagaaattgggacatgccaagttggcaaacac

SEQ ID NO: 1323 - DNA, 3235 bp, Heterodera glycines
aattctacaaaagattggtccgcaaaaacccgaaaatggtccgtaagaaatgggccgcaaatgtcagggatgcaaatgtggggtaaccttcatagcaaatgcgaagaaagaatatgcaaaagcatacaacttcgaaccctagttataacatttggattgtcgtcaaaaataataaacttggtatgatttgaaagcagacagtccctattttttattcgttatttttgtcgttggcttataatcgttttaataaaacttgataatagtagaaccaaaaaaggcaaatgcaatttattgggatattgccgaacaatttactttgatggtctaatcactacagaagcgatggaaaagtcaattcaggcagcccgtctggctaagcgtttgagccgtctcccaacaattcttcgacatcgcagttctgctggtcccacggggcgtgaaggccgccctggttgcatgcccacacctggcagaatgaaaactggttaatatctgaatgaatttctccgccatttttaaatataatttttataaaaaattcttaattcagaaaagaccggcggcggctgtgcgccaatgcatgcggacatgcaaagcgcccacgctggaagaaatggaaggaacggcagacaggctgagggacagccgagtatgcagaacggcccaaatactggagggcaagctccaacaaacatctgtaaaatcaagattataatcatgagatgcaggaaaaattggggcagaccccgccccaacctcagcctttagaccagcccaacaagcggacacgcacaactccgagtttccacaggcagccaagcagatgtcgtaagcggttggcgcccccattgagttatttgataccaataagattaaaaataagcttaatcaaaaatcattgccttattaccgtagaatttttattggattaaattttgtaacttacattttgttcacagatggcatttcctaaataatttaaaaataaaaataaaaaagaaaaattaatgtaaatgggcatgagaagcaaatgattgcttttataaaatttttttgacaatttaaataaaagaatgggacaaggctgctgctgtgctgattgaaggcaggcgttttctgtcttggccacaaaaaatgtaaaaagttatgcagcccacaaaataacgacgaaatttgattgaagagtatcgttatcgcataaaatataacgacaaaatttgattgaattgtcgtttatcactttttcgtacaattgcaaagcaattttcttttgtcagttaatgaatgaattcacatttttaattgaatcatcaatttccaaatcgttaatgtttgaccaattgatcatttttttatgaaattatgatgtaataatacaaaattatgtgtttcaaacaatctttcatttaattttttctagcattttgaaatttttatgcaataatttaaattttttataattatagttttatgatttattgaaattaaaattcattttttatttaaaatctattttcttttcctttttttgattacaatttaaaaaataataactgattacatttaaacagatttttaacatttttttacttcctcttccgggataataaactgtgataaaatggattacgaaaatccgtaagaagatattcggacctattggcccttgcccgttcgtccgatcatttatttacccgtgatttcctaaaaaattaatttttttttttttggttttaaaatagaatgccaaatatggcactgattagggatgtcaaaacagcaaaatatttttttcccagatttcactccgcgaacggcctcagtccggaagtgaaccgggtggaagcagttcgcatgttcagtgtttgcagtgcggtgaatttgtggcctccatttactccagtcagctaactaaccacatgaacacaaagtgggatatttttgcaaaaaaaaatacagttatttttaactaattaggcctacaaattaccccccccctctgatttaggcatttgcatatggccgtttacacgtgccgtctctgtggccgtgcctttgaatcgttgagcagttcagcggccataatgcacgtcaaatcggcccacgggcggggccgtaatgacgcggaggcggaaattgttgatcaacgtgacgtgtgcttgaaggagctcaataaacgctatcggaccttttttagctgattttggttttgaaaattgttacattttatttttggataatttaaattaaaaaaatttaaatgcagcattttgtcattttaaagaatttaattataaataaatttaaaaagtaaaataatcattaaacaccatttagttaattgtatttgtttaattaattaatttgttgattaaaatactaattgattaaatatttattttccaatggtaaaaagattacgaaataattacatttgatcagaattagcaaaataattagatagtgcataccccatttgaccatttgaagggtcctataacaaatccaggagacatatgcttataaaaatccactagaattaaaaagttacttaattatgcgccaaaggctattttttattcgacaaaatgataatcaggacacagatttatttttgctaaaaaacaaaatatgtataccatatacatatctatgtatttgccaaaaaaaccatctaaatatttgctaaaaaaatcacaaaaagaccaaatattgaaacaaaactgtataataaatacgtgaattgaactcaaaaaattctcaccaagattgttggatttagatgaaaagggtgagatctgtttttatttctaagaaatgttctaattttgggtagtggctgctagggatgtgcgagagtctcggttcctgactcgggaaattttccgggtttttcgcttcccggcctcggttcccgatctgggggtttttagtctcggaaaccgagaaatattcccctaagatttcaaaattggaatctgaaatacccatttttcagtaaagtctgaaaaaaatatcaaaacttccattttttctaaggcggctcctatcgcggtaagggatgaactccgtctttttttctataaaaatggcctttttgtctaaaatctgttacataaaaaatcgcacaaaaaatccaaattttgaattttttttaaaaattgacttaaaacaaaaattggtcacgtttagacaaaattttctacaaatcacactcaaattgccaaaaaaa

SEQ ID NO: 1324 - DNA, 1897 bp, Heterodera glycines
gggtccaatgtctgtttgaacttcatcgaatttgtttctaagaactgtccgcaactgaaagcgctctgaaaaattttacaaaaattgaaaaaatcttttttttcttacggtagaagtagggattttttattattttaattttatttttattttttgtatcgctgcttaattttacgttgaaatgacagagttggcgaagaaaagaaggacggtaaagaaattcatttttttttttggtttttttatagcaaaaattgttttatttaatctagcaaaccttaaaagcaattagtaacgattggatgtaagcctaacaaaattgataaaaaaaatttgttaatagaattagtcaaccacatctcattagtagaaatttgtgccagataaaatatggtcaatcggcatttaattgggaaaaattgggcacataaagctcaacatgcttagccaggcctagtcgggattggcaaaatgggtgcttgtttgttcgcgaaaatctcttcacaaccgcaaggtgcgacaaaatttcgcgcatttttaaacggatttattttgtggaattaatcggaataaatatttttcttttaagtttattatctcccaatttcttcccgaacgaggtgcgatcaattcccgacaattttacgctccctaatcccggacaattttgagctgcttggtctccgagagttttcttgcccgtggggtcgtgacgcttaaccctaggtcgagtatcgcctggccaaaaagtggtgaaaatatttttgttaaggcaaaagccaaataaatgcacagagaaacaggaagcactttgtgatcagaggtgattcagagaatttttgtacattttcattactaattattctcccattaacaatttgtccatcaattgaccgataaattcactttttaatgcactaaaagtaatgattattgttcattatttatccataaaattatttcctggcaaaaaaatttattcggaaaaaaggaaaaaaattcattaacaatgcaagcaccaatttgtgtggtgaaatgagaatgaaaatgatgtggttaatgctaaaaaaagaataaataaatgtttttttggtaaaaaatattattttgtttcaaaaataattttttatatacttttttttttttactgaaagctcggcttgaatccgattcatttaaaaataaataaataaatagtctctttttaatgaatcttaaatttaaaaaaaaatcttttttcatttttccattttcaaactctgttcaaatacaaaatcctatttttgtcattcattttccgtgtgcaaaagattattcgtctatgttgtgaatctgtgtatggcggaaataactcgcgagaaaaaagtagaatccggtccatacggtataaggaacggtacagtaacaggccacttcatcaattttgtagaaagctaaggatgtagttacagctgtgcaaaggatgtaggtatagaccaaaatctaaatggaatttttatatatatagatattatttatgtatgtataggtaatataaagtagaaaaattattttattttattttactttacacatttcatattttcggcgccagaccaagtttttgggctatcactttttttctttataaccaaatctaacattcttagtatcattagaaagcccttcacatgctctattagatttacaaaaagcaaaaagatttcctagcttgtaaaaaagatttataaagaaaaaacttaaaaaatttcgatttttttccaattttaaatttataacttttttggtaattcgaatcgagaagcgatagcttagaaactgcttttaaacatgtagagctttagaatgataccaagattgttggatttggatgccaaagaaaaaagttaaagcccaa

SEQ ID NO: 1325 - DNA, 7144 bp, Heterodera glycines
  unsure (1)..(7144): unsure at all n locations
ttcaaaaatttttactatgttatccgcttcgaccatgttcctcccgggaccccacgagaagtcggtccgggagttttcccactccaccatgaagtatgtgaaggtctcatggcagacctcacattctacattccaagggcctaaaaaattttttttgttttttttcaatttcttttttaaactcacccccggttattttattgatgacgcccttcaccggcctataagcctttttaaacagttccatattccggcgtttgagttccatcatagccggtgctagatgattgcctgtgcagttcttaatttgctctttgcgggtattgagctcccgattgcgcttgaggcggcgcttttcatcttcgcattcgaagcattcgccgcatttgcacaacattttttaaaaaatctaaaaagtttttttaaaattatttataaaaaaaaatatttaaataaaaatcgtacagcactgaattatgagataattaactttcccgttctctcctcccccctctttcttttgcccgtccagcaattctctgacctttctcatgcattaatatttactgaattgaattttgtctaaatatttttcatcattcattcattcattcatttttatgttttttgttttgatattggcttggtgcgctagtgcctggtcgcggcttgtggcctccggccttacgcttttgcggtgaaaggttggacacggtgctagtgctcaaccctgtgcttggggttggtgcgctagtgcctggtcacggcttgtggcctccggccttacgcttttgcggtgaatggttggatacggtgctagtgcccaaccccgtgcttggggttggtgtgctagtgcctggtcgcggcttgtggcctccggccttacgcttttgcggtgaaaggttggacacggtgctagtgcccaaccccgtgcttggggttggtgtgctagtgcctggtcacggcttgtggcctccggcctacgcattaaggcgaatggttggatacggtgctagtgcccaacccgtgcttggggttggcgtgctagtgcctggtcgcggcttgtggcctccgacctacgcattaaggcgaagggttggatacggtgctagtgcccaaccccgtgcttatggacactaaatttttctaaaattcattcattcattcattcccgtccccctcttataaatgcataacgaattgatgtttatttatttttcaattaataaggtttattggattggttggatgagtttaaataatgagtgagaattgcaaatgccaagtggcaatcaatgatcgtttaaaaattgtgataataggataatgataggatggacaaaatgataaagggtgttcgagagttatcaaatacatcaatcaatcatcgtacaaatggataaattccatcaattcggacacggcacagcatacaagtcgcgaccttgtggatcaccgcgttcaccgcacatgtcgagcacaggtagatgtgtccgcaattacggctgtagaagtgtgcgcggttgctggtgcagatgatgcattcggtctcccaatagagctgggctggcggaacgagcactgacgaggcaactcccctttcaaatcgctgcgactcgcgcagctgcagtcgaacattacgttcgaactgcagctgctgatgacgaatcagcggttgaggttgcggctgctgctgagggggctgtggttcgatgttctcgtcgttttcctgctctgctgcctgcagttgttcgtgaagaagctctgcttcttccatttgttgatcaaagtgctgttgtctttcgcgttcttcccgttgctgctgctgctgcgcttgctgaagcaacagatggtgctggtgctcaagttgctgctgcacagcacgatgaaccatctcgtcccgaattagacgcatccgcgaacggttcatgtggccttcaatcacagcgcttagaacggggcctgtcaaaaattcatttatttgattcaaattattaagggttcatctcaccgttttcacgttcatcgtcaccaccattactcgccgtacttggtccagccacattgctctctaaaaaaaaaacaaacaaaaataatttcagtttttttttcaaaattagcacaccattagtacgattttgcagagccccattgtttcccgaacgtgaacttagcggagtcagctgctcttcaaaaaaaatcgaaatttattaaacaaaaatttcctagtttacggttttcatttggtatgggccgaacatttccatcacttggacccgcagcattattattattctccacttgcacttgaattatttgttatttcaataaaaaaaattacagcctacccaaacgagactgttgtcggcgttctcgttcctcaagtcgacggccgagcagcgaaagctccactcccgccatgggagagtatctcgggctgaatctctggttcccgcgagactgaaataatcaaatgattatttataaaaataagcgaaattaattagttttaaatacttgtttgaaaattgaacttacattggccaagtacccctccgttgattcaatccgcatcatattctgaagcaacactgctctctgatcaacgatctgacttctcagcaaaaagatcatctgctgctgttcgcgcactgcacgttgtagctgtcgaatggaatctgccgccgagtccatgttttcagaattaattttattgctaaaaaaaaaataaaaaatataaagcaggtaaaaaaaaagggaaaaaggaagatgccaaaaggggctcacagaataaatgaagatcttaatcccgcccaccaacagtccataacattttacgccacatctcatatttctccgttgtgcatttaggggggggggaatattgggacgattaaagtgcttgaactgttggaagggcaatttcttttaggttaccgccaattaccccaacaaggcaatgaataagcacatcccttgcagtgcggagccgttaaatcaagtaaggaatgagcaaaaggtcaaattgcttccgcgctcggcattttttgttgctatgcaaacaaaacaaaattttgccttttttttttagggggtttgggaggtaatggagattaggggcgagaagttgcgagatgaccaaataaaaaagatcttataaaaaaaacatttatcaattagctgcatacaattaatatcgaaattatcattataattatcgaaattatcattacaaatattgaaataccgaatttatcattataattatcgaacttatcattattattaaaaaatcaatgatcgtattttcgacttccatcacttggtctatttctttggcttgaatggagcaagaatatcggttgcacgacagttgtcggtcgtgcacttctcacacaattcaaagctgacaacggttcgctcgccattggttgaatatttgtttgtattgttccataagcacgaaagacatgctaaaatttaaaaaaattttaatgttttaaaattattacttaattaccgtcgcaaaaacgaaaagttagcatatattttgggcggaaaagtttccatgattggatgcttcgtggggttttagctggttcatcttgttgctcattcatcttttgctcattctgattttcggccattatttcaggtgaatggattattttaagagttatttttatttaaatgaaaaaatatcccagtttttttcaaattttatacccatttttgtttgtttaacctatttatttcgagtattaaaaatgaaaatttattgaataaaataaaagccattgatatagcggatggtgaaattcgaacactcaatttttatcctttttttccatcattttttgtattcatttcttttctcaatcaaaattgcgtctcggcgttcctttttcttcgcgtattctcgaaggctcttctcaacttcaagcgccccttttccgccaaagaactcacgcagaacctaaagaaataatttaaaaaatggatcaaaaattttatttactgacatttgcctctcctttgtcgaggaattcttgccaaagctcttcttcagctggcattttcccgtagcaacgctggtcccactcaatcacttgttccggcgtccatttctcaacttcttcgggtgaagggtcagtgtcaacttcatcatctaaaatttgaaaaaaaaaatttgtacagtattgaaaaaattgcaattaccatcacaatttgggcattggttttttggtaaataatttttattagaggatgtggacatttttaggaaaatggaagaataataatacaaagaactaaaaattttgcattttatacctttcaatgtttatttaacccataaaataaatttggctcattcgaaatcattataaatagcatttatacttgcttaattttttcattttgttgtcttcatctcattaatattgcatttttcctctataaattgcactcttcctttcgttaatttttccaaaattgtagcttccaaattctcaaaatggtgcttcttacggaaaaaatcgccaaaattttaaactgccgtgtcagcgagctccgtgatcggcttaatcatccttccgattgtgaaacggtggtgaaagcgctgacaggacaccgtgttaaaacaacatacaaagacagaaatggatacaccaaaagctttgcttttgggggaattacagcacaaggagctgcaataactatggcttatggacgtctgggtcgtcctttcaatgttaatgtggccgcacatttctacgtccgtcaccgcattaaactccgacatcctttcctccactgtgctgttgagagctttccggaaggacaagaggatcgcttctatcctcttgaattatgcgaaatggaggatggaccaaacgaaccagattggcttggtcgtattttcacagaaattcgtaacgacaactacacagacagcatgagccctgcaaaccgagaagttttaacgccggaagacacgtcaatgtctcgtgaagggcgtgatgagtgcagtcaaaatatttcttacaccttatggtaattaattttttttcaaaattgtctcttctctttcttaattttgtacttttccagccaaaaagtactctttcctatccttaattttttcgaaaatgtgttttagatgatacttacactttctggtattgattaatattttcaaaattgtctcttctcttccttaattttgcacttttccagccaaaaagtacactttccaactcttaattttttcgcaattgtctctttgttttaattcaatttaatgttttttgtaataaaaaaaatcgatcgttaatgtgcaaaatttatgttcaattaataatcacaaatttatggtgaaatgtgaccaaaatcgagaacacgaaaatcatttgaacaaacaattcccttaccaacataaggtttataaattttttggaggggagcggaggtgacattgccttggattactgccgggcggagaaaatttgggtacaacactttaattgggtctgtctttccggagcgggcaaattccaggacactctgtttgaatgtgttataacgaagcccttgattttctgtcacgtcataattgagcctaatccctcgaagtttgagcacgtattcaaattcgtctgctgttcctttctttcgtagcttcaacccgtactgctttgcgccgccgcttacgaattccaaaatatcgtgctaaatttaaaaaaatgcagcgcgatttatattggtcttttacctttgggaactcgtcagtgagttgtcccaagtgcacccccgtctgaagtgggtttgagtcttccgggtgtacaagaaacaatgaatcggtgtctaaaatttagaataataaagaaaattattgtatgtttacccgtgtataaaagagtgcagccgggacttctgaccactttctgcattgatttcagtaaatgtagtcgggctgctgatgttgtgaacagtgaaatcacaacatttgaacaaggatgctctttgatccaatcttttttcaattgataactggtcagaattctttccggcgtcagcatgtcaaggccgctgatttcaatctttttgttgtccaggtaatttccaagctcagatgggtcatctgtgatgagcgtctgcgaaagaccataatttcgaagtgaaaatcggccccctaaattttttgtttataatattttcataggataacgaaaaaacatacataaattattcacagccaattttgccaatgatctctttcccttgttcgggaccatttttgttcgatcaatttttattccaaattggtcccagcattccgcaataaattgctcttcggcctcaaaattgcctttgatttgctcatcaaacccagaagcatggagtttttcaacaacgaactcgctcatgtatggcctgaagagtttgttgtcacttttgtggtattcgagaacgcgaagcagctctgtcactcgatatccctcctctagtgccgcatttaactaaaaataatttgaataaaatattaaaaaataaaactttacttccaacgaggtgcatgtactaatccagcctctttgtcggtcatcgtgagtacaactgtatgatgatttgacggcaccatacggaaattttttgcaacatttgatgcaaagtggaaaacaaagccgatcgtcaactttgaccggcaaaacggggatgtcgatttgtcgcggtggaatgatgaacacttttagaatggcgagcgggtatgggttgtcctcgggtcggcgccaatcaacttcctcgcagagcacgtggagagttggatgtccaatcggataatcggtcacacaactattttttttaaatattaaaaatgttacgacaaatattcacttgataaaaggatagaggctggtaaagtcatagtagctaattttctcgccccttgccgctttgtgataaagcttcaaaggaccagttctcccgcccatgaagcaactgcgaatatcgattggtcctccatctccattgaattcgctgaatttctgccgcatttgtctgtcacgggccagcattgcctcgatttcgcattgccaaaacacgtcaacattgggaatttttccgangtataaaatccatc

SEQ ID NO: 1326 - DNA, 7072 bp, Heterodera glycines
  unsure (1)..(7072): unsure at all n locations
tctgtcttccggagaggcaaaattccaggacactctgtttgaatgtgttataccgaagcccttgattttctgtcacgtcataattgagcgtgatccctcgaagtntgagcacgtactcaaagtcgtctgcggctcccttctttcgcagcttcagcccgtactgctttgcgccgccgcttacgaattccaaaatatcgtgctaaatttaaaaaaatgcagcgcgatttatattgggcttttacctttgggaactcgtcaatgagttgtcccaagtgcacccccgtctgaagggggtttgtgtcttccgggtgtacaagaaacaatgaatcggtgtctaaaatttagaataataaagaaaattattgtatgtttacccgtgtataaaagagtgcagccgggacttctgaccactttctgcattgatttcagtaaatgtagtcgggctgctgatgttgtgaacagtgaaatcacaacatttgaacaaggatgctctttgatccagtcttttttcaattgataactgatcagaattctttccggcgtcagcatgtcaaggccgctgatttcaatctttttgttgtccaggtaatttccaagctcagatgggtcatctgtgatgagcgtctgcgaaagaccataatttcgaagtgaaaatcggccccctaaattttttgtttataatattttcataggacaacgaaaaaacatacataaattattcacagccaattttgccaatgatctctttcccttgttcgggaccatttttgttcgatcaattttaattccaaattggtcccagcattccgcaataaattgctcttcggcctcaaaattgcctttgatttgctcatcaaacccagaagcatggagtttttcaacaacgaactcgctcatgtatggcctgaagagtttgttgtcacttttgtggtattcgagaacgcgaagcagctctgtcactcgatatccctcctctagtgccgcatttaactaaaaataatttgaataaaatattaaaaaataaaactttacttccaacgaggtgcatgtactaatccagcctctgtcggtcatcgtgagtacaactgtatgatgatttgacggcaccattcggaaattttttgcaacatttgatgcaaagtggaaaacaaagccgatcgtcaactttgaccggcaaaacggggatgtcgatttgtcgcggtggaatgacgaacacttttagaatggcgagcgggtatgggttgtcctcgggtcggcgccaatcaacttcctcgcagagcacgtggagagttggatgtccaatcggataatcggtcacacaacttttttttttttaaatattaaaaatgttacgacaaatattcacttgataaaaggatagaggctggtaaagtcatagtagctaattttctcgccctttgccgctttgtgataaagcttaaaggaccagttctcccgcccatgaagcaactgcgaatatcgattggtcctccatctccattgaattcgctgaatttctgccgcatttgtctgtcacgggccagcattgcctcgatttcgcattgccaaaacacttcaacattgggaatttttccgagtataaaatccatccgcttttggttgagctctcggatgcggcccgcagattttccacatggtaaaacttcgttgtcatccgggtagcactttgcacatgcgtgccatacacatccgtgaatctcgagtcccttttgttgagactcgatccagccgtccaagcggaaatttcccaccctttgaaatattttatagatttaatttgtactcaaagttaccttttttctccgtcagccgaaaatgcattttgaatccgaacgccgtgcttttcggcataccactgcataaaattgagagccagttcactctgattgtctccacagctgtcgtaacccttctccggcacaagtgccaaatgtccgggttttaggtgattagtccgaaaatggcgcatgcaggctgacgcaattgtgacgcaatgtcggacagggtcaatgccgttgtgcggtgttttgtacgctgctctgtcggcttttccatcgatgcctgccggtcgttttgtcatctccaaaaattctcctcgaaaggcgatgagtccagccattaaaatgtcgacatcgtttttgcaatagcttatttttttattattttatcaaaattgatttattcatattcaccttgccaatgactcatccagcagaaacggaatatttttgttttgctggtaccattgatcaaattgtttccgtttctctgggttcattccgtcggccaggtaatctgctttcgacggaaaaatttggcatccataattgtcaggtttgttggccatgtgtggaaagaagggcttgtcctgcacgtccaagccgaacatgggcaccattgaggcgagcgggccaggaatcaaattccaagaatcacgaaatgtcacattcgggtttaagttctttctgcttttcacctgagatgggaaaatgattaaataaatacatggaaaattataccctcatctcgaacagacggtttccctttctgatcattgaggggttcagtccctccatgaaaagttcccgaaagaccaagaccatgtcgaaacgtccgccgaaatgggaataggcaattgtttcgtattgctttggaagcttgtagagaagccatttaacgaaggcaacaagagggtggcggtcaattgtttgtctgtcgaccgttgtctcacggaacggcatttgactgaatgttattgtccgatgatagccgcaaattttgcagaattttccaagaaggctctctttccattttccggtcgaaatgcaattcgggcatgccacttttgcagtaacaaaattcacttgatgcttctttcgttcagggaaatgcgggtccgcaggctcatgctgcattgtttcaacgtcgaatgtgacaaggcgccacccgtttgtttctttcttcttgttcggctccaatgggcgaataaaacatccccgctcaaattcgtggaagatttgacaattttcacaccagcgttcattgcatttgtgaccctattccaatattaaactattattaaatttttaaaagaaacctctctcccattatcgcaatttttacgcatgtcccatacgacgccacagtatttgcactctttgctcatttgacaaaagttggaagaaagatgatactggtagcaagcattattgaagaacattttattgcaatccttgcacttttgccgaactccagcaattggtttgcatgggaattgtggtcccatttgtgagctaaaataaaaggtaataaaaaattacaagaaattaaccatttaatgcagcgcgatttgcaactagcaatgtggcgtttcggtcggtcgtaagtcttttcacagctcagacaatagggcttgccaaaaagatttccgcttttctgcaccccattgaagtgtccatcgtcaaagtagagaattattggaacgatgtattcctctggcccgtatttgaaaagcggcttgtaatgccccattgctccaaagatgaaagctttaaacttccactggcctgcaaacttttcgttgttccaccaatcaacaatccggggcacataaatttctgcgtcgtaattgggctgtccaagaggtgcttgaacggcttccatcaattctgttgtttcggttctcagcttccctcgcattccatcaattccattgagatatccgtaaaattgttgccgcgtcatggcaccaactgcccgaaccatcgtcgcttgcattgcgtagaataagcagtaattgtctccattgaaatttttaatctaaaaaatgattttttaaattaagaaaaaaagtgaaaacctttataagacattgttcatgaattcggtggtggaccggagccaacttccgcgcggctcccccttttagcttcattttctctggtagtccatttcggttaaccgttgtcacaataacggtaaatgcatctccccaaagcgtcaccccatcctgttttttgctctgcgccacgtcgttaaagcgattaagtatggtgtttatggtgtcgggtgtcatttgacgaattggaatccaaatatcggatgtcagtaactggctggaaatgatacagccgagatgtgttggttgaactcctttcaagcggctgtcaccaattgcttcgtccatacagtgttgaaaaattccaattaaaagtccctcggggtcagccggtacatcttcaatgacgaagcgagacttatttttcacccattggaatttcggaacgtgttcgatctctgagtcgagctttctgacgtaatcctttgccgacttttgtggtggggaaagctcgttgtagggttcccgaagcaattcttcgatgaaaaaacggcgagctcgtttcgaaggaggagattttgacattttttctttaattaaaaattaattttccaaaatatgaataatatttagtctttttcttcacttttaaacctttaaaaccatttttatttgcttgtgtattgtatttactaatctaatttccaacgattaatctaagaggaatggtcatattggtcattcaaccaatcatcatcatcctattttttattctgctggagtgaatttgtccttcagccaatcagcattcgcctatgctgttgaagggaaaggtcgctcgctccttttaccttttttttggcaaataacactcgccgagatttattcggaaggaaagggaccccatcgacagtcattggtccctggcactgagcggcactcaatttttgcctttcctttcctatggtcaatcctttttgggacggaaccaaaaaaaaaaaagagtcataaaacaaataaaacgaatttttttctattttatcgggaaattgcgaataaaattttgaacaaacatttctggattatgcgaagaattcaatttagagaggaattgagtaaaagttagtccgcttgataaaaaataaacaaaacaaatacaaaaatgtccacatgaatttgatgaaactgattgatagggtctttggttaaaatgggttccaggaaaagcattaagaaaggatttaattaccaattcattaatgggcaaagacagactatcaaagtaaatggtcttctgatctaatccgtatacaaatattgcaatccaatgagagcccggaaaatgatgagggtccaaattaacaatcaatgatgcgggaaattttattgaattagggttgggtaattgatcgcatgggaagcatccaagaaacttggggctcgttatttttgatgacgtcaaaattttggtgatttgattgttgtccatttgtcctattgcgctgttgcgtcagggttagtttgagccaaagaattgatcgaaattggtagataattaggctgatgacggacaagccaaaaaggataatcattgcccaacaaaaaatatgtgcatacacatttgactctttgggtagttctttacaaagtgggataaaaggaaaattgatgctttcttggggttgataatgtttcaatgcatgggttgtctgtgagcttttagttgttacttttgtttttatagtagtcttttttgttgtttttcgagttgctgaagaattccttaacacaatcgaagtaactatcccttttgttgttgttgttgttgtgtttcgaaattctgaagaatttttaaatcccaaaagtcttttccactcattatattcaggaatttcctctgtttttattccttcttcaacaatcaatgaaacaattggttgaaaaaataaggaagcaagtaaaatttggtacatttttatcaaatggttgtatcggttgcaatcgttcggtttttatccaaaaagtaaatagagtccgcttcacccatcacaataagtgttattccaccatcgggtactggttttttgaatttaatgttcactgctgtacagccttttttgattagatcaaataaaccgccatgatcgtcgccgctgtttgtcatattaaacacataaatacagtgagtgtgcaaaaaagaaaagtaatcaattccatttccatatgtagagttggcaaaaccaagcgcctcctgcgtgtcattgtagggacgaacaaatttccaattttcatagtcaatgtcatacggtgcctggggataggagcgaccattggccacaacacttaactcccgtacattaaagtgctgaaagttgaatgggctccttttgatgttccccacataatctgaatttgcgacaagtcccattgtcacgcggcgtggaacttggtccatgaacaagtttgcattaaattcatagcgtcctgggcttatgaacaatgctttcatcattgtctttcgtacagcataccgtgctggtttcatttccaattttttcgccaactcaagagccaaaccatccataagactgacttttttacagtagagtttcaatccaacaagctcaaggctatatggttgaccaggggggtctaaggtgtcaattaacaaaaaattgtcgtcatggggttgtatcgttatatcaatttcacaatgattaatcaaatattggggtacattgaaaagatcggcatcaatttttgcaatgtattgtgctgttcgacctcccaaataccgttgtcttctacttttgaacccttcggaatttgcgttttgtagattgctagcatcttcacggtcgtatccagcagcagttaaatgcgaaactttagcttcaagtgattgcgaaagttcatgagaaagataagttttgtatgccatcagtgaattagaattgaaaatttcacgaccgtttattgcaattttcaggtcccgcatgaaggtgtgcctgatcaattgtattggaacaacctgatcagtagcatccaaatgtccccattcaccatttgggggtgtcaattttcgcattcgaaattcggtcaaaaggtaacactttgacaggtcaatgtagttttggctcgagtgtattttaaaatgataaggagtgtcggtgagtggattactcggcaaaatctcgaaaacctttgacgatg

SEQ ID NO: 1327 - DNA, 8630 bp, Heterodera glycines
  unsure (1)..(8630): unsure at all n locations
agatgttttttacctttggactatagcggccaacgggacggacaaatgggaagagaatcaaaggtagaacccgaaatttcgcatggaaaattttgagggaaaagtgcaaaaaatttttcaatcggagaagtttgggtagaataaaacatttagaaatatttttattttttggtttataggagtgtgacgtgaaagaggaattgaagaaaaataaggagatgaaaaagttctttgaaagtgtgccggacaagggaccgatcaatccgagggatgcttatgccgggggaagaacgatgccattttgtttgtacgcaaagactactgaagaaattgagatatcaatgttcgacatcattagtttgtacccctttgttaattatggtaaaatctgcttaatttttgttagtttcctttcgcttaagacaccccataccccgttggagtcccgaaaattgtagtgagcaggaattttaatgtgaattggacagcacccgacgacgtaccctatgatggacttttgaaagtaaaagtgatcccaccgaaaaatcttttgtaccccctcctccccgtgcacatcgatgaaatgctcctcttccctaattgttggtcttgtgcgagaagggccaagaatgaatttgtgatgacaaaagatgtaaagaaatgtaaccatcgtccagcgcagagagcatttttggggacattcacctcaattgagttgcggaaggctttagagctaggatatagaattgtgggattctatcgagcgtatcattttgaacagtttgacagtcaactgttcaaaggatatgtgcggatgtttttgaagataaaggtggaagcgtcggggtggccggcggaggtgaaaagtgaagatggaaaaagagcattcatcgaaatgtacaaggcaaagtatgacatcggtttggattatgataagattgggtttaatcccggactaagaatgattgcaaaattggtgagaaattataaaaaatctctaaaaattgttcgaatttaagggattaaacagtttatggggcaaattttcgatgcgcaataccctttcaaatacggaaattgtgggcagcatggaacgttggatggaattggggagagacaatacaattgagtttgggcgcccagtaaaaataagcgaagagatatcaagagtcgtgtaccggaaaaaggaggagttcatcagggagcataaagtgtcgaatattgttttgtcattgtggaccacgagtgctgcgaggctaaagctgtacgagtacatggagcaggtctacaagaaggaggggtgtaaactgctctattgtgacacaggtgaaaaggaataaaaagaaaataaacacaaaaaatttagattctctagcttttgctcatcggaaggggcgctgtccgttggtggaggggaaatttttggggtaaaacataaattttgaaacgcatttaaattgtggttttaagggagatgactcgagagtatgcggacagcgaaattttggagtttgtgtccgcgggtccgaagcagtacgccttgaaacttagaagaaagaaggatggtgtgatttggcacaaaaccaaaatcagagggatgacactggatagacgaaacgaatttaaatatgaattgttcaaagagatggtgctggattacaagaaaggggtcaaaaaagtttttcactacccggagaagatcgggccgacaaacgacttccgggttctctcaaaagacgtacaaaaagaatatacaccggtgcagaaaaaaggaattattgacgatcactttaatgttttgccctttggatattattaataatttttgttttgataattttgtctcatgtttataacatttaatattttaaattaatcaaatttgtttcattttttttagaatgtcaaagaaaaatttccaagaaacttcaaaagaaatccgccgctcgaaaaatacaaaaaattatttcaaaaacagtcctaatttggaaaaatgtttcgaagaagtggagagtcacataaaggaaaataaaaaatttgggataaaagagcacgtgacaactttctattttaaatgccccgaaaatgaagatcccgaaaaaatgtttaaaaaaatcctgaaaaaattaatgggggatgcaatgagccgagaagctgagccgggctggaaaattgagaaaatttcagtggacctttattgcagtgccctgtcagaccccgtgatcatccctgcccgccccttccaacaatcgaacccagacattgttttcaacgagttcatgcacagacagcaatcatttggagaagtgaatttgttagaccagagaatttcaataattattgccacttattctttccctgttaaataaatttttttcatttttccctttcattattttttgtttattacaataattatttattcgacctttttctttattaatttttcagttaaaatgtactcgtttcaaaactattttgaggaggctctcgaaaaagaagattttttctggcagaaaaacagagcagaagtggaggcattgttaattgaggcttcaaattataaaattataatacacagggactacgaaagccgctattctgattatattgccacctatcaccgcaccccactcttctgtttctgcatgattgagagaaatttaagatttttttacgacacaggaaccgggacgcctataggaagggttacaactgtgctacatgttaccgttgaggcgagctatacaggagagggattcatttcgcctatgttttccttttggttttattgggagggcaggagtcaaacaacaaacgaatctttcacgagccgtctttatttgtacactgtttcgatgctaagagcaatgggcaaagcctggggcagagaactacttttgaaccctgttgaagttttaattgatatgttctaccaacgtatagataggttggaacatagaaaaaacaatttaaaaaaatattttagagatttggtcggatcgtggtcattgttctatagactcccaccctcactttttgacacttcccgccgggtggttgcggagaataaactggaagaatttttaaaattaccatcattttttcgcatgcttttttataataaatattaaatgttcatgttgtttttaaagtgaaggttttgacccaaatatttaatcaattttaatttattatttttggtagaattccagaaaatgcaaacaatcgctgaaattaaaaatttcgagattgttgatggtggaagaatttttgttgtgagagcgagaattgagaatgtgatggaggcggagtacagggtttgtaataaaaatgaaagaaaatttcagtttgtttaggcatgcactttatgccgtaaaggggcttgttcttgcggggctgagaaaaagatgacatcttatttgaaggtgtctgtggcagatgatacagggcttttggaaaatgtgggatttttcggtgtgcgtgggaaacagaatgggatggtaacgcaacgcttttttaaaaatccatatacatttaaatttaggatgaggtcaaaagtttggcgggcgccgtgtgcaccatgaaaatcggcgctagggtgaaagaattcggagggaagaaggggatctattactctttggttgatattgtcaacctttaaatctataaataaacttgttaattttttcaaataaaaatgttttacttaaaattatttctagtttggttcttgttggtcggaacggaaagttgttgcctttcaaaagaagaaaaagagcaatttaccagtgcccgaagaactgtagaaggtgtatttagagacataattaggttagataacgaagcaaaagaattttctttttctgcacataataccatggttgaagcccaaaatataaaaaataaaaaccctgataaacctggtgtaaatttttggcatagcaaattattagatggagttttaaaaattcatgccctatttgacaaaataaaaaaagaagaaaaaaatatgaaaaatattaaaaaaggtatggaaaaatgtctagacagaaaagatttaactatgtgtcaagaattagcagaagaggccaaacaatcaatcgaaatagccaaaaattatcggcaagaaattgggcatatttatcggaccgcttactcgcagcccgatttaggcattggagacttggcaaataaactaaaagaaacaatgcgcgaaaaccaaatacggtttgaaaggcaaagacctcaggaagaatttagggatgaatttattgcttataaaatttaagaaaaaaataaaaattcgagaaaatgaaactgcatgggaatcaaaggttgtgggacataaaccaaaaacaggtgaaaagggaaacaggtgaaaataggtgaaaaggaaacaggtgaaaacaggtgaaaataggtgaaatttcacctaaaaatatataggggcgtgtatttaatggggcatattagataatgtctcaactagtatcaataaaaagtgccaaaggaaaattttgtgatggttatcgctattacaaacataaaacgaccaagttcaaactttggtggaaatgtgaacttaattcacatgggtgccagggctggggttttgaaaaggaagggttttttacaatgacgcgccgacacaatcatcatcctgacactatattgattgaaatcgaagaggacataaaatatcataatttttctgcgggggcaaaatgctttttgggtgacaacaagaaatagttgatgatgctaagaaaaatccgagactccaaactgaatttagagatgaatttattgtttgtaaactataaataggatcttgaaaaaaaataccaattaaataaaaatgaattttcataaatcggaaaaagctaatgccattttattggaggcagctaaaagagagacggagagagcatggaaggatgttgttgcactagaggaagaggttagcgattttgccaaatcttctcgggaaactcttaatcgtgcgataaaatcccgagagaaagccccatacgctaatggtgttcgggagttttacataaaaatatccgactcaatctgggaaattttcacaatcttggacaaaattaatgtagagtcagaaaaggcagaagctgtatggagggaattggaaaaatgcaaagacttcgaactggcaactaaatttgaggaaaaatcaataaacgcattaaccgaagcccataggttgcatttcgaatcccgaagagtgcataataaaataagagcgtatgaaaatagacttcaaaatattgtctgggaatttattggacaagtgtaagatataaaaagaaattttttttattaaaattaatggaagagtttgttgaagttgaatcattttgtcagaccaatacaaaatttggccttaaaaaatacatagccaaattttattttaaaaataaatttttagttaatgttgaggaaaaacttaaaataatactcacatcgttaatcgatgaaatttataaaaaggaacagggaaaattcaaaagcattttgaagctttcttttggttttgaatcattttattgccctcttaaatgccctagcgaaaacacagccgaggctttgttccaacatgtcctattaaaagaagaattatattcgcttttctatcctttggatgatgtcataacgctagaagtaactataatcccagatgtcgacaatagaccaagaaattaattttataaaaaacaaaattacgagaaattggaaaatttctggaaaaatacttaaacgatcaaataatctcgaaatttttgcaaatatgatttttaaacgggtgaaaaatttctacataacagcatttagtgcacctggaatcgaaaatttatatttttcattcttagaaatgctcgaaaaaattcaaaaattacccggtcttattatgggtgaatatagaaaacaggccttatctatgcagaaactagaaattggcatcaaagaaacagatatatttaaatgtcaagaagcagagaatatatccgatgccaatttttcggagataaaaagttatcaaaaaaagatagggaattataaatttaatatcaaaatgttgtacaatgaaattagagtaactgcagtaagtcatttgtttaggcctgaaaaagaaatattttttagtccgtttcttacagaaagaaatagagaaattttttattcattatttcgacatatctaataaaatcgcaactttttttttgcaaaaacgaaacgttttcgttactaatagaatcgcatgatttttagtgtaatatttgagccttactgcacaaaagaccaaaaagttttgcaagtttgaaggtcatttactaatttcgtttgctgaatttgaactaaattagggttgcgtcagcattacaatgcaaaaagcgactatttaagaaactctaaattttcattaccgatatataattttgccttcaaacattagtttatgctatttatttttgatttaacattttttttcccattaagaaatgtcaatgcaacaaaatcaagggtccgatgatgttttgccaatgtgggcggtaccggattttgatgaaatgggccaaatgccgcagcggcaaaaacaaaaaaaaatcccaacgttgaaggagtttcggaaccaatggaaggaacgaagacttctgtgggagagggaagaagcagaaaaaaaagaccccaaaacatggaagaagaggaccgatgagatgaagaaaatctgtgaggagagattggagcaatcgaaaggtgcaggcggcagcaacaaacgacaggaaccggacaaatacacttggaactggggcgaactgcagcgccaagaaagagaatatttggacgggggtctatggggaaaatgatgagatacccccccccccccccccttcacctccctcccgttcgtttgatcgattattttattttctatttgaaataaaaaatgaataaaatttaaattgtttaaaaaacatttaatttggtaccctttgggaattttgattttttaatctttctttttttttcataatttacgacttgtttgcattttctgagtttttgcagtttctgattttttgtattttttagtaatattaatgggttttttgtaatttttaacacttttctgattttttggctatttttatgaattttatgatttatttgcgattttttaaatattggtatttttagtttttatttttgataacctgcgtggattaaatcacataataaacatgtatgagaatgtttaaatttaagatgttggataactttttttttaattttgtctgtgttggtagttgatcgcttctgtcctccttctgttgaacatgttgaagaagtcccgattttcgagtcaatcgcatttttggctctgtctctctgttctgcgtgtttttcgcccagttcagcgtacagggcgcgtatgtgctttcttaattcatgcccggactttgaagtatttgttgttgacgccgatgatccagaagatgaagggatgcgctaaattagtttggtttttatcggggccccagaactgtgtgttaatccaaatttggtggttttttgagtctttgatgttttttaaaaatgaggatttgagtatttttgtgggtttgagaattttgaggatgtttgaggcctttaatttgggtttcgaataaattttgtaaaaatgagacttttgacctaaaatgaggctttttacttgtaaataaagtttttgaaaatttaaatctgctaagcctgttttttaccaatttttgttaaaattagttttttattgatttttaaaaaacacatttaaaatagaagtcattaggcctgtgatttggttatcgttgtcgggtggtggcaccccctctaatggactgtcagatataggcgaatattgttggttttggtgttgctgtgtttccgtctcttcgtcctcatctatgaatacatgggctgttagccttccttcactatcgataaattgccgcggttgatgttggcgtatttgtgatggttgctgttgcgacattgatgatgctgatggctgttgtggtggtggtgatggcggtgatgtagataccaaactttgttgtgttagtagttgtgattgaagttgttgttggggatgtattatcgatattgactgttgttgttgcggtggttgtggtattgatgcagatgccaaattttgttgtgttggtagttgcgatgacgaggttgacggttgatgtgatgttgcttgcgcagttacagcagcaacgacagatttaaaaagcgaatctgcagaagtttctgtggggctgaatgcgtgttttgttgtcaagagttgggcgtccgtttgtcgcaatgtctcagccgtttgtagaccaaattgttcattttgcgcgaatgccattgtctttttgcgttttgcaataggcgccaagggaaaaatgtcatcataaaataaaaaacaagttacaaaaagggttaagacatatatgtccttacaatgttgacacagcaatttgtggtctcatcaaaaccatgtatttttagagctccatttgtatttcgaagcatactataattaattattttttcattaaaacaaggantttata

SEQ ID NO: 1328 - DNA, 3328 bp, Heterodera glycines
gggaccctttttgtttgcacaattttctaatatatagtcatgaaaatttattccctggaattcttggggtctataaccttgaattagatgtcagattcgtgatcagcgccctttcaaacccccggataataaaattttatggttttttatcacaaaaaaatttgcaaaacaaacgggtcgccctttttgtttttaataaaattcaaaatcgcccttctttaaagtagcgccaaaaaccccattattactttactggatccacaaatctataattacaagcaccaccttataattagtatttttacttgattttgaactccacaggtgcctatttgggttgtctgctgctgccattgctggatgctgtgcatcctctgcagatgcttggcatgtactgtttgatcatgatgaagcgaagctgactgagggttggccatgttttgttgggcatgtgcagtggtcgtagcaacagcagcggtgaactgctgttgtgttctgacggaaatgttcccattgttgctgctgctactgtttggcgaagggttcatttgttgctgacggaatgcgtttgaaggtctcccggggccacgcgcagcagaaaaagacgcactagcggaattctgattgtgagcacttttggacaaagacatcgctggaggatgaccaatggtaggggaaacaatttcagaggtttgcgatggactgaaactggtcattctttgggtaacaaaaaaaaaacactgtatcacatacaaaaaaataattgaatttgcggtccggacatttgcggtccggacaattgcggcctgctgaaaatcggacatttgcggcccgacaaatgcggtcggacatttgcgcctcggacatttgcggccaatttcttaagggccattttcggacatttgcggcccgacatttgcggcctgctggaaatcggacatttgcggtcaacggaacgccaaataattattttttaattccaaaaacaatgttttcttcccgactttttcgaccccaatcaaaataggttcatttatcggaaattcttttactcttaaaatttacgccgaactttaactaatctagtaattcttttcaaaaattgggcttgtcaaaaccccatcagtttgaaaattgctagtcagtttaccaactcttgcaccgaccagttgatattgtagagatctgagattttctactaatgttcgtacttcttttgccatcatttgggaattgtttcgctgatattcttttcctcctcttcgttgcttctagttgggtaggtttacgatttttttttcgagaagacttgaatcggcggcttattagagagcattaaattcggttaaaatggatggaaaataattttctgaggtttttattttgttggagtcgaaaaagttgaaccgcaaatgtcgtatttggctgtggccgcaaatgtccgaggcgcaaaagtccgaccgcatttgtcgggccgcaaatgtccgattttcagcaggccgcacatgtccgggccgcaaatgtcctacaacccttaaaagtaacttcttttctaaacaaattcgctgtttttgaaaaaaatcttaggaattcttcattttttaaatgaaaaataataatagttttgaaaattttcaagcaaaaacatacatggttttttattcacatacggcactcattgtaaagttcgattgtcatgttttgaatttcgcttttgtcagatgatggcacctttgcttggcagtggaaatgaccaggccgactgcgacctcatccgggcttttctttcctacattttgaaacgctggggcaaagagctgaacgcacgggaagagagcataaagcgaagtgcaacaggcaaaatgcaagcggggatgcacaaacaaacggtggaacatctctccccgctgatgaaatccctggaaaagtacacagtgaacaacgacatccgactgtacttgaccaacattaccaagtgggataaacagacccttgacaaagacaagtgactaaaaatgacacgggatagagaccaaacaaaacaattacttgttttcgttttggatttggcatatcttttaccattataatcctctaacactgagtctcatcttttgctcactttgcatttgttgacacaaagggaggaaaaagtgaatgattgtagcaatgcaacttgagttttcagtcttgcatatataagagacttgaaaatgacaaaattgttgcacattttgcggcccatcattgacatttctttattttaattcacaaattttcagactttgtgttgtcgaacgcaattacatcgtcgcaagcactgcttacatggaaatgtcattactttttttagctaaactttctatttgtccctgcaatgttttcttttctcaggtcaattggcaatgctccgtggcccgtcggagtgactcggtcgggcatccatcaacgccccggctcatcaaaggcgtacgtgtccaatgtggcacatgtgatgaatgacgaaacgcagagaaagtagccgagtttcaattatttaattattatatattttaagatacatccacggtcttaaaaggtattttcgttaaagcgcaagatttcaaagtcttatttctaatcgcttttttaggataatgtcaaaatgccaagaatttttccccaccgatcccagcaaatgtatggaatttgtgaagaataaaagcgatcaatgagaatgaattttcatttttcatttacaaacaattgtttgtatcattttattgatccatttgtttccttaagttttttgtaattttttatatgcacagattgaaaaatggaccagaaagagactctaactgctgaacagttgcagaaagtgctgttggatgctgagaaaagcggagaatattcatatgaagaacttcttccaatttgggaggaggcgaagggaatgattgaaaacgaagagcaaatggtttcactgtacacaacgtttatttatatgtcgaggcgcttcgccgaaagggaaaaaagtgagcggaaattttgaaggtcgaatttcgggggggggggagggggggtaaacaaaaattatttttgcttgtactcgaaaaacattgtaatttcaatatttttaaaaacgcgtgatttcgtaaatttgaacttcgacttttggttcgggttcggaatgcttctgtatttcacttgttaaggcagtcccgactattcgagagcggaggaactcttccacgagggttcgaattttctcgaggaatgcttcgatagtttttccgatgccagcattcgatttgagaaaaatttcgcctatttttgttacaccaaa

SEQ ID NO: 1329 - DNA, 8537 bp, Heterodera glycines
  unsure (1)..(8537): unsure at all n locations
agtcctaacttntgctctatacactcaagttttctctgcctctgtatctattttcattttctttaaatcagccttcaaaaatacctaccccgaaaatgagcatttttacttaatcaactctagctcctaattaacttttccatttctattgatcttttgcctgaaaaatggcaactcattattgataataaggggattatttcgaatcatgattgtgttttgttcaattaaaaaaataataaaatctcgaaaataatttcgagggtcaaaacttagttgacaccctaagtaaaaatgacgaaaagtagcaaaaaaaaagagctaaagtgataaactgtttaaatagtgtcaaaaatagttgcaaaacaacaccatttgcgtcattattttggtggtcgataaatccataattataatatacaatgacaattaatggacttaaaataaattccggctaaaaatgtttttttttaggtttttttcatttacttgagatgagtatcgttttttcaaatgactctaaattctaacaacattatttcattttttactcttcctttaggtgaatgtcactctcacagatggaatcagctcgtacattgtcacagtgtttgagtgaaatggcgcgacacgcgaacaatgaaacggaaccacaacgaaatgtcattaaaaggaaaaccagctgttcgtctggtgatctacaacagaatcagccaagctttgcgtcagaacaaatggatgacaatgacacggcctaacacaactttcatggatcatttgatctattgttaattcgttccttctccgttgcgaatttgagcaattcgaatttctaatctaatttgaacaaaaaatcattaatcggaaattcaaatttcttcacttttacactagcgccaaagattttccgatgaatgaccgtattccctccatttccaatttgtttattgtttgtgatttgtttaaacatgcagtcaatatttaaaattaatgcatatttttacagattcatttcattttacatgcattttcagcgatatgaaattttctctgttactcgcaaaaggccaattccatttaaaccgtaagcaaattccttttcgacttaattttgtttaaaaagtgtccaaaatttagcccacaagtggttcagaggcatgtggcagaagggctattcgtggccatcgttttccagcgaaaattggttcgttgtccatggagagcagaattaaagataaacaaaacgggcggtttgcgataacgttaaaactgatcattgttggcttaagcaaactatcacctgtaatttttttttttttgagtggagcccagcttctccaatattactaaacgtttaacaaaaccatggagtttttctatgatttttttcttgttaatgcattgtcttggtgattgtcccattgtgctttcagcaccggatgtccgcctccgattgtgacggatcatgccgttaatcaacttcgtaacatatggacgcgcaaattgaacattcttaagtggatggccaattcagacaataccttggtttgacaccgcaaaaaataaagcaaccaaccgaaaaatttcaaaataaatttgtaattttagaaaaatgcttcttcaagagatgctgatattttgtcatacgagcagttcgacttgttcgttgcggacttagatgaaagtgatttgttcaatgtgactattttttaaatttttttcatttgcttttttaccttctctactcagatggcaagagactaccagattggcaatcatcaccttagcgcaggcatgtttccaaaatcgccattcacccctccgccgcgcggaaaaataatcctaccgaatcaacggttcatgatctctcttccctgtcgccgagtgccagacggtgaaattctccatgtctggtttttagtggatattggtaagcacccatttgttatcaacatgtcttcataaaactgcaggatcaccttacaccgctgtgtcatgtacaacactgtctgctctttacggcaacagatcggaacccgtggaccacttttttctgaatatcttggtatttttatgtttatttaactaaaaaacataattgaactatgtttacatatttacccgaaatggccgcaaatcaactatttttagcaattcactatttaaaaattttgtcatgcaattttttacaagatctttttcaaatttgtacgcagtttagctcttctttaaaacatgaaatattttggtgtgttttaaggacccacacattaatattggatgtcaaatatcgagaggacatttttccgatcttaatttgttggggacaaacactctggaagcacttcaactcacacccgtcgctgactggggcaataagacttttgtcttagacaaaatgtaattttttttttgataattaaatcgaaaatgacatttttagtaagctatcaatttttgggcgtttttatgttgttggatgatgtacgaggaaaagaagattatttaattttgttttggcgattttggcatttcgttaaaaaaataatttttaaacaattttcatcttaaaaaatatatatttttatctctataaaataaacatttaaaccaaaattgacttttgggttgacggttttaaaaagttgtgaccactttctcctcgccggatgtgtaggaggggtgaccaggttgccgagtggccagaaggaattggcgggagaggaggaagttgtggtcctttacagggagtatggatgtttccgcgtggaggtggtcggcagaggagatggaaacgcatcctgtaattgtgcgaagggcggagttctggcatctctggaggatggaccaatttgagtcggccagttggggggaccaaatcggtgctgcataattgagaagactgcgagcgatggctttgtaggtggtcaagagtacttcttttgattgtccccaggttgttcctgccaaagcccggaggatgttgttgcgtttttggatttttgatcgaagttccacggaatgggcattgaatgtgaggagtgggtcgaaggtaattccgaggagttttgggttgcacaggaatgggatagggccgtcaatggtgtgaatacgcggatcttgttgggaggaaggcgttgattttatcgctggcgattgcgattgaggttgcgcgggccagaatggtgatgtcgtcagcgtaggtgacgatgtgaattcctggtggaggaatggggattgtggcggtgtagaagttaaataaggcaggtgagaggacgctgccttgtgggacacccatgcggatggtgcgatgggaggaggttttgcctcggaaaacgacttgagcttggcggccaccaaggtagttgcggatccatcttttgatgatagggggaagtgttgtgtttgagatgtcgtggatgaggaggcggtggtctacggtgtcaaaggcctttgagaggtcaagggagaccgcgaccgatcgttcaactggtgcttgtcggttgagtccgtctgtgatgtatttgtggattgaatggagggcagtgactgtagagaaaccgcgacggaagccatgttggttggcggggggtgggaggtgtgcgttgaggtggggaagaaggagtctttcgagaaccttcgccactggtgatagaagggagatgggccggtagtttgacgggttggttgtgtctttgccaggttttggaatgggaatgacacgggcatttttccatagttgtggaatgatgcctgatgtgatggtgagattgaagaggtcggccatgtatttgacggcgacaggtccgaggtgacgaatgtgggatgaggatatgttgtcgggacctaaggcggtagagtttttggtgttacttatggccaactggactgtggtggccgtccatgaagcaaattctgcggaattacgcatggctttgtcgatgtgtcgatttgcttgtcggttgacttttgaaggtcggccagaagggcggggatggaatgcggcatttaggagggaggccgcctttgagttgtcataacatggaagattgttaaaatgaaggggaatgttttgttctttggtgttgttgttgaggctttttattgttttccataattgtctgctattgcgaggacaacgtttgaggtgttctagccatttttcacggcgaaattggcagacacgctttgtgatagtgtttgtcaaatcgtgaattctgtggttggcgggatcagtgagttggagatggtcgcgttcatttgccaagtggaccatgtcgctggggaaggagggacgaattttcggtatgcgaccggccgggatgtgatgggcaggtgcagtcaggattgccgagcggaggcgtcgttcgccatggacaatgttcgttggtttagggagggtctttaggagtgagtcgacttcgtcagcaaagttgttccaatttgcttttgagaaattgatgaaagtgcgacgtggggtgtgactccattagatttggccttggatggaaatggtgatcggtagatggtcactaccaagagctgccgttgttttccaggttgttgaagtggcgagcgagtcgctgatgagggaaatgtccggggatgacagaatagtggaattgccgcggggggccacacgggttggagtgtcttcgtcatttagaatgacaaatgggtgttggtcgatggattctgcgaagtcgacgccgcgctcgtcttcgggggatattgcgtcccaagtagtgtggtgggcattgaaatcgccaacgatgagtgtgtcctggttgccggagaggaacccgttgatgtttggttttgagttgttgcagctgctgtttggtggaatgtaaatgttgtgaatgattagtgggcctttgtctgtgtgaattgagatggagatggcttcggtaatgttgtcacggactggtgaattgaggggagtgaaagaaatgcggtcgtcaatgatgaatgcaacgccgccacccttgtcagagggtctgtccttgcgaaggaaggtgaagccagggcgtttggggagacggcttttggaggtccattttgtttcttggatagcggcaattgtgatgttgtttgtggtgataaagtggatgatgttgtccaatttgccgcttataccgttagcattgaactggaggagggttagtttgtcggtggggatttgggcttttgttggaggggcagtggcccaattgaatgtagttgatgggcgggtagccggattgaactgttgtgtttgttgaggatgaggaggaaggggagcccaattgaagcacaaagggctaggattgggatggacgtccccggcgaggaggagtaaccgacgactagttgccgggtcaccagcgtcggatgggagaaaaacatgccagagtgaagagaagaggagcggaggagatttgatgggccttgactggtgatgacaagtcgaccaggtgtctattgccaccgaagaggcgcccattttgaacagactgctgctttgctccaattgtcggtggcatttgctgcgtaaaattgcctatgatacactgagtaacatcgcaagaaatgtttgtttgtttgttccccgctaataaaaatgcatttctaccagataaaattggtcgacaaattgtccaccgttttgctgaacaccgtccaaaagggtctccactcggacgacaaatgcaaagtgatgcgatccatggaaattgtggctggtttatgcgcaacgccaaccaacgagtcaattgtttgtgaattcttcgaagaatcggttccacgcttttaactgtgtttttagagtaattattaatttttagcaaatcataccgcggattttcgctcttttgtcactgaaggatattttgatgtgtatgtgtgccatggagtccgtgttggccatttccgagttgggacgggtcgcgtgcgaagccgtcgcccgctgtgaccgcgccgttcaaagtcagtggcaaattaatgctttttcattttataataattagtttataatcatttctgctgtattttagtgctcgtcggctttttgaccaccgatgccctttcttttggcaccgtcggtttggcggggatgcacgtggttgaggtgcacggacaccaaaccaggccttatgttgcggttagtttccgtcttgaaaatcacaattagaagatttaaaacttcgcaaaatgaatcaatttttagccaaacaaaaagaatcctcccccgccgcttaaacttcaacccgtacaacctcccgttcaatatgcgcaacaacggcaccaaacgccggcgagcagtacaacaacaacggcaccaccatttggtgaagcgatggaatttgcaataaatgctcgcacagatactcttgaaacatgcccaggtaattgatattaattaattaattatccctccgaatgctttcgtctccttcagatgcctttcaacgtcgtgcaaccgatggcaatgactctgctcaatttgcctctcatcagcgtcatccaccgactcgcaaaaaagtttatctgaaatcttcgcgcctgccttttctcaaccaccgacaacaattggccaccgatgctccgcctttacaaaatggcctttcgtcaattgctgccgcggttccgtcgtccattgaatctgtggcgaatgaacgcgactttatgtgcgaatggctgatgcagtcggagggggacgacgattggtcggacgaggagggcacagcagcggggccaattgagccgtgcgcgaggtgtgccgggggttgtagttcttatacaaaaattccagactttcccggcggccggaccccattgatttttgaaaattttatcccaaaacagcaaaaattgaattgttcaatttttatgcgcaaaaccgctgaattactacttttttggcctgaagagcaaaaaaaaaaaactctccggtgccctccccaaaatgttttatggatactggcatagtctacggtctcactggccatttctcagggcattgttttgttttttctctttttgttccccacttaattctttcgtctgaaatttcaggttttttgcttccgcctcacaaatgcttttccacgtgtacaacgaacatttggtgccgcttgtccaacagcacagcgacggcgaaccgccgaggattcgctgtcgttggcccatttgcgacaacactccgcgcactctgtggtccatcacaactcatttgcaagtaaacaatgatgagtaatgcattatgaaaatggatactaaatgtgctcaatggtcaggatatccattgcactgaaaatgcgttggagtcggcgatgctccaacgggtggagatgggctaccacggtacaatttgatcttgaataagcgagttcaaatgcaataatccatcggtgcttccctacaaagagtacgtctatcacattcggcaacagttcgagcgcagtagggaacggccatccgcgcagaatgcttactcagactttgccgcacaggaagcgatacgacgacacgcatttgccaatttgcgcaaagagattacggtacgtacagtgcatgcagtgcaagtattctgtagtattggtgtgattttccattccgtcaggaagattcggagggtccggtgacgcgaagcattcgcctcacttcagcgctcattctgcgcaacatttgtcaccattccgtcgccggacgtcgcaaactccgcgcgcatgagagtttcattaggtgaacaaaaacacatggccaatcaaagggaaaggcataaatggaccaggaaaacaatagctgacaatgagttaaacagagctaattttcatttacttgatttgtgtattgttttttgaaaataattgcaattctaacaaaattatttcattttttactcttcctttagttggctgtcactctcacagatggaatcagctcgtacattggcacagtgtttgagtgaaatggcgcgacacgcgaacaatgaaacggaaccacaacgaaatgtcattaaaaggaaaaccagctgttcgtctggtgatctacaacagaatcagccaagctttgcgtcagaacaaatggatgacaatgacacggcctaacacaactttcatggatcatttgatctattgttaattcgttccttctccgttgcgaatttgagcaattcgaatttctaatctaatttgaacaaaaaatcattaatcggaaattcaaatttcttcacttttacactagcgccaaagattttctgatgaatgaccgttttcccttcatttccaatttgtttattgtttgtgatttgtttaaacacgcagacaatatttataattaatccatatttttacaaattcatttcattttacatgaattttcagcgatatgaaattttctctgttactcttgaaaggccaagttaatttgaacagtaagcaaattccttttcgacttaattttgtttaaaaagtgtccaaaatttagcccacaagtggttcagaggcatgtggcagaagggctattcgtggcctcaattttccagcgaaaattgg

SEQ ID NO: 1330 - DNA, 2748 bp, Heterodera glycines
aaattgttggacaaacaaaaaagtatgaacttccattgtacgaactgtcgattacacgccaataacatacatatagttagtaaaataaatgtgtcaagggtctccatacacaacgcttaccaagaaaacgtgtgaaacgatctttgaaggagaaaatatagaagatcttcctcgtttttttcgtcttcgtattctggtatgtttgttaggttactatatatactgaattaagcggcaatcatttgcaagttaatgtataggcaggcacttgcaaatactcgaaaaccctacttgaccgttgcataaaaagggttctttttcggagttccaaaaaagacaattgtctagaattgtgatcctgatgaaaaaattctttgcaatgaatatggggttaaaaatatgctggtcacggatttgttcagattttgaaaactcgttgatttgtcgaagggtaactttgtggatatttttgcttattttaccgtgctttttttgtttgatcttataaaattttattagcagaattgaagtagaaaatttttgtatctttttttccgaccacattttttgcaaaagatttcgataaaaattttaaaaaaatcaaggatatgatgaaaaatcatatgaaattaatgatttttcaaaatctgagcaggttcgtaatcacaaggaccagaattccacacaattgccaagtaaagatttggtcgctaatttgaaaatgttaaggatcggaagttcgtcactcagtgtaatgtttcaaagccccattttgagcaagtgaacattttggggaacgatgctttgagtcacatgcgtttgtccccaatcgccatttgggataagaaagagttcagtttggtcagatatccaacacccaaatatttttcatttccgtttttcaaatattaattccattgtgattgtgctttgtcgctgggtacttatggcttttgccaacaacttcagaaaaattagtttaaaaattctgggagggagtggcaaaagccataagtgctgcaggacgacacccaactcgttttttgtctatataactatgtaggaggcagacagcgtgaagtcagacagttcatatacatataacgcaaaaaacgagttgggtttttaccgtactgaagaggtagaagtttggcaaatatacgaaacgtctgaaaattttgcagactaatagaaaataattggagctctcaaatgtcaccaagcttttttgattggattttatgagaaaaggatcaattttcttcaatttttcttctttagctactcagcaccatcccattttaatcctctcccaaaccgaaattgtcatgtaaatattcacttttccatttcacctttttcttccattttcgtgttttatttgttaaaaaaatttaccacgatttttgtggtcaaaatataataatttcatgtaattaagtattttcgacacagactccaataacacttcctttattaataaaatacgaaccaatcatcagacatatgaaaacaaacgctcacacaaacaataggcatgacaagatataaacaactactagtttaggtccagcagaagagagtgattgagaggaaaggggcactctccaaaagtaaggaacagcgagtaaaagggggtgaagggaaatcggaaagggttgcgaggaagtgtcagaaaatgaagtcctccttcgccatgtcgagagcccagcggaatttgtcgcgttgcgttttgctgaatattttctcaacgggcacgtcattctttttgcaccatgcaaccgaaatcctgaaatttttttggacatagtaaattggaatattcgatagaaccaacctcggatccaagtagttcagttttgaggttcccagtgcaatttgtttgttttcatcctgaaatcaaaaatgaccaatctttgctgttcccgattcgttgatttgaagggtgacttatttccccaaaaaaaatcaaattccaaatttgtctcggactttttggccaacccttcctcccccatgccttgtccgtgcgctgtgtgttcagtttggcgatctgttccttcaatctttcgtatttttttgccattttctcgtccaccgatttgctcttcttcagctgatccttcaactccttgtactcctgcttcttctcttttatctgaattttgcttaggatttgcttttccgtttcatgtcatattcactttattctccaaattttccatcgacttttcgtgcgtttttggcactgccctttgatggttacaaaggatggccacctgacgatttgcacctgaatgtaggcaatataagtgaaatgcctctgaaccagtggctttacgattgtaggaaagcattttctcgtggacggaatcggaagctgaaatttcggaattaatttggcaattaaaaatgagatggatacgatttgtcagtttgtccagctgttcttggagagtgatcgacgcgttatacgtacgaaacactttcgcggtcagtccgtccatcagttccttcaggtattggttcaacgaactcgtctaaacaagcgagtaaataagcaatgtttcctttttgctctctcacatccaatcggtcgaacaaatcgtcccccggatctttctcctccataaaaagcttcagatttttaaacacttgcttttccaccggcacacggttgtaatagcggatggagtcttttgccgagaagtcgaattcccacacatacttcaggtcgtccatatcatc

SEQ ID NO: 1331 - DNA, 4092 bp, Heterodera glycines
gcagttgatgacccacatcctccggctgggacccgtttcttcagagaacccatctttggatggtcacctgttcatcaacaagtctcgctttcctcttcgttctcttatttcactcaaattacctctccccctgaatagtcccggcggttctattcggaagttgccaattttctgtttgtatccgtccaacatggcgaacccgtacacctttccctcgccttccttctcctctttctccgcctttttctcctctttgctgcgcgctttgcgcttctccgactccgacacgtaaaaagcgtgcatttgcctttcaatggatgtaaagttacaaaatctctcgtctttttattttttttttgtttacctaaaatcgcatttggccaaatctttaatttcgcctcgctccgcctttgtcatcactttgacccaatccttgaaaaagttctggttgaacaccggttttgacgtgtagtcgtggtcgagcattttcgcgtaaaaggaagccacttcttcggccggcaaagacaaatccatctccttaaaaaactcccatatcaaattttggttttaagttgtaattccaccatacctttccgtcgtatttgaacttgatgtgttttggcaatggcacataggccggtgcaaagacgggccctttgtggacaagcgtttgccatttgatggacccatcggaggcgcccgcgttcgactcgtcctcctcccaccagcgccacacttcctcttcttcctcctgtttcttcacacgtttcttggacggacttccctgggaagaggagggctggaaatgtccaaaaataccagggttaaacaaataatattccagggaaattagaatgctttttctctacttttgagtgtcccttccctcccattgtttcccttcgcttcttcttccgactgacctcttccttcacttcaactttcgttgtcttccgtttcttgtgctcaaccccagcgccgctctcttccttgacctccaccttagtaacttttgttgttttcgttgactttttgctgtcgcttttcttcgccggggatgggtccgacttttgtttctttttctgaagtatgtcatcctttttcatccgttttccttctcttcgccttacctttggctgatattcctcctcttccccgtcggagtcgtcgtcaaagtcttcttcctctccgctgctttcgttcttttttcgactttttgaggtcgactcctttgactttttcggcataacttcctcagcttttttctcctttttcttctcattgctggtttcttcttttcttaaattggtttgttttcaagtgatgttaccataaaaaggcaattcttttaatatataaaaaagcgctcaaaatgttcgttaccgtttccccgtggtgtcgcgtatccgttcgccccatggaacattgtccaagtcggtcccctcactttgtcctccttttggtgcaggaacattgttcccaccattttgctggtgctcattgttaataacagcagcttcagatgaggaattggacaactaaaaaatacaataaaaattcgtgactcaaaaatcttatggaaaaatactccgttttcggtgcccgtgccaatggaggacccttcttggcttgaattcgagtccattaggtcaccaccattcaacagtggggtctctccatttgcctcagccatcattgccatattagggcaggacaacagaaattacaatacaataatagttaaaaggggggtacggtaataaaaaaaacttaaatatgaaaaaaaaaattcttgtaacaaagaaaatgaagaaaagaattaggtaattcagagagacaattacgatcgattaaacagtaaaagtactcacgaaagctaagttaaagaacaagctacgcaaatgaaactgaatatgtaaaaaaactgcggacgacgtacggagcacgaaaaagcttaaagacagacaaaatgccacaataatttattgattaaatttaaaattgaaattattttgtacgtctggcaccaacccaaaattaaaaactgacaattaccgcattccttttccctctgtttgagctttaagtccaaatccgccgtacacaaatgagtgatgaacaaagcattcgccgatgtattacaaatttatgttccaatttggatccagctttgattaacgttttgttggacgatgaccaattgctaacagactctcaaactgataatgatacgttgctgtttccaattgtaaaagcttttagacaacttcatgctcaattgaaggtataataaataaaaaattaagcatttctcaatttatgatatttacagtaattcaggaggagcttagttgcgttttaagtggacaaattggcagtgaaccaaaaccttttactctgctttcgattttggaaaaacaaccaaaaaaaaagtctgacgataaattggaaaaagaaaaaggcaaaaacctcattattataaattataaaattaggtttccttcagaaatgccaaattcgaatggtaaagaaaaagcattgaatgaatgcgctgaatcgattgaagtgatcagtttgaaagagcagaaagcaaacgaactgaacattgataaaatggtaaaagagaattagcaaataattaattaatacataaaatacaaaattagaaaaccgatgttgccaatacgacgcggaagaatgtactcgaattccaattcatcgatgccttttcgcttggaaaggaaaaatattgcaaatttgttgaccgatcggtccaagtcgaaagtgacatggattttgccaatttaaaagtggaaggcattgaaaaggaggatgaaaatcttgttgaaagtgtcagtgccgcttcaatttacaatggcaaagaaagttcgatttcaacaacagcgaactcgacaaattccactgaaatgagtgttggggaagtgaatggacggaaagtggcgcgaatattggccatgaggtgggagtgttcacaaagatgacatttggatcggttccgatttcagaagtggcattgatgtttatagtgcggacaccgaaggcgcacttctcacttttgcacaacggcggaagccgcaaaaaaagtggtgagaaaagcaataacaacaaaaatattgagattctataattaggtattaatttttggacaaatcggttgtagctgtgcaaccagcaacaaatgtaatcattcgttggcggaggagcggcgcattgtcattacgtcacggaggcaatcgccacaagcggaggacgacgaactggtcgaagttctgtctgccaaaacattaaccgaagagagaatggcacacagtggaggaggacagaaaagtggcaaaaatggacaaagaaaagggcgaaatggggaggaggacgaggaacagtcaacgctggaccaagtgacaccaatcccaacaactttggaactgagcaattccacatgatgaactaacaataagttattccacgttaccaattaaagtgtaataaaaatgcatttggataaagaacagtgatgcaataatatatatgagcaaaagcgaaggacacttttatgatttagggagaccgatgcttatttcaaaaaacaaggtgacttagttggacttaaaaattagatttattctatacatactgccgtatctataaaagtgccgacaaacgaaaaatacagtcaaagtgtgggcaatgagaaagggattcaacgacctcccgcttttcggttgctatttggcgtacgacggcgttttgcggtcctcgcggtcgaatgggtccctccacacgggcagccctcccgcaagttcctccctcgacacgggcatccgtttccaccactcgcgttgtttctcagcataatattcgttgctgatcatcggctgaatggcaatcgcccaaaatgccgcaccaataatcgtaacagtggccacaactccgaagaattggggcttcatgtagcgcttcactttccagtacacattatcataaaagcgggcgaagggaggcaatttaactcccgaaggatagcgaattcggggggagcgtatccaaaaattgtttaaatgggatacactttgg

SEQ ID NO: 1332 - DNA, 3798 bp, Heterodera glycines
agcattcaatcacgtggggactcaacccacctttttccatcaacaggactcaaccctacagcattcaatcattgggactcaacccaccaacattccaatcaacaggactcaaccctacagcattcaatcagtgggactcaacccaccaacattccatcaacaggactcaaccctacagcattcaatcagtgggactcaacccaccaacattccatcaacaggactcaaccctacagcattcaatcagtgggactcaacccaccaacattccaatcaacaggactcaaccctatagcattcaatcagtgggactcaacccaccaacattccaatcaacaggactcaaccctacagcattcaatcagtgggactcaacccaccaacattccatcaacaggactcaaccctacagcattcaatcagtgggactcaacccaccaacattccaatcaacaggactcaaccctacagcattcaatcagtgggactcaacccaccaacattccaatcaacaggactcaaccctacagcattcaatcagtgggactcaacccaccaacattccatcaacaggactcaaccctacagcattcaatcagtgggactcaacccaccaacattccaatcaacaggactcaaccctccagcattcaatcagtgggactcaacccaccaacattccaatcaacaggactcaaccctacagcattcaatcagtgggactcaacccaccagcatgtcacagaacaaaccactaatgttttttcaaaagcattcttcattcatccacccggggggataaatagaatttttattttttcgaacaaataatttctttaaaaatttaattaaaaattaattaatttaaacgaaactcattaaatgtttaataaaaatgaaaaaaataatatagaaaatcacttagttcgccgggatccgaacctgatgacccaactcaccctcagaatgatgcctcagaatcctcatttatgcagggattctgagtccttaacgttgtactaacaaccaaaatctaatttcaaattctgatcagagccctaaataagcaggaaaatttttccactcgaaaaccatatgaactcactttggtcccgaatcccaaaatgagttttattgttaaaactttcttcaaaaaaaagataaaaaatctaaaataaatacctcttataattagggcaaggaattatatgcattatacatgaaaattgcgaaaagccgaaaattttgaagttttttcttaataaaattttttccaggcttgaaaatcttttcgctttttggtaagaataatagagcatgttaaaagctttcgattgatataaacaatgttggatttgatgccaaagaaaaaagctatcgtggaaaaacgagctggcgcctaaacgcgtgggtccctaaatcagttgaaaaaaaatccaccccgtctccttttatcccccgtatctaataaccccccccccccccttctgagtaggttgaacaataatccccccggggggataattagagataatacggtatgctattaaacatcattttagaagaaaaaatcaatacagcttaaaatttactcattttagcgaaaatcaagatgaaaagcgaaattttcgtttttttgctaatttgattctttagaatttttactatatttaaattttgtggcaacatccgccatgccacccaccattgtatccaccggatgtgttacaacaagggcacacatatgtgatatatacgataacgtaacgacgacaaatccgcttaatccccccccccttaaaattgatgacgaaatcggagggttttgattgagaagaatgaattgctcgtcctcttcgtcggttttgcattccattatcgttcgctgatcattcattcattcacatatcactcactcactcatcaaatcatcaagcatctgagttgccatatttactctaaacatattttttaatcgcaaaaacccaaaaaaaaacctttaaatttaatccgtctccaaaaaaaacaacaataaattgccaaaactttcaaccatctcctcagaagagttacgaggaatctgccaactaccaaagattttacaaaaataaatttctgatgctgctttttgtgttgctcgccgtgtccgacgcgtacagttcaagaacaacggtacaacaacacccactacagcaggacacgttactgtacaagcgcagtgagcggcaatgctcggccggcaacttttgccgggaggaggacttcttccattattacggctgcagctttggcatttgtgacttccatctgcaggtggattttggcgagtcaataggcagtgcgtacaaatagtttttaagtttcaattaaattgaatttttctcaaaaaataagaatgaaatttcaaatctagaaaattaaaaaatatatatataaaatttttgttccaaattttctgctatttttcaaatttatttcaaatttttttgaaaaattttttactagttttttattttttttctagatttgaaattcttatgatttttttaaaattggtatgaactgcccattgtataaattacgtataaaacgagatgatatgggaatcttcgtctttggctctccgtcttcattttgttcactttggcgctccaatctcccggaagcaataataggaacagcaaaaaccatgattttccggcattggatttttcgaaaaaatggagacagaaaattttcggaatttgggattccataatctcaaaaaagtataggcatcgtacgactaagtaatccaaaattaaaaataacattgtaggaaattatttcataatttcttcactgaaaatggcaattgtccggcaaaaaaacaaacggcggaacaacgggggccaattagcctcattagtgtcagcatcatcatgtgaaactgtgccgtgccgaaaacccatgcctatcagcagaagtgccaatttcgtttgaccaaataaatcccggcggcaccgccagcagtcggctgcttctcctctcatttgcactttcacttttgctcacttttctgtgtttggcatatgcacgcaaaaacaattaccactacaaagtaaagggaaattattagaaattctttttttacaattaattccaagactttttacataaatttattctcattacgataaaaaaaaatttggtttttctaattttttaatatttgaaaacttagaaaaaatttttgacggaaattcgaaattcgcattacaacacatttcactgataaatgatcctttttcaattttttattttaatttacaattaccgagataatcaattacttcaaaaaaatcaatacccctgatacctaattagtccgtcacaataattattgaaaggtaacggtcatgagaaaacggcggcatcacataaacagtacagccaaatcagctgcttcaccagcaacggaagcaaaggtactcactcggcgggacagccaatttcagtttcgaatttcggattcgattcagtctcggtcttcgagattaagcttcaatttgagggattacccctccgcattttaatcacccagccagcttcttccttacaattataaaaaaatgtaattaaaaattttcggaaaattatttctttgaagggagaacgaccgctcaacgacaacaacaacaccagcaacaacagcacaataagcagcagcagcaacagatcgattctgagttctccattgaggacgtggacgaggaacaaattgacgaaattctttcggacactgcccaaaaatttggt

SEQ ID NO: 1333 - DNA, 4572 bp, Heterodera glycines
  unsure (1)..(4572): unsure at all n locations
cgtaaaaggttcgaattcttgggtaataatgcagaattgtggtcccgacgtggtgcccccccccatttttcggcagaaaaattttttgttttaaaaagccgtgaaaacatgcttctaagggttttttgggtctctgatcacgaatatggcatttattttggtctatttcgaaccccagactcgaactcgaacaaaaagtcgaaaaatcaaaattttgaaaaattcattttatgttcgaatctgagcagaatgattatttttaatcttccaaaatcgattcaaatggatggaatggccaataactgaccgtcgttcgtctcttcgttaaaaaatgtgctggcttttgtccattgctctgcatttttaacgccttttgtattcaccattgacaacaaaagaaattattcatctgtcatatttgtgggcccgcaaattcggcacatttgatgacattgaaaaggataccgggatcagtagacaggtcatcactgattggctgaatttttaccgcgatgtttgcgctgagtattttgtccgacacccgatccaaattgggggccagggttggaataccagggttagaccgttgtcatgattgcggtttaaggggtaacggtcgaaatcgacgagacctgcattgtgcgcagaaaatacaacagagggcagttgagggggaatgtgaatgagtggctttttggaggcattgagcgcggggaaccaatggacaaagggctttcatggtgccagtcctccgcagacgagcccaagatctgctgccattgatagagcaatacattgcccctgggagtataattcatagcgatatgtgggcggcttatggggggattcccaatctgccacagaggtaccacatcatacagtaaaccataatgaaaatttccttaatcccaacgacccaaatgttcacacccaaaacatcgagggtatgtggtccacatacaaacgcaaattccgccccaatctggtaatgtttgttttcttcttttctcatgtcttcaacgcatttgtattgccattccatccatttgaatcgattttggaagataaatgtgaattttgttgaaaaatgaaattttgactttttgttcgaaattggtcgaaatggaaaaccccaggaaagacgttttgatgaatttcaaaaaaaaaatcattttttagaaaaaaggtggggaggggggggggacaaaccctactattaccccaaaatattcgtactaataaattcaaattcagtaattttccatattgactaattttgagagaagcaaaatccataaacaaaaccaaaactaattagaatatttcatttcttaaaaactatttcaatgcaactctttttgtttcactaacccaaagacaaattccttccgtttcatttactaatccaaaatttcaccattcttggcaaatagaaaaaacaaatgaaaaatcagaatcaaaacatttgttatactaataaaacatacacacaatcctgatttttaaccccaaatgctgattttttgatggcataaaatttgaaaattatcaaaatatttaagaaatcggatcaaaaatgaaaagggtaaattcatacccaatcaaactgaacaaatttggcatctaaaaaaagattttgaaaaggggaatctttttctaagcgaatgttaagtaatttgtcatctcagaaaaaagttgtgggaatttcaaacttttatcatgttataactcaagtcctaggcagactctttctaaccaaaatgctaaatttattctttttcctattgattctaaatgttcaaagtgattttgtacccttataaccaaaattattagaattttcgaatttatgttttttcatgtgttagagacatgaaaatagtacgccaaaacgagagaaaaaagaaatacgtttttattattatttataatttttgaatgggagtataaacaaaaataaaatcagtatagaaaaatgcagatttttcttctctatcgctatgcaaaatttggtgcggatttaacatagagaaaaaaagctagacatagaaaagcaaatgttgttttttacaccattaaaatgaagagatagtacgccaaagagagagaaattacaaagaaaaagagaaacgacgagatagtactaggcttttctctgcacagtggagttgacccatagtgatagtatggtttacaggttcgaattcgggttcggggttcgaaattggtcgaaatgaatattatattcgtgatcagcgccctcgagaaccctaaaggactttgaagaattgcataaaaccccctttttgccttttttttgtgggacctgtaaaccatactattaccgaatttgagtgccaaaaaagacatttttgtaaaaaaccaaatttttcaaaaaatcgccaaagtgggctccctttaaaaaaaagaatttcaaaaatttttaggcgccaaaaatcgtgaaaaaggcactttgataggcacgaaaaaattgaaaaatttttatgcttaacacatcaaaacaaacgcacaaatgaaaataaaaataattcttccgattcaacgcttgttgcaatccttcgtacagtggctgatgctgtggcacaacgggcacatttttcctcgtcttctaaatttcaatttggtcacaattacgattaattttatgaagtgtcaaagacaagcgttagtaccttcaatgagttgtgacacagcggtggcacccgtggcgccgcttgttcccggagttgacaccacctcaaaagcatcaaattcgaaatctgatcactatctcatttgtttgactaataggaaaatttaaaaatgattaaattcaaaattgaacaaattatttcaaatttcctaaaaagattttcaagatgagctctcctgttaacacggccataaagaccatcaaccttcaaaaatttttcagaatccgacgcttaggtttcaccttcttgggcaaaataataaaactcaatacaaaattctcaaaatctaagaataagtcggggggggggaggggtgtcggagccagtcatgtaaatcaacaaattttttctcttaaaacggctttttttgcggccaaggaatgtcgcgaatttgatttgcgacaagaatttctgaaaatccgaaagcatcagtgatggaggagacaacggggatgaggacggggaagcgaaatcgttggggaatgagtaagacgaattatttaaatatattttttcccagaaaccggcaaaaatttgtcagggatcagagacggtaatcgacccctaatggagtcagtttggataatccactacactatttgatgtgtaggtatgtcacattttaaatggattatttttcgaagcgaaagtcttagaaaaaaaagaaagtaaaaaaacctttttttggggtggtccgggccaaattttgcgatgttttggcaagtctacgactttttaaaaaaaaaaaacgttntttttgcggcgtggtttttaaaaaactttttggggggacagggggggaaaattttaaaattttgtatagatttcgctaaggaaattgtgcaagttttaaaaacgcattaagactttgtataaacttattttccaattaaaaaaaaaacatctttttttaaaattttctaacatttaaaaattttttaaaataattcggaattccgaaatttttcggaaagcattccctccccagtgctgacattagccaaactgaccaactgttgctgcatctgctgctccacctgctccgactcctccacaaaagccttggcattgcacgcgtcgcgcaggtggccctccaggcacttgctcaggttcagcatccaatcccgttggttctgcattttgcgcaggtacacctcgatcacttcgcccgccgggtggcgttggttgatcagcgcggcgccctgattttgcaagtcgttgaactgcttctcgtgatggagcagctaaatggcagcaaaacatggtcaccaaccattaaaaaggtaatcattcaatcattaaatatcagtagttggatgagcgagattcttgatatttaaatccgggtgaaatttgtaattttcaacggtaaatttttccataatgggattcaaaatcattgctctatcctctgatcattttattcatctataaaataaaatcactctattacatataagaattttgaaaattaaccaagattttagaaaaacttaattttgaaattaaaaaaaattaaatttatttaaatttatgaaattttgtaggtttgattataaaataaaatttttcattttgcatgcgatgataagttgttgcccataaattctataaactttttaattactaatccattaataatgccgatgcaaaattaaaacttaaatttcgaaatatttcattgctaatcgatgaaattgtcaatataattttaaatgctcgatcccgaacataacaaaaacatacatgtacaaggggtgtctcgacacccaccccctcgtcataagaggcctcggacaccccccccccccctcgttcgtcgtaaggggggcggctgtaaaagagggagggggtcgtc

SEQ ID NO: 1334 - DNA, 2071 bp, Heterodera glycines
cactggtgatgatgatcatttttctcccccgtcctcggtcacgtcgtttaggcgccaaaaatttttatttctttaaaattgggaagaattttaaaaatatgtttgtttggttaatggattggatttttatgggaccatcattaaatatattatatttttttattaattggccaatttgtggcagaacgttggccgtaaattattaaaacgagtgaatggtatttcaattttaaatcgttaggaaaagtggaagaaaagcaaaaattttatataaatgattttaaaaattatatatataattaaaatgattcaagggattaaaaataaattgtttaattttattggcgacaaaaagtgatcaaatcatctcaattataaaaaaatttaaaaagaaaatatttccttcgataaaaaagtgaagcaaaaatcaattttaacataggcaattatgcaaacaaagaaaaccctaaaagaatttataatgaaaaaataataattcttatttctgtacataaatataattattttcaaccaatttcatttaattgaaactcattaaacataattactaacagactgtttggcgaataataaagcaataaaaaattcaaccagtgagtaattaatcatgaactcccttccccccccccatggctacgggcctgcgtatggcccttggtctgagacaccccttgtacatgtatgaacaaaaacaacttttttcacaatttattttctggccaattatgcccaattagtcacgcccgcccaactacctgctttaagtaaattttcagcatcggaatgtccaggcgtcccaagtcgctccggttacgcttcacttccaatgcctcacgacgacgatggctcaaacacagttcaagctgagcagcacggatgaaggcgatcagcgagtcctgtgatcagagagagagcattttggttgatcagtaataaacaagaaagaaaatatgatcaaattaagagaccatggcaaaaattaaggaaatggctaacgcataatttaattgccctattaaaggacctaattaagcatggtataaagcccaacccaccaaatcgaccatgcgcccggcagacagttcgcgcaactgttggtactccgactccatcattttcaacagctcacaataatcgtatgaatcttctgctgatacttcagcctgagaaagtgaaaagtgatcagagaacgtagacgttggaaggaacgaggaatgattcttgatcatagtcatcttggtcgagattattatatgaaatatacggtagaaccaccggttcaatatcagagatttaaaatattccaatattttgactctaacaatttggcattttgtaggccagaaacaattcaaaatatttttatcacataaatttggtgtctcaccttcccccgatcaaaaaatggattgtaagatcactccaattgttttattaaattatttttggcaattttttttacttgtctggcaatgcattcgtccaccgtttgtcgaaagtcctgaatgtcccggttgtccagcttgtgctgttcaaagatttgctccaacacttccagcgtctcgctgaattgcatcgagttcagcttatgctgaaataaatgggtttattaagcctgcgaccatataattaggagtcctaattcacgtaaatgattaaaacactgctatttttatgatcaattcaatatggggatcagttaaaaccgaaggaagaaattgatcagaccattttttaggtctgttaaacctcggagttgaagtgatcacagcctttataatacgttcagctcataggaaaaatgataatgatcagttgatatatttattgggttaaaaaatcaaaacaattcaaacctaaaccctaacccggttgtttaatcaacacataacaagcatttaattattgagtatatccgcatcaaacacaccattcgatcacgaatccattggatggcatcctcaactcgacgaaaagcgttgccacgcgtgccggacgatgcggtcgagtatcgttcagtgacgtagcgtgctccctggctgaggccaag

SEQ ID NO: 1335 - DNA, 1629 bp, Heterodera glycines
aatttgcaatggaattgagaagcaaaaagaatgcaataacgaaattaaacaaaccaaaagagaagaagagagaaaggaaaggaatgagtgattcatccgccaatttctctcttttttattgtctttttttggcattttcggattaaagaaagtttgggcaattggcggagggggggggggagaatgggggggggaacttttgagagacataaattgtctccatactgaatttcgggcaaaaaatgacttttccggggtcccggtttcgggcatttaaattcgacttttcgggatcccgtgctacccggtattccgaatcgggattcctgattcgatttctgtcaggtctctaaattattgtacacagattcattcacacaatgtttggggtagtgggggagggagcaaataattggcagttaaaaagtgaatgaatgaacgaatgaatgccaacaacgattgggcacaacaaagatgatgtgatgtgatgagacaggaggaggaggatgatgaggaagtgaagaagagaaagtgctgattcaaggtcatttatttttcgtctccgcgtccgtccgtctccatcgacggcgcggcggagacgaaacaaacggcggaggacgaaaaacgaggtgtataatgacgggatagtgtgttcactcccccttatatatgcaacctcccccccccccttcccatccgaacccaattttcaccaccgaccgtccgtctccccgccgacaatgagcagaacgcatgatgtgcctgttgccctcttatagggggtgggaccccgacttttttgggggacataaatttttgaaaatccgtgatttatatggttggcattacacccaatttaaagtgctggttgagactctgaaagcctgaaattatcactcgagtcgagaccgacactcttgagcagcattatgaccagccgaacatgcccaacactccgtgccaccctcgtcactgttgaagatgcaaatttcggaaagtgccgggtttcaggaaacaattaagtggctctaaatctttaactcgggatcacggaagacttcctgagcttaaaacgctcaaagggtacaggaaatacaggggagattcgagatgccgaacgcgggattagtgggaaatttttggactgagtttaaaaatgcccgacgtgggggtggtacaagaaattcggagagactcgaaatgccgccgcccttggcatcactgggaacctgaatttgaaatccccaaaatttgggacgaattttttgaactatggcggcacactttggggattttgtgggattttaaaatttaaaaaaaatttttttctgaacccatttgaatgtcccactttcaacctatgataagcttaaatggtggagagctgagcggggctgctccactgattgatgctgttttgctatgcattcgtcgaccaatcggtcggtccccgccgacattctccttatgtattgaataccgctaaatcgtttgtgaaggataccatatcttcgagacgacatgctggatcgatgatttcttaatattaaattccctattgttttactctgccttccctatcagattaatgcgtatgatgatctcaactaaatagtgattgtgcaggca

SEQ ID NO: 1336 - DNA, 3278 bp, Heterodera glycines
gtaagttaaaaatgaaaatggataaatttaaatcttaaatttcattttatggcaaaaagtgcactaatccattttctggccaagttgcatcatatgtgggccaaatatgggcacaaattaaattaagaaagtaaagtaaaaatcaaatagggaaaaaattggaataaaaaattgtcgcacggatataaatggattttaaaaaattaaaaaaaaacaaattaggacgaaaatttcaaatttttgagctatattccacatacttaaaattcgagtgtttttacagtagacataattaatactctaataattacgcattatgaacatataaaaaaattcactatttaaaaatagtcttcaaaataaaataataaattaaattttcataaaaattgcattaaaaaattgatttaacacataaatgcaggggtgcgatcgaaaatttttcaaaataagaacatcaaggccaaaaaataagatttttgggtccaaaataaggacattttgcaaaattgctttaaatcgcttgtataacactttattcaattaatatagcatcaacttttgtacttttcgcctccaaccaaggaattttggagaatgggggggggggagatggtccggcggtgccgataggcgccgccgaggaaaattttttgtaagttcgttatgatttgttaacaaattttcatcaaaaaggccaatttttgcaattaaaagccaagccgacgacctttttttgccttcgaaaacgctttttttgcggcgaatttttcaaaaatttttgggggttggacaggggcgtccggtggcgccgataggcgccgctgggaaaattttgtgttttttaatgcgatttgttaacagattttgtctaaaaattgccccaattttggtgattttagagctaattttaaagaaaataaagtatttttagcgtccggcggtaccgataggcgccgccggaaatttttttttaatttatagggaaaataagaacatttatgccataaatttctaaatttatgaataattttaagaaataagaacaaaataagaataatagcccaaaatcagaacatttcttacaaataagaacatttttattttgtaagatttggaccctccaaatcagaacatttcttataaataagaacaaatggaagccctgagtatgcggcctcacctccaaatttaaaaaagctccaatggtagcgcgcaacagttatttaaaaagcgcaattataattactcttcggacgagagggtatttaagtgccgggtagtggaaggtcattaatcttgctgctacttctgctgctgctgtttaataattgttgattaattgggcagtgatttaccacggaaaatgggtttttaaaaataaaaatgatattaataaccatcctctcccatttttggcaattttttagagctctaagcataggcatcagtgtcattccaagggtccaaaaatttcccgaattgtgattagccgtgagttttgcacataaatcactctaacatattcgttcaatgaataattgaccaaataaagtatgccactaaattaatcattaaatgttgtgaattttaggcaatttaaattcaaataagccgaaaagcatgacaatagtgaacaagtgaatattaaaagatttatggtttgaaaagcattgaaatatatagtatatgcacaaaatatggggaaaacggaaaaataaattggtttgatccgccatttagagagtgccaaagtccgacagacaacaaaacggcatcaaatccgaaaaattccaacataaaacacaaattgccgccacattcattcacttttgctgttgctggccacttgaactggcggtggatggttcgtcctccaaaatgctgagcaattcaaattttaattaacaaaattcccaaaattcacttcctttctcacccttcttcggtgtcgtcatcggccaattcaattgtaatttggtttgtttcatcttcaaatttccattcgaatgcctccatttccatttctgttgaaacaaaattagggggacagtgccgaaacaaaatgaatgtttgattgccattgagtctgagactcatatgttctccagtaaaagtgttgcttatggaaaatgttggaaatacaatttcatccgaatcccaaaaacacaacgacgaagcggaagcgggatgccgccaaacggaatgcctaaatcaattgtgccgttgttcgagagtctttacttgagtcacggattaatggatctcaaaatctaagtatctaagggccccaattctcgggtaattttccgtctcgaatagcgttattatataaataaagcaaaaaaaaggaagaaaatttaaaagaattctggaaatataagttaaaaaaaattcctacttcttaacctaaatttaaaaaaatcgtaaaaatctgaattttcaattttttttgtttgagtttgcgttaatttcttcgtgtcttacgaagtcgcctttcttttacgccttcgtctctgacttttcccctaatcgcttcacatttttttgtgcctttgtccaaaatcgggttcaaattaagtttttcaaatcactgacagcctaaacaagctttaaataagcgattgaaagtgattgtatccgatcatttgatcgtcaatgaatttttgaaaaaattattaattttcaaacaagcgcgcaaaaatttacgccaattacgctatttggcgttatgagaaattttgtctaacactgcggaacgggccaactccgtctggccaactccgtctgagccaactttgagtcaatataactcttgaagttattgaccgaatcaaacaatcttgatatcattcgaaagctcttcacaggctctattagcctactaaaaattacagaaaatttcgaactataaaaaaagatagaaataaaaaactttgaaaattctgccttttttgcggttttcaactgacaacttttttgagagctgcttaatcactgagaaatagcttataaatatcttctaaacatctagggctttcgaatgataccatgattgtgaagtttggccaacaaagaaaaaagttatagctttttgaacattgctgagacggagttggccagacggagttgacccctaccgatttggcgcgctgtcaaaatgtcccgcgtcataatgtcccgcagtcataatgtcccgcgtcataatgtcccgcgtcataatgtccagcgtcataatgtccagaggtcagaatgtccagcgtcataatgtcccccaa

SEQ ID NO: 1337 - DNA, 6481 bp, Heterodera glycines
attttcaaaaaaaacatttacttttggcatagtctctagttcggcgctttcataaacattcaaatattgttggcctatagagagcgctattactctgctattatattacgtttggccctgctcagtcaaacaaggatggttcgtccgacttttgctgactaggccaatcgtcctgtgggccaatggttttataagccattcgccctgtaggccattcgtcccaaagtccaattaaaggacaatcgccgccgtgtaggccaatcgtcttataggccaattgtcctgcaggtcatttgttatgtaggccaatcgtcccctaggccattaaaggacaattgcagtgtaggccaatcgtcccttaggccattaaaggacaattgcagtgtaggccaatcgtcccttaggccattaaaggacaattgcagtgtaggccaatcgtcccgtaggccatttgtcgggcagtagccaaaaactgtttggatgttgtcgaactgccaaacaagcctaatgaaagagcatctgttaataattaaaactcaaatttagcatcattcaattatttgttttgatttttaaggcacaataaatcgacgtcaatcttcaaaataaaaaatgtcggacaatccagaaaaagtggaaaaacagatggaaaagcaaatgtatgtgtaaataaataaatgtgccgtttttcagtaatagagaacccataaagaatatgcttgctttttccgctcaattcgtacaaaaagcggccctccttatggagactaattgagtaattaatacttaaatagggaaatccttaatgtgccaacccagtggcgtgacaattcgtacatgtcttaggctaggcgccgaagccttaggcctagacttaggcttcttgggcctaggcttaagcttatgctttcttttgtaaatttttttattgtacgagttgcctttgtatgtgtagccattaactcgctaatcctgaatttcgtctgttaaactggatgtttaatgacaaattttgccgaaactggggtactgaattcaaaaatccgtgcacagagacccctaaattgagcaaattccaaggcttttcggtgcctaatcttcaaagctctgcttggggtgcaaaatggcacttcatttgccatttatatgaacattttgttccgttttgaaaagaacttgtcgttatgtaagactgatgtaaaccgcaaaaggaggctttgagcttttttttttttgtgaaattggcattagggctatgattacgcgattaaaatctcggttttgccgagatttgaatctcgatcctgggattcaagtcctgccttgatgagatccagatcgcggcacttctttcacaaaaggcgggatcgggatcccgggaaaatccaggcgggatccagaccaggattatattatcgagattcaactcggttttactggggcataaatctcgacgctgggattcaaatcatgattgagatccggatcccggccctcttcacaaaagccgggattgggactccagggaaatcccggcaggatcccgaccacgtctggcgagccctctcccgctcgtctttacaaaataaatcttcgggattgacagggatcgggatttcgtcgggatgccttcgatctcagctttttcagattcatttgcggcgacagttggcttgagctgttccatttgcttcgacccgccaaaattgggcttcaaattgcgctgctcagcagccgttttgacgctttggttgacgaacacttcaaaacacgccattggacattgggaagcattctaattaattgccaaaaaattggtggcacccatggtggagaggacgaagacggcgacggcactgccgagaaaaagcaaatgcaaatttttttcttgaccaccggactgacgattggaaattggtgccaattgcggacagaccggtgcccaacaaagtggtcggattccgatacatttacattgagtaatggctcgtttaattactttaattatcatttattaggcaaaaaccatgaaaaactttgaaaatttctgggttttgccattgaagcaaattatttttaatttttttgatagaaatataaaaatttttttaataataatttaatattgacatagtgtccttcactgaaggattttcattcactctcagattgtccttaattaacggactatcctcctctggtggattgtccttaattaacggactgtctttcactctcagattgtccttaattaacggactgtctttcttgacagattgtccttaattaacggactatcctcctctggtggattgtccttaattaacggactgtctttcactctcagattgtccttaattaacggactgtctttcttgacagattgtccttaattaacggactgtctttcactctcagattgtccttaattaacggactgtctttcactctcagattgtccttaattaacggactgtctttcactgacggattgtccttaattaacggactgtctttcactctcagattgtccttaattaacggactgtctttcttgacagattgtcattcgctgattcattttttggcaacaacatttgcagcttgtttattcccaacgaattttgccaatcttttctggcttcatttctcgacaattattgtacgccaacaactcgcacactttttttgcctttttacgacaatatacccgtatttccaacaacaacaacaacaacaacaacagttggtgccatggatgatgcgcaacaaagtgccgatgtgtcgtcgccgaatgaagttgcgttggccaaatggttgctcacgccaatgccgtcgtcgtgcgacatcggtggcatttccctggcgccaaaagtgctcaaatgcggatggcgcagcatgttcaattgtggcgaattcgaaatagagaatcggatcttaaaagttgaaaaaatcaaaacggtaatcaaataatctaaatatttatacagtagggcactttgacacggtagttaccttggcgcgggtatcagggggacaatgtccaaaatagggtaaaatgggcgataaatcacaaaataaataataaaaaatatcaaaattttggcttacaaactaagcatgtgtaccaccgagttatgaaagtgccacaatttgttttataatttactgcatgagttttgttagtggcagttggtgcataggcgctgcgatatcatcatttgttgggtcaaaggttcggatcccctagcattcgaacccatttacaattttttttctgctgatctaaagtaaattttacaaaaaataaataaaataattttttaataattttgatagtttagtgaaaataaaatttgtaaaattgatttaaaacttgccacatcatagaatttaaagatcttttttcggttaaaagaaattctcatgttttgccaatttatttggctctatccaatgtgtgacccattcattatttggcgctatgcttttcagtcatttgccaatgcttcttctcgtgccaacttcatcatcatcatcacgtgctttaattggacctttagtgttagagatgcccaagcaattgaaccgttttgcgtgaccaacgcattgaccggcgaacaattggcacttcaacattttgaaagtcctggtgctagtatgcaatactatgtggtgatgattcgccgctgtccaattgcgcgggatcggcacaaatgggccaaatgggaaaaggaggcgattgaatggaatttaaacaccaaatggaacgtcattacacttagtgatgatgttgattccctttcctaatgatgatgataacaattataataattattaagatgttgactgtaataataataataattaatcacacttattcaattttgatcagtttttaataaaattttgatcactcattggatagattactgtaagtttctctccatactaattaaatcagtttgacaaaatgcgacaaagacatactgtgattaggtcgatgttgtaaattcatttccatttaatcagttttacacaaacgcaatatcgtattttgaatagcttactgtaagtttgtttccttaaaattgcaaatctttttgcttcacagacacatttcttatcactcataagcagcagctgaaactgtgaatggtgattatccctaatgaatcgttaaatgttttcccattttaacgaattttcgacaatttaaattcaaataagccaaaaaacattttataagtaattttttaaacaaaaacaacgacaatagagaacaggcgaatgaatatatgtaaacaagagtaaatatgttaagaaggcactgacatttatatggaatatgcatagaatatgtattgaaatatgcgtatgtattgtataaaataaaagtgaatgaatgaaaaagaatatgccgaaaagaaacattggtcggcagaaaataatagaaaattaattggttttgttggccatttggagagtgtccgacagacgataaacgggcattaaatccgaagaaattccaacactaatcgccgcatcattcatcacttttgctgttgctggccacttgaactggcggtggatggttcgtcccccaaaatgctgagcaattcaaattttaattaacaaaaatgcccacaaattcacttcttttcttacccctcttcggtgtcgtcatccgccaaactaataataattttgttttcttcatctttaaatttccgatttgacgcttcaatttccgcctcaagtgaaatcaagttgggaggacattgccggaccaaagtgtatgtttgattgtcattttgtctgaggctcatatgttcgccggtgaatgtgttgcggatggaaaatgttggaatttcaagtttatgcggaagacaaaacacaacaatgaagcggaagcgggatgttgtcgccgaatggaattcctaaaccaatggtgccgctgttcgagagtcttgactcgagaaatgtcggctgttcggggtcacgaatcgcaccgcgacgaacccggggatatgttctcgggtcacggggatcaaatgaagaagtctcggaccaccgacggggggaggaaattatcggtcttgagtcacggattaatggatctcaaaatctaaaggtctaagggtcccaattctcgtgtaatttccgttctcgaatagcgctgctataaataaaacaaaaaaaggaagaaaatttaaaagaattctggaaatataagttaaaaaaaattcctacttcttaacctaaatttaaaaaaatcgtaaaaatctgaattttaaatttttttttgtttgagtttgcgttaatttcttcgtgtcttacgaagtcgcctttcttttaccccttcgtctctgacttttcccctaatcgcttcacatttttttgtgcctttgtccaaaatcgggttcaaattaagtttttcaaatcactgacagcctaaacagctttaaataagcgattgaaagtgattgtatccgatcatttgatcgtcaatgaatttttgaaaaataataaaattttcaaacaacataattaatgttcttaaaaatcaaaagacagtagtgatcttttcataatttaaatgctgtttaggctatcagtgctttaaataaaatcaactttgactccgattttggacagaggcgcaaaagtcggggctccggtcgtcacccccgccccctatttaaggtatggtaaatccattaattgcttacttttttaagttgtgcaataaacgcaagagcaactttcttcgtgcataaaaacttaagttttttcaatggcaacagatcgctgttgtacggaagtgccgatgatgggcacaaccaattgacaaaagcttgcagcgcagcaaaagtagcggtttccgtggaaaactttttgtgcacctaaagcacagaatgaagtggtggacaatcggtgagaatggacgggatgacacgaatgacgtcattgttaaaggccaagccattggtagtgcgcgagaatagtggcaaaatattgagcgaaacaaattccaacatgcgatcacttccctttgggatgctcacataaagtggacataaattgaaaactgtggtcctccatttgttcaaaaattccataacttgttggctgatgtatctgaaaaaattcaaggaaaaattaccgtaactcttagttatacgtgatacacttcggccctcccccccccctccagcttcagcatcaattagtggagtgcccattttttggtctacaaatttcttattaccaattttttgggagccgttgaagagcccaattgtaaaagcccccccccccccctccctccctcagaaattgtataaattaattaaaattttcaaatattttacttgatttcaatttcttcaaatccaataacacgtcctgtaagcggatgatttatgtaatccaaaacgtttccagccaattgttttttattctgctgctcaatcatttg

SEQ ID NO: 1338 - DNA, 10151 bp, Heterodera glycines
tgggtgtgtgggctgcatagtatcagctatccctactcatggcattccacaattggtaccttggatgatcaatggatagacatttattatactaatttgataaatgaaagcagtgtaatccgagtgccggtgcccgaggcgtcacataaaacagtggatcagctccagaaatttttaatcgaaactttgaagcaccaaagtaataatgttcacgtggacaattacagaaaaatcaacaaaactcaattatcagagggagataaatttttgcaacctccccagctgctttcctctccaccccgaaataaaagatcagcgccagcagaagacgaattgacttccccaccaagatttgatgaggaagaagggttaaaatctccgccaaggtacgacgagacaaagagaccgaatttggatgatgacaaatctccaccccctccggttaaaccagcctctccacctaaaccaataacaccatctcctccagctaaaccattaaaaccaccccctccagctaaacaaataacaaaaccccctcccgctaaaccaacagcacaaccccctcccgctaaaccagcaacaccactgcctgttgccaaaccaacaacacaaccccctctacctaaaccaatagcaccaccccctccacctaaaccaataacaccaccccctccagctaaaccaacagcaccaccccctccagctaaaccaacagcaacaccccctccagctaaaccaacagcaacaccccctccagctaaaccagcaacaccacccccaccagctaaaccagcagcaccaccgcctgttgccaaagaaaaaatgccatcccctccggttaagccaacacaaccttcgcctcctgtaaaaccaattacaccggttaaatcaacacagtccattcctcccgcaccacgtccacctcccgtacctcctattaaacaactaatacactcaccaccaagacatcaaccacctgcaacgaataacacgtcggatagatcaaacgaaacaacattaattgcttcagaacccattgcggcagcactaacatctctaccccctaatgaagaaatacaactcgtttggactgatatactaccaggagagaatttgtctaagaaaagtgataacgatgagtatctcaagtacattattaaagcggtggaaattcaatatcttgatgattttgaacgattcaagctggttattgatgagccgaatattagccacttatccttctcgccacagttgggctatgttctgggatttggcgatcctcagaatgtccgtaatggagaaattgccaagtacaggtgtgatttgaggggtggtttctccagctttgctgtgtactcaaaggggcttacagaaaatatgattattggaaattcgcttagctcattgcttcgcgttgtatcagttaccagtggtatgcctggtgattatattgagaaaatttatgattcgccaatatttgcacgcgtgctgcctcgggagagcaatgaaattgagattgagatgcgctcaatggacagtggaagacatgtcccattcgcttacgggacgacgctgatcgttttgttatttaagaaggtgataaatttttgatcattctcattttgtattcatttatattaataaaaatggttcatattgtgtttgatccaagtaatgcgggttatgatgaatatgtgcaatatggtagtggcgtagagattgaagactatttcaaaggatccagcccattccaacgaggatacggtgctcaacacggtgctggggttggggacgtgtttcgagggatttggcgctttttcttgcctattcttcgccgtgtgggcactacagtaggatcggaggcgctgagcactggtcagcgggtattggatagagtcggaaatgagggattgcctataaaggaggcgctcgtgagtgaggggaagcgaggcattgataatgtgttggataaaggcggattaccaaaacaatttggcacaggcaaaaagagtataaaaagaaagcaaaatagccatcaaacaataattggacgaagaattgcgaaaccagtgaggaaacgtgtacgctcagacgcatttggtctttattaaatggcttttcataaaattgataatgatagtgtaaactcaataacgaatgcattggacttttttcgtattcctccaacaaatgtgagcgtctcatcctcaaaagtatttgagcttcttcccagcaatccactggccgacacaccttatcactttaaactacattcaagtcaaaatttcattgacctttcaaaatgttatttgctcactgaatttcgcattcgtaaggaaaatgaaaacggtcagttggtgaacattaccgcagcggacgaggaagtggcgccaattcaaatgcttggccacaccttcattaaaaatatgcgaatgagcatcaatgggcgtgaaatcttcaactcaaactcactaatggcttacaagacatatttctcacacgaactttcatattcaactgccgccaaggactcgcatttgaatgctgccgggtattataaggacacctctttggttctcgagacaaactcaggctgtgctttaagaagaaatttgtttactgaaagcaaaacagcccaatttgttgcaaaaattgatgcggatttattcaaccagccgatgtatctaattaatttttgtgagcttgacgtggaaattctaccaaatgacaccaactttttgttaatttcacccacttatgccgggacgcgctttcatcttgaactcgtgggattgaaaatgtatgtgaaaaaggtatcactgatggatggattggctttggacattgcgcgaaaattggaggcgaaacccgctcgctatgcggtaagaaagacattaatgaagtcaatgttcatcagtccgggtcgttttgagtttaatgcaaatttgttcatggaccaaattccacgccgcatcacaatggggttagtgggaaatgctgattatgttgggaatattatgcgcagtccattcaactttcaaccttttaatgtgcgggaaatctcaattattgctaatggacgctcatttccgcaagcaccctatgatttggactatcccaatggtaaatatgtgcgcgcttttaatgacatgaacgaagcagtgggcttcagcaactcaaatgaaagcaacggaataacttttgcacagttcggaaagacccattgcatttacgtgttcaatatgacaaacagtggtgatgatcaggcggcactatttgatttaataaaaaatggaacaacggctgtgagtataaagttcaatgaggctgtgccagttggtggggttatgcttgttgtgatgggggaatgcgattcgctggtgatgttggataaaaatcgctcaattagcactgatgtgactatttaaatcgatttgtaattgtgctttggccagttaataaaatgaaaagaatttctatcatttttctattggttcgtatttttcttcctgtcgtgagtgaggtgaattccttacctttttttaccaatattgatcatttgaaaagattagataatgcgaccataacaccacacaatacaactaaagtttccaaactacctgaaccgcataaattgattgatgagcctgtcgcagcccttctcccaccattaattcaattgtgtaaaaataagccagaggaagataatttttatcaacaaactgtgtgctgggctctttttcttctctatttaatgctaattttgagccttgttctgcatcaactctattcaatttgctggtttaagcgaaatggacagcaaacaaattacgaggattttgatggaaaatcgattcaccgcaccggtctttcgggggtgcttcgctagcgaccaattaccctctccacacacactacagtatcctgcagcgctcgttgtcaacaaagacccccattacaaggagggctcccattggtgcgctgtttatgcaaagggattggatgcgccagtaatatattacgatagtcttgcgctggcaattgcgccctcacttgggtcatcatttctaagccaattctcagaaggcgtgattaagaatagtcaatcctatcagtccccaattaccacaacttgtgcaccacattgtattgcctttatatatcatatgtccattggacacacatttgccaaatttctcgatattttggataattgcacaagcccagatttatattcattaattttactgaagaaaatgctaaatcgttattgaatatttattacgcccaatggttaaatgcttgcatgtgttatttgatcagtaaactgagaaaatcatataatgaaggtcaggattactggttcgggaatcaatcatgagaaaccccacataatgcccataatgactgttttttagaaaaaacatttgttctttgtcggtgtgcgcgacctggtgaatgccctgcgacgacatcatgcgagccgtagagttgagaattgtcggaaagtccgaacggcgcaagaatgagactgcaatgtgctgtttcagtgtggtcggtgttggactgttcaaaacgaattgtagcagtatgccacacaatgctccagtcacagctgactataacatattaaaaatatatattttttaatttttctcatatttaccgcatccgaaggcaggtggactaaaatgcgcgttgttgcgattcggcccgaacgagagtagagcaaataacgggtgaaatcgttgaagtagaaagggtccagcagctggaacgcaaacttaaattgaatatggagctgaccagttggaagccagagttttgcacagatggtttcaaaatcaagtgacagccgtttctaaaatgcgaaaaaatattttcattaaaaattttttatgcaccaattggacgaaaagactgcagcgttttgttcgaagattttcgaatgaccaattaatgagcccaattccgcaaggagggagaaatccgtcttaaatttaaaaatgtaataaattttaaattgtattttttaaacaaacttgtaacgggtgtcgttccaccatacaactgcataacaggcacgaaattgaacatttcgtaaacgagctcggctggaaggcgtcttcgagccttcaatttcttaggcttcggcttgcacaatgccactaaaaattttttaaacataattttaaatatttaaaatattaccgccaaataagaacataaaaggaatccaattgataatttcgtcaagcatttgacgtgtcaagggcctgcaaagtcttggcttcttgctcacaacaattaagtcttgctttctcttgataggagacatttgaattatatttaaaaatggaataatgaatgcataatgaacgaaggagaaaaaaagggcacaagcaccgaaattgccgtcgcaggacataaaatgacgcaattaaatgcccaaatttcaagcacacattgatatgccttgatgctttggtctatcaaacacctgctaatttaaaataaagtcacatgcaaatgagtcgaataagcggatattccataggtcaaggtcataaattatgcttctaagtaaaaattgcgaacaccccaaaaatccgacatctgctaattctcactattcattttaaaatttggctaacattttgcattttttttaatcaataactatctcatttttgctgttaatcagggcggttgatcaaatcctggtctccgtttatcctgacagcatctcttttagctcttcatggtagatcaataaacttttctaatttcccgagccgtttaggtgccctgtcgtcttgtgcttcatatggcagtgcgcagctcatcaggccaagatttgtttgccattaaaaaatatgattttttaataaaataattaaaattatgttatttcatttcatttgtgctttttccatttccattatccgtcaattataaaatgccacaagtctagctattttactcatttaaccaaagttaatccctaattatttaaaatagattacaaaaatgtccaatcgccaataccccaaattctttatcagcaacattttggggccatcacagccgaagaagccacgccaaggctttctcatcaaccaattgcttggtattgtgcagcagcagggagaaggggtctcttcctcatcatctgctcaaaagaaagcaaatgaatacgtcaaaaagttggacaacagccttgaacatctgccagggttcaactattcaaaagtcaaatcgcggttcagcatcgaggatgttcctgaaaatcctgaaacattgttgaccgccatttttacgcattgtattgatgaggcaaagacggacagcagcgatcgcggaattgtgcccacacatctcggatgtgtcatcagcagtcagctactgacggcaggcgacctctttatcccgatcaggcagataacagacaacacagtcgacacaattctcaacctttttttaaaagtatcgcagagcaaaaagactgaaggggtcacgctgtggggcgaaccctttacagtcacagtgactactgttaaccgcgacgggcttcctgccaaacggcagctcaaagggggagcacgtcggagaatagctgctgtacaccatcgcattcatgaccagtctttgataaaggttttcgaatagctgatggagaaatataaattgcagtttaagatccgtaaccccgatgatcgaaactactgtttgttctattctttgcaagcaaccatggtggccaagacgcgtggatggccccgctggaagttttacgattatttgcacagccagcatggacagcgagacaaatttctcagtgacactttgtcgttaatgcgcacagttggcatccaaatggatttgaatggttacgatgctgatacgtttgtgccgcgcataatcaaccactggaacaacacacagcaaaatcaccgatttgccgttttcatctttggttcaaatggacaatatagaccgctgtacaagtacaatgacaacacatacgacacaccgctacttctttacttcaatgacaaccatttcgatggtgtgcaggctcaaggagggttgtttggccgtaaatattgtctcgagtgtgaacggccgtatcgaagagacagcgagcacaacaaatcatgcaaagcacgctgtctgctttgctctcgggttggaccagcatttccatgccctgccgccgccggcttcttcaaaaaatgtgatggctgcaacaaaaaattccggaacaacaattgctacactcatcatctgcgcacaaatttctgcaacaagtcaaaattatgcaagcattgcggcgtaatttgggatgtaaagcctaacaacacaaatgaacgaaaaggtcatgtatgcggtgaacagttttgcacattgtgtaacaactaccacaacacggaaagaggatgcttcatcaaaactcttgagcccaaagaacaggacccataccgcattgtggcgttcgatctggagaccatgcagcatcaaccagttaatccacaacagctcgatcggcgaagtcatcagccaaattttatcagtgccaaggtcatttgccctgattgcattgaaaacgacacatggaagaggggtacagcaggatgtgcggtgtgtgggccacacaggacagtcgcattttgtcagcggccctttaacaacaccgtcgttgaccaacaagtggtgaccgacaacccattggaagcatttgttgagtggctgatcttccagctgcccaagcaatacgacacttttgcttattcgcactttggcggccgctttgatatggtcattgtgtttcgggagctgttccggcgaggatttaatcccgaaatgttgaaaaaagtgaaaaattaatttaattttttgtaaaaattaaattaattttagggaaacaaaatgtaccagatgaaggtgcgaaagcaaaagaagcgcaatccgaacgtggtcttcagagactcgttcaacctgatgccaatggcacttgcgtctcttgtgccgtcgtttggtcttgatgttgaggacaagccatatttcccgcacttgtcaaatcgaccagaaaactacggtcaacagatattccccacgtccgacgactatctggcaaatggaatgatgccagataagcgacgcaaattcgacatgtggtatgagcaacatcgcgatgtcccctttttgctggatgaggagctcgccagctattgcaccaacgacgtggaaattttgacagctgctctcgttgcttttcgccaagagttttttgaaatctcccaacgacaggagggtgttgttgcagaacgggccgcatcagatgagcatcatgatggcattgacgtcttgagggagtgcatgaccattgcgggggcatgtatgcgtcacttccgcacaaatcaccttccagcggatcatctggccattgtgccggagcggggctacgacaatgcccagaaccaaagccttttggcacttcgcttcttcaagtggtttgcagaggaacacggtgtggtggttcaaaccgctcactcaccggaaggagaaaagaggattggccagtacagccttgatggatggatccaggccgagcggagggccatcgaagtgaatggtaattgattttttttttggattatgcgtttcatttgaaaaataaggttgtgcgtggcacgggtgcaaaaagtgttatccaagtgataacatgctgctaccaaatggaaagtcggcaggagaagtgcgcgagcgggacgcaaagcgcctggaattcattcactcccaagtggcacacgtggatgtgtattgggaatgcgaaattcagtgtatgctgagcagaagcaaagagatgcggcaaaagtttgcggaatacgttgatgatggaccactgttgatcagagatgcattcatgggcgggcgcacgggaccgctaacgctttaccatgaagcacgagatggagagaagatctcgtactttgatttcacttcactttatccgtatgtaaagtgagttttgatccaaaaatgggattcaaaaattaacgttacatttcagctttgtcacgcggtatccggttggtcatccaaaagttcacgtgttcaacgaggatgtcacatggacacattccggggacaacccttacccccttgccttgctcaaagtctttgtggtgccgccaaaaaagtgtgatgtgccagtgctgccagtcaggatcaatgagcggctatgttttccgttgtgccaccgttgcgctcaagactatcccatgggggacgtggacccggactaccactgcgagcacaccgatcaacagcgcggatgggtgagcacgtgtacatcgattgaacttaacgccgcgctggatgaaggctaccgggttaccaagctcttccgcgtgcttgagtatgagcagagcgacgacaaactcttccgtggctacatcgctgaatttatggcccaaaaaatacaagcatccgactttgcggccaacatcaaaggcaacaatgagctggaggagcagtttgtcaatgagtgccatgagatgttcggcatcaccatcgacccggagcagatggcagtgaacaaaggaaagcgttcaatcgccaagctatgcttgaataacctttgtgagtgtcttaatcggcttatgcctagtttgagctcattattttaagggggccgtttttctttgcggaactttggcctggcccaaacggtgatcacagatgaccctgcagttttggctgagtacttggacaacaaatccatcgatgtgatgtccatcgacgaactgaatgagacaacgattctgatcagttacatgcagaaaaaggaatgggttgaagaacatgaatgttcaaatattggtgagagacaattaaattgaaattttaattgaaatttaaaattttcagttatttctctttggacaacatctgcagctcggcttctccttttgagagcgatgcaaatggttgttcgaacaccaggctgcagacttttgtatacggacacggactcgctcatatttgctcatctcattgccaattgccctcttcaaacgggtccacacctcggtcaattcacggacgaatatccggaccatgaaattgttgagtactgcagtggggga

SEQ ID NO: 1339 - DNA, 1445 bp, Heterodera glycines
ttcattacgcagcatttccaagtccaatttttacttacgtatttaaattatattgctctatttgtcagtattattgtttatttattaacgaccggcaggattcgaacctgcagcctcagcactgagtgctgcgctcttaccatttgagctacggtcgcccattaacctttaccacttttctttttaaattattaaaattgtcatatttatgtgaagaaggaaacatgatttaaacaaagtgaaataagtcgaaaaaaaaacattagcttgatttaccaataaaactcaggagatttctggctacattgatcgcgtccagtgtcttcttcatcacgcaaaactaaagttttgtccgacagggttgacgagctgctgcaaatgtcatccctctccttgaacaagttgcccagccattgcccgatcggttgttgtccttctttcacaatttcgagcagttccatcgggtagttacggttctccccacactcaaagcgttcaacaatgcacggaatgtaggggtgatgcagtttcacacggtgtcgggcataaaaatgtgccgccacatttatattaaacggctggcgaagacggccgtaggctggcacgaatgccgctcccttttctgttatcccatcaataaagaaagtcttgcgcatgccatttcggtctttgtaggttgtttgaacttttttgccggtcaactctttcagtgcgcgttcccgatcctcaggatggtttagacgatcgcgaagtgttttaggagaacaaccaaaaaattgcgcgcaatattcgctgaccaagaccatttttaaaaaattgcaaatgattgtcgtaaaacgacgggtgaactcattatctttgtgttaagccccgcccaaattgcgccaaaacaagcgcctttgtttccccgctattaaaaccaaattattttaaaatttttcaatttaaaaatgctctcgacccaatcttcccgcaatgaaagaaaggaaatggagggtcaagaagagcagtgtgaaaattcgcccacaaagaagcaaaaattggacaagccaaaggtgtatgacagtatgctgtggaagatcctcaagggcaaatacatgatcagcatgtatctttgtgcaggtaataaacattaaaatatttttcacatttttttattttgcagatgattggcgaaaactgttcgagaaccgcgaaaaagtgcagcgttccgcgaatgaccgagtgcgcattagctttgacatgtgtgaagagtgcgcgcgtgtcaattgccgtatgactgacctgattgcaccaccaaaaaagaatttaattttgtaaattcatatttaaattgtaattgcttggataaatttaattctttggccttttggtttattaccatttttgagggagggagggggaagggtctcattgcgtttccctaaattattaagaaataaaaa

SEQ ID NO: 1340 - DNA, 1963 bp, Heterodera glycines
ggcacactacatagtttaatataaaaaatgttgtctgccttttttcaaatttagctggcgtaattgtaaaaggaaatacgaaatattaccgggatacaaaattaaagcaacgggactttttagaacagaacgaaaggatttatttggcacactacatagtttaatataaaaaatgttgtctgccttttttcaaatttagctggcgtaattgtaaaaagaaaaatacgaaatattaccgggatacaaaattaaagtaacgggactttttagaacagaacgaaaggatttatttggcacactacatagtttaatataaaaaatgttgtctgccttttttcaaatttagctggcgtaattgtaaaaagaaaaatacgaaatattaccgggatacaaaattaaagtaacgggactttttagaacagaacgaaaggatttatttggttaaggataattgttggaaatcgccatagatttggaccatatgcgaaaaattcgcggtgaacgtaaaagaaaccaaccagcattgacttgtgcaatccgactcgttaaaataaaatgatctttaaaataattgcataaatttatagggacagtatatttaatgtctttacttgttgcaatccgactcgttaaaataaaatgagctttaaaataattgcataaatttatggggacagtatatttaatgtcttcacttgtaagtttggggtcagatgcgttcagaactgacggcacactacatagtttaatataaaaaatgttgtctgccttttttcaaatttagctggcgtaattgtaaaaagaaaaatacgaaatattaccgggatacaaaattaaagtaacgggactttttagaacagaacgaaaggatttatttggttaaggataattgttggaaagcgccatagatttggaccatatgcgaaaaattcgcggtaaacgtaataaaaaaaaccaaccagcattgacttgtgcaatccgactcgttaaaataaaatgagctttaaaataattgcataaatttatggggacagtatatataatgtctttatttgtaagtttggggtcagatgcgttcagaactgacggcacactacatagtttaatataaaaaatgttgtctgccttttttcaaatttagctggcgtaattgtaaaaggaaatacgaaatattaccgggatacaaaattaaagcaacgggactttttagaacagaacgaaaggatttatttggcacactacatagtttaatataaaaaatgttgtctgccttttttcaaatttagctggcgtaattgtaaaaagaaaaatacgaaatattaccgggatacaaaattaaagtaacgggactttttagaacagaacgaaaggatttatttggcacactacatagtttaatatacaaaatgttgtctgccttttttcaaatttagctggcgtaattgtaaaaagaaaaatacgaaatattaccgggatacaaaattaaagtaacgggactttttagaacagaacgaaaggatttatttggttaaggataattgttggaaatcgccatagatttggaccatatgcgaaaaattcgcggtgaacgtaataaaaaaaaccaaccagcattgacttgtgcaatccgactcgttaaaataaaatgagctttaaaataattgcataaatttatggggaccggattttttatggccttacctggaaagttgggggccaaaggcgtccaaaatggccggaccccaacatagttaataataaaaaaggtggccggcctttttccaaattaactgggggattgtgaaaaaaggaatacacaatatatccccgatacacaattttagagaagcgactctttataaaacaaagcaaggagatatatgtgtatagagatatgtggggaatctccacatatatgtaccccatgtgagaaatactcgcggagcgcaatataaaaaccccc

SEQ ID NO: 1341 - DNA, 2594 bp, Heterodera glycines
gaaatattcacgggatagacaattatagtatcgggactctttagatcagatcgaaaggacatatctggttaaggataattgttggatttcgcgcatagatttggttccatatgcgaaaagttgctcggtgaacgtaataaaaaaaaccaaccaacatcagctagtgcaatacggctcgttaaaataaaatgagctttaaaataattgcataaatttatggggacagaatatttaatgtctttacttgtaagtttggggtcagatgcgttcagaactgacggcacactacatagtttaatatgaaaaatgttgtctgccttttttcaaatttagctggcgtaattgtaaaaagaaaaatacgaaatattaccgggatataaaattaaagtaacgggactttttagaacagaacgaaaggatttatttggttaaggataattgttggaaatcgccatagatttggaccatatgcgaaaaattcgcggtgaacgtaataaaaaaaaccaaccagcattgacttgtgcaatccgactcgttaaaataaaatgagctttaaaataattgcataaatttatggggacagtatatataatgtctttacttgtaagtttggggtcagatgcgttcagaactgacggcacactacatagtttaatataaaaaatgttgtctgccttttttcaaatttagctggcgtaattgtaaaaagaaaaatacgaaatattaccgggatacaaaattaaagtaacgggactttttagaacagaacgaaaggatttatttggttaaggataattgttggaaatcgccatagatttggaccatatgcgaaaaattcgcggtgaacgtaataaaaaaaaccaaccagcattgacttgtgcaatccgactcgttaaaataaaatgagctttaaaataattgcataaatttatggggacagtatatataatgtctttacttgtaagtttggggtcagatgcgttcagaactgacggcacactacatagtttaatataaaaaatgttgtctgccttttttcaaatttagctggcgtaattgtaaaaagaaaaatacgaaatattaccgggatacaaaattaaagtaacgggactttttagaacagaacgaaaggatttatttggttaaggataattgttggaaatcgccatagatttggaccatatgcgaaaaattcgcggtgaacgtaataaaaaaaaccaaccagcattgacttgtgcaatccgactcgttaaaataaaatgagctttaaaataattgcataaatttatggggacagtatatataatgtctttacttgtaagtttggggtcagatgcgttcagaactgacggcacactacatagtttaatataaaaaatgttgtcggccttttttcaaatttagctggcgtaattgtaaaaaggaaaatacgaaatattaccgggatacaaaattaaagtaacgggactttttagaacagaatgaaaggatttatttggttaaggataattgttggaaatcgccatagatttggaccatatgcgaaaaattcgcggtgaacgtaataaaaaaaaccaaccagcattgacttgtgcaatccgactcgttaaaataaaatgagctttaaaataattgcataaatttatggggacagtatatataatgtctttacttgtaagtttggggtcagatgcgttcagaactgacggcacactacatagtttaatataaaaaatgttgtctgccttttttcaaatttagctggcgtaattgtaaaaaggaaaatacgaaatattaccgggatacaaaattaaagtaacgggactttttagaacagaacgaaaggatttatttggttaaggataattgttggaaatcgccatagatttggaccatatgcgaaaaattcgcggtgaacgtaataaaaaaaaccaaccagcattgacttgtgcaatccgactcgttaaaataaaatgagctttaaaataattgcataaatttatggggacagtatatttaatgtctttacttgtaagtttggggtcagatgcgttcagaactgacggcacactacatagtttaatataaaaaatgttgtctgccttttttcaaatttagctggcgtaattgtaaaaagaaaaatacgaaatattaccgggatacaaaattaaagtaacgggactttttagaacagaacgaaaggatttatttggttaaggataattgttggaaatcgccatagatttggaccatatgcgaaaaattcgcggtgaacgtaataaaaaaaaccaaccagcattgacttgtgcaatccgactcgttaaaataaaatgagctttaaaataattgcataaatttatggggacagtatatataatgtctttacttgtaagtttggggtcagatgcgttcagaactgacggcacactacatagtttaatataaaaaatgttgtctgccttttttcaaatttagctggcgtaattgtaaaaagaaaaatacgaaatattaccgggatacaaaattaaagtaacgggactttttagaacagaacgaaaggatttatttggttaagagatatattgtcggaaatc

SEQ ID NO: 1342 - DNA, 1285 bp, Heterodera glycines
ggtcagatgcgttcagacttgacggcacactacatagtttaatataaaaatgttgtctgccttttttcaaatttagctggcgtaattgtaaaaagaaaaatacgaaatattaccgggatacaaaattaaagtaacgggactttttagaacagaacgaaaggatttatttggcacactacatagtttaatatacaaaatgttgtctgcctttttaaaacagcattgacttgtgcaatccgactcgttaaaataaaatgagctttaaaataattgcataaatttatggggacagtatatataatgtctttacttgtaagtttggggtcagatgcgttcagaactgacggcacactacatagtttaatataaaaaatgttgtttgccttttttcaaatttagctggcgtaattgtaaaaagaaaaatacgaaatattaccgggatacaaaattaaagtaacgggactttttagaacagaacgaaaggatttatttggttaaggataattgttggaaatcgccatagatttggaccatatgcgaaaaattcgcggtgaacgtaataaagaaaccaaccagcattgacttgtgcaatccgactcgttaaaataaaatgagctttaaaataattgcataaatttatggggacagtatatataatgtctttacttgtaagtttggggtcagatgcgttcagaactgacggcacactacatagtttaatataaaaaatgttgtctgccttttttcaaatttagctggcgtaattgtaaaaagaaaaatacgaaatattaccgggatacaaaattttacttgtaagtttggggtcagatgcgttcagaactgacggcacactacatagtttaatataaaaaatgttgtctgccttttttcaaatttagctggcgtaattgtaaaaagaaaaatacgaaatattaccgggatacaaaattaaagtaacgggactttttagaacagaacgaaaggatttatttggttaaggataattgttggaaatcgccatagatttggaccatatgcgaaaaattcaaagtgaacgtaataaaaaaaccaaccagcattgacttgtgcaatccgactcgttaaaataaaatgagctttaaaataattgcgataaatttatggggacggtgatgatgataatgtctttacttgtaagtttggggtcggatgcgttcggaactgacggcgaccactagtgagtttaatataaaaaatgttgtctgccatttttcaaatttagctggcgtaattgtaaaaagaaaaa

SEQ ID NO: 1343 - DNA, 5349 bp, Heterodera glycines
cgtgccggccccgcgaaactgcggtgctcgtttcaatgcttcaggctatttggtcacatttggaaaggcaaagagtgcaacggcaccaacaacaattgccaaactgatgaaccagcaacagaacaaaccgaagcaacagccccaaaaaacagaaaacccaataaagaattgtggtcggcaaaacgcgcgtaagactcctgcaaacgctacaaaaatgagcatttccgttggtgccgatgaaagtgtgaaaaaagtggggacgcatccacgatcactcgcggaatattgcgttttgggtagtggaattatttattttatccaataattcatttaattgacagtcaattctcctctcacattttcccctgctgctttgtttcgccagtgctcctccatggcttcgtccacttcggccattccatttgctccgactcaattccaaggctctccgcccgtccgttgtctgagccctcttcggccaacttcgccttgggcgcgacctgccgacgctggtagaagcgaatttgaattggcagttcaattcccgagaattgaattcaggcgaacaatcggcagacgccgaacaatcgcaagaagcggtgagcagaggcgaccgagcggacggcagagaaccgatcagtctgtcgcccccgtcgctgatgaagcagcttctttccgggacagggcggatattgggcgtaagtcctttcttccgtttttgccttacattcccccctccctctcccacagagttcgcccaattcgtccacttcactcaccgccattaatccccgcaccttttccctccactttcaccagcagcagcagtcgcccgcttttcaggcgatgatgcgccagcgggtgaccacaatgagtgccgtggcggagggtgcgttggcaccggcgaatgcgcacccacttccgattcagcaccaaatgtcggccatggccgaactgtgcgctggtaaaagcctcgcgggttggccgatggcggtgatgccggaacagcaggtggccaaaaagccgacaaaatccttgagctgctaatcttattgcatttttaagagcttcacttcaactgttttggtctacgacaccgtttcacttttgccaatttcccaggaattggcccggtcttacaagtccaacatattctttttccacagctttctttataatgctattcagacttctcggcagttcgccaatggcaatctgtcgccataatcgtgagcaagccgcgagaaaagggagacgcgatttattgacagtttggcaattgctcgagcaatgcgtgtgcaatggcaacggcacggccaaaaagtgagccaattagcatggaaatttaaatttgataaatgctggatacacttcttaattgacaggtatgatgaggacagttttgtgaatgggagtccgacaaaacattcgatggatgtcttttctcgtgcatttggcctccgacctgatgtcactgccaaaacattgatttcttcggcgaaacgagcggacgccccgtggtcaattcaccccttcggcagatcactgatcaatcgaatgtgccgacgacatattttcatttccttttattgctgaattttcttagattggcacattacgtttctcggcatgaccttcaaacggttgcagtgatcacttgcgtattggacggattgaattcggacggacggaaagtgacaaaggaaaggcgaatgagtaacaaaaaggaaagtgctgccattctgcggagattggaacgacaaaaatttgtcggagaaatgccgaaaaaagcggcggacgctttgctgaccgccgggccgaccaaagaaatgcagacggagcagcaggtggccggccactcgatcatagaatccatttgcaatatttgcaggtcgaaggactgttcttcgccatggatcaggccgactcatcgtcctctgtcggcaaagtgccgccggcgccccccgtgccgccccttttgccctctcagcaactccaattgcctccgtcgcggaagacttccgctgcccagggcggcgttggcacttccctcgcctctgtgatgccatccttgagcttcgtcggcggtccttgtgcgttcgattgtgctgaccttttgttgattttccgtcttttctttggggtcgcgtcaatcgtcggagtccaacgcgacttccgcggtgttcgcctcgccgctttactccgcccgcacaatgtccgaagcccttcacacttcggccacttctgagcggctgtctccggcgcctgacgctgtgacgccttaccaacgaagtgcgacgatggaagcggcgaccggcacaaacatcgccgactccgaagaaatggcaaatggacggggaagagaggacgaaggaacacaaaatggcgggggaaacgaactgtgagaaaagccatccgtggaccaacatgcacaccacaattcgccccttcagtctgatcgacccttcactcactcctcggcttgaacagttgcggctccgttacgccgacattctctacagatggcgcatgtacagaaagtgtgccgaagtgttgaaacattgcagccgcggggacggagaagagacatccattggcacaattaatggtgttgaacggaagaagcaattgcttctttgttatgcatttccttttttagcaatttgttggtgcacttgttgtggccagcaacaattgacaagctcaaaatgcacgaaatgccatcggataccaatctgtgagcacacccatccaaaactcatctcatacgttatttttagattgtgccatttgcgaacagccatgtaaaggtgagaggggaatgaaaaggatgccttaatctgaaaaaacttcgcagtgtatgaattcgagggttttttctcttctccctatttttatccactataaactttcaaaatcataggcagcaacgcctgagaatatgcaaaattttggattttcattaattgaatttaaagtacccattaaaaaaaccaccccctcccctccgctggttacgggcttggcatacgatcatattttgaatgacttgctacgtcgtcattttatttgaataattaaaaaatgtcgcatttttaaaggtattgtggccacttgctcaatgtgcagtcatggaggacacttcgcccatttgactgcctggttcaatgcccagtcccggtgcccacttgggtgtgggtgcgaatgccgattctaaccaattcctttgcaatataatattcgatggatttattcagagctggttcaaccgcaattaaattttttttgaaaatgcctaaaatgaaaaagcttatttaaggtttgccaaggccttgattttttctcttaaacttgtgaaatataagacaaaaagcggtcgttcttatattaacaaacattaaatcttttcatttgaatttcgccacctctttcggttcactgccaacaaaaggtgagaaagaggcgggcgtccctaagggattcgaaaccaacggcgtgtgagaacggggccgagcgcgcgcgattgttgcaccggacaaagacgcgacagattggctgaagtcggagagcggaagttctgacagtaaaagagaaacattttcgaaaaagtgcattatggagagaatcaccgtggtatttgcgacgcaaatgttcgtctccggtcagtgccgctcggattggtccctcctggtgactatttgagaaaaagccggaagggagttgcgtcgtcacactttgagttgggccacctccccaggggtcctttaacataaaaatatgtttattattcttactttttaaaatagttacccttacactttcacttcctttgcatttgggcagagaaatctgaccaattgccgttctcaactcatcgaccgatgcgtttaattttggttgttgagagtcattaagtgggcgaatttgcatttgtctgatctttgaccgttgggctgcgaggcaaatgtcctcttcatctggagggaatttattaaatgctaataataaaccggaacctacccgaagttgtgctgctgctactgctcgcacttcgccgattcggtcgtccatcgcccaatgttcccccactcgccatcgatacaaaagacacagactgaagaatcggttgttgctcttttgcttttgttgtcgacgatgtgccaacatggtcagccgagaagcgattgaacgcgctgaccaactcgtcattaagtggcggcggttcggtggaggggaggggcggcggagggccgaacacttccaaagggtcgagcactttctgctgaaagaaagtaataacattcattagcattgctcagcttcattcaccagttctttttctgtttgatccaacgaagatattggcgctcttacaaaaattcaaagttctgataaatgatccaccaataccgtacagttccgatttgccgattgctgtcaagtcgcccatcgaccgtttcagccctttgcctttttggtagcgcttcagaagaccagcggaagaattcgctgaacaattcggacaaagaataaccgattttaagtattaactcacttttgatggatggatcattgcaacttttggaaaaattcgaagctgatccgatgagttcgtcctttgtctgctgatcactttctccgactgcgaatggttcaattgccattggaccggccaaattggactgagaagttgagaaatgtttcttcagacgaccgctgaacttctgacggccaagccaagaagagatttgctggggaacataagaggacgatggattttgagcagagaaattggacagaacagaagaggaagggttggcagagaaaggcaactgaagcagcagaagacgcaatcaaactgatgtgaacatgggatgcccggcacggcacaacaccccctccccctcgttggtcatgtttgaaaatatttctcggaggttttgcagggtcaaccaacttgaccaaaactatatgtaatttttgttgccatttggtttcacacttcccaattggttgttggtttctaactctccacagctcacctccaaatgcctctcggaatcgctctctccggccgacttattttgctccgaacatccgttgatactgccccttttgactcccaaactgcacatactttccccgaatcctccgtcaatgcttccgccactgtttgccgattcgccgccacccgcggcgatacttttccctccgccgacggttagccacgagtcattcaggccgagcaaatgattcgcattcgactgcaattggttgccggaaaagttagggacgatggcagacgaatttgaggaggaagactgggattggacgcacgagacacgtcca

SEQ ID NO: 1344 - DNA, 1217 bp, Heterodera glycines
catcatctgctccacgttaatgttctgctcgactctctggcgaagagttgcgctcacttgtgcatttgcgccgtgggcattttccaaacatttcgccatttgcgtaaaaaaaccttcaaaaagtaattgaaaataataattaaagttggcatcttccaaccaacttttcatttgtagcaaatggagtcggtcatgttcttggaaagagcgtgcggcttggttgacgcgttcttcgaaagtgtcgcgtatttggctgtacttgtccatgtactgcttgtactcctcgtgagccttgttcaatttgttgcgtgccttagtttacaagtactttgaggaacatttggttaaatgaatcttaagttaagtgagcactcgaaggtattcttttgtgctggcagccgtccattctttgttgctctgtttcagactgaccacctcagtgcttcgctggttgaacgtgtcccttgcctttgttaataaatgtattgtaagaaaaagctcaattagtattaatttgccgaagcattattcaaaattattttccatttaagattttgaatttccttaagggtttgggtcctcaaatccccaattatcttgaagtccttaggcctaattgagcacgttctcacatgccattgtgtcaattaattataatattttaattttcctttttaacactttttgcagacaggtggtcgttgtttgcatcaaattgatcgtttccaaagtgtccgcgtctttggcacgttttcgcatccgagccaattcttcttgataacgagcgacttctttcagaagatcatttaaatttcgaagtgtcgacgattggatttctgaaaagaaatgattataaaacaatgctaaattcaacttttatttgggtacataaaaatgaaattattatttaattgcaccgcttatatttagccgtaccagtccataattccaaggtttccttcgccaatttccacgcgtccacaaaaccgctcttgtttgaaatgtatccgttaacctaaaaatcaaaatccaatgtttcaaaaatatttaatcgccactctgtgcagactcttcccaagcgatttgaataaatcgtcctccatatttacgcgttctttgagaaaggtcagaagttcgtgaaccgactcctcgcccttcttcatgttttcataaagcacgctgtatccaatgtgcttgtccccctaggcattcatttg

SEQ ID NO: 1345 - DNA, 1550 bp, Heterodera glycines
ggccattttgaaaaacttgctggcaattcacagagtaaggaactgatggggttttttacaaaaccacaaattgggttatctgaagatgttttggttttcttcgaatccactttggttggcttctatggctctttgtttgtcgtcatttcaatcatttggcaactctatggccaactttcctaccgcattcttacacaactcttcatttttctctcccatttgcaagttcaacggactctcttctcaaatgttgggtttgcgatgaatttctttgccgtttttgttggttttactgctctattttctgctggaatggcttttcataacatttcacattattttttatcatgaaattcgattttatatgcgaaataattaatagattaatggatataacaaggcttggaatcaaagtaaatcaaattttaaggaattaaagaggataaaacagtgtctgtcttaaaatgcataaaatggcactatttgaattgtggaaaagatagttgtggtttggcttctgtcgaggcatcctcagaacgccacaactgggtcacagttcgaatttgggtgtagaaattaagaccagcctttccatagaaatttgcatcgccaagaaaacttaaaacgcattaaaaacacaacatgagagaagtgtcactcaccttccacgcgaaccggtgaaagagaacatcggaagtggcacagggattggcacatttatgcccacttggcccacatcaatctccgagacgaaacggtgcgcggcaattcccgaccgagtgaaaagggcagtgccatttccgtagggatttttgtttatcaaatccatcgcttcgtcaagtgtttccgtttcgagcacacacaaaacgggcccaaagatttcttcctaacaataaaaacgaaaattaaattcagaaaaaatatcggacggaccttataacagagcatttcgggctttactccagtgatcacctgaaaagggcaattttaacccaaacaaaaacagctataaattggcgaagtgttgtgcattaatctcaccgtcggtccgacaaagtttcccttctcgaagcctttcactgtcacattggtgccatccaatggcacatcggctccttcttccagcgccgattcgaccaactcgcaaatgcgctccttcgctttttgtgaaatcaccggcccaatgtccgtccccgcctcccatcccgggccgacgcgcaatttccgggctcgttccaccaaatcagaaacccatccgcgcgcatcacccacaaaaatggccgtagagagtgccatacatcgttgccccgcagcaccgaatgccgcggcagcgacctgaaaatgggagaagagaaggcacgcaaagttcgactaaactcggagacgaaagtgcctgattcaacgtgtgttctcggttcgcgtcaggaaggatgactccgtgattcttagcgcccatattcgactgaactcttttcccaaacttagacccgtgctcgtaaatgtatttgccctgaattcgaccaaaatcccatcggaaatatccacgaaaa

SEQ ID NO: 1346 - DNA, 5226 bp, Heterodera glycines
aaaagaatatcacacagttaaacatgcgatagtcatgagtgacaacagatgaatggcgccaagttagaaatgcctttttgcaggaatggacggacaattgcatttcgtccaacgtcgactcgggcacaaggcagaccacttcatttgtagcctaaacactgcgtcaattttagtcgattttatgcacctctcccccccccccacttcaaattgacggtactttcctgttttgatttaggacccataacttttttaatatgtatttaaaacacagtacaaaagaaatacacaaccccttcctcctcctcactggatttgttagttcaatccattctttcgttttggattcgaccctttgtccatgaatccaattcggcaccgtcgaaacaaatctgacactccaagaaggacagtggacaactgagccaaagaagggtactactgttttcccaactatatttaactttatggacggagaaatggctaaacgcataatcaaggccctaaattgtttttttcaaattaaatatacacaaattcttaattacagaatagacaatcagtttttgtatagcggcaaacaaaaaaccacggaaatgcgaataaatttcattcctctccaaataacagaggcatttaaattggaacataatacaaatgaaataaaaacagctttgtgaataggtatgtgaactagatggttcttagaattaagggtgggggaacattgaaatggggacaacggggcggaggacattggaaaggaaattggatgattttcggaaatgaatagagtactttggagaggggtgggcgacagcaatcgggaaaaacgtgacataaattgatcgatcaataaatgggcacgcaccccaatccgattgcattaaatggactgataatttgcggtaaaagggcacaatggcttgtttgacgcccttatgaatcataaaaagaacgatcccaagtaggtttatcgacaaataagacaaagacaatagaaaatgaaatattcaatgagaagaaatatttaggtgaatgtagaaatacttgaatgttgggggctgggagtatttgtcaatcaggcgagtaattctggtgggttttcaaacatttagacaccattattaatgtgataaaactaaaatatcattaataaaatccgaccttcacaattaacacttcgtttagctccttcttccttcttctgtcgcttccgtcgaattctcttctgtctttgtctgctgttcctcctctcgaattgggcacgtttcttcctcatttctctgggaattagtcgtttcgtccatctgccgaaggggagtgccaggttcagtaagcgcttctgcttcaacaatgtcggtcatcccagttcccgtgtcttccgcctgttcaccctccttctctttgctgctttcttctggcggggaatgattctttgtctcctctgtcggcccctcttcacaagcgctgtgacaataatcctcgtcatcacttttgcagtgctcccttttgttgcagccaaatgaagaagaaccaaaaaccgattttggagctgtcatgtcgtcgtgctcttcaaaagtggtttcctaaattgtttatgtcttctgtctgaatgtgagtaaactaagtgggacggaaaccacctcttccttctccattttgtgttggtgtagcgtaatttcactgccaagaaccgcctcttcatcggcaaccgattcgtccaaaaattgaagttccgttggctccacagaatgtgcatgttcgctgtcttcgatgtgctcttcactgactgctgttgacagttcttcctcttcccaaattggcggctgttgttgccgatggtccatttgttggttctgttgcatggccaatgcgaactgttgctgctgctcctgttgctgttgtttgctgcgcgcgtaggcaacacttcgagttaccacttcatcgacagtctcctcaatatgactcaaattggaggcggacgaatgcgcctaaaacaaacagaaaatctttgttattttactgatccttttacgttgtggtgaagatagtgatgaatgcccgaagatttttgtggcctcctaacagtcggaatcgaatcggttgcggaagaagcaaggtgcgtttgttggtgttgctgttgttgtaggtgttggtggtgatcggaggtggtgacaatgatctgatggtgttgctgagccgtgggcggtgaatcgggcggtggagtgatggtttggacctaaaagaaacaatgatagatggaagtgtaaagcgttagaagataacttacacacacaattataaagatgaattttaaaatcagtcaatcgtttttgtttcctcaatttttctttttatattttcaactttcttccaaataataatatagttttgagtggatatcgtacaacatattgccaacaaaaaattgcaaaaattgtattaagtagttctacattctctcaacatttccttgcccactgatactattgcccatattgcgatgccatgtttatggcatgctgcccataaattgatgccaacaactggtcattgttttcattgatattgtgattgaaaactccattagtcggaaaataaccaaaagcgttgttatttccacccattgtcaggtcaagcattggaccattttccatactaggaaattgttgggtgatttcatccttcaaattgtttggcagcttttctttgataaaatcacaatttacctgctgataaggcgccggctcatcgcccatcccatttccgttgcgcgaccgacgacgggcattcatgaaaaaatttgatacggtggacatgtctaggcgaagatgttcggcgatggtttgttgcatctcacgactgggccgttgggtctctttgaaaatcgcctgaatttgttaaggtgattaaaataccacacaagaactcgaaacctggagcgtccgtttttgtatgtcagtgaaaacaagacgaggccgcttttgtggagggtttccctcctcatttgtgtcactggtcctacgatttcgatggtgatgacgagaattttgtgctggcgtaggtggtggaataacaccggaagccattggacctgcaaaagaaacgttcaaaagatggaaagagctgttattataacctttgtacatatccaaaatgctcaaacggatgtgcaatggttgttgcagccaattgaacatccggcgaaatgtttcacggccggatttaaggcgattccagggcttagggttacgtaacaagtccgacaatgtcccctggctacggcataagatccgctcagcaaaaatagcttgtgggatggaatgttgctgaaagttttattaaatgctattgtattaaaaataaaaagggggctaaatgggtcgacctttagttcatacgcaacacgtttgcacaagtcctttgtgtcaatgtaaatttcgtcatcaatttcggcattcaatgggtctgttgtgtctgtcgttgagtaagtggtacgaggaattcctttaaatcgtatttaagtccaagaagctttgtagatctaaccagctccaggtcccatcggcccgtatccagactgtgttccactaccattcgaagctaaaataatttgctgatccgaattctgcgagttttgaccaaggttttggctgagagattgttgcttaacctgtaattttgaaattgatgttttgtctgattatatatattacacctttgaacgacgtgccgttgttgagggagtggatgtgattgggtggcgctgaactatttgatgttcaagttgctgaggttgacgagacatttggtggacaatgaaatgggttggttggtgaggactttgctgctgtatgttgggtgaaggcttaaaaagaaaattgatgccaatcacacattaaattctatgttttcagcttaccgattcgcgtgaaagtgacgcaagaatggatgaagtgatctcgacattgctaagtgctggtggcgtctcagcatttgccatccgttccaattcctgggcagtaggcccctggagggtataaggtccggcatccccgtaggcctcatgatgatgggaaacagatgctgccgagtgataccctccaagttcgttcgatggattaatttcttccttaattttcaataataagatccgaaagcgtaaagttgatcaagaatttaaaggtatatctttaaccattgcacaaaatcttactttaatgtacgcaacattgttgctgctgcgtctaataccattgagtaaatcgctcgttcgacttccgccatttggacgatgcaaatgcgaaacggaaacactactcaaaagtccgagtgagccttctgggtctcctctcctcgtcccttccaagtgcaacggcgaaagcaatccggcggggccattaccaaaacttaaaaaaatttcgtcgagtgaataagcaatgcacgaggaattattcaataagaaattatgaatgttaagtactttgttttttcaagttggtttgaatggagctgttgatggtggccaaggtgttgttccatcgattccattttgagcgcagaaatgtaatgcgaggagctaggcatcgacaccagaccagcataaccactgttttattaaagttaatacaagaatcgtaaaaatatggtggtatttgtttggcttcttaaaagataacataggaaaattaggattctcgcagtcaatttaaacgctttgagtgatgttcgtctgatgtgacccaataatttattgaaactttcgaaaacctgttcccatcagctgtaccagccatgctaactgttgtcaatgatgcaagttgtggagtagtggttacatgtgacacatttccaccactttcatgatgaagtccacccaatccagctattagctgatgatgaccaacagagctgtgaccctgttgaggacttatggtttccaggaaattctcaggcagttcctcgaagtgtcgactagtcgtattaaaacttatttgtgggtcgatttgaataaaaccagcaacggtagacaaatctcgcctaaatttaaaggtaaagaaaattagccaaaggcaatgatttttaaattaaaggaaatacttttgcaatccaccggtgccatcgtttaggcctgaagcagaatgtccaccgacaccgcacgaggtgacggctggcggttccattcaaaaatagttttttatccagtactttgtgagaagtcaa

SEQ ID NO: 1347 - DNA, 7631 bp, Heterodera glycines
tttttgtttgtggttttgagtttatataaaacgcataaaatcgtcaagaaaaaatttctgatttcgaattaaaacccactcgaaactgcttggctccgccgcaacaaatttgccaccaacttgaatgtcgccatacaattttacatccactgatctgcccggcaacaactgaaggaaacgaagaaagcgctctcgaagttctgcgttgccatgttgatcagtgtcaacgacgttcggttcagcggtttccgctgttgattctatgggttcagtctccatactaattaaaaacaggctttagtgcagtttatgcgtccaaacgacaaagtctctggaatttatagttagaaaaaagcaaataaaatgagaatatccgtaattccgcttaatcgagtataggtactttgggattaattttttgagtttccttaaacactgaattttgaaaaattctataaactttaactttcgattgataccaagaaagtatgctttgacccaataaaaaaaaattataggcctaagaaattgaggttcacattgacagtaaataatgttcacaaatactgattgacaacaaaatgtttaaagttcatacagcaatttattataaatggaatttaaaaaaccataatattatttaccaacatataaattaagaaatacaatatatcccaaaaaacggtgtgttaagctttaaagcattggttttaaaaggaaagacgacttccaaggaacaaagtgggcacgccaataacagccagccatttcaacgtctggaacatgttcaactcgagccagaagaaaacgtagagcccaaaaacagcacacagaccaagatgaaaccctaaaaatggacaaatataaaacaataataatatgacagagaatttaaaaagtggtatttaccaagagcactgagcgaaaacttgaattttccaaaattgatgccaatacgaagccactaaaaagtaaaaattatgtagaaaaaacatccaaatttaaacatttaccaaaaggaaaaggatgataagcggcgaagcacacaaaacagaaaacatgtcagaaactagaacagatggtcggggttcagggctgcggaaggtgtgagaaatttccggcagaagatcgtaattgacatgagacgattttggcgacatcgaagcaacaaaaataaatgtacgacctaaaaatgccaaaaatcacacaagccttattctgacagaacactaacaaaaaagtacctaagtccaagccaaaccccaaaaaattacgtaggttttattttcagcctttcgcagatttaaataaaaatacataatgccacattaaacttggcatttaaaagaagcactaattcaaatgatcagtcgaaagcaaaagcaacaaatggacaaattgcttgaaaaaatttttaaacgaaaacaaaattgaaagaggtaaattgaaattaaaattaggtacatatgtgtcatttattcttttttttttattggtaatgcattttcaattacctaataaagtaatgcattaattttagtcattttttcgcatttttatatgttttcgttattcccgtctgctctttttttgcttctccaccacattgacatttattcgactgaccaaattgaggataagaaaaatagccacaaggaattggataccgaaatccgtacgctcttcaacgaaacaaaagtacggattttgattctttgggtttctttgaaatacaaaacaatcaattagagttcgacatttttaaaaaagcctggacctggattccttccatgttggcctggacctttggacaaaaaccctgaaaaacgccaggtcctaagaaaaatcccggttgaaaaaaaggacatgtacctggaaacaaggaaaacccattcctacaaactttataaccatcaaaaagcgtgttaaatacatttaggattatattccagccgcttttcgactacatgacgacgaattgctatgcaaatgcaatcattttgcgacctgcggtaaggtaacaattttttttttgcttgttttatttttattttccttaaatttctttttcttgttgtcaggaaggtgtggcgagttatgttggtgaacagtacatggacgtgtgccggcctggtcgaggcggatactgtagtcgggtagtgtttttgaacgcggatggcacaattcgggaagtcatcacatcgtgagtttctaaaaagtttttcatataggtattttggtgagcgattgaaaatttaacaccaagttttcacagtttattatgacgaaaaatttacagaaaaaggaatcaactccaatttttcgtgggcccaaaacaacttaaatttaattttttattgaaaccaatatagattgactatttttagtgttgcagttgtttgtgattcggttttgcgttttaaatttgaattttcggcactttttgttcgaatttgcaattcgaaagaggccaaaatgaatatgttatagtacaatataatccttaaattgcggccttatacatgcgtaatttttcattcatttttcactttgtttagctgtttgaaacgggaacaactcgtgcccagggaattgccattcgtctgccaaaattcgaccactccgcaatggaacaaattggtgaactgttgcaagtctgaatcattttgcaacgacatccaagtaaataaattaaattcattttttatgttagtttgattaactttgaattttacaaaaaatatatagagcaagcaaattttcagtttcccattgaacttggtcttcgcaatggctttttgcctgaatccttcgatggtttgccatccgtttttctgacccttctcatttcgcttgtccttgtgctgttgtttgcattgagcatttgtgttgccatttcctgttgctgttttcctcgaaaaagggctgttgttgaccgatgcattggttggttggtgcagtgccgttccccaacattgaacaggtttttttgcgattgaaaaaattgtgaaattttaaattttgattttttaaaaatttagttctaaggctgattgtgaaatggacagtgaaagtttatgtggcgcaccgatgggccaattggcggaggcggcaacattctcaaccggatcgggtatatttataggacattcagaaaggttcctctttctcaaaaaaaaatcagaggttattgatagggggtgttcgttcccctccccggatcagttttaagaaaatttcaagaaaaattttggaaaaattttttagcgattttttcaaagattcaaacgctgaatttttttttactaaaattttctttttaaaaaattgaggctgggaaacgactcctaattgatggataaacatacgccctttcgcttttacgatgttttgattttgtgctccgtttcgctatattctggaaatacaatacaattttatttaggtatttaataggatgcccccaaactccccccccccccctccttcccttattatgcctaaataaattaaaaagattaaataaaaattgtttgtttggatcaaggttccggcgttccaatgttggcaccgcgcacaatctcttaccaaatttcgctgcaaacagtgattggtaaaggacgttttggcgaagttacattgggcgaatggcgtggcgaaaaagtggcagtcaaagtgggttggattaattgaatgaataggaccaaattttttgtgtaaaacacattttttttgtgaatttttaagttatttctcggccatgtcgtcccatattaaattcttatttaacgccttttttattacatttttttaaatgcatgagtgcaataattgtgttcattgtcagattttcgagtctcgtgaagtggcttcgtttgatcgcgagacaacaatttaccgggacaatatgctacggcaccaaaatcttcttcgctggatttcaagtgacactgtcggtgggttcatttgataattttcaaatgggggtactacattcccactgtctcgtattgttacccccaccctcccgaaatttcaaaaattaaatttttttttttaaaaaattcaagaaaattttttttctatacgggttgcttcgtgatcatataaaatttggaaaaaatcgccagaaaaaccttacaaaaaatttttctttaaaatattcaatgttaaaactaaaaaaacatttcattgacagatacgggagaaggaataatgcattggttggtcaccgattattgtcccaacggttcactgttggaccatcttgaaaacaacacgctcaacacacaacaatgcctccaattcattcgctcaattgctcacggaattgactatttgcacacttcattgactggcaacaaaaatttttgtaaatttttttaaataaatttttaaaaagtaagagtttcaacatcatcaacaaaaaacaaaaaaaaaattttcagttaaaccgtcaattgctcatcgtgatctcaagccggggaatattctcatcaaaaatgattggacctgttgcattgcggatttggggatgtgcgttcggttgaaaagcgacggaattattgacaggcccgagggtggcgacagagggggaacggcggtgagaatttttggggttttttcgcataattttactacatcaactattgtattattgtaataactaactgtatggtggacctagagcacctgtttgttttttaataatcttttgaaagatttctagcgcttttttcctaaatttaatttccatttttcaaaatttcagcgctatttggcacccgaatttttggacaaatcatacagcaatgactcaattacctcttacattcgcatggacatttacgccctggcactggtcatttgggagatttgtcgcgttggtggaagtgaacaatttggtgggaaaacattgggcggcacattaggggtgaaatttttttttccatttttaaggtttccgcattggactatcaggtgccctaccaagagtatgaattgacgagcactcatccgagtccggacgcaatgaaacaaattgtttgtgtggaaggactgcggccaaccattcccaaagaatggtcgaaaacaaaggtatgtgcttttttttacaatttttttttattcttttaaaatcaaagtatgccatggaaaaatagttcgggtttcggtacgggagaaatgtctgatttcgggcggtaaccccctgtaaaattaaaaatatcttttatagattctcgaaaaatgtatattcttcattcattccctgaaaagttttcaaaaaaaattgaaattggttaaaacattaaaaaatctttttaaatatgaaattcagggttaaaaaataattctaatataaaaatgattgtgaaaattaaaatttttctctcttcggcacatataaaatcattttcagatactcaccgaattcactcgggtcatcaaagagtgttggaatgccatgccgcagtcgcggctcactgctttgagcattcggtgcacaattgacagaatttgcacggaggagaacatcataatcaccaccacataggcacaaatgccaacaaattcctatcccttttttcttttctttttctttcatttcatttctcactcagagagactgaataaaacattgtgcaatgtgacaacagttctttgtttttgttttttggatgaaattgtcaaatcattttttagttttcttttttaaattgcaatttattattttatattccccattttttgtcatatttttttgctggcaatgagcaggaacttcgccgctcttctccgtgtaacgtgtgaccggaagatggcacgtcgggccaacaaacagctgaaaagggtgtgcaagaaggcgcatgcgcaacacaaaaatgtaaatttaatgcttttgtgcacataactcgtacggtaatgaaattttgaaaacgaggcctatcccctaagctttgattcaaacaatcttttaaatttcgaaaattaagaaaacttatatacgagttgtcatggtgagtgacatttttatggcgccttggtgatcaaaaaaaaaacaatttcccataaataatggcaccaattttctgtttgccaggtcgaaacggtcatccaacagcagttcgatgatcaggcaaaattggaaaagcgacgggagaagcggcgaagacagcgcaaacggaagcgaatggaacaacaggaaaaggaaggggacgacaaaaaggaaggagaaaaggaggaggagcaaacagaggacgaagcggacccatttgacgatgagaattacaccgtcaaacagtttgaggaggaggtttggctgtcttaatttatcaaacaaaaaaattgggatttacgactcaacggacgcgacatcattttgttttttggggttgaaacatgaaaattcttgtcagatcggcgaaattttagagattttttggtcattcaattaaggagtgcttttgagattcgttttcaaactgtttaactgtatttctttaatttttgttaatttaattaaacgacatcaaaagtatttctgaatctctaagtttcgccgatttgacatttattttttcgtttcaacccaaacaacgagctggaatagaacaaagagttgacactgaatcaaacacgagacgatacaaaaactgcaatgttattcaaaaaattcaggctgaacggatgcgcaaaaagcggatgggaaccgaattagatgaggacgagcgcgaaattaggcatttggaagcaaaactgaggaagaaagggcgcaagaagggcaagaaagagttggaggaggacggagatgaacttgatgagttggagaaggccattttggggggtggggaaaatgattgatcactgatcaccctttttaaaagccaataaaatttatgattagaatttcaaaaatgccaaggaatggaagtcggttgctttattccgaattttataaattgcattttatggattcaattcattggtgatgttcccttttttaaagcaatatttagccagaaatgttcaagaaattcgattcggcagatgatgtggtcggttcccagcagctcaaaggatctgtgcaggttagtcaatctgataaaacactgatttttctaccagtgtgatgatgtcgaaaacagcaattggtttttaattatggggcctatccgaattttttttaacgatgcgcgaaataatttgtaggtgtgcccgtgctgaaaaagtgtaaccaaatacatattccccgttacaattactgagttaactcttaatttaattgacagaagtcaatccgggccaagctggttgagcagtatccgagcattgagccgtacatggacgccattctgccgaagaaggagaacttcaagttggtcaagtgcaaggaccacctggagctgatcgcggacgccaacggcactgtccacttcgttaaagtgggcattttcaatttaaaataaatgaatttgattcatcaaaaaccattttttatccgatgggcaaccattttttttacttgaaaaaaattttagaaaatgtgatggccatttaacatttttttatgcctttttaaattcaacaaaaatagaatatatatcaaatttggttgagtgtttgttacacat

SEQ ID NO: 1348 - DNA, 1485 bp, Heterodera glycines
tgatttggcaaattatttcccaactctgagactgctgcacaaatacccgttcatgcttccacaccaacaggtgaaaaatggtgggggagggattcaatttaaatgtgcatttaatttgactgactctctaatgcaattgaaatttgaaatttctgtcaagggcatagtcaaaccccttggcttcggcttttcttttttttcaatacgttttttcaaaaaaagcattttcgaaatttatttgacctccccccttccccccgcaaaaggtagacaaaggtgccatcaaatttgtgttaaacggttcgcatataatgtgccctgggctgaccagcgcgggcggccgacttttggacgattgcaacgaaggggcattggtcagttttacaataagaattaattatttatcaaaattataataataattattatttttttgcatattattgcataggttgccattatggcggaaggaaagcagcacgcaatgggaattggacaaatgaaggtaaatttggattggttttctcataaaataattgatttgcttacatttaattgtaatataattttcatccttcattcattccggtttaatttaattaattaatggacgaataaattatttcatccattaaaatattcaatttaaaatttaaaaaaatgaagctaaaaaatgccctcttttttagctttcgtcggcgaatgtgcggtcacaaaatgttggcattgccattgacaatgtccacttcatgaacgacgggctgtggcgattaaccactgttcaatgagcacagaacaattttttttaaaattattgtttaattgactctataattaatcgctttttcaattttaaattgttgatgtatgaggaatcatattttttcgtgctttatttgcaaaatgaaatacacaaaattttcattcgaatgtttacattaataaatgtgaggtgattttgatgtggtaaaaattggaatatataattaccataaaattatttccaacatttttaaatgtacaaaaaaaatgaagaaagaaaagaatactgactggtatttcacaatacaaaattagcatcggaagcaaacttaaattagtaattgaaattgaaaccattccctccgaaacacatggattcttccactgctaattgattgattgttgagatttgctaattaggggtaattaatactggcattggtgtggggtgggtgtggctgaattccccaataatacaatataaatgaataaaaaaaatcgttaaattttccattattttcccaagtactgctccgtctcctcctacatgcttatcatgttctgctgctgctgctgttgttgttgttgttgtattcgctgctgctgttggaatgcttcaatttctgtccaaatcatttgacgccattggtctgcaaaaagggggcgtgtcaacaaaaaatttttggaattttattggagatggcgctgaagacacagggacgt

SEQ ID NO: 1349 - DNA, 2834 bp, Heterodera glycines
aaaaaaaatgaaaatgaaacgaaaatgcattcgaggcggaacacgaacgaaaaaataaattttaaaaccgaaaacgaaacggaaatttcgtcggggcatggggggggggggttctctgggcccgggccattttttgggtataactcctttcatcattgccgaaatgaatgaatttaatttcattcgatagccctaagtgttctctattaaactgcaaaatttcaaaaatttttgttaagtttgaatgaaattatggacaaaaatgtttggaaaacatggttttttttaaattaattcctttcaaaatattttgaaagaatataaaattctgattttttaaacaaattaaatatgagggcgagaaagtgtgtgaaaatgagaggacagacagacaaacagaatttattgtttgtgcccgattttgaatgaaattctctgtccattcattctcaacttggcatggaagcgactttcatagagaaataattggccatttttaaaattaattaattaatatttgacccacatctgcggaaatacttggccattttttataaccattaattaattaattagcatttggcccaccaatgctcagctcctgttcaatgtccacttcgatgtgtccgtccgccgttggctcgtcgtttgggtcgtggtactgcttgaagtacacgtgttccatcgcttgttcagcggttggactgtgcaacaaaaaattatttattcgaaaatcggtcaatttgctaattatgccatccaattttaccgataatcagggtccaaattgagtgttttctccaaaaagtccaccgcctcgggcgttgcgttggcaaaaaattttttgaaatctttgcgctccattcttggcatattccgaatgtaatttcgtgcctcttccgacgagattttctggaaaaacgaaaatggcataagaggtaaatgaaaaatgccgttttttgcctatgactttcaaaaattcgtcgtttggagtgccacagacggacataatccgggtcaactgatcaatatcttcaaattggaatttttttcaaattttattttgttttttacggtccgctccaggaaaaagtgtacgaccagtgatcagttcggccattatgcagccgaccgaccaaatgtccacttaatttgcaaaaaaagcaattagtaattaattaattagtaaaacccaaataaaaaacaatttgcaggtcacaatatttgataaatgattaaaaaagcaatttgtagttgataattaattaatttagcaaaaaataatcaaaagagcaattaatagtctaaaataaaaaataaatcaaaaaatatttaataattaatttatttatttaaaaaagtataaaaaagcattcacccgtctgtgtgtagtgcatccaattcagcatgatttccggcgctcggtaccatcgggtggccacgtagccggtcatttcttggtcagcatgacgagccagtccgaagtcgagaatcttgaaaagtaataaaattgccagccatttcgtgccggtatcatattgtttgttatacatttttttttaatttttggatccgattaggggaaaattcaaaaatcccgaaatttcaaaatttgtgaatcgcaaatcggtgtacgatgatgacctaaaaatgtcggggatttgattcgggatcggcttatcccctggattgaacctggattttaattcaaaaactaaaaaaatgcaaggaaatacagtattacttgaaaccaaataatggtcatactgtaattgttgaaaaaaatttgggcggaaattccgacaaaaaaatacttttaaactgatcattctgctgaatttaaccaatcttgaacacacaacacactttcaactcgcagtcctcgttcaccgcaatgtttgacggtttcaaatcccgatggataatgccggccgagtgaatgtatttcaatgcccgcaaaatttggtacaccaaaaattggatgtgctcgtcgctgagccgttgaattttgagaatgttggacagatcggcgcccatcagaatggacacaaaataactgacaaaatggggaaaacggagagaattttaaaaaaaaaaatttgaaaattcaaaattcggcgcatatttgcaaaattagccaattttttgcgcaaaaatcgcaaaaatcttttcccgacgtcacattgctttcatataacttttttttcatgaattagtgaaaatttccaattttatttaatctaaaacacaactgattgaagcaaattttcatgaaaattgtaaattttctacgaattgatttcgctataaaattctaatttaaatttccaataattgcccccaggggcattcattaaacacccacacgtcattaagtgttgacgggtgctgatcaggcgtgaacacgtcgtacagatcaatcacattctcgtggttcatcagccgcaacagtcgcaattcgcgatgggttcgtttggcatggattgacgattggaagggccctttggaaaattgggggggggggggggaaatactcccaagattttttggtaattaattaattactcgtaaatttcttgattgccacccgatcgcccgtggtcacacattcagccgaacttcaaaaaatgcaaaaatattgttaaggtttaggctcgatgtccaggaattcagaaaaaagtcgggtttgggccgagattttgtgatcggaactcgggatgcgaaaatgatcgggattcgagtcgggatggtctaggtttttaaggcaaggacacgaaaaaggtcgggattcggcatccgccggctctgaatgtcgaaaacttttctagattcaa

SEQ ID NO: 1350 - DNA, 1761 bp, Heterodera glycines
  unsure (1)..(1761): unsure at all n locations
aaaatgttaaaaaatatagaatgagaaaaaattagggggttaaaacaaaatgcaaagctgttttgttggctcaaaattcaccgatcaaattgcattttgcattatttgatcagaagcgttcgaaccgatcggggagcaaatctggcataccccaggggcataatttctggtgccaccaaacgctcaatttgaaacctctcggaaattgagcagacatttgacaccaaattatattgaatccggactttataccactggaccaccaaatgacatacagtaggggatcagtaaaaatattataaatcggattcacaatttttagtaaaaaaaaaaaaaattggggaataaaaattagaaaaaataatgaattaatttgaaaaaataaaaaattaaaagcataatttccgtgaattaatttgcctatttttgtaagaatgtgtttggccccatttttaaattaaatttaattcgtttccgatcatttaaaaaaagattaattatgagtgaccaaatttggccaggccaaacaatattaaaaaaaaatgcaatggatgttatttttaattgcccataataactctcttataaagacagagaaaggtaaaattaatttgaattatttataaaaccgttacagtatcccaaccccagtgtgaattttgaatatcgtaattcgccaccgttttacatttttggtagcattcgggaatgatccacacagttttgttcagctccaccgtgtagaagccggccttcacattggttgcaatgttctgctgctgttgttgcacctttttcgcatggacatggcaatcggaggcgtacatttacggcaccctggggggacaaagtgtgccgaagcccggcgggggacaaaaaaaaaacaaattgagaataagtgtaaaaataaaatgaaatttaaaaatagttttttaaattcaataaataataaaataattaaaattggaattcatgataaaaagagattaagcaaaatgattattttttctattaatttacaataaattaaattgtgaaaaagaaggtgtcatggcggcaaaacgtacaaaagcaaaatggaaagttttttggaatttttgaaaattaagcccaaggatttctagagctaagcttaaaccaggcataggctaggcctaggcttcaattttccatgatgtatttttgtaatttcgttttgccattgacccggaaaaagagcataacacaaaagcttgtttaaacagtaagaagaagtggatagacaaatgtaatggtcggacggacaaatgaattaacgatcgatttgcttttgcccaattgaaagggtaattaagccattttattaattagtcggctgatcgcacatccacctcattattcgaatggagctgaccctttgtttcattgtgatgccgttccaattcgtgccaaatgatatctaacaaaaacatttatttatatgtgatcgggacacttgagaggccaagaattgaccatgaaacacgagaccgagcacttatatcaagttcgagactctcggtcaaaaaatccggtgtccaaaaatgttggaaattccgttacatctctgcttttttagaccatttccgaggggcattcccaccattaccagtcaagaaccaccacctttccagtccgcaacacttctggccaagtcatcgccgtcctcaatggtgaagggctgngccgccaccggttcatccgctggncaatggtagtcgcgcatgtacggatgcagcagcg

SEQ ID NO: 1351 - DNA, 3234 bp, Heterodera glycines
agaaattatttagcaataattagctcaaatcccatataataaattgaaaaatatattattttccactattgtgacatttttcggtaaaaaaattttaggaaaattatgaaatttttaaaaatgtttgaattttattggccaaagcattgtttgtctgactaatttaatattgagcaccaaaagcagaaaaaatcggaaaaatatttaaatcaatttcaccatatatttttgaatttgattacaaaaatgcgaagtggatgatcaaattttaagaaattaattagattatattccccggcacaggtcaaactttgcccgaaaatattttaacgttcattttgattttccaattctatacttttccaatttttgaaaaaatttcgtccccataatttttcgctaagtgatcagaagaagttcaccaaaccttgcagggatactaaaaggaagagaatcaaccaattttaaacattttcatcccatatcctaaaaaatttcaacgctaattggttttaaaaatgtttttttttcaaaattcagagttttccattattttattttattttttaagttttaaatatattttttaatttaatttttaaaaaccaaatttgctctcaatcgggacatttaattttccggtcactaagtccaaagttcaataataattaaatcaaaattcaatcattatgtgccatcttcgggcataataaattcatatccaaattcacctccggacttcggtaccaacgcgaaatcacataagcggtcagattgtccccattgttggacaccgtccgggccaagccaaagtcgagcacagtcaaatcgcactcctccgtaatggccaagttggacggcttcaagtcccggtggattacctgaacaatggcgaagctattaatggatggaaaatcaggattaaatatagctcactcaattgaagcatttttagaacgtaaaaaatttgatcggatttcgacaatttaatttttttaaatgggtaaaaccccgaggtcaatctcggcattttccctttttcgtaattctgaaatcctgacctttggtacctctcccgacactaaatcctcacattttgcttttgatttcgaaaatcctcgccgttttttttttttttttgccttttccatacactaaatccctgcattttgcttctacaataatttagaaatctccatcttttttttagcatttccttccccgaccaaaaattcgccgggttcgttcttcgtccttttcccaatatcaaatctcggcatttactaatcaaatttgatcgagaaataaaacagaaattatttaaacataaaaacaattaaatattctggcgtaacatttgcggaatggagatatttcagtgcacgaagcaattggtagacaatgtatttgatgtggtcatggttgatcagcgattggcccaactgtttttgtcggtccaacacctgctttaggctgacgccagcgtatccggacacaatgtaactgccaacagaaaagtgtggcacaaatgccatcgaatgagaaagagaaatgccgagaaaaacccaatcgaagtgccataatatgaaaaaaaaagtatgtcaaaaaatccaatccaattgtcatcctgaaaaaagaaaaatgtccccaattcgtacaggttttttgagttcctctagccataatttttttgaaacttgatgaaattttttgaaatttgtagaatgatagagaacacttagggctatcgaatgatatcaagaattaaaaatttggttgctttttaggaaagttatcaataatttttcatcaaatcatattgatgattttttaaataatgagagtattttccattatatttacacatttttgaagcatttgtcgtccatgtcaggcgtgtacatgtccacaaattggatgatgttctcatggctgatcagctgcaacagtttcaactcgcggaacacgcggcgcgctttgatcgcgctgctgaatggctcgtacattttcttcaccgccaattcgacgccttgcgctgctcgcactttgctgccaaattcaattttgggaatgtgtttttttttctccgattttttggccaatggcacaatgaacggccaaaaaatgccggatttaatttgggaattttttttctccgattttttggccaatggcacactgaaaggcaaaaaaatgccgcggagttttttcattttacgtttataacaataagctatgaattttctgggtcgatgaccaaccagtaaaatggcacccatttacgatcaaaatccagaaacccgtgccaggatttgaatttttaaacaatttgatcgacaaaaccctaattaaataaattgtgctggaaataaaatttgttggttttaaatgccttttggtgttgtctgctgtggaatgtgaggatgtgctcaactcacatcacgttgccgtagttaccaccgcccaaatagtccacaaattggtactccgatggcacggcatattccacctgaaaaaggcgccacattttttgaataatgccatccaagcagcaaaaatgtcgaaaaccgtgccaatgtttggcaattagggaagttgggaagcaaccggattagtttttattacgtgccgtgcaattaagcggcactaattattgtattgcatttatccatttacggttgtttgaaaaagatgacaattaattggcattggcaaatgctaatgagaaagttggcactgtgaaaaagtggcatgtggcacgagtttttaaaatgccggatcatcagaccaattaattggcacggatttttgtaaaagcccgaacatcagaccaattaattggcattggcaaacactaattagaaagttttggcactactgattcttggaaaatgacggacccaatagaagttgggcaaaacaaactttggtaatcaaaaatattattagtgccaattatttgaaaatgtaacgaagattaagcacttttccatcgcaattagacatatttagacaattaattgtgccacgaaactaataaacctaccatatccatgttgaaacaactgtatcatatttgcaaccaatgatgaaccaccgtaaaacaactatcgtactcatgttaaaatacctaccgtattcacgttgatgtgtacaaaaggccgtgtcgctgtggacgaacaatcagaagatgaatttgttgttgttgtgccaaccattgccatttgctggagg

SEQ ID NO: 1352 - DNA, 8073 bp, Heterodera glycines
  unsure (1)..(8073): unsure at all n locations
gaagatggaattgagttttatcaaagataaaataggttgaactcatgcaatcgaacatccaattcgactcatgtagaacccggaacccaaattcgaacaaaaatcattcatgtgtttctcattttatccgtgacaataatcactgccaactttgtttggcgcattttaaccggagttgaatacttgtgaattttattgtaaataaatttttgactttttgttcgggttcggagttaagaattggtataaatggatgccagaatggatcctccaggccctaataccataaaatcaactttatttttaaaaaacatgaaaaaaatttttatgacccaccatcttacagttaactttaatacccaaaactatcaatcctttttcaggccaatcatttttggtcgtttcacgcagcggtgcaattgatgttcatcggcaaccgcagaagttcgggacgttcggagacagcaaatgcccgttgaacaatcctttggtgccggccaaattgagacaaaatccgaggcccacgtgctggcaaatccccaaagagttttggccggactgtgtcaggtcagttgcacatttgtccatttggcttttatatttaatttccacattttttttgccagggaagttttgtgtggccgttccgccggtcatatcattttgttggtggagggtacggagccggtcttcaggaaaatgacgttcccattggacggacgcgtcgtcacggtcgacaacattttgccgctcatccaacacacacttggccgccgagaaagagtcatttgcttgccggcaagtcgcccaaattggcagagacatttttatgggacaaagatttttggactctcttttcaaattatcatattcggaggatttaaatgaattttcaaataatctgattgaaatggcactaattttgagtcaatttcagatgttcgtcagaggtttcttcaaaagggcgggcgtttggcgctttgccgaaaaatggcaccgtttcggctgtttgatggtcagcgctgaaaaaagaaacaaaaaattgcgaagcaaatgtttaagttttcttctgcctcgaagttttcacattggcgaaagttcggtggtgcttttgttgcggctttgaagggcaaaggtgattagtaagcaataaatcaatattaacatactatatgttacagtatttcattgcttcccttccctttaattgtctaagtcgcctttttctcgcttgtctttctctcccccttctttctcatgctctctcctctttcctccctcactctctcctctttctctctctctttctctttatttatctcgttttctcttcctttttattttctttctttccctcttaaatatgttaacatatgtagaaccacaccgtactttgcacccattcactttttaaaaggctcatttgtttgtctatccatccgcagtgcacgcattcgtcacaaactacgtgttgttttcctccgtctcttccccctccgctttgggtgcattcacccctctccttccccccttccccatttggtctctctcacattcattacttttgtttatttgtttacttctcctaacaaataagtgcattggtcccccctttacccgctcatcattctctcgatcattcatttcccacaaatcttttaattccttaaatagttcaactaaaaaaattaactaaaattaacttaattaatgatggaagaagagataggtggtcctcagcgcagttcgactccaaaccaaaacagtgacggtgccatattaaaaaataataaaacagcataatgatgctttaacaatttcagacgcgccgtccctttctctcaatgacgacacaactccgagcttgaatggttcggggtcgttcctggatattacggccgacgaaagtaattagccagaatgaacttttacaaaaataaggaatttgccctttcagacttcaatcgcttgatcccggcgagcagccaattggagaagagagacattgccatcggcgttttgagcagccaattggacgttttgaacagccaactggagaaaaaagacatcgccatcggcgttttgaacagccaactggagaaaaaagacatcgccatcggcgttttgtcaattgctgtcgtcgggatgggcgctacaatcatttatctgttgaaccgtcgctgagttaacgctaaccttctgttttttccattcactgtttatttaaccgactttttaattggagtataaaaaaatttgtattaatatttatctggaagtcgcttgtgttccattttgtgcttcctggatgattcctaagtttattgacccaatttcttggaaatacagaattaataaaaacagaatgaagtcatagctggggcccaaccgtgagggcccaactgacgtagaccgtcaaatcgatgtgcatttgcttgccttcgatattcgcattcacatgaaaaatcgaaatgccatttttccgtctgcctttcccagcagttgttgctcaaccacttacaacatggcatcctcaactgtatcttgttgactaattgtgccgttggtgcctttgtgccgttgacgtcatactccgggaacagttcggcatgggcgaggaacgcgatggcgagcagtgaaaaaatgacaacaatttacctatttagaaatttaaaaattaactatttcaaaaataatatttttgctaattttcaaattcaaatatcaatcattagctgatgctctctcctccccgcgatgatcaaatttgtcgattggaaaaagtattaattaataattcattctttatcggttgggtcatccctttgctcaaagcgaagtcgacgaatcccaaaacactaagaacgcatatgacacacccaatggtcctatttatggaatgccattccaattacctttcacttaagccctttctccaaagttttacgattggaagagttgtgccattctgcgagaataaaacaattggcacagatatagagcatagatgtacataatagctgattatggacagcaaaaaatgagcatttccaattgttaatttaacaattttccatcattaatcactaattgttctttaaaggtgccttaattaccctttaaatggcattgtttgtgtttctcattgacaacagagcacaggtagtgccaaagaaatatttgtgcttaactcagcaggagaaagttggacagtttttgaaggtactgcaaaagcgaagaataaacgaaggatgaactggaaaacagcaacgaaattccgaaaaatttttagcaacgcaatcgcgacccatcctccgtcaatgaccgctttcttctgacgccttttgagcagttcccctccaatgtcaaggtgttcatgttcatgtgtacaattgttttgctttcgctggaactttgcattttactgtacacaaaatggttcaaccacatttaggcgtctatttgactttttgcgtccattcaatgaccatttttgttttcattggccataacttttttcttacttggtgagattttacttccttcgtgtcaatcgaaagcaaaagtttcagtaataactcaagaaaggagcaaatactgaaattaaattttcaatgggaaaacgagagatttagcttttttcaaatatatttagggcttttcttttaaaacgttattgccaaagaatttttgaccaatctccctttccctttgatgatcactcccgactccccatagtcttgacccagtaattttattatgtaatttttcccttttaatgtgtgctttttctctctccctttgtattccccgtctgataagaattatgtcggcatcttctctttccatccttgactatttaaactctgtccccattgactcttcgtcttcttttccctctccaatcctaccactcctacactttttcaactctaactttcctatcgttacctatcgtacttaaataaatttctttccattctttggcaaattttggagtaaaacccgggtattaattgggagtttaaacaaagcctcattggctaaatctctcccgacgaattgtgcatggacagtgcagttggtgccacgacccgggatttactcctaattcccattttgccgaaccaggtaaaattcccaataggctaaacgcctaagattgtcgagtcggagctgtgtgcttgctcctcggcggctgtgtgccatcaaaaaaagcattcaaattttgaaataggaagaaatgaatggcacatacaaattatttttcattgactaaataactaactattgagtttcaacaaaaatttatttttatattttttaaataatatgtaaaatcgcggaagaaatgctttgttttttcagttttcttccgcctccaattttttccactggcgaaagttcattgccgcttttgtttctgcgttgaagggaaaaggtaattagtaaacaatcaatcaatactaccatactattacagtatcctttttctgtgcccatttctttgcttcccctctcaaatttgccttttcacccccctctctttttcatactctctcactctctttgtttatctcatcattttctcttacttttcattttctctacctttccctcgtcctttctctcttcatttaaaaatgttaacaaaacacacacactgtactttgcactcacagtcactttttgaaaagatcatttcgtttgtctgcccatcagcagtgcactctgcactcattagtcacacactattacgtgttgtttcccccgtctttttccccctacctatgggtgcattgaccccctctccttcccccttccccatttggtggtctcccattcattccatcttggtttatttttgcagctcctcaaccgcattctttgggtgggtgcatatatttataacccattttcctttccatcattcattcaattcaatcattttcaatataacatattcttttattccctcttatttggtcttatattttaattataatatagctaactaaaactaatcaaatcattattaatggcagactgcggtacgccagtgcgcacctcaactcccaacgaggacatttctgcctccgatcgtactgcaaaatgcctaaatattagaaaaaaattacctaattaacagaataaattaaaaagtaattcaaaaaatgattttttcataattgcaggcccttcgtccagcagcagcgagtcatcagcagcatctttggacagctccggcggaggatttgccaacatctcttcggacaaaggtgtagtctcatcaaacacaacaaaaatgaaatattttttttttccagtgtactccgaattccctgtgaccaaagaaatggacaatcgcgatgttaccatccgttggctctccatggttgacaaacgcgatgttaccatccgtttgatctctgtggctgttggcgggctttcagtggctttgttcctgagccgtcgtcagtgaatctgtggcttaacactaacctgttcattttttcacctattcgttttttaatcgttatttctcatggagagtataaaaaggatacggagttttactttaagaaattttacattaacaatagcaattttgccctataattgtgttggtgttccggtacaataccttatatgaacccgaatttatcgaattcaattcttaactcccatagctcaacaaaaatcaccgagccataggttaggactgatattttccacaaataactattaagtaaaatgggatgtgagtttctataaaaattagttaaaaaacttaaatttataaaaatattattcaaaaaataattgtgaaattcaaatttaaaccattagctcgttgcccattccttctcgcgatgaccgatttgtcaaattgaaaaaatccattaattaatttatttattctcgttgctttaaatctgttcgttaaaaaacatttatttttgttgcatctaattttataagactatgtaaatgcatcttttcaatgacccattttttggtcatttagggacaagagtaagaatttcgacttttgttcgaattcgtgtcagggatttgaaataggtcgaaatggagtgatcagctaccccgaacttgtggcgccttcgctgggacctgaacgtgaaacaattccattgctgaccgcgctgagcgactttctaggcaccacactgctcgccatcgcattcctcgcccatgccgaactgttcccgtatgacgtcaacggcacccaaaccccgtcaattaacgggaatcccgccgggaaacgggaaaaaaattttaaggaaaaaattgatttttaaaaaatttttactttgaattacctatttttcaagtgaaaatattttaaattgtttaaaaatttctttatgtaaattagagttgagcgagaccgggactggtactgaaaaaacgggtacaactgagtacccagtcccggttttgacaaattttgaccggtaccgggaaattcccgggtttttcccggttttcacaaccaaaaattccggtcctggtttttgtcaaaattcccggtcccgctcagctctaatttaaatgattgagtatttttaaatttaatggactaaaaatttccaggtccaggcaaaactggaaaaacctggatttcctggacattagaatttttatttcaaatgaccgatgttttttcaaaaaaatgtttaaatagatttaaaaacagattattagtgtaattagtagaggccgagatttccaaaagtgccggaccggaccggtctgatattttcagaagcaaccggtttccgggcccggcctctcaaaaccggtgaaaaaagacacgaccataaaatatttttgaaactttaatacactataactttttagagaaccatccaaattaagcattattggtattatttgatagccctaagtgtcctctatcaaaaactttggttgtgtttcaaaaaagttgtggcttgtaaatttcaaaaattgatttggtaaacctcttgaccacaacttctttgaaactcatgaaatttttttaaatatacagaaaaatagaggacactttaggcttcaaatggtaccaagaatgtttaatttggttgcttcaagaaaaaattatgatgcactaaacttgcaaaaaaatttttatggtcgtgtgaaataaaaaattcaacagaaaagttcaaaaaaattgataacattatgccaaaggaatattttccaaaggaaaatgaacaaaaatcaagaattttaggctttgtcataaaccggtaaaaaccggtccaaaatgccggtttccggaccggtttggcattttcaaaatgaccgttttccgggcccggcctctgaaaaaccggtcaaaccggaattttccctaaaaccgccggaccggtttccgggcccggtaaaaatcggtaccggatccggtccggctcggtctctacttttaaccataatttgaagctcaattgaaaatctagagaaaaatagcctattttgaacaattttggacattttcgtccattttattagcacaccgatgtgaattacgcagtaaaacgagtataaaaagcggtgaaaaagtgaaaaccgtccatttccatttcttctcctgtactgtgcagcgcagaacactgttcttgttccttcattcacactatgaggaaattctattatttcaagctgttccaagcggtcttggcatttgtcattgtttggcaaatcctttcgattgagaagctttgcgggaaatttgctgagccaaaggtgcacacattcatcatcagaccatcgcgaaccttacatttaattttgtactgatttactctccatgctttcagtgtttctatccaacggaagcttgcgacaacttcactatcttcaaacaaaacgcagaaaccactgaactcaacgcggacaatgaaacaaaatggatccagctgaacgacctcncgaccggcgagggctgtctcccatcaatgtgaattgatcagctttagctcgtattgctcctcttctaaacatgatctttcagatttccattgtctccactcttcgaaatgg

SEQ ID NO: 1353 - DNA, 2736 bp, Heterodera glycines
  unsure (1)..(2736): unsure at all n locations
aaagggttcctgagagttttcaggctattatgatcanaattcaggatccattatctcaagtccaaagaaaattgagttatgagttcgacctgtacttggatttcttgattttgagtgatttattttattttttattttacaaccaatattatagtaattgttggcttgttttcagaatgatgatgacgtggtgattgtcggtgaaacgtgcactgtgatgtcgagttcgcccaccttcggcttcaactcggacatggaaatgcagcagttgcgaagccctccctcggcatttgtcagtggtggacaattcgagcacattcaccacgttcagtcatcctcttcaacctcttacgacttgtactatgatgatcaaggtttgatttgttgttgtgtatagccataaattaattagaatcgatgttagtggatacatttggcatttatagtgccgtaaatttgcgttttttgggctgtttgtgaggagccccgacttttgcgcctatgtccaaaatcgaattcaaatttgaattttttgaagccctgatagcctaaacagcattaaaattaagaaaatactgtcttctagttttttaggaacatcaattttgttgtttgaaaattttattatttttcaaaaattcattacatatcaaagatcggctacaatcacttttaatcccttttttatgctgtttaagtgatcatggactgaaaaaaactcaatttgaacccgattttggacaaaggtgcaaatgtcgggccgcataattggggggaccgcaaatgtcgggacacggtttgggatagagggaatacaaattaaaaacacaaatatccgaaactccaaaaatcgattttttgaatttattttttgcaaagaaatcaagtccgcccatttacagcagcaactcaacaatattcgatggtttctcggccaatgcattcgtcggcaatgaatttgggcggtgatggccaacccattcagcaacaactggaccaccaccaacaacaacaacaaatgtaccatcaacatggacacgcatcagccgaaacgcgaggatttgttagacgagtgacggcaccgacggcgaaaaccccatttgaagaagaggaggaggaggaggaagatgaggacgaagaggaggaggaaaaggaggtgcaaatgggaggaaatgaaaccaaagaggagatgggaggaggaggcggaagcattggacgacgcgcatccgcgggcagtgggagcggccgtgggagacggacaattctgctggacgacagtgcaccgcttcccctcccgccaacgatgacaaaagggggcaaaattgtgccggacaacaaacatccgcttcagcaggtttattattgtcaatgtcaaaggatatatgttgggagtggtcaaaatcggggaacattttgatgaattttcgttttttaaaatcctgagttaggtggtgcattataaaattgtttatccattttcaccaaaaaattactatttttggcatcttggtctccatttttaaaaatatgataaaatgggagtccggagatgccattaagcgccggcgtgaaatttttgagaattttaatgcaattttaagataattgcttaaaatttcaaaaactctacgcccttgtgttaaaagaagttcgactttgaaaaatttccagtcgcattacttctttcaatttttgttatttcaagtcgtcgaatcgtggtgccgcccttgacgaggagaacaagcagaaggtccgacgtcgtaagcaggaatttgaaaaatcgacaacagccaacaaaccaatcgttggcgaatcgccttcaaaaaccagcactgccacagcggtctttggaagtgccggaggagtgaaagtggaagtgaaatatgacgacggaacgactggcaacaaaaagggcacaaaaacgaaacagcagcagcaccaaagtgatgggacagcgccagtgattgaggagacatcgccaacaaccaaaaatttgatgcacgagcaattaattaatttaacaatccataattattcatttttgcatggcacattaaaggcttgagaaattggctgtaaagggcactcctccagtggacatttttatagcacaaatgcctgggttttagcaaaatcaaaaaaatgttattattatatccgagtcaaaatttggcattacattgacgaaaaatttgtttagatccgtcacacttttgttaaaattccctgtaaacaaaaattttcgactgatgatcgaacaataataataataatgcccacacttttcagtgataaaggcctcattgtggctcaaacggcacaacgccttggcaccattgagggatggcgtcggatgaatgggtggcttaaaagtgccatgaaacagtctgacatgaccaagctgaaacaacttctcacccagctttcgaatgtgaggcatttgcactgtaaatttaatctttggttggatttcgattttctcaggccgacataagtgttgatttgttgcgggaagatgtggacacaccgaagcttgtgaagagtatgcaaaagtcggaagataaaggtattgtttatacacctaatcagaatacaatggatgtgcgaatttccgtttctcattatttgacttttgtttgtttgaccctttttgtgtttaacattttgaccatttaccgtctgaaacccgtgtgggggctacaatccantttttacttctcattacgtgctgctttt

SEQ ID NO: 1354 - DNA, 3824 bp, Heterodera glycines
caaacttcaaatcacttttcactgtcctattttaaagcattagatcttatttaaatctcaaaacattacaatcgtttggtattgtcgttctgaaaacccgatttttaggcatttcgtcgatggcaacaaatttggtggccgattggaagcagaaggtgcgcactgagaaaagcacaatgaagtcaatggcattaccaaaattggcgccggacaaaaagtcgtctgtggtttccgtcgctgtcaacccaccgccagcaacgaccgcaattggtggtgctcaaaaaacaaagcaaagtgcgccaattaaaagcgaatcgaccactggagcgactgttcgtggcttggcatcagcaggtttccatttgttcagtttatttttggacagcatttgcaaacggaattattgggttcgtaaatcgccattatttcttggattggttcttgtttttgtgtcagtttcttaactaaaacacgatttttatttattgtgctatttcatatttttgaaaaaatgtatttcaaaaagtcgaacaaaaagttgtccactcgaaataaaaatacggctctacacgaatccggcatccatttcgactaattactaaccccggactctttcgaacaataagtcaaggcaccaatttttggttcaaactttgttttaactgcacttcgaagtgaaattcattattgcttcagtaaggaccattcaaactatagactgaaaatggaaagccgaaaaattgttttttattttgttttaatttggacgcataaactgcagtattagccaaaaattaactgttcacaattttgtctaaatttaaggagcaactgcggcaatcggtggtggaatgggaacgaacacatcgttgggcgaaaagacaaacaccaccacccaaccaccggcacctgtagtgaaaccgaagacggcgaaagcaaaagttcgactatcgaagccgcgactcactggtgagcatttttgtggtttattgtgctttcggggggaggggtgatcattttttggttccctctagaaaggcgcaaaaaataaaaggattacttttccaatgatacataacaggcccgtaaccaggggaggcggcatttgccccaccccttccgaaattaaaattcaaaaaatggttaatttttaactcatttcttataaattttgacccttattttttccggagacacataaaggcactgctgaattccaatttttccaaaaatttgacgaaaatttgggtcaattacactgacaaagaattttttgaacgaagagcaaaaattaaaaaaaatacacttcggttaacaaaaattttttctggttacgggcctggacttaatacatatgcattttccgagttacagttggagccctccctatgtcaggaaatttgttgacaaaaaagtttgataataaaacggaaaattgacgaatttttagactattcccaaacacctagctttccacacgcctatcttttttctcagttttaactcccttttctcattgctctcccccttttcaggtacgcttgcactgctcctcggccgaggacgatccattaacataattaataacttgaacatccaaccatttccattttttacattttttgaaaacttattttggatgccatgctcacagtgtatatccctcactctgtgtgctcacttttatgtacatcctcgcacatgcttcacgggtaaaatgcagatgccggtaaaaaatgcgttcggtcgaatttgttttgcgcctttccctcgacataatgggaaaattctaaattttccaacaccatcattaaacccctttctgaatctgtctgtgttcgcgcaattcttatttttatcattatgtcaaaatcatttccatgccgggacgggtgattgatcaattgtttgaccctcattgtcagagccgacggatgctaattaagaaagacagacagcgcgtggctgaatgattgcgtcgtttattgcagcattatttgaataggtggacgaacacgggtcattcccgttttctgctcgtttggcggcacggaaaaaggagtaaatttaagaaaagtgaaacgaagtgctgccgaggcgcaactgagagcaacagatgactttttttttctgcacagttctgctgaacaatggctacttcttgcatttcgcgtaaaccgatgagagtgatttagaagggggtggggcgggtgaattaaggcgtacgcttgtgcttgataggcaatttaaagcttgtgaccatgtccatggtagttgttccctgttggaccagtcggtcaagccgtatgatttgtgatcgggctgggttcgcgatcactcattcactgctctctgctgccgagcattcggtcgcgcgcgtgcgtcgtcccccccccccacccttttcgctatttgtctattttctgtctcttgggttttctattcatttgttgcattatttcatcatttcgtgccttccctttcactgtctgtgagcatggtcaaattggcagttagccgcaagaatttttttttcaagttaaaaattattaatgattaaatataattgcaaaaaaaaaactaattttatccaactttttaggtttggaaggcgacgaagaaattgttgagaaaacggtagcagcgaaaacgcaatcggaaaagggcagcaaaggcggcgccacccaacacagtccgaacggaacaggtggcaaatgttgccattttttgcctaattaaaccaaaaaattagccaaattatgtacaggattaaaaatttaattttcgacaaatcacaatgcacgaaataaaaaagaggcgcaaaatagtataaaaaaaaatttttgaatttttttcccaataattgggtaccatcggtagtattaccaaaaactggttattgagaaaatttctggtgttttcaatggtcctttttcaccctgtttttgttcaaattgtttcatacaacagtttacaccttttccttttcaggcgtttcacccaattttgagtcgccattgacgcgcattttgtccgccaccgaaaaattccatgtcagtcgattttttacaattttttttaattcaaatttacttttttttatatttcccaattttatttgacttttaaaacgtttcccttttggtctaggcacaaaaccgtgctgtccaacccaaacggaagcctgccgccgaggttatgttctccgacagcttcatggacagtttgtgcggctcttcggatgacacgacgacgccgcagaccaaaaagtctaaaatcattcggaagaaactttcggctacattcaaggtactttggaattgattagaaattcgttttttgaattggaagatcatggaattttagggacgggaaaaaatttcaccgaattttgccgttaaactttgaaattttcaaaaaatcttattttttacaagaaaatttgaggaaaaattttgtcaatggttcttttctggaattttcatataaaaatttttcttattgttagattttttcttgaaattttaaaaactttttaaaaaatttcttcggtgaaattatgtcccggctaaattttggggtgcacccggaatttctgtttttttttgcgcggacatttcaattttgtttcagtccgactcgaaccgtgactctgtggaggaggccaaagacccttcggccgctgttcggccggcagttggcggccgtggcgagaaaaagcgggtgcgatttagcgacgaatttggcatcgaattgacccagacgcgcttcttcgaagtggaagagggcgaaagaggtgaaactgtttctgtgtttttgaaata

SEQ ID NO: 1355 - DNA, 1715 bp, Heterodera glycines
tatgctccagcagcaccatcagttcggcgccttttcgtttaccgacccgacgctggtcagaaacctttaatcatttgacaaatcatcattttatttaactgatcacttgtccgacccatgccgtttgagttggacaaacccgaaatacgaaccaaaaaacaccctccaatttgctttcaaacattcatagagggttaagaaataagtaatagcaataagatttttaaactttcttttgaaataaaaacgaaaaaccaaattgaaacttttcctacaaaaaaccgctaacaataagaataagaaagtgaaaaacaaaaaaaaattacggttttttcaaaattttttagggatttgggaacttcatgtacccttttgtttgacagcctctccaattcaattcatttttgaatttcaatttgaagatgcctcccggacacatgcagcggccgacgccacaaattccgctgcatcagcagcaaagtcagtaccgcggtggaatgatgggctcttccggcggtgcacaaatgggcaaattcggtagaggaatggaaaaccttttccgagtaagctaacggaaaaaataattgcataaatatggcttaattaatgttttaaaaaattttgagtggaaattggtgcccgttgacgacgtcatcactttggttgtttcgggcagcaaaagtcagtcgaagaacgtcgaagcgacgcgcattcgcggagtgatggaggccatttgtctgccagaaatgtgagttttgggtgaaacagtgattttatgccgaacatttgtgggaaaaccgtcgcagagaaaagcattggctgaattagtttttttatgtatttcgatgagctttacggggctttaaacttagaaatttttcaagaaaaaaacttcgaaagttttttcataggaaaattctatgaaaaaactttttcgaaaaatttaatggttaattactgttttttcaaaaaaaaatttccataaaatcgctcaaaatttcccgaaaaaacaataagaagaaaatgtctaagattttttcttgaaaaacttctatttgtaaatttaaaaaaaaattttcgacgggaaacgatgcggggaaatgaaccatacaaccgcggacaattatttatttgaaccaaaaaatagaatattgaaactaaaagttgaggaatttactctttttttattttctgtaaagacaaacgaaaactttttgaaatttcagcagtttaccaatatcggacattgacgagaatgactacaagcagcaccaaaatgagacgactgatcacatgccgaaaatcatcccccacgaaatgatcactggtcagtcgatttccactttgtttttgctgggaaaacagcccgttttcgccgacgcactttttagacatcggactctgaaattataagttgggtcccgagtgtccaaattggtgattttgtgaatttttggaaaatttttagtgcgagaactcttggacacggcgagtcaattttgggctccaagtataaatttcaattttttaaagcaaataaataaaatattaataaaaacagaacgccaaaagaacaaatacaaatagtggaaggtagacattatattttacccttgattttattaaatttttttagcttataactttgtcaataatagaccaaataaaaccattttatgctcatttcgaagggaaaattctaaaggatatttctt

SEQ ID NO: 1356 - DNA, 1987 bp, Heterodera glycines
agtggggattgaacccaagccgagaaataataaaatcagaaggtttagccacttgaccacttatgcatacgaacaaatgctttaaatgaaaataaataatttaattttttttttccaaaaaatttctccttcttcaccattccctactcttttctcacccagacccccattcttaccagtgcaaatttttaccggcggtaccggtactagacaaaccggtaccgatactttgatttttgaaaaaactggtaccggtaccggtaccaaaaaaaccggtaattaccggtcggtaccggtaccggtaccggtaccgctcaaccctagttttaaaccctcaaaaattccaaaaaaagtgtttgtgttcaataattgcttaaataaacttaaaaaaacaataaacaaccaaaaatggatttaaaacataaaaatgcaaattttttttattgtcgtccagcgtataaaaaatatttccaagtttgccaaaatttcaaaaaaattcttttttaaaaaaagaaaagttcgcaaaaaatggcaatgacgacgaaaactcaaatttttcggattttttggggtctaatttttttaaaatttccaaaaagtccatctttaggggtgcatttttcgcttttcttgcatttttttttttgtgaaaatttgccaaaaacggccaaaatattgactaaaaagacaaaaatggcgaaatatggaaaacccccaaaatatggatttatatggactaaaaaccttcagcaaatcaaaaaattttaacgtagaaatgctatttttgagcccctttcttcatagcatatgcgcagaaaaaatatgtgtaatccatataatttacaaccctattaatgattgttctataaatcaatgcaaattttttttaacataaaaattcataaaattgcttaaagtcaatcaaatttacatcacatccttattattagggttataatttgggagtccaattatatgcacatgcatatttttttcctggactgtgggaggcatgaaacgcacgaaaaacatgtttttagcgtgttttgaagcttctaggatgactttccatatgcatgttttgcatatttgtgcatatttcgcgatttatgtgcatatttgcatatttgtgcatattttggcatttcgtgcatattttatgtgcatatttgggcatttttccaaaaaacctctaatagaacggcccccaacagacaaattggcctttttgacctcaaaaaccggaaaattttccaaaaaaataattttttagcaaaattttcacgaaaaatattgaataaataaattttctcaaaaaatggttaatttatgtcaaaaataagcaaaatttcgctttttgggttggtttttcgcaaaaaatgagtaaatttttgctttatcatgtttttttcttctaaaatgatttttaataccacatttagccattttttgaagattttacttaatatttaacaaatttgaagaaatttagagacattacacccttaatttggaaaatttatatgcatatttttcactttttatgtgcatattttgccatttttggtgcatattttatgcgcatattttgcgattttatgtgcatatttttggatgccctgatgataagactcgttatttgattaaaatttactatacttttaaattagacgtgcacatttacaaatattcttattttttaatctttaatatggttccaaaacttccacccgcgaagaatcgaacgaataaactcagtccaatttgatttttttttaataacatttcaatttttaaaaatattaaccaaatgaaaaattaaaagttttgtaactgtcatgaccacaaaaaggacaaattcggggtcatattcttcactattgccctgccagcacctttatcacaatgtttatcaaatgaggagctaaaaatgaggtttcgccaaaaacaatgtttgaattaaatagtgcattgggtatcattcact

SEQ ID NO: 1357 - DNA, 1136 bp, Heterodera glycines
aaaggggctcaaaaatagcatttctgcattaaaattttttgatttgctgaaggtttagtgcatataaaagcatattttgagggtttttgagaataaatgcatatttggtcatttttgagttttgagagcatatttcggtcattttttggagattttcataagaaaaatgcaaaaaaaagcgaaaaatacacccctaaggatcgactttttggaattttttaaaaacacacccttaaaaatcgaaaaaattttaaatttttataagaacttgtggagaaaaaatttatttatatagaaatgtaaatttgttttagaatatataaaaatttataaatttgtaaattcacatttttgcaattgtaagtaaaataaaatgctccttatcccttgttttggtgttttaaaaatcaattcttaattatacacaatttttggcgttttttaaggttaaaagccattttttgcagttttttaaggcatattttagtgcatatttgggcatttttcgggtttttagggcatatttgggggatttttagcgcatattttatgcgcatattttgctttttttagggcatacaactttgaaccctacttattatataaataactttaaattttacaatttagttatattttttaaatttaataattaagaaatggatattcaatatatgacaaacatttttaaattttgaaaaaccaaggggctatcaacatttcaagaatttttattaattgtttattatgcccaatgattattaattacctgcaatccattcccataaaaatggctcaattggtccgatacggtgacattggccaactcggccaaaatgcccgtgtacagcacgtcctccaaataaaagctgttggttttgtgagcttgttccaagacggctttgatggtgcttggagttgtcaaatagcagccaccgtacaaaaacggtgggaaatgttcgcccgggaacatttcataagggacgtacctgaaaaagaagccatagccctaaaataatttaggaaactgtttctgctctgctgctaattgtatgtcatctaattaattcagtatttgaagtctaaaacatcataaatgaagaaaaaagcggaaaaatttcataaaacctaaaata

SEQ ID NO: 1358 - DNA, 2101 bp, Heterodera glycines
  unsure (1)..(2101): unsure at all n locations
aagtttcggatgccctttctgctgtcgaagccttcccggcgcgacattgtcaatatgagcaacttggtgccattagcgcaaggcttttcaaactgagcccatgcatccaggccaaagtgccggaaatgaatttggaagttgtagctaatttgtccactgttgacgatgtgtgccattggaatgagcagggcaaacatttgccaaatgcaagagatgaccatgctctaagtattggcaaatgagaaatgggacttaggattgagtatgaatggtgcgggggatatttaaatgcatttacaccctaatcactttatttattttacatccatttttgtggcgcggtgccctttcctatttcccccaattaaatggtatcctacgaaaacattccttaattagtgcaataaaatgtgaagcaaatggcgaatccgagttcagaaaatgtctccgcgaatagaggggtgtctaatgagggagtctcactcgagcaaattggattggcaaaaccctaactgatcagcgaaaaattcgggaaaggttacacaaaaaaaggggccgcccctttccgtcctctgggcatttgttaataagttgatatatattatatttaataagaaacctaaaaaattgcaattaaaaaaatttacagtatcattctgtgaaagatatatgtataataatttaatttgttttgagaatgataagtttagtttttgaggctgactaccgccaccaccaaaattggacaaattgtttatgtgatgctacaaataaaagttagtatatttttattgcatagatagataaccccgctaattgagccgaggatttgatacccaattgatcaactggatacgccttgaactcgattaaaaatgggaaaaagggcaataattttgtctgctttattttgtttaatacattaaccactgtaattagtgaaaaaaataatttaatatatcatacaaaaattaaaaataaataattacaattttgaaaactcgtccacttattcaccatcacatttaaagcttatcgtctcattaaatgtcaacattttgtcaccaagcatcttctgcttttcgcttcgtttattcagtattttcctcttaaaactttgaaatcgaaccttaaaaagttcaacggattggttaaataaattacttaattaaaaaaggacaacaacaattttaattttgtggatttaaaaaaaagctaaaaaattatgaaattatcctttttgagtttcctttaatattttgccaattaacggacattgggcagttgttgaacaaacgatttgttcaccaccagtgccattttggccaattgttccccgcaggtgtgcaaatgggtcatgttgaacaaccgttcgtacacacacaacaaagcgccaaaatcgaatgcgggccaaaatctgttgaagaaaaaatgagggaatgcggcgagtcgggccaaatcttcgacgccaaaaatgcaaatgccatgccgaaaatgggcagagggacaggaagtatccggagcccacaaagtctgcctgaaagcttggtaatggggtcatgttaagcatttttttcgagactgtgagggatccaaatgagaatgcgaacctcgtcaaatgttttgtgggcactgcctttttttggttgaagcatgtctgcgtgtatccgtccggcgcgttaagctgatcagccgagtgcagagtgatcagcataatttcgtcccgtccatagccgatcagattcattcgtcggacaagttctgtcaggttcagctccaatcgaatgaagcggaccatggcacgggtcagactaatttcaaaatatccttttgaaagcagtaaatgtggcgaaaagccatggacagaagcagcagccggaacagcagtattcagagtggcttttatgtaaataatttgaacggtttatttatttattgaaattaggatttatgactttaattagccaaattaatgttttgtaaaatgctattaatcaaaaaaaaatcaaaagatttccaagcctataaaaatgtattaagaanaaactanaaatttcgatttttcgcatttatgtataaaaattgttaatttggcgaaatt

SEQ ID NO: 1359 - DNA, 8475 bp, Heterodera glycines
aatttttattgataatttgaagatcattattttatcttgttttgcaaaaatccattaattttgctgtctcctattctttgttttttattttggaacatttgtgttaccttttgtctttatcttattatgtacgttgctcttctattatagtactataagctcattatacacgaacgtgcaaaatgaccttattaattcgcgcaaatattatattctgaactacattatttagaaatgaaattttttttgttattacaaaaaccaattgaatttttccgatttgaaacttatttatttaaaattttctcgttattcaatttacaatatttagttagaattcattcatttatgttaaatttcatgtataacaattttagaatgttttttaatgatacattttcattagcttgtctcgatacaaatttttgtcactatttctacacttttgccatttttcattactattttagttaactatttcgagatttttcattaatattaaaattaaggtaaaaatagatatttttagagagtgggtcaatttttgttataagcattgttttattattttctatttattccactcatttttatttaaatatccatcggatggtccaacttttgttcttttttcgtcattttgtaacaaatttgagggtttttagttttgcatattttatatctttattaattcggatttcaatggcatttgtcattttaattttagtacaatattgcatccattactggtgaatattcttatgcatagtataaaattattctgcttaatccttacgatgcccttttcgtctttaattaaatcgtgcacaaattgcttatttatcactcctttgaacaatgagcgaggattaatcgggaacaaaatttgcatgttccatcatgcaggtcactcgctgactaagccatctgatcagctccatctcttcccggattatgccacaaatggtgaccatctgctgctgctcacaaagaatgagaagaagactatgaaggaggggtcggagatgccatttgcagaaattcctccgttttggcacccaaaaagaacaaactcatcaaaaaggccatgccggcactgacaacgccaatgaatggcactgctaaaggacaacaacgaaacttttggcttcctaatgagctcatctatgagctgctcctatgggtccggcccagctatttttggcgcgttcggcaaatgcttacaaccagtctcattctgtgtcgtttgcttacgggtggcaaacatgcaattacttggcatgagccttacgatgtttgggtaatgcgtgaaagtgtttttaaaaatatataatggaaaatgtccatttacttttgtgcaattgagatcttatttttctttttgaactaaatttggttgagaaaatcgtagatcaaacaattgaaataggctttcttcaagtttaaacttctttttttcaaaaataagttagcttatcttgcttagatctctgatgattgtatttctccttattctctgtcttatcattcatttgcttattgcctagcgcacgcattatgcgctgttaaatgcgggacaaagcgttctcttcacatggctttagctttattaattaccttttttaatattaaaattaaactatcattttcaacttaaatttggtaaaattgctccaaaattgatataaaaatataaatattaataaataatttatggtttttccatccagcatttggagtccacattctcagaccgtaaatttggaccaacaaaagtctgtgcgtatttgtgccgtaatcattcattgctgttgccgcgcaatttcctcaattatttacattgttcggaggactatgtcacgctttatgttctcattgttttggatagttccaagttttcgtcgcttgctcaactcgctctcgcggtgggtaaagtttaaaataaaaggaatattattaatttatgtatttagtttattatacaaatatacaaaaaatataaattgctttaaatggcacaatttattttttatatcagctaaataatttgcatttttgtttttcagcgccagggttttgacggtcgtggaccatgccgcgacactggactttgtgagagcgggtcttttgtttactgcccggacgaagtacgttaattttacaattcttaatttaattggtattaaatttgtttaaattctcttaaactagtttaaattctcgcgagtaaagctttctgcattttttaaatgacctcctaaacgtggttggcgccacctcacaaaaagtgcaaatttcggcgcttcacaaaaatgtgcaaatatcctatttttcctatgattttttatcgattttttattttaatttaaatttaattaaactatttaaattagtacttaaattttttcttctatatgttatgttgtatttcgaataaaaatcattaaaaagaacattttattaaatagaaccattagccaaattattttaagtaatctggttaatgattttatttaatattaaacaagttatacttatcctttatttgaaatccaaccaacatttttagaagtatattttgcatcatttcattaaatttaacatctttataatctaaaaattgttaaaaaaaaatcataggaaaaccgaatttttgaactaaaatcttccaatttatttgccatgttcaaggttacaaaaagatgagaaactttaaaaaaacccaaatggatctgactctcatcctatttttagccttttgatttgatcaagctcaaatttcaaaaaactcaagacgttggcgtcattatgtacaatcttcaaacgttgctcaagcaattttctaattacattgacgttattttgccaaaccatattcgagggacgcatcggctggggggtatttgaattgttttgtgtattgttgccatttcacccaaaactacatacattgattggataaaagtttgttacttctttacaattcggtccttgaactgatttattattttttctttgtttgtcagttaacaaatatttatgcgtttaaagctaattctaaccaaaatttgtcttttatttcacaaacttgctatctgaaattattatttttaaattattcaaattttacatttttttttgtttatttataattattaggggttccttttttaggcacaaaaaatcgcgaaataggcacctaataaggcataaaaaaatcgcaaaataggcactaaaccgtccctggtaaaaacatacagtttgccaaagttggcagatattgaattgcttcgcggtcatcatcatcatggtcaccattttcttcactttttttcggtatttttgctcatccataatgatggcagtatcagaagagcctttgaaaaaatgaaatttttttaaatgtttgtccaaaaaaaattcaaaatatttaatgccaaaagttcaaattggtaataatttttattgtaattagtccatggatttgttgagtgttgtttttgttaatatacacctgcaaaaatgccaacatcaaaaaaactgctgtaagcggaaaataggaaagaaaaaccgttttccttcaattgaattggggggtggagaccaaacacacgaagacaaagccacacacaatatttttttttgaagtccgaggagatcaccaatgtgaagcaaattgagaacgaaatttagagaggaaattttggaaaacaaattaatgagaataatgagaagtgaaaagtaccaaacataaattaaagaggtcaacaaacataaaataaatagagataaaatgccataataatttaaaattaaaacaaatatcttaattaaattaaaatctccaacacccccgaacaatctcgagaggcgtcctcgcctcaaaaacatcactcgtccatcgaaaggtgggtccacgagcagtcaacggcgaaaagggcgagagtcggacggatcggaacgacgattcatcggcggtccatagcgattggtgttgcgccattgtccagcatacggatgatggcgagtcgaagtgccacggcgattttggggcgggaacggtccaatccgacaaggatcgactcgatctcttgcggtaacattcggggccacaacaaccgtcgggttcatacgagaatcggctcgattactcgtagagacaactgcagaattgacggtccgaattttcaaatcctgatcgcccgggaatttcgtctgggagaaaatccaggccttaagcattttgcagccattattacacattttcccctcttcggaaacagtgtgtttgttgaaattttccccgaatcggaaaatttccaaaactgatcggcctttgtcggtggtgaaaattggagtgatcggcgatttggtgatgatggcgtgcattttcgtgatcagctcctcgcattccgttgccttggcgtgcacatacggtggagggcaccaaaatatctgcacgtgcgggaagcgctggcacaggctgacgatcatttcgaattgggccgcgatcgatttttcggtttcgccctgcatcagagaatcacgtccagccaaaatgagcagtgccttgacacggcttgacaaaacgatcggctgaaattggcggattaagtcggccatggaactctctcctccgatgcagtaggagctgttgatgtgtttggcgagcatttcggccgatgagtctccgagcagaacacggtcatgtgccaaaaagcggctcgctttatgcacaatcgtggcccgcacacgttcgagtgcccatgaactgtctttgaagacctcgtgccatttgtttttctcagaatcgggcagcgaattgactccctctggcatttgcatcgacaagggcttatatcccgactcggttaaagcctgtcgagccacaaagcacgatccgacccacttctccaaagcctgccgttggtcctcctccgttgggtatttgccggtgctgatttggtccccccttttccctgtgtacatacacaactccagcttcggttctgctccaacaattgtctggaccaaagtttgggctgccgtgagcgaagaagccacgcccgttcggagcagaaagatgctgagaagggcttgaagcggtgttttgactaccgccgatcccagattcgacatgttcaggaccgggtcgatacttcccagcgtgattttctcgcacagctcgtgccccgagccgcctccactgcactccgaagtccatccaaatccggcactgacacttccgacatccattggctctgaaaaggagtcgcttttccaatttccccccaaacaatctgaagcaattgtccccaattgcgattcgctttttcccccaatttcgcggcacttatttccagtcatttcgcaaatttctgaacgaattcctgcgtacattgacaacaattttaggtcgtttttaaacggatttttccctttaggcagtgtcgaaatgtctgggacgccttttgggaccttaaccaatcgttcaatcggcacttttattggggtgacctcctttttgtctattggtaccaaatttgccgatgaatcaccaatttctgtgatcaaatatggtccaaaatgtgaccaaagtaactttttgtgaggcgaacgacgattttgaccaggaaagacgaccataactttctctcctttttggaacttgttggccgtgacttttggtcgggaatcataccaaattttcgactgttccctcgcttcttccgaatttttctgggcttcttccaacatgtttagcaaattttcccggaacaattgaatgtattttccggaatctatcgtgtaaacaggattaaccggaaatggtacgtgtttatcgagcggaaattttgcattccggccaaacattaacaaaaagggtgagtaccccgtaacatttgacggtgtaatgttataggcaaaaacgccatacgccaatctctcatcccaagtccaattgctcgcggtcgactttttcagaattccgatgataattctgtttattctttcggccaatccattggcctgagggtcataccccgctgtgaaggacctttttatgtccaaaacttttgaaatttcttccattgtcgcattcaaaaattcctttcctctgtccgaatggatcttttgtggggtgccataaaccaaaatgaatttttcgacaaaaacttttgccactgattctgccgacttatcaggaattggttctgcgaccaaatattttgtgaaatgatcaacgatcacacaaatatattttttgttcgattggcttgggccgacatctaagatgtccatgcagaccaattctaatggttctaacgatttgacgacgttcaacggcggttcattagcccgtgaaatgaatatcataatttaatggtaatatttaattttttcataaatatttaaaatatttaaatttattaattattattttaaatttatttcaaacgggtgtgaagcaatcaatttccacgcattccttggcaatgtcgtcctttccataatatttaatttgtacgcaattaaattttaaaatttatatattacttttttgtcactaattgtgaatgctcttttcactttaaagtttttcacagtttccgattgattgccaagttgaagcaatgcctggtaacagatcagtaatctaaaaattgcattgggacatttacagacaatttcaagaaaaaatgaatggaaaagtgtgccgcattaattgcgcacttcctaatttcagatagaaacaaaaataattttaattttaatctattgttgcggtttttcaacaatggagaatgaatcaagacaagacttcgccgaacaattttttacaccataaaaaaattattgaatttttcttaaattattaaaaaaaaactctccggaaactcatgtaaagacactctctgcgatttggaatttgaagagacgtacttacaaggccaaaccttcagaaaattttttcttaatttgtttttccaaaaataatcaacaaatgtcccaatgcgctaaaaagttaacaatttaaaaaattatttgccattttaattcaataacagttcaaatattttctcccacctttcgtcacaaattcccccgtcatgtgcaagccaaaattcaatgccatagggcttttttattgcttcatccgtttcatttgtggcacgaagctgtataagctttactccgtcagtgccattcgtcaaatgaaaactttaaattagagtgccacgggaccgggaccggaaattcccggtcatccgaggtcccggtcccggttcccggtcccgggttttgaaaagctcaggtcccggtcccggtcccggtagggcaaccgggaaccgggaaaaacaagcactggtaagaatggggtctgagtgaaaaattagtgaagaaaattggagtcaaagggaaaaataaaaaataataattaatatattctttaaaagtaacactgcccaagtgtgcaaatggcctaatggctagtctccttgactttcccttcttctttcccctggttcaatccctctacagaaattagattattttcaatttttttttttttttgtatactcgtgggtttcctataaagaaaatatgattcctcatagtttttttttaaattgatacatattttatcattttttaaatgaaaatcctaccaattgagcttaataatcgcaaaaaccaacctttttttgttgaaaatctgttaacaaattgcacccaaatttttaaaatttcccccggcggcgcctatcggcaccgccggaccccttctttcccaaaagttttttgaaaaagcgctccgaaaaaaagtgatgtgaaaatcaaatctgaatttctattaatattcgatgatttagtcaaaaatgattaattgtttgaaataattgaagaaaatttgtttgaaaattttcattaatttaatttattaaataaaaaaacaaataattttgtattattttcacttgatataaattaaaatttgaatttttgtttaaatttttaaaatttttttgaatttttaaaatttcccggttggtcccggttcccggtttttcttgcggtcccggtcccggtcccgaaaaaaaatcgaggtcccggtcccggcttctcaagtcccggcaagtcccgatcccggttttggcaaaaattcccggtcccgtggcactctagtgataatattaattttcttttatttaaaaatatttaaatgtgcctttaacactgataaaagtgtaagctttatcggctccagggccatgcactaagtctacaatgatctatgaaaatttattttttacccaatatttgaaaattgtagcaaaaagaggtttaaaaaatatattttgttgatttattcaatgacataattatacgcaagttattttagaatgcttcgcgatttttggtcactttcgcgttatttattattaacttagaatattcgatacattaaac

SEQ ID NO: 1360 - DNA, 1793 bp, Heterodera glycines
actaacaaaaaagtttgccattcttctaagacagtgttatgaaagaaatgccctatagaaagtactgggaacaataaaagataaatgaaattttgcgagttatttggttaagctgaaaaataggcgcaccaatcgaggacggaaagaacaaaggaaatatccgaatacaaatctctccaataatattttatttacttaaaataaagctatcttctaatgaaaactgcaaaaatttggctactttttggcaaaaaatggctaactgaaatttttttttaaattttggttcgaagagcaacccctcataaaaaaaaaacattttttggctacgggcctagttcagggcgattagctcaataattttgggcgaaatgtcggcacacgtaataaataaagcaattgatcccgagtcgtataccggaacagaccaacaccgccgttccctatcctttaaaatttttttgaaaaaacggctaaaacaggtcatcgctctgccccccccccccacgaaggcaagagtctgcctatatgcctttgctaaaaaaacaaacaaaacaaaaaacatttctctatgtttggttagtcgccgtttttacagaggtccttcgggcgagcctacagtgccgcgatttttgcatatgaccgccacgacgggggcaatttcttcagggagcacaagttggacatttccatcccgcccctcaatgaattcaagagcgggccgtcgtacagtgccgctgcctttgtcctgctgatgtccatctccactggacggagcatcagaacaaattggacggtcactggcgaagtgaccataaatgggcacgtggaagcgattggcggcgtaagagcgaaaactcttgcggccatccaagccgggatgaccaccattgtcctgccgcgcggcaacttgggggactttcgtcgcatagagaaaaaacaccgccgtattactgcaatttttgttgaccatacttttgatttgttacaaatgttgaactgattttgtttggttgccagtgaaaaatttttcaaaaactctgaccaataaaaatcagcacttgggggtcataaacagaacccgctgggtgaaattgaaagaaattttgaccatttttaaacaaaagttcagtgaaaattatctattttgaggttttttttaaaaaaaaacatcataaaccatcaaatttctcaaaaaagcacttttaaaaagcatatttgatcccttgaaatcaacaaaataaattagcatatctggaagccttgggtttatctcattgggtgggaattcaaaaaaaaccatttcataaaaatgccgccctattcatcaccaaacatctttggcagctttaggagggaaagttaaaaaaatattgctagcctagttttgcattcaacatatttttaaattcgaaaagccctaccccggtgctgagcccgcacaaaaatttgagcaacttcgcccccgaattaaaaaaaaaaccggtctctaattttcacgacgcatcaaattgtccaaattttcatcttctcgccaattcgccgtctccccaattagacactgcctcctcaactcatcatcattcatctgctgttgtcccattcaatttccaatgctttcttcagtgtcagtttttcttggattcttcgttcattcaccaattcaaatggcacaattggcgttggcgtaaatatataaaagatgatatacaacggctaagtgaaataaattaaatgctatacataaaagtagagagttattttactcggtactaattgcgtttgtatcctcc

SEQ ID NO: 1361 - DNA, 7555 bp, Heterodera glycines
  unsure (1)..(7555): unsure at all n locations
caaacacaattantaccttttactctttctntacatttntcnttttattanatccatncccnnttttnanccnatttttntatttnccnnttatnncttntttataaattaataaattccaccacttgtttatttaataaacatttcgccaaaaatatttttaaaaatatgaccggcaatttacaagataccaagggatgacacgttccgctttccgatttatttggcatctatttcgaccaatttcgaatccggacccgaattcgagcaaaaagaagaaattcaaaattttcggatttcccatttatagcagggtaataaattggaaatgaaacagaaaaattatcctaaataatagcattttcaaaatttttatatatttttaaaaattttctacataggcacctgtgccgagatatggcgtgccaaaatttgccaaaagttttactttttataaacaaacaaatgcaatattaaagattttttgcatattttgccatttttggtcaaatattttccgattgagaatatcccttagttaggaaaaaagatttgatttgattatgccaaaaattaaatccaaattttaatggatgcgcgagtgggtcaacaacgacttcactgccgaaaaccttgcgaaattttaatttgaagttgcaaaaaaaaacgacagaattacgaggaataaaattttttaattaatttgcacccctaattttcaagatttttgtgcatatttggtgcatatttcacgattttatttgcatatttatgcgcataattggccatttttcgtataatgaatcgttcgtatggagtcgggtcgacgacccccctactatttggaaacagcttttgctttaattaccaattaaaattgcgcttaattaggccatgtctccacaagacagaaaaatttatgtgcatattttgcaattttggtgcatatttcatgcgcatattttaagattttatgtgtatataattcccagccctattcatcagatgacggacaagcagaatgctcaaacagcatttacacatttgcgccaaaatttgtttgggaaccgcccattagctacggccatttcagcgcggacagttcgcctcggcgtttttttcgccgccgggtttttcggcctggacgttaatttataaattaatcaaacagcagaattatgctcaaggttgtcagatgtaaattttcaaaatcatcattttgcgaattacgcgattcgaaaaattaaaaaaattaatattcataacactgacgttgacttggctccctatcatttcgtcactgatcgtttcgtcactgttcagttcgtcactgatcatttcgtcactgcgaacattttttaaaaattgtttggcacattgtcaaaactgaaattttaaatttaacaaataaaatctgttttacatatgtatataaaagaaatgcatgcagcacaaaaattgcaattttggcaaagtttaataaaaatctttaaaattctgacttcaaaaagcagtgccgcgaagacgatgtgcggagaagtgcttgctcgagagtctcaggaaattttctgtttcaagcagaaatagtgcgggcaaggacgggcgaagctcagcttagcactcgaaaccgaaagcgaacccaatttttttcgaagctcgaagtttcgcccacccctggtgcggtgcgggtgcctcgaaaaactttcacaaaagattatcgtaaatatcagccagccctgacctggctccccaccccccccccggccaattgtacgtcgtactggaatactgctggttgaccccttacacacttgtggtcataatcagggctaaaaattttaaaaattagtattttaccgacaatacacagcaattggggtcaaagagcagcttataccccttgaaaacagcaaaatgctgataaatcagcagagttgagagccctttgatcataatgaattacgtcgcaaaaaaataaatttaagaaataagcacatttggaagctaaaattaaagatgagaagctaaactaatctcttttaccccctttgttccccaaaagttttttggaaaaagcgccgcaaaaaccatcttcttttctaacaaaaaatttctcaaattttgatcatggacaatcagaaatataacattgaacattttaagcctgttttgaataaattttgtaaaaatgaggtatatttgcctgccaaatgaggctttttaaaattgagaagctaaattggtctctttttttcagagaagttctctttcaaatctcacaagcaaaaaatttatttatttattttttgctagccatttgtttttaaagaatttttgttgtttttaaggcaatgtgccaaacttttttttaaaaaaattctcagtgacgaaacgatcggccaccgttgacttcacataaatatgagttatgtgtttattttttcaaaagatttcctcattttagtcgaaattacatattcttttctaaatggcaccgcccgtcaaaaaaaaagaaaaaactttcctccgtcgaccaccaaatgaaacggtgagcaaaatttttggaaattcgattgggaatttgatgttctacaatttcagttggattcgcaacgacatttggatggacattttccctcattttgaccgtccacaactcggcctcaaattggcacttctttcgccacgtttcgatgagctggtggacaaacacttcgatggcaaaacagaattgacaatttggcgcccgtttaaaattgaaaaaattggaactgaagcaaaaattgctgttgagacgaagcgaaaagccaaaattgtgcattttccgttgcccgaccgtccgatgcacaacaaaattcgctttaaccgccttcagattgagtaattcaaagaatgaattattaactgataaaagctacccttttcaggtacatcgatcattccgtcgtcacatttctccgtaccaaccagcaaatgtttgacaaaggcaccaatttggatttgtatatcgaggccaaggatgtcaagccgatttgggatgtttttgtccgtcaaatttggcccatttttgcgccaaacattcgccacttgggctttgtcagggataatcattttgactatttgcgtcgtctcatttcgccgtcaattctcaccgacctcacccatttggattcaatcgatgccgcttatttgttgccaacggtgatcgctgatgatgggccaaatgcaactgatcgccaagcgctgtccaaatggttgaacattccgacaaaagacgggaagccgaagcaattgatttgttgtgctactactactacgtcaggaaccattgaattgatcaacaatttcaaagaggtggggccacattttcgtaaaacattttggattaattgccattttattttcgtttccaattgctttaggcatttctccatgccaccactcctgctgccaactacataattcaacttcaactttttgaaccaacgccaattgagccatttgaattgacgaacgaacagaccaatgaaaagttgacagtgaagaaagaagacggtgatgaaaacatggagaaagaagacgaagatgactatatcgtggtggtgaagcgatgccaaattggggcgacggttcggtgggaggacaaaaagacgaataatttcagcaatatcaatttctggcctcttaatggcaaatactgtattgggtgagtctgatgagagaaacagtttttgctttaaaaatcaaatttaaacattttatttcatttaggcgaatgtctccaccaaagtcgggccaaaagaacacaaaaaatcgtctgaaaatgaatcccgggcccagcggacagcaacagaagaaagagtgaatgaattgttgggaaatgagaaattctgatcgatcattgtgaattttaattgagctgataatcgctcgtcgcgtttatttgttgcttcttttagttaaatgaaatcatttaccataaaaagaaacgaactttgaggaaaattgtgagcaaaatttttttattgtattaaatagggatcatttatttatgtaagaaaaatcgcgaaatatgtaaataaaatatgtataaaaaacactgaaatatgtttatgaaatatgtacaaaaatcctcaaatatgtaggaaaatatgtaaatataattttttaaatgctgttttttggaaaaaaaattcttcgtaaaaagtgaaataggcacaaaatgccataaaaatgaccaaaataggcttagaatcacatttgaatattttacaaattaatttttgatatatcattttttgaaaaaaatcgattttttagggatacattttcaaaaaaaattttttaaattttttacaaaaaatttctataaattctcaaaatttttgaaaaaaaacttttggatatttttgggggtatttcataaaaaaattccctaaaaattctaaaaaatgcaaaatatgtacaaaaaaatgtgaaaaagtccaaaatatgtataaaaatatgtacataccgtatttgctctttttatgtgccagtctccattaatctgccggtctccaattatataccccgttcgaactaggttgaaaaataatctcccagtctccatttatgtgccaggggggataaatagaattttttaataatttagttggcacatttttcaaaaaaataaaatcaattcaacggtagggatactacttatagttttttcattatttttttcctgagctccccgtggcctgaaatgctgtttttttcggctgttgttaagctacttttcgagttgaaaaaaatccaaaatatgtaagaaaatcccgaaatatgtaaataaaagtcccaacttttgttcgcaagcacaaaaaagaaagtgtttttcctactaattaggctatggagaatccaggaaaaaatatgtatttacataaaaaaaatgatccctagtattaaactattaaaatttattgaaaaatttttgatttttttgaacatatcgctaaaattgtcatcgcggcaataataataattttttattgcattttgttacttaaagaaaatttgtcttataaaatagtgggtcggggtcggtttagtacgggccgttttagtacgagcgcaagtttttggctataacttttttcttgccaacaaaatccaacatttttagtatcgttcgatagccctaagtgtcctctattaatctgaaaaattgcgaaaaattttgttaagcttcaaaaaagttatggccagaaaaacacaaaaaaccagattttcaaacttttttggctcaaactttttttaaacttaataaaattttttgaaattttgcaggctaataagcatccgaaggactctcgaatgatatcaagaaagttggatttggatatacaaaaaagaatattaattttttcataagtaattcaaataaaataggcatttaattgatatagaagatgctgatatgggatgaagccttttttgtgtgtaattcttttatctgaatgttctcgtcatgtttttgccaaaattttgattttgtccttttatatctaaagttacagtccaaaaaattgggtaaggtcaacaaaatttggctaccattttacaccaacgtccataacttgagttaaaattgtcaaaacgacttaaaacttggtcagattatgaaatttgatgagcttaacaagaaaaagcctgaaagaaatttttctgaaaaagaaaaaacaaaattttttggccatgtttattttggccaagtttccaaatctattggccaaaccgaaagtcaaaaacaaaatccaaaataattccatcggggttttgaggctttttatgcccttaaataatataaaaaattacagaatcgcacaagtttccaaaattgtgttatgggcgattattcgaatttctgaaaacgaaggccaaggagaaaacacttgtctttggacaaaggatttttcttatattttttgaacacatgcaaaattattccagcatagtttatccgtaggaaatccttgttttaaatcttttttaaaattttaaacaacttccctaaagccttttttggccatttttcaaaaagtgggaaaatttgggattttttggccataacttttttaaaaattgtttgagtgcattaaaattgacgccattcaattcatctcgttattctgcatcagatgatattaaatttattagaatttgttacacttttaataaagttacactcaattttctggttattgccaagtccctaattttggcaccaaatttcattggcccatggctgacaggagaacaacttataggacatgctacgtcacccgtcttattccctggaccctatagacttaatttatggctaaattatttctctcaaaaattccttatagggtaggctctttaaagaatatggcaaggtcgtggatccagtgaaaattacctaggttcaaagaatggcacagaattttacaaaaagggcattgttaaactcccatctcggcggcaaaaggttgtagacagtcagggcaattactttgttaagtagctttttgatcggctttgttatgattgttatttttcattttttgttcataaatttttttccttcaaaaagcgcccttttttatgcaacgacctagtacaatttaacaattaatattaacttatattaatttaccaaaactaaataaacggaaaagcattaaatttttataaccaaacatagcattaaaataatttttcaaaagattttttttaattgaatcaacttcataaataaatattttgttatttgatattttattctttgctatatcacacggctaattcataagaatcttcgttttttaaaatgattattttaattaatgaaatgtattcaaaaatctaattaataagaaaaactcttttttatattattatttaattaaacattttcatcaaaagcaacaaatatacaatattttggaatttaatatatatatatatatattatttaaattgatattaattttagttttgatatcgctttataaaaaataaacatacatatttgtaattttatttgtcaatttagtgttcatttttaaaatctttaggttttgattgtacgaatggccatcactcctaaaaaggattaatgcgatgaacatgtgctttgataatattataatttatttattatcttttatatttttgaattatctcgcaatttgattatgtttttaatttatttgaatgttttatttaagaattaaaaaaaaatattaataaataaaacgctttaatatattcgaagttcttgctattagcaaatagaaatttataacatattctcatttttaaattttttaagtcatttattttttatgctttcaaataattagttaagtttcttttactttataaaggaaatggaacaattcgaatgcaatttaattattcaaaatttattattatattcataacagaagaaaatttaataatttttattatttatttaccttttttaattaaaaattataaatttgaacttcaacaattgctt

SEQ ID NO: 1362 - DNA, 2789 bp, Heterodera glycines
aagtcatcgtcctgccgttgtgtcgagatcggctggtggacaagccctcagcgtactcgttgaatgcccgcagatgatcatccgtttggtcccttaattccttgatttgtgacagtttatgagtcgactcatacatcaaaggacggattcgaacatcccgtctgcagactgggcacgtgcggtttgtcgccagccacctcctgatgcacatcgagtggaagatgtggctaactgacggttgacaaggcagaacgctgatcagctgaccacggagaagcgacaaatggcagatgaggcacacgctgtctgctcttcgatgcctttcttcgtctcttcttcccagaatgcgcatgttcacagatgtgaagtgcggatgcgaaccgggtccttataaaaacaaatcttacaaaattttttactcccggctacctctgttgtcgtcgcctttgttagctggcgtcatctcaccaacatagtcggcctcttggaagttcaagcgccgatctatgacctctcttgcgcgaattgcctccggcggcatctgcgccactcccacttcttgcatgatgggcattctgtcggcttgacggacattgtagaacaggtcttcatccgaccaaccctctgaaattttggtctcgaacgaaactacaaattttgcttttaccagattctggtgaatcgtagaggccaagcaactcattgcgggctcgcgaccgtgcatcttcctcggctcttctgatgttacgaagcctggcctgctcttccgcatactcaacatcaatttgctccttctgctgtcttatcttctcgagctcggcagcaagcactgggtcttctcgatatgcccattgtctgtcttcgtctaaagttgtttttaaaagcaattccacttaatttgttaaccccgccatgtgctaagcaatttttgtcgctgccgctcctcatccaaggcccgctctcgtcgctcgagaatctgctgatgttcctttattgccttttgaacatcctcctcagcatgatgattggcatagcgaatgatgtcagcgcaatatgcttcaacagcttggcgagttggcagaactaaatatttgacgctatttgataaaataattattttcagctgacatatgtcaatttctgtgaagttcatcgactcgcgtgcagatttccgtagagcgttgacctcagccttgagcttctccaaccgctcattgatgtatcgctcgtatgcggcttgcctgccccagaccagattccgctgcttaagccgcttctgctgagcaagatgttgcttgaggaattggtcagcctggcgcaatctctcttgcactcggcggtctgcagccatgcgcttctgggcctcgattcgctccgcctccaacgcctttgcttgttcagccgtcatcagaatcgggcgttgcattcgttgttctgctgcctgagcggccttagcccgtcgcttcacgcttgtctcacacgtcgccgatttgtcctcatttcgtcgttttttgccgatggaattggcccgcggtctttgttcttcgtctgttgtgttttgagcttcttcctgctttcgtatggctgcttccagctggaaatgtttttgacgcaggtcttcaaaaacatggtcgagcaggggatgccgttcaacccttacagccttcttttttgacctcttacgcacaagccttaatagttaaataaatttttttgtaacacattaatatctctactttagctttgcttggaggaggcctgtaagttggccaacggacataaagctcttcgtcatcttcgccttattgcacttcttcacacaacttttgatgttttcgttgatgagggccaggtgttcgacccaactgtcggccaaacgcgccagttccatgccattgacctcagcactttgaagccaatcctgcattgaatccaacgtcgccgtgctgggacagatctgctgcaatgagtgccagagcaagagaaactgcttgatgatgtcgtaaagctgttcttcaagcgcttggatgagcaaacaatgctgctcccgtattattggagccttgttgtttgtagcctctttcaaagagtcgcaaagttgctccttcacacattgccgatgtttggcttgcgcagtagccttcaggtagtccttcatcttaagcatctgctccattgcatattgatgccgctttgttgacgcattgaagtcccagaaaaggcttttctccttttcggagcacaccctcaattcagccagcatctcaggcggtggtgtcggcctgtttctgtagcagttgttcttcgcacgaatcattgcattataaactgcgaagtaagcaatgctggtgttgtcatactcagctttgatcggcgtataaatctcctcgttgatgttcaaagcatgatcaactgcttcagatagctgctggttttctggctcaattggttcctaaagtcagtaatcccttgtctatattttttcttgaatatttacatcagaatgttcagatgaatcagagcgatcgtctttggcaggtgcagtggccgcgtcaacagacaatggcgaagcaatgcgcctgtgacagttgggacagttgtcatcaaccccatcgtagttgtgaagtcttttcagtgcgtaagatgacgggctttggttcctaaaaatacagaatttgctcggcatgcaaaacccaaagtgtgaccatttttcgaagcatctcagatggaaatcgccgcagcacggggtgcttgtgtagccgtaaaaagcaaactgttgtttcagatga

SEQ ID NO: 1363 - DNA, 1861 bp, Heterodera glycines
  unsure (1)..(1861): unsure at all n locations
ctgcttgatgaagtcgtaaagctgttcttcgagcgctnggatgagcaaacaatgctggctccgtatatnnngagcctgtgnntttgtgctcccctcaaaagagtcgcaaagtgctcccttcacaccattgccgatgtttgggctgcgctgtagccttcaagtaggcctgcatcttaagcatctgctccgttgcatattgatggcgtttagttgacgcactgaagtcccagtaaaggcttttctccttttcggagcacgccctcaaatccagccagcatctcaggcggtggtgtcggcctgtttctgtagcagttgttcttcgcacggatcattgcattgtaaactgcgaagtaagcaatgctggtgttgtcatactcaactttgatcggcgtataaagctcctcgttgatgtttagagcaagatcaactgcttcagttagctgctggctttctggctcagtcggttcctaaaatcagtaatcccttagctattttttttgttttaattattcacatcagaatgctcagatgaatctgcgcgctcctctttggcatgttcagtggccacgtcatcagacaatgtcgaaacaatacgcctgtgacaatttggacagttgtcatcaacaccatcgtagttgtgaaggcgcttcagcgcataagagggcggactttggttcctaaagatagaagtaatttgcacagacttgaaaaacaaatgcgaccatttttcgaagcatcttagatggaagtcgccacaacagggagtgctaatgtagccgtaataggcaaactgttgttttagatggacattggcgtcttctaatgccggtggcacaacagcgctattacagcatttgcaggactccatcttcggcaacgattcttccaggaacacatcttcttcttcagtcactattgatggagctgtgacggtggtcgaacgcttctcctcaattccactggacgtcgatggaattggcgcagaaggggcagcggcaggcgctgcaatttccatagcttcaacttcttcaccgaaaaggtgaatcgaaggaggaaactcgcggcgaagtgacgatttcgaccgcaaagcgagaagcaggcgtcgtgtccggcttaaattgttaaagtaaaaaacgataaacactattgttagtttactgaccagcaaaagggtttggaaatgatccgtgccgttgtaccaaatgatgatgggatcaacaacttgtcgctggtcgccacgattttgcgttgccgtaaaattgcgcagttgatcatccgggaaattttgacgcatcatctattttcaaaatggaattgtgccaagtaaggaatttctaccatttgttggccgtcagggaaatagatttccagcctgtgctcatgttccatgttgaaaaagctgacaccttcttgcacttggccaggcggcaatcgtggtagcagaggtacaacaacaacaataggtcgttgcagtaaaattgccgcaagaaatgcgtcggctgacgccgcccaatcagtgggtcccatacgtctttcgatgtattgcgggaaggtgacgtttgcatccaagaagaatgcttggatgaaatcgaggaagcgttgtcgactctcgaaccaccctcttggatagcagtttggctcatcaaccatgcggcccagcgtcaagaaaagatgtctgcgcaaatttgcagcatactgctcgctgtcttctcccacaagcgcgaaaacgatggcgctgttaacggaataaagccaattattatctcacaacaaatttttattaaccggaaaaaagcagagccatcgccaataacattctgaactcgcacttggcgagacagttgggaagcgacttgagcgg

SEQ ID NO: 1364 - DNA, 1051 bp, Heterodera glycines
caaatcgtaaccacttttggaagattatattcagtccctattgctcatttgtttcccataaagcacttcaaacgttcgttcgctgcattggcactgaatggcatcggcacttacacttttggcacgcccattgttctcacctttccgatcaacaataggaacgacaaggtgttattttttggaaaattgcaactttttctgtttttacagacacaaaaaaccgacaccgttcggccgtgccaattgtacgccatggtcctggaatatatgcaaaagcgttaccttcgcaactcgcaaaggcatttgctgaagaacgactctggcggtgggaaaggcgaccgtcaccatcatcatttgttcaaccgcgcattggacgcgttcgttttggaattaaatttggcaaaaaaaatctttttagaaatgccgattctgcccatcaaaattcctacccctttgaattggcactgaccaaaagcgatgccatttggtgctacaaagtgagtggtggtggggcggaggaagtggtttaaatttgcttaatttcccctccccaatttcagtgtcattggcaacgcttttgtcgcgggtgtcccatcgatgcgaattcgtccgattgccttccgttggacgaccttttctcatggcaatgtttgctgaccatcacttggaaaaacaacgctgcgctatatttgctgtacaacaatttggcggaggtgacaaaagggatgaattacggggagggaccgaactcgcaatgaccgtcatcagataaaatgtttgacaagaattgcagagttgagaaaccgtgaccgataccgtaactccatcatacagaacactgtgttttataattatagtttttgagcatcccggatcagttcttgagtccgaattcgtctggccattcgcgtttgatttctcgactttcagaactatttttgcccaataattttctttataattttaagtttttagcgtttttctgacgactcccaccattcgcttttgtcaaatgccaatagtgatttgtcatcactggaccatgcccccc

SEQ ID NO: 1365 - DNA, 1734 bp, Heterodera glycines
atatgattgttgtatttcttaagaatttatgagcttgtttattttataatgattttaaaatagaattaagtgacaacacgtatggaatttttaaaatgaccaattttcagaggaaatctgtaaaaaatgatgaaatttcaaatgtttccaccggagactgcgccaccgataccaatacacggattttattaacacagaggcccataataatgattgctgtgattatcccgtaattacgtgattgaccgcaactgaaaaaagcgcctcaatttgcgtgcactcctgctgctgatggtgtgccgggggaatgttctttataattttaagtttttagcggttttctgacgactcccaccattcgcttttgtcaaatgccaatagtgatttgtcatcactggacaatgaccccccgggggtcaccgtcgacgactgtttgtccgatttcactcgtactgaacgcattgacggttcgcattgcgaccagtgcagcagcaaaggacagtcgccaatgccgccgctgaccaaacaattgtcattcctacgattgcccgacattttggtgagtgatggcactgatcgaccaccattcaattgtccatttaatttgcttgggactgcgtttgtccggcttcttcgggagttcattccccgttttaaatcaaaataaaacgccttccatttatgatccattttttgttcccctttaaaaggtcatttgcttcaagcgcttcacctttgtcccctccatgcagcaattcgttaaacaaattgtgcccatttcgtttccattggacaatttcgacccgagcaaatatttgtcttccgacgtccccgccgaacagatggccaacttttcgcgctatttttgcattggaattgtggtgggtgaaaagggttcaattaacaatggtttcttgctctatttccccttcccccacctcatttagactcattatggccaactgaactttggccattattgttcttatgtgcgggatttcttttccgacgaatggtttttctgcaacgacaacaaaacctttgtatattctttactaattacttaattagttgcaattaattaatgaatttttttattacataattagcccgtcaaaagcagtgaggtggacacgcgaaatgcgtacattgtcttctaccaacgcgtgacttcagctgctgcagccgatcaccgcacaaatcagcaaaacccatcgcccccggggaaaagggaatgaatggccaacgattggacggacggatcgaaaatgaataaataatagatagaaaaaatatcccataattttggtcatatattataacccaaacgccataatatatcacttttcataaaattttaagtatggggaattagacaactttttcggatacttacaattaagcatcattttgttgcttaaattgtcatagtggttaaactcacactttttgtctgtgtatgttcttaatctgtatatatatacccagttttgtgttttcaacactaattactgttaccatatcgcgcactaccgtatacattcgggttaaaccaatcatttatttattacacattggttggagattgaagtgattctgcataattgtcatcgtcatattacgtgtacttacgtcactcattgtcatcccagcaaatgctttttttgttccctttctgcctcttttgcttcaaatttattgaaatgaaatgttgtttgataaattattaataca

SEQ ID NO: 1366 - DNA, 1773 bp, Heterodera glycines
tgtttaagcaccgtttacggcttaaaaatgaaaaagtggaaacacaattagaaataataaagaaattattttaccgaattcgtggtcaaaaaactgagaatttcacgtatcgagaatcgagccgagactctcgcagaatgacacgtttaattcccgcccctttgtttaaatttttcggttattttcgttggcctgagcggcggaaatccttttaatcctcaggctaatcccatggcctttccttgtccccatttgcccccccccctctctctctcttcgcctaccgttcagtcagacgaaggcgtgccgaaagtgccgctttgcgctccctggtgatgaatttgccaccattgtcgaactcctgctccagctccagtcgttggcattcactgtacaccacgcgataagtgtccttggttctaacccgaacatctgaaagggaagcgaacgatgggcaaaaaacactcacaaaaaacattatttttttattcccaaatttggcactttttagcattttaatcgtactgtttgtgcccggccccaccgggtgccgcggctgcgggcacagcccgggaaaagtgccgctctccgcccgtcgactcactgccgccgccgccgccgctgctccgccaatggtcgccatcattttgagcctccgttcctcgccaatggtcggcgctcctctccacgacgtgccaccaccgttggtcatctgctgatgcgtgcctccaccgccgctgtgttccaactcggagcaatttgaagaggacgaagcggagcagcaattgttattgttgttattggccaaaacgacgggcggcggtggctgcggcaccgacgccgccgcgacggcaccgccaaaatggtgcagcaaagagtggtgatggcattgtggcacatgggacgactggtggtagtaggcgtagaagtcgttgttgctgctgttgttggcggagtacagctggggaaaaaacatcgcggcagcgccggaagggacggcggcacaattggaggaggcggaagacgggttgaagcaggcggaggacgaataggcgccggacagagacgaggcggaggaggggtcggacgaggagggggacggagcggcgcgggacgacgccggcggatgatgatgggccagcggagagacgaagttgggctcgtacaaatgctgaaacggctaatcactactgatcaatcattgaaattccaaaatttgcctttttctcatttaaaattttatttttagagggcgataatttccgtcccatttgccctcctcccattgctcctaccgaactgctcgaggctgtgttgccgcaccgttgctgctgttggctcatcgccgcatttggcatgggatacgaagctgaggctgcagcagcagctgccgctgctcggtgaagcagcagttcggggccaccagccgaagaagaaacagaaacagcgggggacgaaagttgggggacggcgccggccgaggcaccgaacggcacgaaaacggcggacgaagcggcacaattggaggcgaagccgtactgctgggccatggcatgggccatctgagcagcgacggcactttgggcactccgttggtggcacttgtgaaaagtttttttgagaaataaaaatgaaatttttactgaaatattaaaataattaataaaattgaaagattaaaaataaaaattgaatttggaattagcagggaaagattatcagcgccagtttctgtacgaaaattttctaggtttgctaagccatttataaatt

SEQ ID NO: 1367 - DNA, 1537 bp, Heterodera glycines
ggggggaagagacccccgagggacgacagagtcgggaagaaaaagcacaggaggaaaagtaacaataataatacgccccttcattgctcatccaccaacaccaaaaaaacatccaatggtcggcgtcaattaaatttaatgaatttttgaaatgccttttaatgaaatcagacggacgacgacgcaaattgggacaaaaaagggaacatcggacgaagagaaagcttatcaaaagcagcacaatcggtgttatcattaggacagcaattaagcagcgcctaattgctttgaaatttgataagggcccaatttttcgtgtgcccacaaaaaaatgcttcgcttggccttccgccgatcgcagactttttttgtcccttccgccgcctcctttttcgatgattcgcttctccattagcctaattaggtcatcattttgttgtcccaatgttcaaataaatcccaaaaacattcatcctaattttatttatttataattcattcgtcccctcccatttttggatgattttctgcctataaatgcgcctaaaattgaattttccgtcgccccgtcgtaaatttgtcaaaaatgcgcaaaaagcggagaaacagtgccggaggcaactctcccaaagagaggaggggggggggcacacaaaatttgaacagtttttgtggaagaagaacagacggacggatgggcggcgcattccgtggcatagggagggcaatcggaacggacggatcagtgacgaaatgccaacgaaggaagtgaagtgacgacggacaaacgaacgattgggggtgggggggggcaacggacggaaaaattggggcgacgggggcaatcggtgacaaatggatttgaatagcatgacatggaacaacgtaatttaatgtacaaaagtaatacagattaggatgacgacagccattttaaatggggggggcaaaaagacggcggaattccacggcaaatcggaaataactaatggaaacgacaaatttcttaaattgccgttatgtgacatgggcaattttgtaaaactgataacagtaattgccgcttttccaaccatttaatgaacaatggcggaaagattctcgaaacagagaccaaagggacaagagaatgtcgggattatggcattggcactggtaccgtatgtccctttggggtgcctgtgtttttcaaattcaaaaagggcactcgttagctgtgccgtgccctccctcaatggattggcgggggggggggggtcacttccctctcaccgcctcttttctcgaccactttcacctttattggtgccaaattttatttgtttattgctgctgctgcgatgccttcccgagttcgtcttttccttttcccttttttccattgtctccgccgttccttcgctccttttccgtcaccaaaatatatcatataaatggcggcatttgaaacagagcaaaagaagcgcaacaacaacaaaagaggcgctaatccctcagcccattcctttgccaaaaagggggggggggggaaacgccc

SEQ ID NO: 1368 - DNA, 8521 bp, Heterodera glycines
  unsure (1)..(8521): unsure at all n locations
cccccnccccattcattccgtcagtgtttgggatgaccaccgccgtcgccgcttcgaccactcccccccccccttcattcattcattattcttccggaagtttacgatgggaaggaaccccaaagaatccccaaccaaagcgcattttcaccccacccgaccatcgccacgacgcatttggacaatatcccaaacaaaaagagagcaaatcccaaaacagaggaaaagttcagcaggacgtaccacccaaaagtgaattgaaaaaagaaagaacctaattttgtttattgtttcactcgaaggatgggttttcaaaatagaacagtaacaacttgaattggaaaatgtacggtcgaatacagtaacagtatgaaaatcaccgtagaaaataggaaaaacaaacgaagggaatggtaagacagcacagtgagcaaaaggggagaagacaaacacaaaaacaaaacacaatttatcagcgaaattaagaaagaaaacaatgtcaaatagagggtcggggtcattttggcgcagacaagtttaattcataacttttttttaattcgaccaaataaaataatgttgatattaatcaatggtataaatgttctttattagcctgcaaaatttcaaaaaattatattaggttttaaaaaagatatggcgcgctgcgccaaaatggccaggaaaatgcaattttttgaggttttttggccataacttttttgtttctcagctaaattttttgaaactttgcaggttaataggcactatcaagccacttaaaatcataccaagattatttaattttgctgtgaaatcaaaatgatatagagtcttgcgccaaagtggccggttccccaaatagagggatttaaaatactgtaaaatgatagaaaaataatcgattaaattaaatttcacccattaattattgttttagggataggctttttattagaaaaaatggaataattttttgtggacccggtttttgaccttcaaccgacttcataaaccaaagaatgatcagaaagccccgccgatggattctcctcaaattctctgcacaaatgtcaacggcaccagcccactccgtccgcccaactttcccatggcccattcgctgtccgaccgttcggccaccaattcgatcagatcgcccgcccggaagcacagatcgccggccacttcgctctggggaagaggaatttgttggcacaaaaaggaaaattttaattgcaaaaagaagccaattcggcacaattccaaaaaagtgcataatttccgtcatgccgactcactttaaagtcgtacaacgccctcagaaattgctgtttcggttgctttgtgctgtccattccgctgtcctcgtcctcccacggcaaacggctcaattccttgggcccaatttgcacataattaaccgggaaaatgccacgcagacaattgccaccactgtttggcaattcaccgcgcaaccaatcggcattcacacgcgaaatgaccataacccaatcgtttgcagagaactgtaatgaacgggtaaggggagacggtacaaaagaaacacgatggatttgggacaaaattgaaagggaggaattgggacaaaaaaacattggacaccttcaaatccccgggcactccgctgtcgtagtcgtacaatgccacagcccgacattggccatccaaaggaacagaggccggcgttttcaattcgatgagcggagagggaggcgaatagcggtccaaaacggggtaaagcggggcgttggcggaatgggcagggaaagaggcggccgaatcaaacggacgaaggggtgccgattgagctaagcattgaagaaaaatttgaattaaaaatgccgaaggaattcaccggtaaaaaaaccgtcggcaaatgcggcactgcccccggcgcagggcaccgcccattgaggcggaggatgggcggcggtggacgacgacgacggcattttgttggacgacgggccaagggataatgggccgaaaatgtcctccaattccttctcggccaagcattggctgctgctcaattggccttcaaaatgacggacattcgtcgacaaaaagccatagatttattagaaaacatttaaaaaatgaatgacactctaaaaagtgatgccgcttttggcgaccattaaaattcgaaatttgccaatttcggattttaccctctcacatggccaagttaaggaacacaatccaaaccaaacaaccaggatctttcgttcaagttttaataattccctttcccaatgaatttttccaaattccggggcccttttcatcccaaaatcggttctctcacaacgtacggttcgctgtcggttgtgctgaagcagtacgaccaccattgctattgttgctgctgctcatcactgtccgttgtggcattgttttttgattggtcgcagcggcgcctccgccgccaaacgccgtcgacgttcggccgacgaactctttgccctgctgccggaccattgacaccaccgcctgtttgcccaaactttgcaccatcggattgttgcacaccgactggagcagctggcgatttgcgaacatcgcagacagagattggtcaacaactgaacgcagcgagagtaatatgtaaaaggcaaagggatggacgaacgaaaagccaaaccgaacattttggaatgtaaattggcggagacacccgccaaaatccaccaaaatgcaatcttttttgttcagaacaaggtgttaaaccataccaatagggggctattcgaaagaccggtttatattttcgagtgaaatttcttaacatattattgttttttgagtctctgtcccggatctttggcttggcattttcgagactctccaacaattacaatttttttgcgttgcattgtctccggcagcggcgccaccgctcggacgagttcgaaacgcagcggcggcgggggaagggccggacaccagcggcacatttctgctgggctttcctttgccaggcggcgggggaataaatgccgcatttgacggcgtaaaggacattttggtcaaaacttttaagttataaattccataacagtgccaagagaatttttaaaaagtaatgtgttcagacagctgataaacagagaacttatttgttgacatgcaaatattcgttttttcaaaattaataggtatttaaatgtcattttaaacaatttccacgatgattctcccccccccggcccaatgactgtcttccatcaaattatcccaaactcattctcctcccatttctgttcagtatcgcactttcgtctctttccctccgcccgatttgcctccaccgcttcggctgtcccatattttgctgatcttctccaactccctgtccaacttgcgctccttggccgccgcgttgcttttccgcgtcttccgtcctccgctcgttttcaccccaaactgataagccgccttcgggttcgcttcgcgcgcactttggtaccgctcgtagtcgtcctgcgattcgaagtcccaccgtttgacgggccctttccgatttccctgtaaaaatagtaaaaatatgagcataaatgccaagtcactttaccatgtccatctgtgtgtagtccgcctcatcgtcgctttccccgccagcgtcgagcattccaatccctcctgaattgccattttaaattaaaaattaaatgagttaattagagcagacagacaagactgtcccgagtttcatttcggatgttgggcatttttctccgtttttacgggtcgaactacaagattcccggaattggattccctggcatacaaaatccccctggtccatatgtacgttaaaactctgtaccaggatagaattcggcgtaggcgtcctcctgctccaaacgacgcttcttcagcttctccaggtgctgctcttccgctgtgtccgcgttgttcgctgcgttcgtcggttcgtccttttccctctccctcttccgctctctgtcttttgtctcgcggtgtccccgcttgtccctctcgtctctgccgcttctgctggaaaactgggagtaattaggcaactgtctgacaatttgcaaatgtttccttggggcgcctatcggcaccgcggactcccatcgttaaaatttggatattagtatggaaatttggtcttgatcagacccgtataccggaaaaataccttccattttaaatatttttcaaattttccaaaaatattacctgtccctgttgtcagtgtcaaaataggaagaggccgtcgtcctcttctgctgtccttcttcccgtcctcgtctcgtctcctgctgcctttccttgctcggctcgtactcttccaacccctcaaaaatgctcgtttcagcctccccttttgccgcttctgtcgtgccatcaccagcgcccttccgtctttttttgacgtccgtccgaagataagcgagcacttgagtgagtttcttaacacaaaaattgcaaattaaaaaagatatccaatttatataaaatcaaattccccagaaatttattatgatgaaataaactaaattcccttattcagcagtttccgactatttttggtcaaagaaataaaaataataatttcagaatataaattattttcgcgttttgttcagaatgagttccaatgtcagtgaatgtcccacacaaacattgatcagcagattgtccgcgttgatgttctcgctggattggtccagtgggcagtcgaccaccgaacggagcaaagtgctgggcacgtccgtctcctcgtcctccaactccaccacataagccatacgtccacgcgcaaaaagctcattgcgtttgggcggtttactctcaaaaagcaatttgcaaatgtttgccgccaatttggagttggccgctttactgctctccgacaacggcgcattcgcttgagaatcctgaaacaatttattacgtttaatcgttacgagaataacattgattaaatttattgactaattgtaagaaaatataaggattgtctcattcattttaaattaaatttcggtctttctaaaatccttttggtgtccgttgtccttaattcaatggttgggttttgtttatcccatcgcatggctcccaacgatttaaagacggttaaaagtgattctatcacccacttgttgctcctggtctttgtccgtcacatcgcgctccaatatttccgtcctcactttgttcagcagcgaataatccaaacccttgaccaaatgagtgtgctccatgtctccgcccaaatatttcgacttctaaacgtataaaaaataattctaaaatgggtttttcttcgactgggattgtccaccccaaaccaaacaagacctgaatttcaattcgtcgtgtctcctccagcgaactgttggcaaggaaattgcctggcaccgctttgtatgcgcctgctatcagccgttgtctgatttcgtcgtccgtcgaactgacgcctttccttcgttccgccgcccggtcccgataattcttcattatttcattcagtctggcctgtgactcgtcgaagaggtcgtcttcctccttgccctcgacgggcttttcccggtgaaaattggcaaaattccgtttttttggcgcttttttgttcgccacattcccagtcgaagcagcaacggacacaacttgacgatgggtgaaggtggccacggaagacgaattgacagatactctgtcacttgaagagtgcgaactgcggaccgaggccggaacagccaaaagttttcgaaaatcatcgttattcattgattttattattctgcaattaaatgatacacaatttggcgttttcgcacataaaaacgggaccagagcgtttgggcccccgtttttgggccccgcgtttgggcccccgtttttgggcccccgtttttgggcccggggtcgtttgggccccaacccaaaaatagaaaaatgtgcttttttaaaaattaagattctaaaaactaagcctgagggatccctcgccacttggcataagttaggtttaattacattcgctcattttttacttattccaaatcctattattttttaatagttaaccaatttgatgtacattctgatttggacatttttcagaaatggctaacccaattgcaaccaaaaaacaaaaagtaaaattgactctaatgcactttatgagtccaatcaattgacaatccatggtttttatacaataactttttccatgttcgaacaaaccctatctttttggtatcattcgaaagcacaaagtctgaataatgtaataatacgagaaaacaagagaattctaacatttcaagaaagttacaaacgaaaataatcagcaattacttaattaatcaaatcttttgtggtaattgcaaattattgttgaatttatttttaaaatgtttattttacatttttatgctgaaatttaaaaagttgtttttactgtgatttttcatttttctgtacttggggcccaaacgaccctggggcccaaacgaccctggggcccaaaaacgagggcccaaaaacgggggcccaaacgcgggggcccaaaaactggggcccaaacgcccccgactccaaatttcataatgactcaaccaaaaataatccgctggccataaatattttttatttatttatctcttcgtccatttcactcagtgaataatgaatgagtcactcactcatttgtctcccaccaattttccgccgctttccctttgctttttgtgtaaacaaatttaaaaatttcagtgccagtctctctcttatcgttgtcattattcgttcattctttacgagtaaaaaacgaaatatttgcacatataaaaggccacaaattcctcggaaaagtgaagtcccaaccgaaagataagacaccaaagattcaaattttcattttctgacaccatttctaaaacattcgttgcttaaattccatttttaaaatttaattaatttaagccattaaaaaaaatctgacaaaatgaatttttctccgatcactctgtttctgctctcttcactcgccattttctctgcagcggatgcattccgccaacaaacggtcgccgttcgcggccgtttaatgtgtggggataagccattgacggacacgaaagtgaagctgtggaataaaaacaaaattggtagaaaatcataattttaaattcctatcaatatatttattgatcaaaaataggccgtgatgatcagctggcggacgtgaaaacggacgcgcagggaaatttcgcattggacggcggcgtcgggtccattttcggcatgaatgtgcacctgaaaagttgggcactccatttttgtaaatgcgaaattcgagcgaatccctaacattttttgccagtttatcacgactgtgaccgtggcatccttccgtgccaacgcaaagttaacctcggcattccgggcgagtacgtcacgcggaccagcaccgttcagcgatggttagacgccggcacaatgaacatgcagctgaagtttcatgacgaatcaacttcatgcatcaactaatttaatgtttaagaggatgagataaaaaaaattcaatttttgaagcccttgaaaaacgttataaaatttttgactttgtcttcattatataaacttattaacaactatttgcacttaaatgataaggatttcttttaaatctatcggacaccgtcgcaacctataaatccgcaaaattaataaaacttcgaaaactgcggaaattttgttttaaatagagctattaacctctggaatatcttcccctgtgatattttaaattcaaaaaataaatcacaaggctcttcgttcatctctctccaaatttcttgatcttcatcctgaactaattaactctttctcttaatttgtctctggttaaattcgaatataaaattgaattttaaaaatctcttaaatgatcaaatattcttatttggccattttctctttgctcgctgtgtccatttcctccttcctttataaattttgtatttgtacaacttttctgattatatctcacaatttatagtattctcttttgttctttgacctcgtttcacttctgctgtcattggcataccaagtgattgattttctttgccctttatgttgagtatattgaaattatgacctttccaactgtgacacatacatatgttgcaaaacaaaaatggcatggcatcaaaacaatgcactccttttcaaaacatcacatttatagcacgagagaatttcaattaattgggtcaaaacagcagaatttaaaaagttatttggttttggtttaaattggcgttatatttattttttcattttttgttcgtctgcggttcatttgtacgggcctggccgttttcgtacgggccgttttcgtacgaacacttgttgttggactataacttttttatttgtcaaccaaatccaacattgttggtatcattcgataaacgttctgatactctattagcctgcagaattc

SEQ ID NO: 1369 - DNA, 1453 bp, Heterodera glycines
acaaattaaaacacactaaaatctaatggaaatagcaatcttttcttataatttcggatgtcgtggtgaatgccgcctccacaattcgctcgtccttttcgccggccgccagtgtgaacagtgagaaaatgttcttccaacccgagcggattttgtcggcatgcgaatggaccatgtgagtgacgcaggagacgatcatttcacgacaggacagcgacttgttgcgactcattatcacttgaattgtggagggatatttcgagtaaaaatgaaaggatgagaaaattgtgcaccttcaaatgggtgcagaaattccttttggaaacggaagttcggcagttcgcctttttccaaaaacttcatcgaaagctgtcgaagagcatccaacgcaaagtgagaaatgtcctggttggaactgcagccggccaagttgaagtgttcgccgaggacggaccaaatcattgaccatctgagaatggcaaaccacaaattattgaagaaacagcaacatctcttcgcacttactctatacgaattcggttcatattgtagaaggaaatctcgacgatcttctgcaacatgtacatgctcggcccaccaggactgcacaactcttcgagcagtacttggcacaatgctcgcacaaattcgataaccgcttcgccggacagtttactcgagtcttggaatatcctgcaaaaacaaggtaaaagtctaaaccccatcagaataattgctgtcacctgtctatggccaccactaagtcttgggaggatgtttcagccaaatatccctgcacggtggagaaggacttgtcacggatgttgaacatgctcttcagattgtctttaaggaatgggatttggggaaccatcatccagtggggtttagcatcagctgaatccgttgtcatgagtaaaaacacgcaaatccatcctaattaccgtggtttcccgtgccgatggaatgaaccagttcaagctgactgatgcatttcaacacgtcgtaccagctttgctaaaaaaataaaatttaaaaatttgaaattagccaatttgccagtcaattacgtccaaatggctgccattttcaaccccaatttggatgagtagctttatcgactccacattctttggccgaatttcggacagtgaactgttcgcggtgagcagagtgaatttggtcagcgtctgcacaaatgctttccgctgaatggccaaccgaaagaggcaagcgacgcgaatgccggcggaaaagccgtgcagacaacggccccaaatttgaggttcgtcggaggattgcaggccgatgctgaaggtggccaagcacggggaccaaatcaactgcaaattgaataaaaacatagtcagtcagtaattaatttgtgatattccaatcatcccggctatgagaaacctcaaacatcagttggacttgctcaaaatagatgcac

SEQ ID NO: 1370 - DNA, 7822 bp, Heterodera glycines
actcactcaatttcggccgttttaaatttcccggcttcgttttgatttcattggtggcaatgtcatcgtaaatttgagacaaaaaatcgtccggcaaatccgattggtcgttgataccccgattcatccgaatgtattcatcctttgtcattttccgtttcacctgaacaaaatgaaccaaaatgttattttcataaagctccgacttgtgggttgtgcaggtccgtggtcagcataataatcgaatagctgagcacataagcagtgtccgcagaggcaaaaatgtggttaagctgcgggttacaagcacaatatctgcaacaaaaaaaacattaaatgaaacaaaaaccgaagattctgacctgctcgcaaacttctccattattcgatcgattttctgtgcctcgccgggcaaccgaaatttgctgagcaaagtgcgcaacgcctgcacaatgctcacgccggtgaagtcaaagttgtccacgtaggagtacatcacgcgctggttgaactcgtcgccgtcgcccaaatagtcgccgatcaccgacttgtccaatcgctcttccgcgtggaaaaatttggcaatgtccgtcggctccgccccgacgaagcccttctcactcagaaatgacaagccctgcttgggtttcttggcaaacagctcaatgccactctccacaatgcctttttgttgtttggcctgtaataagctcaggaaacggctccattttgaggggtgattagtgattaatgaatgacctgtgctgttacgttcacgtccgacccattcccattgcacgcggagggcgccgcgttcgcagtttcgtcaccgccatgaatggactgctccttgccgaggttcatctcctcgtaccagtaaaccaagcattggagcaccttcaccagacagtccaatgccaactcgcgcattcgcctctcgcgctctttcaacgcaatttggccatgggacggagaggacgaatcggcggagtaaccggactggaaaaggcacagaatggcatgacataaatgtacatgtatgaagacagtacagctattttggacagatgcgtgaccaattcttcgaaaatgttggcggatgtcatgtgacagtcgtagttgacgtaaatgtccaccacactctgcggactgtcacaaattttggcaattgtcgtgagcaccacccatttgtgttcaaatgaactggagctgctgtccaaaatggaaatgatgatctccttgaagaacacttcgatttgcttcttcagatggatcttgaaaaacaaagaaaataaatactttaatcagtccgaagacaattccattatatgaaagatttgaatatgtaaaaaatagaaaacagtttatgtgctaaaaatcatagctatatttcgttatcttttcaaaacatttaaattttttacgtctaaaattttcataattttaagagttttatgtattttcgtattgtcaatcatttttgtcgatattaaaatatgaaattataaaatggtctctatttacaactaccttatacttgtcgaccaaatgaacaaaaatgtccagtgctttgctgaacacgctgatgttcggagagacggcattgtgagtcaaagccacgcacagaaagtgccgaatggcgtagacgaaactgtgcgtgtcgggcagtgcagcgttgaagttgcgcacaatcagcaaaatcatgtccagcgacaacagcttcgaacgcaattcgtgactccttggggagatgagagaaaattccgctggggaaaagggctggctgattgttagccaatccaaagctgttcctagcgggtccgactcgaaaattggattgattctaaacacagcggctttaaataaaatatttaattttattggagcatctgttgccgctgactgtcattttccacattacttttgcataagatagcaaatatattatccgagaccatggagtaaaaaattgtcattcaaaatgcattcagccaaacccgtacaattagattcctagaaataaaattccccactcattactccgtttcccccacctcgtatcctggtcgtccggtgtctgtttgatggacaatttgcacaatgcgcggaagatgagaaaggcgtctttctcctccaaactgtgaaactccaattttgacggttgctgcggcgtgttctgtccgccgcccattcccgccgaactgtggtcgtcttccgctgtcgtttggtcaaatgaatgagtagccgaaccattgggcaccgttgggctgtacaacccgttcacactcagccgctcatcggtcgaagtgtgccttgaacggggaggaacgtcctgaagaaagggaggggaggaataagcaatgataaggaataaatgcatcggtcaaaatggcatacttttttctggtttggcttttcgtgttcagtggaagcagaaactcggtagaccagggaatccacaacctcacggacaaccttttgattgagccaaatggcattattatatattttatggcatttaggtaattttactccgttttcccagtccaaagttagagcattgccgcctccttcaccggttgcgctgtccatggccagttccgcgtttgtgaacacaaaattgatggtttgggtgagaatgcctttcgcggtggactgattgattggacttcggctggccaaataaatgttgaaactcgtccgaactgcgagcagcaaagagccctcatgaattttgcagttattgttgaggatcagtgccaaaattccctgttccggaatatcgttaattagttcaaaataaaaatgggcccactttgattatctgaagttgaatggaatcatcagtgtgtggaccttggaacggagagcaaatggtttggacaacctctggaaaaagagggaaaatcaaaaattgaaaagccacagaagtactgtcaatgagtagctggtcgggattgacagcatccggcacattcccgaccaaatggccataggaaatcagtttctaaattgacaatatttagataaattgatgaaagaacagtaaaagacttctaacgaatccaaggcgttcaccacaatttttgtggaccgactctgacaggcctaaaaacattgttcctccaataattgattataaaatatctagcaaaaaatgaattaaaatttgattgactcactcaccaattcaaagggaagaaaataatggtcagcgagaaatttgttgttgttgttcggcaaaacgtctgatgcgccctcctctatgtcaatgccatttaaccgtgaatcgagttgctctaaaacattacaattaatcgccatttccaattcgaatgccatttcttaccgattgcttcttcacatgcttttttcaatgcgacgtgctctttgcgcctcgtgcttgggtcatttagcagcctctcaatgctggcttttaggaacatctccaacaaacctacggaattgtcttttgaagtcgccaaaatgtcggtttgatgttaatttaggtattaacgcatatctgatcagaatgatcaattagtaagttacctctcacttttttacagaaaaaaacaacaacaaagaaaagttaaatgacgaaaagccaacaaaacaatgcatatctacaaaacgccataaatgccttttcgcagcaaaaggatttaaaatggtagagggcagttggacgagacgagttgattgagcgcttaaacaaatgatgatcgaccattattttggcgtagaaagattttggacaaaatataattggaaaatatttatttcttttaaaaataacaattttttgtgcatgacaatttatattttattaggtggcggaatttaagaaacgcgcagcacgcatttgagtggcattttgggtaggaactcaatttgacagtaattaaagtgtaaaattctctagatcaattgtccgtctttttgatcattcgtccgttccctttaatctctctgttgttgcgttttcgttttttgtttcatttcctttggccatcgtctttttgtttggcgttatttgctctgcaacaacagaagtggcaccaatgtgggaaagtcgcgcgtgtgtgcttaaaaaattaaatgtaatttaacaatttcctaaattcgttttacaaattttccacggcgtgccaatcgccacaccttttacatttattggcaccggcacttatcaatcaatcgtcaattggttgatctgaccagtaaaaaaacgcaccgaagtccacgcactgtgaacgcccggtagccgcactcggcacaaacgacgggcagtgagtgctgctgtttctggtggtggcccagcagtgcgttggtcgccgtttggaacggacaatgcggacattggaccaacggcggagaggcggacgggggcgaggaagaagacgaatttgcgatggatttgaggccaagcgaagggtgtgcaacttctgctaattggccattgggcgctgttctgttggctccgggcgaggaattcgaagtgtcgtcgggtcgaagccgattccgactgaaggagaaaaggaagcgggtaaaaaatgccaaaatcgatgcccccggcaaatgtaccaataatatttcttatggccaattagcgtctccatggccaaaaatgatacatcaccgcacataaaaaatgaaccgaacgacggtttgaaaaagttaactttattttaataatttgcttccaaatttattatttttttttgtttatggtttttaattttcttatacattaattgttttttgatttattttgcaatgaattccgtatttcaaaatgtcggtttatattcattttaacccgttaagtattcaggggtcgctgatcacaaaaccagtatttcgatcaactttgaccccggaccagaattctgataaaagtcgaaaaaaaatttttcttcaacaaatagatattggtttgtgaacagtgatttagaaatatgaaaaaaaattgtggcggttaaactatatagaagcaaaaatttctaatttgtacaaatccttatattttttaaatgttatctaattctttaagatattaatggtacgaacaaagcaatcttttccttccgaggctcagtgttcctaatcgtctttacaaaagattgatttgcctacttcaacaggaaatcaaacgggttataagctaccggtcaaaaaagcagtcaaaccggttcaaagctccggtgaaaaaaaagcggtcaaaaattttgaattattatgaaacagaacatttgaacaagaaaaggaaaatgaaagaattattttctgaagataatgaaatttctaaaaattttttgaaaaacataagaaaataaatataataattcgttcgcttgcgcttctttggcctgtaataaatttagttttacatcgccaggcccaagttgttttaaaatatcaggacaagtttatcataaatataatccaatagcacaaccgacagaccataattcattgccaacaaatggacagttgtattttctcgatagttgcgaagcacaaaatgtaattacattctcataatttagatatatttttgacagaaaaaatagaaataattcttagaaaaaatttccctttgctaaagcttatgaaatgatgagaaatgtagtagacgaacaaaaacaattaacaacaacaaataaaaacaatgaaacacaggaagttaaaatgttgttgagtttacggaaaggttttgatccaaatcaatacaatctccagcacacaaatgaagtagctgcgattattgtatgcaatgcaaatgaagaaataccagcggcaaatataattgttgttgaaaagggtagcaaaaaaattaaaaaaaatttatcctttgttatacccaatgggaacaaaaggatggagctttgacataaaaatcaaaacggaaaaaagatttcattttgtgattttattaaattcaagctattttacagacattcttattttttgcctcatcatttttctaatcaactttttcaacaatggatttttgaccaagcggcccgtgttgaatgggatagactgaactatattagaactcaccaagaattaagagcgtgtagttataagggattagaagattatctttttaacaaagctgaacaaacgggagtaattattggaaaacaagtgattttaccttcgtttttttaggagggccaagaaacaaatatcaacattttatcgattctatggctattgtgggagaaaatggaaaacgggatttatttttgacatatacaataaatcctgaggatccggacataaaaaaatgtttaataaaaaatcaaactgaagataggccggatatcgtagcaaagattttcaaattaaaagctgatacgaaatttttggtaaagttatagcttattgttgggttgtagaatcccaaaaaagaggcttaccacccttacattttctaatcactttacatccaaaagataaatttaaaaatgcaaatgacattgacaaatttattcgtgctaatcttcctgataaagaaaaagaaccttttttacgctcttttttagagaagagacccaaataggagaagatggatatgctttatataaacgtcctaacaatggtgattttgaatttgtaaaaggacatcgcttaacaaatcaaaatgtcgcaccttataatccatatttattaatgcgattccaatcacacatcaatgtagaattttgttcagaaataaacgctgttaaatatatttacaaatatatctataatggatatgatgcagcaacagttgaatgtgtaaaagaggagccgaatggtgaaaaaattatgttaaaatacgatgaagttagccaatatcttgaggcgcgttatttgagccctgtcgaacatgttatcgattgtttaaatttgagatatagggtaaatcacattcaatcggacgattataggtacatttagaaaaacgaacagaccatttatattgataaaaattccgaaagtgataatttaaaagaagctatgcaaaaagctagcaaattaacggcatactttaatttttttaaagaatatccgaacgcaccggaatttaaatatatagaaatgccaatttattgcacttttgaccattggaaatggccactaaaaagaaccgataaagttattgggagaatatacacaataaccccaaaaatagagaattatattatctccgttatttattgctcaataagcacgctaaaagttttgacgatttaaaaattgttaatggtgttaaatcaacatatatgccgaagcgtgtttggcgttaggattaacacgagatgattcagaatggaacaaatgcttagataaaacaagccaattcaaatttcataaaggtcttcgttcactttttgcaaatattttaattaattgtgaaccaaaatacccacttactttgggaaaaatataaagataacttaagttaggatcttaaaaaatcgtatactgatcagattgcttatcaaatagctttatcattaattgaacaaaaccttctaaaccatcaaaaatgtttggacgattttaaagatatgccaaaaataaatcaaaatattcagaatatttcagatgatcagataatgaatccacaagatgaattaaacattgctttaaaaaaaatattctttaatgaactgaacaaaaagtaatttttgagcatataaaaacaatttttgaatgctctaatgaaagctcatcaattgcttttacattgatggaccagggtggacaggaaatcgtttgttcagaccgctatttatcatatagccagaggttttttaaaaaa

SEQ ID NO: 1371 - DNA, 4272 bp, Heterodera glycines
  unsure (1)..(4272): unsure at all n locations
gggggtcaagaggtcaatgaccaggtgtgaaattcacacctggttttggatgaagtggtgatgaatcggtgagggaggaggggggacggacgagttaaggtgtgaaattcacactttttttgaacggtggcaaaagttggttgggggggggcgttcggacagtttaaggtgtgaagttcacaccttgttgctgagaaaggagggaaggggcgatgaaatatggtaaaattctcactaatctgacatttgagatcgcgtaattgatgatttatctgttgaaattaaaataaatgattataatttgagtgaaagttcatcaatatgaatctgtcactcattagatttttttattttcggtggggccagttgttccaatcctcttaaaattttaaaggacttttgttaacattttaaaattacccgcacacaggtagaagcccaatagatactttcccttcacgagtacccacagctcgttgtcttcgactttcctctttttgacagctggcgcttcttcagcatccttttgcacaggttttgcacaattattgccccagcgactttttttgatcatgctgcgggtgtttggtttgggttggaccttgtcagtattcacagcttcgctatccgtttgaattccatttctttcagcttgcaacggtacattatcgttcattgaagacatttttatttaagaaattattaaaatgatttttggttttgagcggatgaacttgtcgagctgaaaagtgggcggagcctatccgatttcaaaagtataaaaccggcacatttttgaatgcccgcgtctttttccaaatcattcttaattttattcaccaaaatggccattaacatgagcgacaaaaagggattagtcaaacaaatcctgggcgaagccgatcttaccattaccacctctggtattacagttagcgggccgaggctgtcaacgccacgttttattccctttgacgagagcggcaaatgccggtcatgtaaggcaaccgaggtggaggtcgacacgatggtgacaaaagagggcatcactatttggtgtacgcgcgtcgacaaagcgcagtttgtaccgtttgatgtgatctacgatctgccgggacattgcttttttcgagtgaagaacaagtcaagagtgttcaatgttccctacagtgagctaccctccgacacgtgtgcagacctaggggtttcaattgaagagaaggacttgaagagaaaagcaaaagtggctcttgatttggttgaggcaggaatggtgtcggacgcaatgcaggggggagcacgttggaagaaagcaaagactgcgatcgatgtgttaggtgatcttttgcttactgaaccactgagcgaacatcaaaagaacactccagattcatacctaatgagcctcaaagccgacaatcatcacaagtgaaagaagaaacaacttcagtttccgcttctgcagctgggagccctcaaacccacactgttgaagagatgaaggaacaaaatcaagaagatgttgaaaaaaagatgccgcctgcactcccggatcctccaactatgagtggcgaaaagaaggtggaccctaaaaaagaggatctcggagacattgataaaactcttgatgaattttttgagagtattaaggcagcaaccaccaatatgtaatgatatttaagtctttgcttttgtattcttttaaccacaataaaaatgttaaattcacaagcgttttccaccaaagatatttgctttaaattgccctttggattaattatttcggggccctcctcctcaggtaaaacccaattcctactaaaatttattgctgagttctccgagttaatctcacccagcccggtctccattctttattgctttggtgaaatgaactcagcggtgcccgtacttcaaaaagcgggggttgacgtttatgcgggagtcccgtcagaagattgatcaaacgcttgcccaagcctcttttgttgatactcgacgatcttatgctctccatggacgagcgatacctgtcagatttgttcaccaaaaaatcccaccaccatcaatttgcggtagtttttgtcactcaaaatttgtttgagaaaaagatcaaagtggcgcgcctgtcctcccagtacctggtactgatgcgagcacccaactctctgttgtcgatcagaaatgttggaatccaacttttcccgcgccaactcgacttctttctggatgcgtaccgccaagcgaccgcccgtccctacggctatttgctgatcgacatgcatgcatcatcggacccatcgttgcgtctgcgcacaaacatatttaaggaagagcaggaggaagacgaaggcattgttgttttcattcccaaaaatggcggaccatagtcaacaataacaacagataataataggacagctaataaaagacaactcggactggctatgtgctttggcgagagtccggctagctatcctttgaggataggccgcagtgaattaagccttatgaaagcatgagatatgaaaatgttgagaaaatgcaaaaacatatgacaattcagcgtcccgggccaaccgaactccataggcacaggagtccggctagctatcctttgaggataggccgcggtgaattaagccatatgaatacatgagatatgaaaaggtttgagaaaaatgcaaaaacatgtgccaattcagcttcccgggccaaccgaactccataggcacaggagtccggctagctatcctttgaggataggccgcggtgaattaagccatatgaatgcatgagatatgaaaatgttaagaaaatgcaaaaacatatgacaattcagcgttccgggccaaccgaactccatagacacaggagtccggctagctatcctttgaggataggccgcataaaaaagcaccaaaagaaatgagaaattttagaattgatcgagactgatgaataataataataataataaattgactcaataaaatgagaaattacgaggcaaaaacgccccatcatccgctgtcgacagaggcggattaatttgcctttggaaaattacataaaaaagaatgaattcatatataaaaaataaagaattcattcaattattatctaaataaataaattcaattataataataatttagcattatggctgtttgtaaatgcaaagtgtgcgacgagtgccgtcgaaagcaacggctgcatgaaattagcgagcggaaaaaaattattgaaagctgcggtggggatcaccactatataaaaatgattgaattacggatgcgcgacttagagctatataaacgagcttataggcgaataaaatctgtgatcgaccaagtgctggaaggttggtaatataaggagggtgaaatttttaaaaaaatttagggccattccatgtaaaatgcacttcaaagtgccaagaagaatttacatattatttgattaaatgggaatgttgcactgaggattatggacggggagtgggctgcacatattcagaaattagtgatatagtaagaaaaaaaataataattaaaataatatttaactgttagagccaaaatgagttgttggcatattacgatcgggaacgggtggtcggcgagatcgatccgccgttggctgataacaatgcaccgttggcaatggctggaattatagccgagttgcgcggtggaaagttaccgcagggaaatttggctcaagatgatttgacccaaaatgaggacctaattgcggcgggggaggaggtgattataaaagaaatttttaaaaaataataaagttaaatagtaaattttaatggataaaaaaatcgaaatgttgtgttaattgtaggccgcagggcaagatgctccagttaaatagcgggcgcgacgcaaaaacaaaaagaggggcggtaagaaggtaaaaaatgggatagaagaggaggaggaagaagaagaagcagaagatgagggggaggaggaagaagaggcagaagaggagggggaggaggaagaagcaaatgacagtgtgcagggtagcagtatatggtccgggtcaattgactcggccattactgccttctccacaatgtcggccacgcagcgaaaaaaagtgctagggaggagccgacaatggtggcaagagcgcaaagagcgcaaaaaggctgaaaagggaagatgcgctaaaacagtaggagcagtggaaaatgataaattgaattttgattaaaattcatttttttatggtgttaaaanataaattttg

SEQ ID NO: 1372 - DNA, 1263 bp, Heterodera glycines
atgccactatttttttttgattttggcattccgttttcgtcgcgtcgtaccctccgttctgctgctggtcaagcaccgaactgctgctcaacagtcggctcagctcgtgcaccgtgtcccggtgctcatccgcctcctcgtcatcatctccaaagtcgttgtcctcgtccatttccatggcattttctgccaatcgtccgccgccacaattttgccgttgctgctggttgtgttgctgatactgcttcccgtcgttgttactgtttgctgctgctgcggctgctcgtcttctcatagccgcttcctgttcagccgcttccttgagcttctccaaatcttgcgcacacaccagcggcttcttcaacagggaaattttaagggaggaaagagggggttggaaatttcccaataaaatgcaataaaaccgcgaaaaatgggcgaagaaacgatttttctttaataaatcctcaatacacttagaatttttttttttttaattcaatggctttggtaaatttttaatttaattttctcgactttcaacggaatgccggacggtcgtgtcgacgatgattgtgatccattatttgtgccaacaccaactgctgctgctgctgttgttgcatttggatagccagcagcaccaccaccaccgttgcgactttgtgcctcgaaaagcttcagcttgcagctaaatgatgaggcggtgggcgacggtggggactgtaactgctgctgctggtgatgagccgaagaagacgaagacggtgccggtacggtagtcgaagttgttgtctgctccgtcgtggaggcctgtgataagtgggaaattttaataaattttaaaaatttcgagaatttaacgcaaagcaatagaaaatttctaggtttttaaaaatttttgtgagaatcctgtcagaatcacattttggggtgcacttcatttcccccccccccggtccttcccccgagggcaccccaaaacgtcgccggaagactttttggaccataactttgttcattgtaaatcaaattaagcattcttggtgttgttcgatagctttatgtgtttactattaataggctaaatttaaaaaattttcgttaagtttcaaaaaagttatggccagaaggaactcaaaaacccagtattttgaactttttttgctctgattttttttggtacatcaataaaaaattttgaaaaatttgtagattaatagagtttttcataagctttggaacaataccaagaatgtttaa

SEQ ID NO: 1373 - DNA, 1701 bp, Heterodera glycines
cggcgaaccggccgcgacgaagtgtccgcggcgaaccgaccccgaccctcttttactgccgtttttcacatgggttggtcgttatttgaccaggtcaaatgaccatggttaaatgacctggtcaaataaccaccttctttgactttatttcagatgtttttcttgccagccaaatgagtgtgtaagaagcacatttaatgatgcccttcctcacttttggtttgggtgccaccggaggtggtggcactttcggtgccgttgtcgtttccggccccgtcgttggcgaattaagcgcgaccgggatgtgcgacggttttgcgatcggcgccattgtcgatggcgtcaccgatggtggcagcattggcacgccgtggggctgatggtgatgatggttgtgattggcatcaatgatggtactgctgctggtggtgccattctgccgaaaaatgctacattaagcctaattttttttacgcgcatcctcctaaaggcacggattgattagcttaataattaccccattttgatagtgataggagccgctaattgctgtgccgttgttgttgttcactgtcgcaacaattttgggtggcaacggaggcgacacgttggcattggcactatcaccagctattgttgtttttggtgttgtggcggcaaattgacgatgccgatcatttgcgttatcattgttattgttgttgttgacaatgtccttgttgtcaatgcgtgtcgagaaggaggtggaggacggcgaggagttcaacatttgtgcctaattagttaattaattggcatcaaaaagtagtttcaaatttttttttccatttttaataaggcaattaatggcccaatgagttcctcccggagatggcgactgggaattattttttaaattttgaccagatttgcaaattgtaagaaattgttccgttatcaatacgggagggaaagtacaattaaatttttaataaaatcttaaaaatcctcctggtattacccaaaattttaagtttaaggtgataattaaaaatttataagaaaatttaagaaaaaaattggaaaaatttttggaaaaccttagttaattatcataaaacattgaaaaaatcgctagaaaaaattttcggtggagaaaactgataggggggggggggacgaactgatccctcccagaaattatcaacaaaattttaactaaaattcaaattataaaacaattaaattttaaaaaaaattttcatccgttatttgcacattttgctgctgtcgcttgtgctgctgctgttgttcatccccaacagcagcaggaaaagcagctttggtcgtcggacttgtcgtcggattcgtcgtcggttgtcctgggtaatcaatgggcgtcgaggcgcgcaacatttccgactttggctgttgctgctgctggtgctgtactgcttgaattcctcgtccaccacttttactgttttcgttgtctttgttgttgttgtccatcaacagcaaattgttgaacgacgtacgatgttgaagctgttgttgttgttgttgttgcggttgtggacggtatggcgacgacggtgacaaatggttgttgcgtacaactccagcaaccgtggcgacgccggcagcgacggcaacaggtgaagacgatgacgctggcttttggtgatgggcaaccggggaggaggaaaagcctagaaaaca

SEQ ID NO: 1374 - DNA, 1427 bp, Heterodera glycines
tccacacggtcaacagtgaacgggtcgtcgggccagcggccagcgccggagacggtgaagccgggcaagccgcacttgttgcgcacaatcattgtacaacagcgctcgggcgggcgtggcgctgagatggcggcggaggcggacgcctcgggcaaaaaacgaccctggggaatggagaggggttaaaactacaacaaaaaaaaaaatacctccaatatttatttatcccccccccccattgtggtgtgctctcaaaggtaaaggacccacaaagacaaaagacctacaaagacaaagatcctagaaagacaaaggaccgacaaagacaaatgacccacaaagacaaaggacccacaaatacaaaggaccaacaaaacaaataataattttataattaaaaaaataaattgtgaaaaatgctgaagacaaggtaagtttcccccatatcatggccctcgtaccaatttttgaaaattaatataatttttttttaaagaattttcgaggaaaaatgaaattttctaataattttttcaaaatttaataatggattacgaagctttttcacaaaattcccaggagatcgctatttttcaatttatttttcttgaaattttcctaaaaaaagtttttgagatttgggggtcaaaggtcgatttagaacgggtttgatccggatttcgggcatttgaaaaaaataggagacaaatttgtgccctcggcattttgacccaaaattttatttataaatattcctaaaaaatggtcgtcgcgtcgcttcccctcactcacatcgtcaagcagtagttggcgctgctcccgctcaatgaacagctccaagcggtcgcccgccgtctgaatgcattggatggcttcttggtgggtgaggccgcgcaggtcgttcccattgaccgccagcagagagtcgtccacgcggaagccggccgaatgcgccacaccgccgggcaccagctgggagatgaacaagcccgacttgccctgccaatgagagggggaggggggtgggtgtaagcggagcaggacaaaatgtcgtcggccgaaacgtggtcacaggggcgtatctagaaatatttttcgggggggggggggggacccgacctgaacccctttttttttttgctatttaaccaataactttttttccactgctgggtaacaactgcactttttcactaaaaatgaccaaattttggccgttttaaggcaaaaaacttgtaaaaatagtggaaaatgtaggtccggcggtgccgataggcgccgccgggaaaaatttttggaaatttgagtgctacttgttacgaaatttgcctattaaacttttttattttcgtttggggggggaatattcaaaaaaaatttccattattggaaaaattttttaaaaatttctttttgggggggggggg

SEQ ID NO: 1375 - DNA, 3127 bp, Heterodera glycines
ttttgaaaaattttttccccggtagggctccccgggaaaaccaccccgggtaagaatggggtattagctaaaaaataatgagcgaaattgggggggggaaaggaaaactttctgataaaaatcacttataaaaattattttttaaataatatgcaaatggttcaggggttaatctttcctgttggtctcttacctagttcccttgcatcaatcccacttcagtaaaaaaaatatatctctctttctttaagtaatcaatcataatgtaccttcttgcatcagcaatactatagtaaagtaatgatgaaatcgaatcgtcccgacgatgcctatcggtaatgcgtctctcaaatccagcataattttcatggtttagtcaaattttcaagttaccacacaagataaggagatttatcaatatgctgcgcgaacaaaagaataaattaaattaaatcagaaataaaagttgatcggactcataaagtgaagtagagccagcaattccgcaagttttttcagtccatctccagcatgttctctgataagtccgcctcgctcactgtgtcgcgcgccctcacctgcgcagctcattcttcattttctgtacttgctggcgcagtcgctcgtaccgccgcttccattcctcatgtagcatggcgctcgccgtgaccgggccttttcatagtcgaacccattattgaggtttttaggacctaatcctcgcttagccagctctaacacctaaagatagccgtagctcgtagcgctttttgccgcgactatccgacccattactcaaacacatattattgttattataccattacagacaaaaaaagaaatgcctgcaccccccccccccctagatacgcccttgcgtggtcaaacgaatttttggattatgagcttttgattcttattctgtaatagtccgaatcttattaaaaatataccaatcaaaatgaaaactaaaaaaaaaatgaattgaaaaaacccaaacgcactttatacggcaatgaattggcaccgccgacaattgaccattcaaagccggacggcccacgtcgcatttgcatgttttttcgcaccatttttattgaagcctttgggggaaaaatggggtaaaattatgaggtatttattattgcagcatttttcctggaaattatgaaaatctatgaaatttgtgaaaatttggtaccaaacttggcaattttggaagattttttgggccaaatatcgaaaaaatttaaaaaaagaataaaatttaaataaactccgtgcccttttccatctaacggtaagcaatttgatgggtttaggcatttaaaacaaaaaatatttttgtgcacacttttctgccaattccatcggcaccaatgccaatgccatcgtcggcgttgttcaacagtgacaacagttcgggcgttgaaaggtgcgcaatcacggattggggccgccgtttgagcaccgaacgcaatggccgactctcctccaccggtggcacagtgccgccgggggcgatggcacccgtaattgtggcattcgccggtgattggttggacagcgaaaagccagcagcggcattctgtgaaggaatggtggattttttacggaataggtgccaactacgtccgggcattttttaaattttttcggaatgacccaactcttccaggcattttccgaaatgggctaaaactccgtctcggcaatttaaattttttttttctcggaataattctacttcgtcccggcctttttagaacgggtcaaatcagtcccggcttttctttaatttttcggaatgatctaactctgtccttcgtacccaatcaattcaaattattaaaattcatagaaaaacgaactcgaaattatggtgctagggcgtttcttaaaaccgccagggcgtttcttaaaaccgccagggcgtttcttaaaaccgccagggcgtttcttaaaaccgccagggcgtttcttaaaaccgccaactcatatgattatgtatgtatatccgttaaattaaatatacaataatatctattaatttttatttgttgtgcaagtaagtgtcagccggaaatattaattagtctagcagtgacagactaaaaatctttattaaattaatttacaattatttacttaatttttaatagctcctgtaatctggttttgcaactttcaaaaaagtaacaaattacgaattaacaattttatattcgaaaattttgcagttgataattgttgctataaccacgatgtgtgctacataaataaatatcagaaacgttacgattgtgatattaaattttgcaattgccttaatgaatatcctaattgctttctaacaaaagtctgttctccaactcatatcttaaatattttattttttagaatatattatgctggtcagttcatatttttggagaatgttttaaagaagggtaaaaataattattttattttaccgtcaatagatatgcatatgtattttaaattttttattgttatgtaaacttctaatatatatatatttatatacataatcatatgagttggcggttttaagaaacgccctggcggttttaagaaacgctcaaagtggcggttttaagaaacgcccacctggcggttttaagaaacgccctggcggttttaagaaacgccctggcggttttaagaaacgcccaatgtggcggtttttaagaaacgtcccagcaccccttcggctccttctaattaatgaaaatattttacaattaataaactaaaaatttgctaaaatttattttctattatattttacctcttttatgggaacacttagacatgttgctgttaatatgaataataaaagtaatttatgcctcattttcttatatttcacaaaaaaaaaacttattactattatatatggattcttaaaaaaataaataaaatattttataatcttatattcatttattataatattgttaatatttaaaaattcttatattcatttattgtaattttattaattttttggatttacaactgattattattatataaaatgtttggtgtaatagaattgaaatcaattgtacaacgcataaaaaatatgattaaaattttttta

SEQ ID NO: 1376 - DNA, 1341 bp, Heterodera glycines
aagaaggataaaaataattattttattttaccgtcactagatatgcatatgtattttaaattttttattgttatgtaaacttataatatatagttatatatacttataatatatatatatatatatatttatatacataatcatatgagttggcggttttaagaaacgccctggcggttttaagaaacgcccaatgtggcggtttttaagaaacgtcccagcaccgaaattatgcccacaaatagtgggggccaggccgttttatagtgggggccagggcgtttctctcaactcttaccgaacttggccgtaacctgccacccaaagcgattacaaaacataacatcaaacgaatcgaccgattgttatgtaatcatcacctccacaaagagtgactcgctgtataccgttggcatgctagctttatctgttcgggaaatacgatgcccattgtacttgttgactggtctgatattcgtgagcaaaaacgacttatggtattgcgagcttcagtcgcactacacgggcgctctgttactctttatgagaaagcgttcccgctttcagagcaatgttccaagaaagctcatgaccaatttctagccgaccttgcgagcattctaccgagtaacaccacaccgctcattgtcagtgatgctggctttaaagtgccatggtataaatccgttgagaagctgggttggtactggctaagtcgagtaagaggaaaagtacaatatgcagacctaggagcggaaaactggaaacctatcagcaacttacatgatatgtcatctagtcactcaaagactttaggctataagaggctgactaaaagcaatccaatctcatgccaaattctattgtataaatctcgctctaaaggccgaaaaaatcagcgctcgacacggactcattgtcaccacccgtcacctaaaatctactcagcgtcggcaaaggagccatgggttctagcaactaacttacctgttgaaattcgaacacccaaacaacttgttaatatctattcgaagcgaatgcagattgaagaaaccttccgagacttgaaaagtcctgcctacggactaggcctacgccataaccgaacgagcagctcagagcgtttcgatatcatgctgctaatcgccctgacgcttccactagcatgttcacttacgcccgtaccgggagtcccggcaaaatcccggcgggatcccggtcccgtccgggctctaataattatttatctcaatactggtttgacttaattttgttaccttttttggtaaaattttacgattttacaccccctaaatttgaaagcttttagcaactattttc

SEQ ID NO: 1377 - DNA, 5202 bp, Heterodera glycines
  unsure (1)..(5202): unsure at all n locations
ctgcgccgcccgcccgttgattttgctgttgttggccattcgtcgacggcggtgacgatggttgttgtcctgctccgttcccatgatgattgttggccgattgcggtggcacaatgccggtgaaatcgcccgagtttcggctcaaccgattcttcggcgcgaacggcttcggatggggcgtgtcatagcgttctgtcaaagtgtatacaatttttttgttgttgaaaaatataccgtaatacaaatatttttttttaaaacaataccgtaatccctatattacagtataccaaacgggaccggggtgatggatttttgtccttaaacacctatattacagtataccaaacgggaccggggtgatggatttttgccccattatttttaaaaggattttgcgttccaaaaacacggtccggatataatctcgaatccgaatgaacctgatccagaataggcctgaattttttccaggaaatccggtcccagaggtataagtgcaaaacatggaaccctggtccagctccaaggcattttttataattgtcaaattcttagtaaaaaatatctttttaaaaagttggttttttttttgtgcccaccaaatttgccgattggcattttgtcctcctcctccggcggactgtcaccggcgaagcacacccgggcaccgccgacgcacgatttgttggtggaggaggccatccgcgtaactgaaacaaataaaaacagttaaaattttaaaaaataataaacaaaataactttttcattttcccgtccgaaaatcgaaaaattttccgatttttagggcttaaaaattccatagaaatttgtacaattttttgtgtcaatcacaaaaatcaaatcaaattaaaatttcctcaccatctgaatgttgttgctgtgcagcagcacccttttgaggcagcaaatagcatgtgagcacctgaaattttgccaatttattacaaaaaaaaaaaaaaaatttttcatttgaaaatccccaagaaaattgcaattttttttttcaattttcatatttcgttccaaaactttgcgaggtttcttgaaaacagctttgttccctctaccaaatgctcataagttttcataatttattattttggaaaatttttgcgagttttgatggcaaatttttgatgctagccgaaaatttttctaaaaaaaaattgttgaaattttccaaccaaaaaaaaatttttcaggaaaaaatgctaaatttaatttaattttgttttctaccttgatgttcatcaccggctcatgcgtggtggtcagcttgggcagcggcggttggttgaaggagagccaaagggcggacagtgttttggccttgtacagtacggtcagcgtgtacggtaagtactgtagactgttgtccgctaggtccagcacttggagttgctgaacaacaacatttcaacgaaacccaccccaaccccacccaaaaaattgttggaaataatctcaatttttatcggacaaaaaatagtaaaaaaataaaaaaactattaaaagaatttccgaccgggcgcaaatcggcttcaatgataaatttttaaaatgttttaaattttcgaaaaattgccaaatttttgaaatgtatcttcgggggtggggaaattcccaccccctggctatgggcatgacctcaagaacaattttcatttttaaatagacgaaaaaaaacactgaaattggtattttttgttaaaaaaaactccattaattttaataatattttaatttatggttctcagtcagtctatttttattttaatatcccaaaaatcaggtttttaaaatttcgcaaacacaattcttgtttaaagatttgagttctgtgctccttggcactaattagccaattaattaattaattgcccacattcaatttgccaatttccattggcaactcgctgagatggttgtgccgcagtgagagaattgccaacgactgacatccaccaattgttggcggaaaggcgtgcaaattgttcacgttcaggtccaaaaatcgtaaccgccgcaaattgccaatgctggaaggaatttcctgaaaaaataaatattatttataaatgtaaagcaaaaaaattttaaatattattacaggtattatggggaaaaaagaaaaaaggaaaatatttggaaaaaaatgccgtgcgttcgagcggactcgaactttcacgtatttaattaagaggatcagcgtgaacgactgcgctatagcacgacgaaatgaacaatttatttatttcttttccaatattccatttactactagtaatggcttttttgcaattttttgtatcttttttatttaacatttgtgagggtcaatggctcattaatggtcaaaaaaaattggcgtgcgctcgagcggactcgaacttgcatgtatttaaacggctgcatcagcgctaccgactgcgctatatgcacgacaccacaaaccaatttaaatccttttcaatgattctttgctcagtgatggagtccgtccatacgtttatgataaagggtggataatgaaaattcactaattagtaaatttgatgattagattctcttcctttttagacgtccaatttatttaaatatcactcttgtgtatttcttaacattgatgagggtcaatggtagggaaaaggatagaaaaagttatgaaaaactcattaggaagctactcaacttgactgccatcgttcggtagaatttcttaatttttacaatattgcgagggacaaaaatgggaatgcctcaataaaaaaaaaatcagttttttttaatttaaaaaataatgaaaataattagccgtgcgttcgagcggactcgaactttcatgtattaattaagcgcctcagcgctaccgactgcgctatatatagcacgacgaaatgaacaatttatttatttcttttccaatattccatttactacttactaataatggcttttttccaattttttgtatcttttttatttaacatttgtgagggtcaatagctcattagtggccaaaaaaaattggcgcgcgctcgagcggactcgaactttgcttatgtttaaaattttattttattattatttgttaggacatggagggtcaattgctcaatcattgtttagttaaaaagtagagaaccaacgaaaattcaacacgtgaatttgatgattagttttgccagcaacccatttgagccctcatcattttttaattttttttttgccgaaaaaattgagactctcaaatcataaaagtataaaatttaaaaatataatatatttttaaatagtaaaaaaaatgttcacctgcagttgattctcgcacagaatcaaatcggtgagcagtgcgcatgaacaaattgacggggtcagcaccgtcaaattgtttttggccgccttcagcacttccaaccgcttcaattggcctgcaaaaatgggggccatgaattttggacttttttaaattaatttaaaatttggatttaattttattgtggattttgtttaaaattccaaaaattaattataaaatcaattttattaaaaggaaaacaaacaaaatttcatccggacccgggtttttacaaaattccggtctcaaatttaaaaaaatactattactaatatcgtatttcctaaaataatagaacccccggtggttttggttttcaaccctcttcaaaaggtgaactctatttttaagggggggggggggagngttactgtantttttataggaaaaacggtaatataatttttcttaaatgcattttttaaatataatattattaattgatgaggcatcaccgaccgactgagctgggcaagtgccggatttggttctcgcacagcaccagctcggccaggttttgcaggtcgccaatgttcagcggcagttccgtcaattggttcccactgatgtccaacgtgcgcagcgcgcggcaccgcaacagttcgtccggcaaccgggcgaccatgttgcagtgcaagtcgagcagctccaggctgacgagacagtccattttggggggctgcaagtatttttttatggaaaattttggaaaaatagttttaaaaaaaataatcggacagtggaacaattcgagggattaaaactaaacaaaaaaaaggaaacacattaaggcaacaaataatttttggggattaaaaagagatataaaataattaggtaattaattctcttatacacatattgtaatggaccttatgattttttatgtggtaaactgtttattcaaagagattaaaaaaatgaaggtgtaagttaattgaaaaacgcttttttatgtgttgaaaatgattttaatattgatttcagaccatgtaatttattttaagcaaatttcaaaaaatccacttcaagacctcgaggagaatgaattttcatgattttccaggtccaatatggaacccaaaaatccagacttttttcaaaatataataataaaataaataaataaaatagaaaaacaatcaaaaaccgaccaattcggtcagataattgtcgcacaaatcgagcacacgaagccgttccaagcggacaattgaggggggcagcagacggagctcacattgggcaacatcgagaaactgcaaaaaaaaaaaggattggaattttcgggaaattttttgaaaattttattgaaaaattgcgaattttccccttttaaaaagaggataagtaaaacagagtgagactctccgataattttttttttgctaaaaatggtttaggttaatcagtgccaaaacgtgcgtgccacgccgagggaatattcccccaaattcgggatattgcccaagcccaactattttatgccaaaacaccaaaaatgccaaaatttgagcatttttttgatgctggaaaatgttttttataattttaagattttaaccgtttaaaagaattattttaaaattcaaaaaattttccctttttgatgttttaaaaacgctgatagttaattaattattgagtaattaatggaatttcattanaaattaataaaaaactgtgcctgcaaattgacgagccccatcatgtccggnggcagatgagtggatggattgttggacnnagtcagactggacagctgagtcaagtgacaaatgatttggggaaactgaaaatggaatttcaaaaaaaaac

SEQ ID NO: 1378 - DNA, 1399 bp, Heterodera glycines
ggggggtctgacctggcgcatacagagaaaagaatatagaaaaagaaatgataaattttgcggaggaaacttggaaaaataaaatatcaataaaaataaaaaatatgaaaattaatccactaaaaaattgaaagaaaatttcaaaaaatatgtgggattacattttttaaagcatagcctagtagggttgtgtccaaaaaactcgctaacgagtgcttaagtagagaaaaactcggaactttttctcgtactgagtcttaaggccaaacgccggtcacgagctccatgtggaagttttcggtctcgaaataacgcaaatttccaggccccgcaaatttccaggccccttcgttgctcttggcagagagaaaggatggattaatttcacggggacgacgaacgccagcagagtaagtaaatcaatttgtcctgtgattcctctccgatcagcagtgatcagtggagaaagaaagtccgatcagcagtgatcagtggagaaggaaagtccgatcagcagtgatcagtggagaaagaaagtccgatcagcagtgatcagtggagaaagaaagtccgatcagcagtgatcagtggaggaagaaagtccgatcagcagtgatcagtggagaaagaaagtccgatcagcagtgatcagtggagaaagaaagtccgatcagcagtgatcagtggaggaagaaagtccgatccagcagtgatcaatcagtggaggacggggaactccccgggcgcgctttactacaaaaagcgcgcttcactaccaaacaaaaataaatttgttgcgattgtgtgtgtgactgatgtgagagtgacaaggagcgagcgagtaaacacaagtttatatatttgtgcgcattctcaatcattcatttaccaaaatgacacgggtaattagggaaaagatcaaataaatacgctgggggcaaggaaattaaaatggaacggatcgtaaaaatttatgtaactaatttgattggaaaaaaaagaaaattacaacgtccgtccaccaaaaacggaaccctgggaggggggcacttctgctgctgctgactttgaaggaacagcatggggaaattggttaattaattgactttttaatctccatccaatttaaacgggtggaaaagttataaaatttatttttgtcgaactttcggaaaacgaacgaccaatttaatttaatcgcaggtgccaatcagcaaagattgccttttataaatgaatgctggaaactaatcttaagatttttttttagaggtgcagccgggaccggggaaatttgggcaaagaccgggaaccgggacttttcgggttgaaaacccggggactttttggctgggaaacccgagaaaaaagccgggagtttcccgggcccggtcaaaac

SEQ ID NO: 1379 - DNA, 9736 bp, Heterodera glycines
ttgttttgataggatttagttatgttaaattgaaccttcagatagaaggtcttcaaatggctttgaaattacaccaaagtctttgcacaattttgccattgaacatatctggctgttacagctgttcaaccggagcacaatttaagtatgtgtgctcaacaaattttggcaatgcatttgctgaaattacatgcgacgatggaacacatttttccacaaaatgtgattccaacgccacaatttaccaaacaattttggctttcgataaagccagaattcaaactaagtgccaaacaaaatgtttggcaggaaaaacatcatttgaaattgctggaacattgcattatgtccagtatcaacaattggaagattttaattctaatctttccaaaaaacaaatcggccattcaaattggctgaattggaattttgattggaaggccacactttggtccttaattggcctccaatcatccttacattcttaatgattattggtgtaggcattatttgcctcatcattttcattaaaatttcacccttctataggctttggaaattaatttcctggtctctgatgagaagggactacggtacattaaatacagcaataatgatactgtatttggcggggggaggatcctttggatatgatgatgagtcacgtccgatcagtcctatccccgcccacattctgaaaaatcctataaataggatagaatttgactccaacacatcattcacaatgtccagaactccattaaacgacatcacaaatcaccgcagccctggtcaaaatcagggaaatgcggcgcgaactcgttcagcaatgggtcgagaaaatatcgacccaaatgtccctattgagggacataatcttcccctttttgaggaagaaattccattggagaatccatggaattggagaaatttgactgaatctgattcagattcagtgactgagatcgcaagggaatttagtccaatgtctttggactcggacccggaatggacgtggaaccctccacgttccatatggccaagaaatgggagggagccattgagtcaatggtttccccgtgtcatgggaaatcactggcacgaaagagaaagacgatctgctgaagcgctccttagggacttcctaaggaacagcgcatttttaactaccaatcacctggccactaaccgtgaaatcatcttcgatggattgtcacgtagcggtgcagaacggaccaacatttatcccggattcaccgtcctcaatcattttgagggacggggaataaccatcaatcctcttgtaccattggtacaagagtgtggcgggtttagtccccgccgcggcgaaattcacatggattatttccccactgaagtggtggacttatgttattttgagagggagactgaaatcccccaacaaataaaccaacaattacgacaggacgacacggatccgggaggaaaccggaacctccgggaattctcagagccaccagtggctcgagaccgataatcggatcggtcaaccactgatcaggattggaccgaaccacaggaaaccccaaatagtcagaactcggattttggtccgagtcaaatcgagaggtcgggaagcctgagcagcattccgactatttacattatttttttcactattttttattgaaaatgtaatgtcaattacggacactttggaatgtccgcttaatcatataattaacaagcaaatggttgcctgtgttcctcagaaatgattcagtgaatcatctcatacttactggaaacaccagtgagctcctccttcattcagagggtcgggagcaatcggaccgtatttaagcagaaaagtgaggagggagaaatcacttctcctttatttccaaaaatgactaagtcctcctcttcctcctctgagggagaattgtccgacgcatcattttcgccaaatgacaagattcccctttgtcaaagggggatcaaaggaaatccgctggagctggtggacgcggcccgggcggtaagcaataccacccggagaaaggggaaggaccttcggagtctcattgactccgaagcgaaggaggtggcacgaaagccgcctactgttccgactgcgggaaggaagggcatcggaggggcgctaaaaagtgcccctctccgaaggaggatcgggcggaatcctcccgaccccccgtaatttctcctaaaattaaggatactctgccgaaaaaggcagagggtcgcgcacgattgccgatccgagggccagtttcgatcgcccctcggaagccctcgcctccatcgccaaaggtcaaggccacgacagaatcgagcctgcgccgtcggcaacattcggatttatccggaatggcatgcccggatttatccgggttagccaggatttcaacggacgggagacccgggacgagcggctacggaggattagcaggatctctacgaatgagagacccgggactagcgggtatggccacagaaccgctagtgccgtcgaaagtgaactgattgaggccgtgaggagccttcaatcagtcgtggaagaactgcggaagagcatcccgccaaaattgacgggaggcaacagtgaaccattaggccaccgaaagaagcgccgacaccatgactcttcgtcctcctcgtcgtcctcctccgactcggagactgaaaagcggaagaaaaagagaaagaaggataagaagaagtgaagggaaactttggccgcggaagtattgtcgcggaaagcgacaaatgatatattttgataataattaatattttttcctttcattaatttagtatttttctctattttttattttgtgtgttactggttctctccctctttctttctctctctctctatgcgcgtacgcatgcgcacgcgtctctagggctataaaagccgcaccattcgcctattggggcacttcttctcacttctatttaatatttatatttaatcgtcccttctccatttattcacacatttatttgtgactaataaaggaattgaaaaagggagtcaaaaatcgaagagaaagctcttctcgcataagcatacaagggaaaggccaaagcctcttcctttgtccaacaaatcaattaacgttccaaaggggaacgttgaaagggatcgaaatccctttctcttttttgtccattccgcgacaaaaattggagccccgtaggggtcaagctccagtcgtagcttaccccctcaattgagagaagtccaagctttgaacaaagcttgtccaacattcgtaagagatgagtgaactcttacgaatcacaatcgcgccgattgtgaagcgtctcaagttgtacattgagacggctcaggaaaatctgacaaaagatttgactgaggaaatcagaacagatttgcttgcagagagacaaaatctctgtagagcagtatcattgttggagaaaaacaatgacaagtgggaggctgtcttccaccgagttaaaggtcctgctcttcaggaagaagagcagaactacaaggactacaaacctgaaggaaaagccttcatggaatgggccgaccaagcccgagggcttgtcgacaccattgatggggctttaggcctctcagaacagggggacgatgtcgttcaccctgcacaggtccaacagcctgttcaaaacattcagccacaagtggttgtggctccgcagcgacatgaagtgatgttgccgcccatttcgcttccaaaattttcgggtgaaccccgagaatggcctttattttggaagctgtttgagacttccgttgaaagtcttcaaattgaagacttcaaaaaacacatttatctcttgggatgtcttcccgagaagtcagttgctcgaagagcaattgatttgtacccgccttcagatgaaaactacccgcgagtggtagaaatcctcaagaaaagatttggggatgagaagtcaattgtggagacactccaatcagagttgctccatcttccaaaaccgtcagattcggttcaatctctgaggcagttctcagagtccattgaaaggatttgtcagcagttgtcagattttggagaaaatgaacaaaataagttcatggcctccacgataaagtccaaattgccataccatctcctcactcaagtggtggagaaggaaatgcgttcaggtggaacatttgattgttccgacctacgcaaggcaatcacttccattgttgaagtgaaggaagaagtacaaagatgtacacaagtcttccgtggggaagaaaaaccccgaaattttcctcctcaaatgcagaggaacaatttccaagggagaggaacaaatttccctcccaaccaatttcgtcagggtcattggcgacccaataacagaaatgagtctgtggggatgatgtctccccaaatacacagatcatttaacactgtcaatcagagggaacaaacacacttttctcctcgagaacgaggaacgaacccactttgttctctttgtagtgacatgggacacgcaccaagcaagtgtccaaaatatccaacacctggagcacgcagaaggcggcttgcagatcaacaacgatgttttaattgccttatgcaagggcacaattctcaacaatgcagctcatcaaagaggtgcccaaaatgtggtgaaaaacaccacttcatgatctgctattctgaaggagacgctccgagaggaagcactcctcaacaaacatccaaaggaggggctgttcaaaagaaacagtcctccaatagacgaggagaaccacctcgtccaacacaaaatcatttttcggcattaaatgaacccttaagaataagggaaaatccgtctgaaatatcaatttttgacggaaaaagaacaaatgttttaaccagcgttgtgacaaagaagtcacacgcgtttttgatgacccgacgattgagggtccggtcaagtcgcgatcctcgtcgaatgatcaaagccatgtttctttttgacccggcgagccagacttcatatatgtctgacccgctaatcaaaaaactgaaaccacataaagtgacttccgaagaaatggaagtctacggtttcggtggtgaaaggaatggaccaatacggttccattcacctgtctactccgttcaaattcaacggagtgacaataagtgggaggaaatcctcctcaatcgaaccgagcaaatttccactccattcaaaatggtggagtggaattcacatgattacacatcggaggagcaggatgttttccaagctctaagtttttctcaggacgaacctgagattctcataagtgctcggcacttttggaaatttttccaaagcaaaaaggaagttttgcctgggttgtttgtcatccaaacaacactgggtcctttagtcaacggagaatcagactttggaccaaatgttcaaaatccaggactgtcaatgatgaccattgatgagtccaatcaagagcagatgccagctactaaagaaattgaatatttctttaatttggaatcgttagggataaaagaagaccctaacgaagacgatgatcaaacagcaatgcagctgtttgacaaatcaatccgtcgtgaaaacggcggacgatattcagttaaatggccatggaagaaagagacaccgaatcttccctccaactacagaatggctttctcaaggttaatatcgactttgaataagctcagacattctcctgaacttatacagcaatataacaacacaatccacgaccaattatcaaaaggtatcattgaagaggccagggaagcacctggcactcttgagcactacattccgcatcaaggagtgttggctaagggcaaaaaacttcgcgtcgtttatgacgcgagtgctcacacaaggggtacaaacagtttgaatgactgtttgtacagaggtccggtacttttacctgatctcatcggaatgcttttgcgattccgatgccccacatttcctcttctcgcggatatccaagctgctttcttgcagatttatttctttggaaccagaagatagagaagtcacaaagtttttgtggctcaaagacacggaaaagccactttcatcggagaatctgataatatacagattctgccgagtcgcatttggggtgattagttcaccttttatcctagcagctacactacaatatcatctaaaaaattgtcgttcgattttggctaaagagttagccgaatcgctgtatgtggacaatgcgctcatggagtgtgaaactccagaagaggcattaacaaaatataaggaagcgaaggctatccttaaagaaggctgttttaaccttcgggaatttattacaaattccaaggaggtgatggaagccatcccccctgaggacagactcgagaaagccaaagtgaaagtgctgggacttatttgggacattgacaaagacgacattgtctttgaattcccatctgtcgattcattaaagatagtgaatcgacgtctcgtcctgagttttttggcctctttattcgatcctttgggattgatgggcccatgcatccagcctttaaaacttttcttccaaagtttatgggaggaaaagaaaggctgggatgatgccctctcagaagaggactcgactcgctggaatgctttccaagaatcttggaaagacaagcgaatccgagtcccacgaaggacaatgatacagggagaatgctcccttcaattgcacgcatttgtggatgcttcgatccacacatttgcaaccgcaatttatctccgagtggagagttcaaataaaattcaaaattggttgattttctcaaaaaatcgccttaagccaaagagtgcttcgaaagcactcactattccaagaatggagctgatggccattcttattggaattcgaggcttaaaattcatacaaactcaattgcgccgagcaattgaacactcctatttgtggagtgattctcaaattgctttaaattgggtggcttcaaaagaagcccaaccaaaattcattgaacggcgaatcaaagaaattcgcaccataacaaagtgttcgtttcactttgttcgaacagctgaaaatccggctgatctggcaacaagaggagctacaccagaagagctctcaacccattcttcgtggtggggtgggcctaattggctcacaaaggaccaaaatcattggcctcatgaactcttcttcgagataaaagaggaagagttacatgatccaccgaaagaagatgaaaaaatatttttggctcatacatgtgcagagccaaaacagcaattatttaatgcaaagaggcaccattcctggaccaagttggtcaggacagttctctttgtaatacggtttctccatttgaaattattaaatggaagagacccttcagagctcacaaaaaagcaccggaaggaaatcgtcaaggtttctaaaaccggaccattcacagcagaagatgttctgctggctgagtaccttataattcgtttggatcaatttaatgatccagatgaattcacaaaatttccctcactaattgatagtgaagggattctcaggctgagaacgagattaacaagaagtgaccaaccttatgggttttcacatcccatacttcttggaaagaactcggaaatccgagatcttatcattttgcaatgtcaccaaaaaagacatcacctaggggtggacagcacccttacggaatttctcaacaattattggactcctcagtctcgaacggcaataaaaagggttataaaaaactgccgtcgatgccgaaggatgaaggcataccaatttgccttaccaaaaatgcctccactgccggaggaacgagtctgccgacaaatgccctttaagtcaattggaattgactttttggggccaacagagacacgattggcaggagtgaaagtcaaggcatggataattatagtaacttgcctcacaacgagagcagtttacttagaagccatgcttgacacaacggccgaatcttttttaaatgtcctccgacgattcattagtcggaggggaaaaccagacttaatttggagtgacaatgccacttcatttaaattgtctcaaaaaacgattgagcaattgacaactccaaagggagttgagcaaaacaaagatgaatttcttgcacttaataaaattaagtggaaatttatcgctcaaattagtccatgggcaggtggcgtttacgaacgcctcgtgcaattatgtaaaaattgctttaaacggacattggggagaaaaatcctcaatttcgatgagcttaacacttttgtggccgaagttgaggccactctcaaccatcggccaatcactgttgtgtcagagggagcggatggcattcagccactccgcccccatcgacttacttcaacccgatttacagataaattgggagacaacgacggaagaagccgatcccaacgacaagcaaatctcatcctcggagaaattggctgctttatttaaagcaaccagagaagcccatgaaagcttctggtacaaatggcataatgagtaccttctccttcttagagagagatctaagtgggatcacaaaggcgctcatctcctagataaaggagaaccaaaagaaggaatgatcgtcctcattcacgaggagttcactcctcgaaatcagtggactttgggaaaaataattgagcttaatggcagaccaggtgccattagaagcgttcaattagaaatgccaattcatggcattaaatcaaaaaggtatggaaccatgcctcgaaaagtcgttattacacgaccagtcaacaaaatctttccattagaggtaggatttgaaaatcttaccgaaaatggcaaagaaaatttgaaagttaacgaagacgaaactgcgaacagttcaacagaaaatacaactcctcatttgggaaataaattgccaaatgaggagcaggaaaatgaggacaaaaattctcatttgggtgaaccaaaagccaaccaaaacaaacatggaatgattacccgcagtaaagcaaaagtgatgacagttcttaactgtctcactattttctgcatttttggattggcaggagcctatccaacaaatcaatgcaatgagtgtaaactcatttgctcaaacaaaggtgttttggcaaaaattccgaaggaaattcggaaagtggaactttgctgctctgagaattgttacattgatgagaatgtacacaaactcacatatgagttgccaaaagaaatcctcctaaatgactaccaatgtcaaggtcatttttggatggattcaaagcacatgtttaaaaaggacattttatgtccagcagtcgatgagtgcgtactcatcgaatgctatttatgcatggaacaattggcaaatccaacgtgttatccgttggtgtcctccatgttagttggaggacttttcctttccttaatgagcataagctttatggtttattccatattgaaagttcttttttctggacttcacatgattatttggctgataatccaattcatcaggccaatagtctatttcgccgtgccaaaccaacatcaaagagaaaggaggcaaaggagaacgacttcacacaattggacttcacagcgtgtcttcaggacaacagcattcattgtcctttttgccgtctctctccaccaatcagtggagcagagactgtagcaattatgccaaagcagaaa

SEQ ID NO: 1380 - DNA, 3305 bp, Heterodera glycines
gctggtcacagattttaaaactcgattaaaaagtaaaaaaactgaaaatcgctacaatagtaattagataattcattacattggaagtaatttaaagattttgaaaatttgagaatttctatagaaacttgtttttgtcttgcttagaaacggaaaaaatgaaaaacaaaaacaaaatttgatgaaaacataatccatgtgaaatgaaaaaattttaaataaattcgatttccgtcgattaattccaaatttttgatgaaaaacaaacaaaatgtgcattataaatatcgtatatttttgttttcagacacttttttctgttgtaaatttacattgaaaataaatttatttaatattttttatgaattaattttttataaacagctatatatacctattatgcatattgtacatttcatcattttaattctcattcagattataaattttgaaatgatttatttttcgatttttcttgccacattaattttatggtcaacaatttttcatgcgtcattaaagctaataaaaaaaaggaatttgcattttgtttttttctttgtttcactgaaaatttttctggaatgcgcatgtcaagcgcatcacaattgtccacttctgtccaaatgacttcactgtcgtaatgtccactgtccaaatgtccacttctgtccaaatgacttcactgtcgtaatgtccactgtccaaatgtccacttctgtccaaatgacttactgtcctaatgtccactgtccaaatgtccacttctgtccaaatgacttcactgtcgtaatgtccactgtccaaatgtccacttctgtccaaatgacttcactgtcctaatgtccactgtccaaatgtccacttctgtccaaatgacttcactgtcgtaatgtccactgtccaaatgtccacttctgtccaaatgacttactgtcctaatgtccactgtccaaatgtccacttctgtccaaatgacttcactgtcgtaatgtccactgtccaaatgtccacttctgtccaaatgacttcactgtcctaatgtccactgtccaaatgtccacttctgtccaaatgacttcactgtcgtaatgtccactgtccaaatgtccacttctgtccaaatgacttcactgtcgtaatgtccactgtccaaatgtccacttctgtccaaatgacttcactgtcctaatgtccactgtcgtaatgtccactgtccaaatgtccacttctgtccaaatgacttcactgtcctaatgtccactgtcgtaatgtccactgtccaaatgtccgggagcctggctatttttgagaattttttccaaaaatcaacataaatcagtaagatttaaaaatcttgcgctttaaagtcataaatgtactgaaaaatggatgaactaattaattaataaacaacctaagtagggcttccttttttaggcacaaaaaatagcgaaataggcattaaataggcacaaaaatcctcaaataggcactaaaataggtaattaaaaatttttattaacgctttttaggtaccaaaacacttaaaaacataacaatttcaattgtataaactttttttcgaataaggatataaacgaaaaatttttgttatgaagaaaatataaaattttcgggatcaattttgggaaaattttttcaattcttagggggagtattttctgaaattttttcgggccatttcttaggggtgtatttttggtttttattgcatttttttaaggattttttgcgaatatcctgaaaaaggcacatttaaattccacacatttaaattttttttaaatcaattctacctcagatgcataatcaacccgcaacgagaaagtaaaattttacccgcgaagatttggtctagtaaaagcgcattaaagccatttttcaattttacctatgtatgaaaaaaatttgcagaaataaaagtgttattaaacaacagattttaaaataaaagaaatgtattggcaaaatcaaactttatggcaatattgcacatttttttccaaacaaaagaaattaaaaatatattaaaaatataataacaaaattattcaatgcagaatttttcagttcttaaattaaaaaatttcaagtatacttttcatattcatgtaagttttttttaaatttctcggaactgtcgaaatcacatttcaccgtttttagtccatataatttataaccctagtaataatgtaataaaacatggttagatgaaaaagttccaaaatttgctctaaaaagactaaattgattatttctcctgtttataaaaagggaattttggaatgccatgcattttttcgtaaaacaacccaaatttacatctgagggaaaaggaataaattaaagtgcgattaaaaattcagtgattttgctttgggtttcgttaaatttttcgtttcggtttagtgctaatcctggtctgatttttcaacaatttccgattcgttggaagcccaattcatcagccccattcatttttctattatttttggctttacatatattttcttcattctcgcatttgcttttgaaaaaaaagaaaaacaaaatttgatgaaatcattaattcatttgtgtgggggaattttttttggtgcattcaattttcatgaacaaacaaaaggtgctgggacgttagtcaaaaaccatcaaatgaataatttttgacagaaaattattcataatttcgtctaaaatggatcaaattttataatattgatatttttcgatagccctaaatgttttctattatcctgcaaaatttttaaaaaattctttaagtttaaaaaaagttatgacctgagaagctcaaaaaaccaagtttttttgaacatttttagtcataactttcttgaaacttaacgaaactttttggaattttgtaggctaatagaaaacatttagtcgtatttaatgatatcaagaatttaaaatttagatgcttttgaacaaagttatatcaaaaaatattttcatttgatggtttttgactaacgtcatagcaccaaacaaaatgtgcattaagaaatattgaatattcaaaataattaataaatatagcaaaaaatgaccaaatagtggaaaccgtagtgtaaactctgaacagaataatgcttttaatgcaaaataaggtgctaggacgaagtgacaaaaatataaatgacttcaaaaaattacgatcaaaattattcagtctacattttttggaatttatgtttcattatttagcaaataaaagaaatatagctggggctcccgttttttcgacagcaaaa

SEQ ID NO: 1381 - DNA, 4925 bp, Heterodera glycines
  unsure (1)..(4925): unsure at all n locations
ataaacagctatatatacctattatgcatattgtacatttcatcattttaattctcattcagattataaattttgaaatgatttatttttcgatttttcttgccacattaattttatggtcaacaatttttcatgcgtcattaaagctaataaaaaaaaggaatttgcattttgtttttttctttgtttcactgaaaatttttctggaatgcgcatgtcaagcgcatcacaatgccctgccccccccctttttcatcatttatttcccctttcattttaataaaattatttccaaaataattacaataaaattaacaatcgcttttttacaaattctctttaagaattgcaatgccttcatttaaatttgtatgtttccaatttttgctaatttttgtgctcacggaattggcacattcagagaaagggtgcccaaaaacagaaggtacgtaccgtaacccattttttttgcgatttgaaaactgttaatatcgatgttgattgtatttctatactaattgagctgaaaacgttttcacagatttaattgaaatgaccaaacatttgctgacaactgggaagaatgtaatttctggtgaagcagcttcatcatccagcgaaggaaagtgcagtgatacggtaatggaaagtgttgtaacaaaagttattgaatttgggtgttatgacgaaatggaaaagaatgacgacgaaagagcgaaaagcaaaacgaaaaacgcatttattgaaagcattgaaacacaacgaaaaggtttttgccaactttggcaaaacggcaaaagcattggggagaaggagcaaaaagatggcattttgaaaatagtgaaaggattgggaggaattgagctgaagaaaattgaacgaattcttgaaaatgttcaaaacattggattatcgctcagtaatgaaaacaaagcaaaaatgccaacactgatcggtcatttcgttaatggtttcggcatgttccagttgctcattaatggtctgtgtaagcagcaccaagctgatatgataaaacaaaaatttaaattttatggcactaaattagtttaacggtttctctaacagtcttttattatcctaattaatatagattggtgcagggcgggtttcccgcgcgggattgcgtgatcatagtccgcaatcatgcatttggaataagcccgcgagatccggtcccgcaaaaaatttctgtgttcaaatcccgcagcggtacacgcaaatttgaaatttccagtctctatcaattagcaattaattgttggtaattaaaacaattaaagaggaaagggtatttttacgtaaaaaacccataatatgtcaaataaattgaatatatttaaacagcatgccaacttgtaaaattgatcacaaaatgcgcagctcccttccaaattttagaaaagcaaatggttattccgccgttagcatcatcagcagcagaaaatgcgttggtgacgcagcaaaagcgacgcacaaaacggggctttgaactgttccgtcgacacgacggctgcgccggcaattggagcacgggccaagaatgcgcaggtggagctagtatctttgtgctgtccatctttgtgatcattctgtgcgcatttcgactgtcgcacgaggccaaattgcacacgatgtcccatccggggaccatccaattaatcgcattgctctcactgattgccttctgtgtggctctcatcatcggcctttacatgatgctccgtggctgttttggcgcaaaattagacggaggttcggcatggggccgaatgtgttagagaagaagatgaaaggggtggggatgaactgctggcgacgaacattttttttgtcaagggggattttcgaattttctgtttttcctttttcatttggtctgtggaaaatttgtgccgaaattttcggcccaaacattttcgcctttgctttttttaatcattggtagcataaaaaacattaactctactcattgtatgtcaattaattaaccattaattaagctgcagttaatttgtgctacatttttattttcataaattttttgtttcaaaccgaccacaacacaggcgaaattggcctgctgctgatacgcatgttactgaatgggcgaagcgggccgttgcgtctgacaataagcaaagtttaaaaccgtgctgagacaaaccgaaaatagtttcagtgtcaattaaaatattaattatacaattcaaatagatgtcgaaaaatatgaatttaattatactattaatattaaaaatataaacagaaaaagatgaaatcattccatctccgaacaaaaaaaatcacattgaaacgaaaatttaattccaattcttgaacacatcaaattgattggcaagtcaacttactagaggattgttcatttttagaaaaaaagcaacaacaaatctactaattttcttcttaaatttcacccaatatttattaaatttaagttctttattcgattctccagaaatttcatgtgtttttccataaattttccttcatccctattctttttccactaatgttacaattgaaaattgttctccatttattaattgtacgaaaattatcatttatttcgagaactttttgttttatttatacatttcgatagtccaaagatttttctattattctgttaaatttcagaaattttttattaagttttaaaaaagttggggcaaaattagtgagtcaaaattttttggaattttttggttacacctttttgtaaatttataaaattaaataataattaaaattaaatatttcaatcattgatacttttgtaacttcgtcctagcacctaaaaattcggtaattgaataagatattaatttattgcataattttaaatgatatttattttgaattaaaaattttttttaattgataaattttctgtgcgttattaagcggtttaaagaaatattaaatatcttatcaattaaacaacatttcgtcacaaataaaattttatttttccaattccttcatgtattaccgttcaattttttattaatatatttagatttctttcattttatatgttatttttaattttaattattttatatggcatcggaattataataaacggcgttgtaattttggtcatattaacttttaacaaaatgagaaaatcctcgatgaatttgcttctgttaaatttggtaagagctctaaaaatatatcagtttttcaaatattgaaaaatctccgcatttatttggggtttttctcatattttttttcttccacaaaatgccactgttgccaaaataatgacagtccctggactttgacttggaaattgtggcaccattcccttccccgccatccaacggtgctgcaatagacgtgccgaagaaaattttgaaattatagagatttgttaacagtttattacaataaaactggctaattttggagtttgaaattacaaaagtttcctttttcccttaaaactttctatctcccctatgggaacattaaagagggccattccaaaacaaatttgttttgaaaaaaatttcatacatatatttttattttcagggcttgtccgatctatgtctgctgtcaataactcgcttatctatgcccaaatgnttgacgaccattcttgagttttactgattnattgcatttcaattttttgaaccggggttggggcctgccccattctgcttaattggcaccgggggggaaaggaagttcaatcctgcaaagggatgaaaagggggggggggggggggggggggggggggggggggcgcggctcctttttttttttttaaaaaaaaaaaaaaaaaaaaaaaaaaaaaaaaataaatttttttttttttttttttttttttttttatatgggggtaaaaaacaaaaaaaaaaaaacaaagaaataaaaaaaattttttttttttttttttttttttttttgtatgacaccacaaaacaaaaaaaaagaaaaaaaaaataaatgttgtggtgtagcacaaaaaaaaaagagaaaaaaaattttttttttgggttttttttttttttttgttttgtgggaaaaaaaaaaaaaaaagaaaaaatttcccgggtggtttttttttttttgggggggagaaaaacacacaaaggagaggaaatttctctcggtttttgcgccacacaaaaaaagaaaaaaaaatttaggtttttttttttttttttgggggaaccaaaaaaaaagggaaatttccccggtgtttacccccaaaaaaagggaaaattttttcgggggtgttttttttgggggtgggggcaaacaaaaaaccgggaaattttcccgtttttttttttttgtgaaagggggccaaaaaccgggaaacatggggccacccccgaatgggaatttctccgggtttgggcaccaagggaggggggaaatttttccggggggttttttcgggttatgggcacccttaaaggggaaaatttttgggttggtttttttgcgtggtggcaaccgggaaacggagaaataattcggggtggttttttcggtaggtgggcaaacaaaaaattgggaaatttcccggatgttggcaacatgcaacgggaaaatcttccgggtgttttttccgggtgttggggaatatgaaacgtgaaatctttcggtggttttttcgggtttgcaacatgaaatgggtcattttatgtattaatcattggcttgaagcagttcaggcgcggtaaagccaccgattagtccgaaaaattatccttgtcaatttccttttttgtccattcgaataaagaataggcgcttaaaaaacatttgactaaaaatgaattattatttacattaaatttattagtaatatatttaggtacattacgctcaataagagaagacaaaaatcgcc

SEQ ID NO: 1382 - DNA, 3448 bp, Heterodera glycines
tgaaatttggggaaaagatagattgtgatgtggatgaatttgaaaattttaatgagattattttatttaaaagaggtgtaggagggagaaaattttgtaaattttttgttattttttaataggaattttgggtttggggttaaattatgaaatttaaatgaaatttttgaaaggttaaaatttgtttaataaaattttgtttttattttaatgaattggtattggtgataaatattttataataatgtggagaaatgttttgtaaatatagggaggattgtttggaatttcttggggtgttatgggaagaggggtggatgataaagaattaaaagaatagagagatgaaaataggtgtataaaaaaaatatggttaatgttggagtttgataattatataagttagttttttatattaaaaagtttatatgtattttatggaataattagagagggattatgccaacagaatgtttgaaataaattgcatacatatatttttaatttcacggctccgtccgaaccatgcctgctgtcaataaactcgctttatcttatgccaaattgtttgaacgaccaattctgaagttttcactgatttattgccatttccatatttttatgaccggcgtttgtggcctggtctctattctgacttatatggccatctgtgtggaaaggtaagttcaattccatgtcaaaagtggggaaaattggctgggaggggggggggggggggggaatcccgcatttttgacatgaaatgaaaatgcctagaaattagaattttaatgtggcatttttggttttggtggcgacgatgggggtgtttttctgtgctatatttcaatcttcaaaaaatttcccgtcattttttcgtctcgaatccctctttttttctgcccgtggtaactctgttcgacaatgccattacgtcaagaaaatgccatcaccaaagttctcgaaattataagaaaattaaatgacctccgcataatgaccaaaaaattacattttaaaatgtgttttaaatttcaattaagatacattgtaattatttgtcctcttcacgcatccaattggtgcacaaggagccgaattttgcttgtgataaattcaatttgggcatttgccattatgtacagactaccgtattttgatcttattggcacagaaaagcgtaagaccaatttccaattacaacaataaaagtgaccgggggaaaatcactccgggggatttacagtggtcgttggttggcctctaatctgacacccatttgaccaattcagaattcccaactcgcacttatgtatgtcagatcacttctttgattttaatagaattccaaatcagccatttttaaataacgccggatattaaaaaggttctcgtagataatttgagtgatttctccaggtgccagagatagtgttgaaagttattagttcgtcgtgataaaattaaggtcctttgcctaaaaaaggattaacgtagatgatggcgattgctgtcccattcttagaattttaagaacccatggagacactaaactaatagaggggatacggtaaaagtaaatattgtgttttttcattcccagatgagtacggttgttttttggagtttcttccatttcattgggtctccgaatttgcgtttatccatctgtcagtgttcatcatatcagcaactctttactacaaaacgtgcaaagtgttgtggtcaatggaagtgttggattacacacggctaaatggtcacagtttaattacctaatttgtatctcaattaattttaatcaataattgcattaattttatccgattaattttcagagcgtaaaataaggcaacgccgaaaagtgatgaaagtgctcattttctgctttgttttatattttctgtgctcctttggatcaatttcactcttcataatatggttctttttatattttacattttaaattatcgcaaaagccaaaaaaggcaaaggaaattttcaaggaaaagcaaaaaaattgagcactttagtaaaaaaaaattctgtttaaataatgcaaaaatttagtgaattgtacgggattgacattcttcggtacgcaattcgactgttcgcaatgcaaagtgcgatcaacccattcatatacacactgatcgggaaacaattccgtcaaaatttcaccaattttttttctcgtatttttaaccataaataatttttttttaaatttctttatttgtattttcatttatcgctgatattccactttttattgcaaatgacttcattaacacctaattgtatgattgatgaaattccatgaaatgtaataatttattttatttttttgggacattactatacattaggcattgttaattgagaaaaaaatgattcaaaaattgaaaataaatatctatgtaaatgaaatgtataaaatgaaaaatgctctgcacatatggacaattaagtcgtttattattttcaatttgatttttatagtgttttggtgtcagcacactctccacattttgatcactccctcacggccggcggacacgagcaaatgaggccataatgtggccaaatcggtgatgctgtcccaatgggcttctggggccttaaaaatggatttatggaatgaatataaattgtaatttcggcatatgcacaacattttggagcattcgttgtgcgtgcggttgatcgcccagcattgggttaatctcagcctcgggactgatcagctgagaccggtcttccacttgaacacgcaacacactgtccgtgatttgaacttgccgataaccgatccgattgggtgatttcaattgctgaaacaatgcaaaataattgttcaataatttgcacctagagacctccccccatacaataataggcttcatatcgctttttatacgcgtccaaccaatttttagtaccaccacctcccttcaagccataactattttttaaaatagaaaatggctaatcctacctttgttatcaatcaaaacttattgttatcaatcaaaacttagattttttagccatattctggcattaatttgtaaggtaaaaagaaaagtgtacttggaagatcaaattcgaattactctttgtatcaatttgcaaaaactgaccgtttttgtttgtgtttaaaaagtttgagcttttaagctttcgattaatagcaccagacagggaaaattaatggcctaaaaatgagagcggtaagttgattgatgcgaaatatgggaatgagtgataaatgctgtttaagggcaattaggggcgcaaatttctttgtttcaataaatttctgaggcgggataatttaaatcccgcgatcccgaaagatttagaattagcacgcacttgcagatcgccaatgtgcaagtcgctggatggcaaatgcctccggtacggaccgcacaaataggcc

SEQ ID NO: 1383 - DNA, 1052 bp, Heterodera glycines
cgtgatttgaacttgccgataaccgatccgattgggcgttttcaattgctgaaacaatgcaaaataattgttcaataatttgcacctagagacctccccccatacaataataggcttcatatcgctttttatatgcgtccaaccaacttttagtaccaccacctcccttcaagccataactattttttaaaatagaaaatggctaatctacctttgttatcaatcagaacttagattttttagccatattctggcattaatttgtaaggtaaaaagaaaagtgtacttggaagatcaaattcgaattactctttgtatcaatttgcaaaaactgaccgtttttgtttgtgtttaaaaagtttgagcttttaagctttcgattaatagcaccagacagggaaaattaatggcctaaaaatgagagcggtaagttgattgatgcgaaatatgggaatgagtgataaatgctgtttaagggcaattaggggcgcaaatttctttgtttcaataaatttctgaggcgggataatttaaatcccgcgatcccgaaagatttagaattagcacgcacttgcagatcgccaatgtgcaagtcgctggatggcaaatgcctccggtacggaccgcacaaataggccgacgaatttggatgtcgcaaattccaacagcgcaaactcccttccgagtcaccagtgaaaattatgttgcttccgtcgatcattgagggaaccacggcggttgagaccaattcggactgcaaaaaatgggggagaactgaataaaatgagaggtagataagaggaatggacgacttaattactataattgcacactcactaggatgactaattacattcactaattactttataagtgagaggagcttcagtgctcggccaaagcacatccgtccgactgtgtgttgacaggtcccaaatgcttctgtagacaaaacattggcattttttaagattattttgaataaatttgacggaaaattggggcacagggagagatttaagcatattttcgaaaatttcatgatgaccgtt

SEQ ID NO: 1384 - DNA, 1435 bp, Heterodera glycines
gggaattattcggtctgatggatgcgaccaactggacacttccaggccagcaaaactgtgtaaaatgcggggggattagtacagaaataaagtaatgaaaataaggggggggggtggaccccgaaccatttgcttgcaaagggaccaaaaaattgaataaattcataaaaaaattccataattttcacggctcggaacttaaaacgcatcaaaaattttaaagtttgacccaaaattgccgattgttggagttaaaattgggggaaatttttcaggcagcgcatcgcccgattggccccaaaactcccgaatttccataaaacaggctcaaaatttttggataaaaatgttgttaacaaattacattcaaatttttcccggcagcgcctcaagtttttttgaaaatagtgcaaaaaatgaatgactaataaatgcctcaccgtaaatcccacaaaagcatgtttttggtggtggccgaactggcggtcaacagcatccaatgctgcttcactgagtcaatgcaaaaggatgtgatcaggccataactggaattggagttaaatgaatgcaatagtcattggttaagacatccatcacctgtttttgattctccgttgccaaaccgaagaaaattcaatggcattccgtccctttttgggcgcaactctggaaaataattcctcaaatatttgaaaaaaaaatttttggttaacggtttagacagccaataacagattactagaatttaggtgccggatcgttactcaaaacccatcaaaaacatttttgttcataacactttcttgaaacttattttttattttgatggttttttgattaacgcccattttgatggtttttgagtaacgtcatagcaccttattttaaattacaataattaatagttgatgaagccagataaaggaaagagagagcgagagagaaatgtggaggaagctagagagagaaaggagagagagtgcgaggaaaaaaagaaaggaagaagagaaaaggaaaaagagaaagaattgagaaagagtggaggggagagaaattgcgcatatgagagatagagagagagtgagagagagatagagaaagagagagatagagagagacagaaagaaagtcgtgctgcttcatttctgattcactttttcacactgaccacctcaaatcgtagcagaacactgatgagtgatgggtcagtgcatagatcagatggtcaacgcagaacaaatcgctgaccgccccctccgcgtcgcggtccaactgcaccgatttgagcagcgttttgcgctcaatgtcgaacatttgcagggacgcgtccgcacacgccatcaccaggtgcacgccctggtcgcccatgaagccgcaggcgttgatcgcgtgcgaatagcgcagcgtgtccagcgacatggcggccggctgcgag

SEQ ID NO: 1385 - DNA, 3482 bp, Heterodera glycines
ccagtcaaatcgcaaacctaaatttttttaaaaattttcctcctcttaaagggctgattgtgagatttaactcgggtatatttttttaattaccgtgccgtgggtgtaagtcactgggtaataagccaaccgttcgtcgcccattttgcgagtcggcgggttcagctggtcaaaatgtctggcctcctgaatcagtgaaataaataatcagtttttgtaaccgaaaatgaaaaagtttttaaaatggttagaaattgcaattatttaataatggtatgaaaagaggcttttgtttgaacaattccgtattttgaacccgaattttaatcaaagtttgaatgtgttcccaaattccacacgctttgagttcaacaaaaattcgagtggaagggggagaaagcggcaacaaattattcgaattttgggggtaatagcccaaaaaacggaccacttcagcgttcatggccacaaaattgcccagaaagtactccgtgcgcttcttgctctccttgtcctcgtggtactgcagcacataccgtccatggcacagctcgtagttccagtacggctcgatgcgataggagcagatctgctcccggtagatggattggatcagttcggccggactcggcccgtggtacgacttgatccgctttttggactaaaacaaattttaatccaatttaaaaacaaaaataggtaaaaataaatttagaaaatacgcacagacgaggccaacacgggcaacacgcattggtattcctccgcgtcagcagacacaattttgaccaatttgggctgttccgcagtggccgaactgctcgaaaaggacgacgacggagaagacaaaggcgaagactgactttgctgttgttgttcacttccatcaatttcattatcattatcttcatgctgctgctgcaagactaaaacaagaaactaaacaaattaatttaataattgccattttaaaaaggagtggtaaatttaaaatactcaattaagtcggcagtttgaaaaacaaattcgttttatgaaaattacgtcacgcttgaccaccccataacagagggaattagcaaacaacaaaaatttaaacaacaacataaaaaatacttaaatttaactaatcccccactaaaaaaacaagttatttgtagcaatttcaaaatttgaaaaaaggcattcatcgtaaaacatgtttaaattagggacctttttcatgttctgaaattggttcttgtgccgctgtcgttgtctttggagaagcggtcgttggacttattgttgtgggctctgatggaagaaattgctcaggtaattcgtcaaatggcctaaattataaaaataaagcaatttacaaaagtaattaaagcatttattattgttgaaactgacttaaacacgactctgtacgaaatggaatcgtcgagggcccgcaaatattccaattctttaatatcgacgaggcaataagctaacggaagagcaatggccaaaattaatatggccatcaaaaaatgccaatgcattggcaaatggaaaaactcgaaggcaaaaaaaaagaacaaattagcttgattaaataattaatttttgaaatttggcaaaggtgtagaattgcggtcacgccgatgtaaaaaaaattggaaaatttcaaaaagcatttatatgagatgggggccttgggttcgagtccgcttggctgcaaatttatttttttatgttacttgatgaatatcttagacaaaatgaaggttcttgaaaaatcagagctcatatttggcattttatttttcgaattcgctacaaaaaaaataaataaatgtaagtacacgcgattacaaattgtcagttggcactattggttggtccattactcactacactatgggtcaagcccagtgttagacaaaactcatttcgccaaaattataaatggcgtaattttttgcgagctaattcaaaattcacacgggtaaataaataccttttttcttttttaattatttattttatttattcaaaaataaaaataaccaaaagaagggcatgtgccacttacacttttggtggaaatgaggtgaaatggcaagcagtggtaaaagacaattgaaattttgagtggagaagcagaaagtagaaagtcagacctccaacaaagggaattggtttttttttatatacataggggttggagaaaaaatttttgtggaaaatttttaagaaagtttgaactaggtagtttagtagtttttaattttatttgaagaaatagttggaggtctggttgaactatttattgaaaagatgagggtgttgttttttgagcgattgaatttggtgaacaattttgtcggttggtggcaatgaatttaatgtttcataacagacgaggattgttttatcgaaaacttccggcggttgggaaatgtcttcactggtcttcttcttgtttggtccttttgcaacaacgggagtttggtcgtttgtcgtttgtgagaacttcgtcgcagaagccaatggagctggagtctgttgacgttttcggaggcgttcttcgtattcctccttgagttgctctttggtcagcgctgggcggacgaacagacgcgccaggttttgttgagaacggagtcgagcacgctcacgcttccatcctccgagtgccacgtgttgttgtgtgggtgtcggcatgaccaccttgagcgggcgtggagttgttcgctgcgggtcgtaccggccgagtcgaaagacggcggttggttcggcctcaacttcaagatggtccaagattttggtggtggcttccctgtcttcctgaacacgctccgatgggcgaacggcattgctttctgggaggccaatgaacaccagtgtacgttggcgttcttgctctgcgagtgcggcagtgattgggtccaatgccggtgccattgagcgtttggcgcgaggcggagtgatgtttgttgcgttggttcgcttcatgtcgaataattagaaaggaatatttgttttttgcgatcttaattggacaactacgtgtcaaattgctttttcattataaattttatttgtatttattaatttttgtctacaaagtattttaacttttaattgatgataatatcttcgaaaataaaaaatgtatcaatattttatatgtttattttattcaaattgaaacctctttgagcatacaaaaacacgcatttcaatgaattggattaattaggtaaaattacaattagtgaaaagaaaaaaggcgacatggtacgtcgttttttatcatgtggctgaaaaagaaacgaatgtgcaagaaatagtgcatataactgtctttcttccctcgcctgttttacaccccatccaaaaaagattaccaaagtttcccgcttatctataaagaacagagcgtaacatgccatttgtttcctaagccgtttttcactcgctgttcgctgctgtcgacttgtgacgag

SEQ ID NO: 1386 - DNA, 5180 bp, Heterodera glycines
aaatttggcaaaggtgtagaattgcggtcacgccgatgtaaaaaaaattggaaaatttcaaaaagcatttatatgagatgggggccttgggttcgagtccgcttggctgcaaatttatttttttatgttacttgatgaatatcttagacaaaatgaaggttcttgaaaaatcagagctcatatttggcattttatttttcgaattcgctacaaaaaaaataaataaatgtaagtacacgcgattcaaattggcagttggcactattggttggtccattactcatgggtcaagcccagtgttagacaaaactcatttcgccaaaattataaatggcgtaattttttgcgagctaattcaaaattcacacgggtaaataaataccttttttcttttttaatgaaaatgcctaggcttgagtcccattagttcatgccattgtttgctgcatatacctttcagtgcatcaatgtttttcatgataatttctatggagttctttcgcaaaacaatgacacttttggaatataaaaaatagtgacaaatgactcctggtaacagtaacggcttttctgtgcgcagctccgtatcattaatcttaccctttggcaaaaattatgaaacgattatttcaaaatgccactcacaatgtttcggctgacggcatataaataaaatatttaaaagagcaacacgaaaacttgccgtgacactgcaattaatttttttgatttttcatttgatcatatgaaaataagtactatttactgtcataacttatgttaaatttgataaattagtttgaacttttgcaagctaatagagaaaaattctggctattttatgctactaagaatgcaaaatatgattgcctttaagcaaagttatgccatatgctttgtcgaaaaaattgccaggttttgcgcaccttatgaaagaatataaaagtagtttctttctccttattttctcataatcataatgtcctcaattattaatttcataagaagtttttttggcgtttttttgggccggcgcgccccccgccccgtcaattgggagcggcatcggcccttgtgcaaggagacggctgtcaagcggcttcctggttccaactgattttcaggcatgcacggcggcatctccgataagatccgcagcctggaccagctcagcaacttgcttcgctcgcagatcgacccgccgctccgttcgctggaaattgacctcctctgggccgacccatcgacgagcatcacaggcgtcaggccaaatgtgcagcgcaaggctggcgtcctgttcggcgcggacgtggtcgagagcgtgcgcaacctgctcggcatcgactacatcgttcgggcgcatcaggtgagtttttttcgcttttcatttcacattgatttctttcattaatttttcccattcccttttttccagctcgtcatggacggcgtggaatacttcgcggatcgccacctgatcaccgtgttctcggccccccgctacaccggcaagaacaacacgggcgccacgctgctgatcgcgccggacctgagccacacaatcacgcgcttcccgccggcctgaggacgacgagacgaacggacagaacgcgcgcacacacacacactaactgcacacagagggatggcggaactgcccgaagaacgatgcgtgtggagaaatcggatcgtctgccccccattgttgtattgtattgtaaacccccattcacatgatcaaccccccaaaaactgttgtcatttcaattatttgcgtgtttgaatgtatgtatttgtatgtatatgtatgtgtgtgtgaataaacaaatgtaagactaatggtttcgtttttcaatgtgtacagagaaagttctcctgaaattttgtgatttttttgttcaaaatatgtagtaatcagttctccggatagcgaaaatttgagtttggagtcgtaaattagcatcagtagggccccagaaataaacgaaattcgagttttttttcaaaaatgtgtatgtatgtgtaatcgttggaggtcagtttgatggtgagacaaaaccaaacaataacaataaatttaggcgaggcgacttccggcacaatgggaccggccgagcgcactcctcctcacttcaaaataagcgggctgtaccagcaattgggctttttgttggtggtatttgacagtgcatgtccattattttttttttgtgtctgcgggtatgggccgaaacacagccaattaacacacaatggtcggcgagaagatcctctgtaagttttgggggagggcaatttttggggttaaataactgattttcaggtatgcacggtggcatctccgacaagatccgcagcctggaccagctcagcaacttgcttcgcccgcagaccgagccactgctccgttcgctggaaactgacctcctctgggccgacccgtcgacgagcatcacaggcgtcaggccgaacgcccggcgcaaggccggcgtcctgtttggcgcggacgtggtcgagaagcatcaagtgagttttttttttttgcttttcatttcacattgctttcatttcaataattctccccttccccttttttcagctcgtcatggacggtgtggaatacttcgcggatcaccacctgatcaccgtgttctcggccccccgctacaccggcaagaacaacacgggcgccacgctgctgatcgcgccggacctgagccacacaatcacgcgcttcccgccggcctgaggacgacgagacgaacggacagaacgcgcgcacacactaactgcacacagaaggatggtggaactgcactgagaacgatgcgtgtggagaaatcggatcgtctgaccccccattgttgtattgttctcattttgcatgataaactactcaaaaattgcactaaacgatggggctagctcttttggagcaaaacaaattgtagcaataaattttgacgaggcggctttgggcataaaactatacggaggaaaattcagtcgagcaatcccttctcacttcaaaattgagcggggataaggtttactttattagtcttcctgatgcaagataacaaacaattgagcgcaattttatgcacaaaatacattcaattctaaaatcatatgtaaaggtttcctgtcaactaaattttttccaacaatcttggtattttgctagccccaagagtcctctattagcctgcgaaaacgaccccaagccgtcaattaggtatgtagtgatgaatgcgaaccgatgccatctaagcatagtgacaactgagtcccagtgaaaattgataccagtactcaaaaaataattcagagaaaaaaagagcattttaaattcgctttgaacgagattctccttttcaaaaactttttacatatcaaatttgttggtttagttggagatgaagaaagttatggctgatcaaaataaacaatacaaaaatggcacggcaattgtgcagatcattggtcccacaaaaaaaaaaggaataaaaatccaaaaaacacatttttaagggttatttgatgcgctgagcacgaatatgacatgcatttcgaccaatttcgaacccctgacccgaactcgaacattttgaaaaattcaaattttcatttttttttgcaaatgttgctgatacactgattggtactgtaactacaatatgagtaaaggaaatcgaattgattcactaaatttacatacttagatcaataatttcgaataacaaggatggagtaggttggtggatgaaagtgtaaacaaaaaattatgaaaccaggcaaacatttgaatgcatagtacccggtcaataataatgaccagcagatcaaaggcgacaatgagaataatttaaactacttttaatattatttggttgtttgggatgtatgacgtgcacaccaatattggagttgtccgcatcgtgccagacagatctcgcgccacactcttgccgataattgaagaatttgtggtgccggggtccagcatacattccgatcagtgggcagcctacatgggtggcgcaattccagccatccctgtcatcccaccttatgtccaccattctgtaaatcatacaatccacttcgtggatcccttgaccggagcccatacaaaccatgtggaatgtttttggaagaatctcaaaatgaagttcaaggcgatgtccgggacttaccgcgagttgttgccaagttattgtgatgagcacatgtggcggcagttcaacgggaagaaaaccatagtggcatttgataatatgattgatcatattgccttttattaccccgtgaataattaaattcgatttcctttactcatattgtagttacagtaccaatcagtgtatcagcaacatttgcaaaaaaaaatgaaaatttgaatttttcaaaatgttcgagttcgggtcaggggttcgaaattggtcgaaatgcatgtcatattcgtgctcagcgcatcaaataacccttaaaaatgtgttttttggatttttattcctttttttttgtgggaccaatgatctgcacaattgccaaatggcacttgtcagtgtaattttgaattagcgcgcaaaaaattacgccaattagctctttgacgttatgagaaaattttgtctaacactgggcttaacccataatgctcaaatggcatctgatcaacttctttcatcccgagatagatttttctcattcagagttttagattcataaataatatatttgtcctggtccatccacaaaaaaataaccacaacatgaggctaaatcttaacatttgggtacactgataattttattgatgaattaatttccatctatttttcatgtcgattaaggcatattttggttaatgtacctatttatgtcgaacctctactgactccccattttcgcgcatctccaaaaataaaatttgaaaaatacgcctccaaaagacgacagatgactgtgacatcgacaaaaaacaattcttttccgagctcatttaaagacattactctacacgacgtatgggccagcaatttggaggccgaatttgccaaactgcgcgacctcatcgacgactatccattcgtggccatggacaccgaagtacgccatttgcttttttttataatggtgagaactcttcaaaaaaccacatctttcagtacccc

SEQ ID NO: 1387 - DNA, 2902 bp, Heterodera glycines
  unsure (1)..(2902): unsure at all n locations
atattatgggttttcacgccttttcaggtcggcttcactcttatgaatgagaagggtcagctgccgcccgcccgtgacattttccaattcaatttgcacttcgatccgagcaccgattcgttcgcgcacaattcgctggaactgctcaaaactgcgggctttgacttcaacaaacaccaggcaaaactgcgggtggagggctcgcaaattattgccaattaatttgttgtgtcataaaattgcaccaatttaaaaagttgttttgctttttagatttaaattggttcgcgtaaactaatgtaaaataatgagggaaataaaaatttatgaaaaattttataaaatttttctaattgtaagattcatttattttcaatatttctttgggcccaataattttttaaatttgcttattgagggtttcatctttttcagacggagggcatcaaattggaggactttggtgagctgctgaccacttccgggctggtggttgagccgcgcatcacctggctgacctttcacagctgtttcgacttcggctatctcatcagggttaacaaattggcgttggtttgtaacaaattattctatttgtaataggccattatgctggtcaaactgcccgaggacgagaaggacttcttccgctaccatcgcaaattgttcccgaacagtttcgacatcaaaattctgttgcgacagcccgggccgcgcgacgccatgctcaagggcggacttcaggaggtacggacgccacgggcaattttgcagttgaaattgggtgaactgctccccccccgcccacaaaatttatttagttttttaaaacgggacaaattatttttattgtcataatacttactagttttgtacatcgttatataaaacggttttgttagcctttcagctggccgaccaactgcacgtcccgcgcattggccaatgccaccaggccggctcggactcgttgctcactgcgatgactttcttcaaactgcaggaattgtttttctcggacaattggagggaggtgagcaacagtttcccaaccattgtttacggaccaataaccattggactacgaactaataaatgaatttcagatttctgccaaagttcaagggcacatggccggtctgtccaatagtcagctgaatggtggcactggaatcacgacgaacaacaacgggttgggttaagggcgccggaagagggttttttctgtccattgtctcttttattttggctgcacaaatctcgcttaatcaatggatgatgatccgtccgtcatcaattatcatatttattgttattcgtttctctttctcgatttgatgttctttatccatttttctttccttcttcactcaattttcattgaaattgtaaatgcactccgaaaaacaacaaatttataaaaatggaaatcgactattctttgactcgttagtttatgttttgagtggttgatgaacggtagcgaaatttctgtaccatgcaattcgcccctccccgctctaacaattctttatgaaaaaaacaccgtgaaaatctgaaaaccaaaatagttaggtaaattcaaactttggtttaataattaattactgtttgtgacgccccgaatttttttccataaattgaccctggcttacaattagtcagaaacgagatctgcttggtcattcttggttctaaactcaattctatgctgacttatccctgtgatttatatcaaatctaattcataaacaatagaaatttatttgctttaagtaataaatctgacaatgagattaatggggaatgtatccaatgtaaagcttaaagactctgaacagtcagagataaatggaaaaataaatctcatattttggggctaaatctcaaatttatgggcgaaatgccactccttccagtgacgaatcagcgtgagcccggcttggcaaatgtctaaaaaccaaatttgatcaacaatttttttagaaaaaaaaaattacatcgccacgaattttgcggaccaattgcatatcctttggcatgattgtcactcgaccggcatggattgcgcacaaattggtgtcctcaagcaacccaatcagataaagttcagccgcctcctgaaacaaatcattcggatgaaaacaaaaatgttggctctattgccgttgacacaatcataaaaaaacaaatttcatgcatcataactagggcgtgtaattatatggaaatccatatttttttcctggattattggaggcctgaaacacacgaaaaacatgtttttagcttgctttgaagcttctaggatgaatttctatatccattttttccatatttcgcgatttatgtctatatttcaatattttggcattttcgtccctattttatgtccatattttgggatttttccaaaaaacctctattagaacggcccccagcagctaaatttgcctttttgagcccaaaaaccggaaaattttacaaaaaattattttttcgctaaattttctcgagaatattgaataaattcaaattttcttagaaattaataaatttatggcaaatataagcaaaaaaacgaaaattttagctttcgtgttttttttcttctaaaatgattttaataccatatttagccatttttgaaggttttactttatatttaacaaatttaaagaacttttgggaaattataccctcaattggaaaaatttatgtccatatttttgccattttatgtccatattttgcgatttttggtccatattttatgaccatatttcgcaattttatatccatataattacacgccctaatcataactttttctagaagcttccaaattcaacgttcttggtatcattcgatagccccaagatntcctctattagtcttcaga

SEQ ID NO: 1388 - DNA, 3828 bp, Heterodera glycines
cttgcatgggcctgcaggttgagatgcaagttaaaaaattaaaattcgaaattcaccgcttttgaatttacattcaaattcaaaaacgaaatgccaaagaaaaaaaaatatttagttttcaaaaattttttaattgatgtttacggaacacgaaaatttgcattagacaatttgggtttataaattgttttggacataaatttgccaacattgccttcgtttttcctggggatgaacaccagcacaccgcgcgatgctccgacggcgcaagacgcacgaactttgcgccaaatggcgtcacttcgccggtccatgcgcagcactctgtccccaattgtggcggaagagggggagagagaaggtgggccttttttatcggacaatttgtcgcaatataattttttttaagtggggacttccgccgccgccgcaacccaacggcgttcaaccgacttggctcagtcgttgctccaacgacggtcagtgctcagccaatttggcagtgcccagtcgtcggtgtcttcctccgtcgggaggtgagaaataatgaaatattggtgaaccaaaaccttatcatgcattgtacatttaccagagttaagggtacttttggtttttggggaaaactatgtaaatatccatgtttttacggaactcattgtcagttacactccgtcaatgatggccagcaaaattgacaatcggcccgccattgtcatcgaaattggcactcgactgaccaggcaattttttcaaaaattccctttctaatcatgggccgtgaaatttatttttccttttgtccaggattggctttgccggtgattttttgccccaggagattttccgctccgaattcgttgacccattggacggtccgtccccgtcctccccaattgcactgtttgaccggtcgcgcactgagcaacagcagtacgaagtgctcgtcaaattcttcaaaaacatcgttttcgggtcgcccaaaagtgccaatttaactaaaaatctaaatttttctgacatttttgtggatttttaattaattttaaatgaatttaaaccgaattttcagcaaattgttgaccactatgagctcgcgtcgtgtggtggtggtcgaatcgcttttggtgtccaattggcaacggaatgccattgcccgtgccctcttccaatgcccttctctaagcgctcattccgtaattaaatatctgttgttgttgttgttgttgttgttgtttaaatatccgttgttgttgttgttgttgttgttgttgttgttgttgttgttgttttgtattatctttataaaattgcagattttgttcgctccgtcccatttgtgctgcacttttcccttcaacacaaaaacttgtctggtcattgacatgggtgctgacgaagccgtgctctttccggtcatttttttgtaaaaatttgtcgaaagcattcatcgacattccatcaaattaattttattctcgaagatagaaaattcaatgaaaaattttgaggaataaaaatcataattttttgactaattttatagtgttggaagaaaatttgctcggcatatgccatggaattctttagttgacgcccttttcttaggtagctgaaggggtgctgatgctgaacagtttggagaccagtgtggcgccctccgcgacggcgttggagcaaaatgtgcgtcgtttgatggcccaatttggccgtctgcggaccgggggttggcaaaaaatataaatccgaaatgtaagacaattaaattattcgaataacatttgacagccgaagacgatgcggagggacggccgctcactgagactgagttggaacaagcggaccgaatgcgactgtgggaggacgtggcggtgcgcttctgtttcgccacaacggccgcgcgcggaaaacgcattcagacgtattgtgcgtggggaccggtgaaatgattttcccttcattccaataacctggactgtttagtgaggggggggggtacgtgcccacttaaaaccattaaatttcccaattcgcttttttgagtggccaataccgattccgctgcttcttcgtctgccgattgttccgctgcgtttgacgcggcttcggctgcgccggcggtggagctccaatttggtgccgcccatctactgacagtgccgggcattgtgcgcgaggcggcggccgaagtgtttttcagcgccggcgacgaggaggacgtccgatcggtgacccaaatgattttggacagtgtggccaaagtgcgtttgtaccgataccgagtttcaattcctctttttggcgttcttctatcgactatagagcgacacccattcctctttatcagggataggatttattcaaaaaaaaaaaaccaataaagatagaaagcccttaagacgccttcttgaaatttaaaaagaatattttttgattaaaacaacaacaataacaagaattaaatttgctttcagtgactgcaaaataatttttagggaaaattcttaaacgagaaagcatttttggtttagacttttgccttaatttggcttttccatttgattttccccttttttaggccagcatcgatttgcgtcgtgatttcttgcgcaatttgctgttgattggcggtgtcacgcggttgcccggctttctcgctcgtcttaaggcaaacctgaaaaacaatgaggatgtcaacatttcccaaacggaaactttcgtttagtccgaattgctcggcgcaattgctgacggataccatccgaaattgtcgcggaaattgcacgacatcagtttctaccaattcccggccgaattcaagggccatttgttctgcgcatggcttggaggtgcggtgaatatacatatgcaagggtgtattcgttcgtcggccatatgacggacaatttacccaatgggtaagggaaaggaggaggcggcgcctaatttttctctgttctacattcgaacttttcggcacttctaagtggggggggggagaatccggcagcggtgcctatttgcgccaatgaggagggaaaatttttttaaagccaactgatttggtggagaaatcattgaatttcaggtgcaatgtttggtgcttttgaccacagcttggaccagcgttctctgacacgggacgaatggatggagacgaaaacggtgccggattgacagagagaaacaaaaagaggagagagtgacccttttgtgtattcgtcaaagcattatttatttattgtatgtgtttgtttgatttttgccatgcgtttacagcattaaaggccattcattatgcaaatctttttattactgatgcttttttgtcaattatttttttccgctaattacaacattcctttccttataaattttgatttgcaaaggaaattatgaaattctcgttcagaaaaaaatgctgtgtagatggaataaatgttttgtgacaaactgatgttgttggggatttcagtgcctaacaaataaggcagtgttatttcaattgtctatctatggagcccggacggggtcggcatcccgtcgggtttttcctttgattccggtcccagttttgaaggcctggatcggtattccggtaaactggaattcgaatccgggtaattctaccacggcctaatgtcaatcccgatcccggcgaattgtggtcgggatcctaattagagttgggaccgggaattttgggctaaaccgggtactttttgggttgaaaaaccgggacttttcccggtcaaaactggtaaaaaccgggacttcggtactcagttatacgtatttttcagtaccagctcccggtcccgtacaact

SEQ ID NO: 1389 - DNA, 1266 bp, Heterodera glycines
ggcggtttttggaaaaatctggattgaccggtgttctggattaccggattttgagagatcggacccggaaaccggtgatttttgaaaatgccaatccggtccggtccggcgagtttttgaccggttctttccggattatgaccaagccaaaatccttcacttttgttaatcttcctttgaaatatctcatttggcataatgttttattttttttttttttgataaaatccttttatcaattaaaaaattttctccggcggtgcatattgaaggtgcacttcatcccttccaaaaatctttaaaacttttcaatttttaattcttgaaattttgtttaaaaaatttctttttttgtttgaaaaatttaaaatttaaattctctgattactcgttgtttgtctaattctctctcaatcgtaaagtgtttttctgttttacatttttatgcatgttacaactcagtaatggattctcgcatgatttcaattgaataattatttaattatgtggcattattattcgattttttcacaccgcctcatcgccatttttccgtcatttcacattttaatgtccaaaataaaaatattttttcaatttttgtagtgaataatgcctgtcatatacttcgacgacgtgcttccgagggagccgatgtggctcatccaattggtacatccgttttatttcttcttttatttacactgttttgtccggttttcagcccttctacatcacttcctttcttgtgctgctcgtgtttatgctctgccctggcaatatgtttctctatactcttatcagtgcgttttgaggagagagtgccgtttttgtgcagcctctgctaactaatcgctttcctttgtttaagctgtggcctacccaatgtacgcgagcttgttgaccctcaacactcaaaacacatgtgggttttctgctgtgctttccctccgagtacaaagccaattccccaatttccagcggaatacacccagtggctcgtttattggtgcgtgttcgccgtgttgggccagttggactttctctttggctctatcaatggctgccttctgctgctgtacgtgcctttgaagaccgtctttctgctctccttggcctttccgcaaatttatggcgctcacaacatgtacgtgaagccggacgtattggacaagatgaagaagatgttgtgatcgaggagacaacgtatcactgtgtaatgtctgtaggatgattctttgttgtgattcctatattgtgtgtatg

SEQ ID NO: 1390 - DNA, 1063 bp, Heterodera glycines
  unsure (1)..(1063): unsure at all n locations
gcattttattatgttctaaactatgggtataattanaactattaaagaaaattttgtaattaatgcttttatatttatttttcattttttaattcattaatatatttttctttaagtatttgaataaaattaataattttttaaatttattagtcctatattaaagttactaatgcattttattatgttctaaacttatggtataattaaaactattaaagaaaatttaattttaaaagataaaaattaaatttaattatacaaaatatatagttaaatatttttattgttaaattatagtatttatttaaatttgttttaatgtttattttttaaaatcatcttttctttattcgcgttctgtcagttcatactttcattaaaaatgataataccttcggcgaattttccatatgatttatatttatctataattttttttattaataaaataaatttaatacatatttcgattatatttacatttgtttaaattctgtttccataaaaaatgtagatgacatccttcagaactgactttgaatgggaaattattaaaataaaattttttatattaaaattttcatagaataattacctgctgcataatcatttaattcattttgttacatttaaatattatttttgagaaataaattattttttgttttatttagttgatataatctagcatattctttcttggttgtttgctgttttttatgattaatattagtatattcttgatcattcaaataattttataaactatttgttcatataatctttatttattttattaaatttacaattttggcgttagtcggtcataaaattaacttaattttctttttctaatcgcttctatgctaattttaattattttaaaattaacgcttttgtagatctgtttctatcccgtaaggttttaaaatcagtttattgatagtttcaataaaaaataatcataaaatgagaaactaataagggctaatttaatttaattacaaattagtatttgttatatttatttataagaaattaattaatgtatattttattt

SEQ ID NO: 1391 - DNA, 2826 bp, Heterodera glycines
tgcactgtgtattttcttttatatatataaaatcatattatgtatttgtactttttataaagtcatatgaaatccttatcattactaaaggtaagaaattatatttatacttactcaaattaaaatattaacctatatttcctttaaattctaatagattttgattgatttggttaaataatttattattttagaatttttaaagaattatttaaattaatagtataaataattcttaattttaaattaataattattttcgttctgtttttcttattataaaaataaaaatgagtatcgaattgcggaattctatttaaataattttcattgattaaatcttaagtaattatgagtattttaaaaatattttcaataggttcatcataaaattataattttaataatcatttaattaatgtaaatgcttaataatggaaagcgccgatggagaaatttcaaaattttaccatatttcttaacagattgaacaacaaaaaggctaatataaggttttttgctcaaattaaaaaaaattcgattttgagtccattggtgccgataacaggcttataaataattgtttgccattaataacttacttttttattaatttttggttttgtcttcaataaaattccttaaatttattaaatttatttaccatttcaattttttaatcatgaattttataaaagaagttaacttttatattcactgtttttcgatcaagaaagttgcgagtaagaaatttcagggagcaggaccgtgaatccgtaaaaatagtgtctcccgtaaaaattctctgggctaaaagtatgaaatcgtgagcgagattcacgaaaaattgcagcgggaatcttgaaaactcgccggactctctttattttttcccaaaatttatttattaatgttgcttattagttttctatgtttagatcatttaaatttaagtttttttattatggatgccttttctagagcttatgaagttcgatttttcgatataaaaaaacttaaatttgtttattttttattcatttttgtgttttctattcattttccttatggtttttgcattaagattttcgattatgtgcatttttcattttagatttcaagatttttacaaatattttaatgtttattttaattttaaaaatttatatttttaatttttcttgttctcatactccgtacgtcatacgttaatatgcgcaaagaaataggattagtatttttatttaactattttcataattaataaataatcgaaagttcgtataattctttgttatgtgtttatttgttaagattatattaatattttattttcttgtatttttcaattaaaatacttttttcgttaggttgtcgttaatttttcaatgttaaaaatgatttaaattttatctttaataaatttgataaaatataagacgaataattactgcgtttaaattgtacatgaagcgcaataaaaaaacaaatttttttgaaatattacttatttgttttgattaatttatcaattttataattactgaattaaaattaaaattatcatacaaagctcagaccaaaagtttcaaaaagctggatatttgacatgaaatgaaacaaaaataaaataaaaacaaagatatcgctttaagtaaaaaaattatataaaaataaataaatattaataattttttttgaaatagaatttccaaaaaccatgcatggaattttgataatttttttttgactgctgctgcagataatttcgaaccatgcttgggttttttcaaatttttattgcagatcattatcgaaccacgcgtgggataattttggattttttttgattcccagggggttgctggtgcctgatcaggactctaaaattgattggcgacttgcacaacacaaagacatcccctgaaaagtcggtctaccactcgaatccccctcttcccatggcccaagccctgtaagcatagggttggaaccatccggtgctaccagtaaagccgtgaggtcccgctacccagtgcttatgagggaaatagtccagaggagccctcttacgcgtccgtaattaggccccgcagggcttggaagggaagggatgttgatggatgcctgggggcgcatcccaggcggggatcgattggccattccactgaatgactcccgactgaactccgattgacccctttggctggttatccattgccttttaagcgcccctcgggatgggaggagccctatcggagagataaaatggggggggggaagagggtaaaggccatttccggtcccggccttacacctccggccctccaaaagaccgtccctggtcgttaaaatgtaaataatttccaaatttgaatgaagtcctcagactttttctttctttttcattttttaattaacaaaaaaaaacttactttttacttttaataatactaagatttaaatttaattacggtaatttaaagacattgaaaaaatatttttttcaactttttataaaataatatcaaaaaattaattttaagttaatgtgttaaaaataaaggcaattaaagtcttatttaaccgagttttcggttccagaacaagtgaaaaaacaaccttctacgagagattaagacaataaaaattaatcataaaacaaccataaaaaaaattgttgactaagaaatatcgcagtgaaaagatttttatgagaattaaatgaaaaaatccaaaaaaatataattatattattaaattgacaataaatataatattcttcaatacaataaattttaaataaaatcgcatttataaatgaag

SEQ ID NO: 1392 - DNA, 4022 bp, Heterodera glycines
ccgaaaagcccaggcaagattaaaaataatgggaaaaacaattttggttttttatttaagaaaagcctatttcgtgaagaggagcactgcttagtttggtaagctaataatataaattgtaaaaattaggcacaccagtccagggatggtcccaggcggggggaggggtggcggggtacgtaccagggatggcccaaatcgaaaaaaaatgcgaaacgtgaaattcgcaaaagcaaaaaatgcgaaataaaataaatgcgagaagcgaaattcctctaaattgcaaaacgcgaatgcgaagaaagcctatccatggtacgtcctacgtacccccccctcccccccaggccccaggaaccaaggtgccgacatttttcttatttccaaaactaaaaaattcttaaattctttttgacacattgtcagattttgccatttgttcctccgaatttgtgccgatatgtttcgacatgtgtcaatgtttcttgtggtcgcgtgcttgacttgctggacacgccattcttatgaaaattgtaagtgacaaatttaaattataaacaaaaataaaccataattttgaaaatttaagcaaaatttcttaattgattttatcaaaattaaccagaaagtccaactgatctgaaaataaattttttttttcttgtttgatgttttagcgataatcaataaaaataggtagaaatgcacgaaaaaaattgtgctacgttgaaacttgagaagaatcgtagtatatagcgaatattaatatttttaggtggattcggaccaactgcaggcactgaaagaactgcaaagccaaattgcatcggaattcgaagccgtgggcaaaaaaattgattacctcgttgtccaacgagagtacactgagtccatgcgagaatatggaagggtgggtttgcgtacataaaaaaatagttaaaattagggtagcacggtaccgatacttttgacgaaaaccggtaccgatactagccggtactggaaaacccgagaccggtaccggtacttaggttttcaaccgataccgataccggtaaccggtactaaccggtacttttttgaggtaaaaatttttgaaaaaaattgtaaatttataagcaagaatattttaataacaaatcatttttcttcttcaatcacttccaaattatccgagtctaacatttcttgctcctcttcatccggctccgtagacggtgccaagaacactcgatccatattggccttgataagcaaaagattttcggccatttctgcacctaggctaaaataaaaatttacaaaataaattgtgattttatactccaaataccgatttcttaatttgttgctgtaaattagtcctgcctttgagaataatctttccgaagaaacagaagtggcaggaattgaatggacaatccgagccaaaataattaagtcaggaaattgattgccgatttctctccaccaagtaaaaagatcagcgttgactgacggccgatcaaatgccttgtatgcagctaactgtagctgaatgcgcgtcgtttgtgtcgaatgcgaagttcctgaaattgtagacggaactgaaacacatccgggcgattttggcttccaaatgtcgtctaaaaataaaggactaattaaccaacaataaccataaccattataaattttacattttatgctttcatcactttgttctccattgaagtctgacaaagactcaagatcactcaatgtcgtctcattctgctcttcaaaatttgtggtgtcttcattgttaactgtaaaatgttattttaaatatttttgaaaaaatccatcatttacttttcccatttgcaaaatcaattaagtcttcttcaataagattccaatttgcttttgaaaacatagattcatcataagcaaaacgcgggtccattagagaacaaatacgaattaacatattctggaccaatttcttcaccctttcatttaatgagtccaccaaactgtcgataaacggttgaataatttctggaaattttccctcttgcaaaaaaacatgaagtcgtttaagagtcggcaaaatcactgacgccgttgacacctcgcgcgacagctgaaattcattagttattggatataattgcttatttgctgatctcgcccactttttgtgtctcggtatcaaatatctttagtacaggacaaatgtggcgcaaaatttcaaaatcatttggtgcaatggtgggcaatgaagcaggtattgtttccatctctgccaggcgaggccgctttgacaagcacaaaagtccggcatttcgttggtcacgttcaaattgcattgagaacagaacttttttctgctctttgaaggcagcaagcatgtgataagtggaattccaacgggtgggaaccgacttaaaatttgtaaagttatgatgttttttttattgtattaccaaaataagttgttttttgggcatgttcaatttgtcttggtgtcgctcaagacattttcttatctttgcttttcgcactccttcgtccattctttcgtcttgaaaataatttctgaaaggcactctgtcttcattgcatcactgacaaccaaattgagaaaatgtgcacaacattgaaaactaaagatttcatccatttatcactgatttccttggcatacctctccttttccaactgtctgatggcagattgcatattcttcgcatcatcacgcacacaacacgccattttgttcaatgtcaatccattttgattcaaacatagtgcaattttctccgagatcagttcaccagtgaacaaaattttccatggaaaaggcagcgagtacggcatcgtggcgagagaaacttttatcaatccaatgaacagtgacactgaaattacaattaaaatgattaaacattattaaaaaataattatcaacctttgtaattgtggtgacagtgtcggcttagaccaaccgtcactcgtaattgcataatgatcagatccaactcccgattgaattaaacaacggatttgatcggacatcctgggaatcacttttcggcgaaaatgttctcgtgcaccaagatccttcaaaaataaattcacaatgtataagatatattatgatgtacaatgttcggatgtgctttttgaaacaaatcctttaagtctgggtcatagaaaaaatagaatgaattgttttgccggaccattattcgcacgatgcgttcttcagcaatttccgtctcattcttttttgtcaccaaaaaagattgtatttgcttttgtttctaaaaattagtctatattacaataaaaatcacaataaaccttatcctcccccatttgccctaaattttctgtgttttttaacacagaaaattccttttgatgctttgcttccaaatgtttccacattcctgtagtagagccgtcacttcgggtgactttttttgcgcagattttgcaagttgcaccagtcaaatttttgttgtaatgtttccaaatatcagcattttaatcaattaattctaaatgaaaaaaagtagatggaaattaaaaaatgaaagaaataaatgaggtggacaattgcttgacacacaacccactgactgtaaaatttggcgaaatgttattcaaaatacaaatattttcccatttcccaaccttctctctttcttttgttctcagaactccattcttaccagtgcatatttagtaccggttagtaccggtaccgccgatactcaaaaaccgggaccgagacttgacttttttcaaaaaccgggaccgagaccggtaccggtacctgaaaaaaccggtaattaccggatcggtatcggtaccggtctcggtctcgtgctaccctaatttaaagcataattttctcaatcaattttaatgtttaaagttaatgtagtattcagaattaaaacttccattccaattacattttaaataaaattcaacattaggtaattatcaacaaattttactaaaactataaataaacgcaaatgaca

SEQ ID NO: 1393 - DNA, 932 bp, Heterodera glycines
gtgccacccgccggcacccaatagtcccatttcatttttaaattgagtcaaaaaccgtgaatactctaagaattataaaaatttacaaaatatattggtcaaaaagttttttatatttatttatcgaaaggggttggttagtctctagcaattctgtcaattgattaattttgtatttaaccgaaaattgtgaagaaaaaatttttggaattaaaaaaaatttttgaaaaaaattcggcttagaaaatactagggtcgcgacttttagtgacgaaaaatctcgaaatagttaactaaaatagtgagtaaaaaggccaaaatagcgacgaatagtgacataattttcagccaaaaattgagcaaaaataattttattcactgattgcagttgaaaatgaagtaaatttcctttctaataatttcttggcaaatattgacattttaaaccaaaaattttgtcaagaaaaaaaatttggggaaaaatttttatgaaaattttccaattcttagtggaattttttgaaaaattttttaggtcaattcttaggggtgtattttttgaaaattttttaaggtcgattcttaggggtgtattttttggttttattgcaattttgttaaggaattttccaaaaaatgtcgaaatagtgacaaaacgccaaaatagtgatttctagtgaccgatagtgacaacataatcgaaaaatttcaacgcagaaatgcgttttttaagctcttttcttcaaatcaattgagcaaaaaatttagttaacccctaaaaatcgcgaccctaatcattacaattaattaaatttccaaaattcatatttttaagacttaagcaaaatatcattttttcttcatattgactcaattttgttcattcatactttgaagcgatacaagcaattgatcaccggacttttcgacag

SEQ ID NO: 1394 - DNA, 1207 bp, Heterodera glycines
catcagcaaaagggtgacgagcacgggaaggacaacgaaagggtgcggatgtttggcaatgaagaagccgtacctgtgagtcggtggtgttcggcaaattcggattaggtatggtaattgaaaagccgtaattacggttttcagtttcactaatttttaattaaaaaatattttaaaaaacacatagccacaaaaattggatgtgagccaggaaaataaaagctcatttttaaaagtcagagaaagcgtggcgatcacatcggttaagtgatcaatcacagtcaaactgatggacagacaaagaaaaagaggtgaaatggaaatgatagacagttcaaaccaattaaaaatgatcaacagataattaagataataaatattttaatgaagcaaaagcaccgcaccggaaaaaccaccgtgccaataaatcctgcagggcgccaaatgggttgatcagctggcggttgacgaacaaatcttttggcattttattttgacgaaattaaattattcagccaattaattaattattgtaaaacgccctaacaaaaaaaaagacaataaaattggagttgcaatttgtgatttatcatctgtcaaatgcgctgtttttgatttcttctccaattctcatccaatttaaaaaagagaacggacaaataaatgttttgcgatgacattttttgtctttgggcagcaaaaaagcggatttcggatcggaagagtgatcttgcggcgcggatggaacactttaggaatggattataatattcttcgtcttcttcgccactgtcttcgtccgtccattcgtgttctttcctctccaattgggtggtggtgagggggggggagaaatcggtgggcgatgtgtccggatgtttgcgaatgtgcgcagttcaactcagctcagcaactgcttgctgacgatgatgatgatgatgtgaataattgatgaatttggaggagggccttggcggatttgggattggatgagtaaaaagtgggcaaaaaatagggagatgggaaaagggggggaagcaaaaagggaaggacgcgagagggatgaagcataagggggataaagaaagcagggggaggggaagaaagacgggtcggaagattggctggggatggactttttgttatgaccccgacaaaaatgaaagttgcaattttaaaataaaaattaattatttgaaaaagattt

SEQ ID NO: 1395 - DNA, 1993 bp, Heterodera glycines
  unsure (1)..(1993): unsure at all n locations
gtgctgatcagtactgagttgtctgttctgttggttacacgtcgggtggggcgataagttgggcgagtgatgcttttgttggggggggggaggggcaaagggacccctcggatcgattgccgcttctcatttcgcttcccggcggcgattgcccccgggttcggtcgcattacgcgcccggaggagtccgcgatgaccgtgggattagcggaagtcattgggctcgatcgataattgcttgttcgcttattcggcggaggggggggggagatgcggggaaagctgaccattcattcattttgcaaaaaaaaagtantggaaaaatggcggagaatttgttgaattccttaggaataatttatttttagcattatttaaaaagcggaatgaaccgcccttaaacaaaaaaaggaagaatttcattatcatttaatcgtttctcaagagtaatttttacaattaaatgatttgatttttcaataactttataaataacccaaaatattcattaatataatttagcacaaattcagtacataaaatgtctttaaattgcattagcacacaatgttcccccaattttaatcacaatacattgggaaaatgttggcatttttcgaattgttgcctcgggcgacaaaagtgccgaaaaggtgagaagaatgcttttccttctccttccgctgcttttcttttgcttttgctttcctccgctgtttttgacccctttccatcgccaagggcaccttttctgttcagccgatgcgggcgaaatccgtgctgacaatgcgcggcgatcattgagtgcgtttttttcgttcggatttgggagtgtttcagattttccggaaccccaaactgtcgaaggaaagtgaaagtgaaattgtaaatattttattattctccgattcaaacattgcctctgacatgagagagttcatttaatagaaaattcaaaaagatgaaccaacgaaaattagaaggaattaacaaaaattgtctttatttttaatgaattaaatgcttaaatacgattttttttaaagtatgggttttccaaaaaaattcagaaaacataacccagaaataactcaggcggccaagtgcctgggcctgagttcaggaaaaactcaaggcctggtccctggcctagggtgagctctaagattgttttctgctgtttgtttccttcttttgtgttcttgaattgcatcattgttatcggagttgtgatttttgccacttttttatgcattagctaaccgacaacaaacacataaaaaatgccccgagcgacggtttttcgctgttttgtgacctcagtcgccccccccccctgcccattaattgcaccctccagcggagttcattcattcggcttttgcttccgtcatcgtcctatctcagaaattgccactgccacggccaattttcttcggggagtgacggggtttactcgggtaattttgttgaatttttctttttgaaaaacacattataaaggaaatttgtataaaaaatggttaatttattttataaatacaccaacatagctaaataattgttagcattagcaagtaaaaatggaaaaacattgtaacatattcaaatattacccatgagcgaagacgaacccttcacacatttccctttttggacaatcgatgttattcatcttttccatattcccccgttcatcatttcattcactatttctcttttctctaactctcgcaaatccccgccccttttcggaaaagatgatagtcggaagtcggagcgatcaaaatacaaattaattatttatttattaattcatttatttattcacatatttcgcgcattataatccgacaataaagagccatacaaacgattggaccctttggacttcatggggatcagggcccgattcctaagattaagacctttcagtcctgggacaatccgtctcctcccatcccactctggcatggatcctcacgtcttacta

SEQ ID NO: 1396 - DNA, 2705 bp, Heterodera glycines
  unsure (1)..(2705): unsure at all n locations
gcgcatgtgcttaagttgctcctcaagccctggggcgctttttgccctccttcttgagggctcatttctcttttcctctttatccgcggatattggtcccccataacggagggacaaaggaacagaagaataagagatgagggagaggggggtgcgaggggagtgggaatcatctctggagtggcgcccggccgacattcgagactctcagagtcgtcacttttacttctttaccttcgtgggaatgccgagcggacaatgaagccgatggcttactcaatttgtggcccaaatgccaaaatctaatttcgacaaaatcgcattaacgaattatcctccattcctttgcattgttttaagtaaaagtgaatgaatccaaatttggcattaccatttttagcggcttattaatttgtttggatgtaaaatccttgggccaaaaagggacaaagccgcgctattctctttttagttttgataaacttaattgcctagttaaaatatacttcatttttagtttttataattttaattcactaataaatcatttggttttctttgtccgtcggttatatttttcccatttccccgaattgttttggaaaaattttgcctcgggggtaaaggcggtaaaagtttgtctttggcatggcccgaaatggaaggggacaaagccaatctccggtttggtggtcatgttccattttcgtcaaaattcagcacaaattcgattccgaggaagtcggcgaggcgaacaaactgctgcagtgcaaatgcgatggcatttttggtcgtaaaacattaatggaaattgtgccaacttttgcggacgtaaaaattcgttgtttttttatgatgagatggaaatgaaaaaattaagcttaaagctatacgattcaatactttttctaattaattatgttttttttgtgaattgttgcatcattttttaaaacccaaaatggaaaaaggccccattaattcgcttaatggcacccgcccaaattggcattccgctaacaaatagtgccaaattcattcctttcccatgccgtcgttgtacattttgctgacgtcaccaaaggggcgaccaatgcccgaggcattcattaggcatatttaaattgttggagaaatgcacacaaagattttttttatctccttctgcaaacaaacgttggacaaagaaagccgaagcattattacacatttttttcattccttggccaaattattcgctaaaattctttcccttaattaaaatttttattttttccatttttcctcattaattcaaatggcacattcgcttattacttattgttatcgtctctttttcttccttctcatttttccaattcttttgcttattcaaaaaatgaaattgtcatccgcctttttaattgctcattttgtcaaagtacggcacaattattttgcagaaaatccattttttcgcggaattattgggattcttttttaaaatatgtatttaaaagtgcctttgactcctcccccacctctgaattccgtttgtttttcccgacaatcccttcgcccttttcgtcaatgttttatgccatcgcccggcacctccccggaggggataattgttgtctcgcatttccgtcacgctccccttcccccttaacccccccccccccctccccgccacacttggccccattaatctttcattcaccgagggccaattcgtcgccatgccgggataaagcaatgaataacccccgcccctccccctccccctctgccccaacaaacacacaattggtggcatttcagggcattgggggaacgaacaccgcccgccatttaatccccggcaaactgtgcttctccaaaggaaggtttattataaaaatggcacaatcacttaaaaaaacactccatcatttctaaagaatctaattgggtaaaaaatggagacatttgtatttgaaaagttgcgtttttatctgaaaaatgtagatttaaaaaaatcccaaaatgggcgcttcttcttcgacagccgctggtataaacggaaaagaacggcggaaaagtacggaagaaagcggtgcggcacttttggaagcagacaaaagggcgcgaaggtgagcagagaaagggacagatcatttatttatgaatcaatttcagattacttcttcaaaacgggctccttcgacgcaaatcaaaggctggcaacaacaccatggcggaggacgaggcgggaggaaacagctggcagacgaaagcccattccatgtacgatctgcagcagatgcgcggaaaatcggcggaagccgaagagcagctgcaaaagggggacgacgctgcggggcacgaggcgacggaacgccaaaatggggcggggagcacaaatggcaaaaagcatcggttgaacaaaatcgtcataaggtgccaaaccaaaagccaattagctttttggtgtccgcttataatgagtgactgctcaanctttggtttagtctcagcaaatcacttggctgagccggtttctccgtccnaagtccgtctccatcgacccccccctcgccgtccccttcgccccggtagcggcacttcgccccangcaggaaaatgcggcttcatccgccgncgttgcagtcgcaaaaaagtgcngtcacagcgacggcggccgctgacatgggcatgggatccgcgggcacgacgtcaacctt

SEQ ID NO: 1397 - DNA, 2306 bp, Heterodera glycines
attttgccaattttcccgtctttttcagccgactctctgccgaagggcacggcggctgtcagcgccaaaacagtgccaacgcggccaattcggccgaatgttcgaccaccaacggtggcccaccgttgggccgtcgctgctcgcatcaggcaaatgccaccacagcgacaggacaactgagcaacggggggagacaaaaagcgggtgccaatcgccggtcggacgcggggttcgcggcaaatgccaatttgaacccaatcagtgccaacgggcgcgagatcatccaattctgttttgacaacccgcacaacgaaattggtaaaacggagagagatggacaaaagcataattatgagaattgtgtaaattgtaaaattaaataatattaatggcgataattttcaaatttccaggcagtcgaatttgctcgagactgctcgagaaacggaccgattttcggcaattcgtcttctcaatgggcaaggaacgatggcaacaaatgaccggcagactgaaggaatttttggagtcagtggtacgaaaggtgagaagacgcgaattctgcaaattaaatccaacaattgcttaatctcaggtggacaacatcgaaatggtcgaacgtttgtcgcgcaaatacggcgaggagcacgtacagctcaaatgctttggcttcaagccggacttttgggtgagtctggcggacgcaatggtaagcggataaattgggaaggcttttcaagcccattttaattcactgcttttaagactgtcgaatgcgtcattttggaccaagccacgcatcaggtgaacaccaaaagttgacaaaacaaaacaaaaaatgggggggggagggaatttgtggcatttaacaccaagaaaagagatagtaagagaagggtgggactgatgtgccatctcaacatttggggccagaaagtggaacatttcgcttcatccctggtagtgaaaacaaaacgaagaaaagagacccatttggcccatactctcgaatatcgcctgacatcaaaaatgccctttttggaaatcaattttgaacactcatattctctgttcatttggccgatttgcttagccttcggacacgatcactgcttggtctctgctcgtctccgttatgttcagctccgtccgggacggctattaccaggcattgcgcgctgctcgcatctcgcaaaggcatcgcaatgtgcagcagcgcgaaaacactcacaatttgggcaccaaccaaacaccaaattccccctcgggggtaacatttagtgcactatttatccattatttttttctgttaaaaatgcaaacatttgcccttccgccacaggtcgaaaagagtgcgtcagccatcgaattgcagtcgcccgagcggaaaacttccggcaacaacaaacaaaacacattgaggcaacagatggagcagaagcgggagaagtcggcttcgccaaatggggcgagcggagtcattgtggaagaggtgggcaggcaattagcaattaattgcgcattcattaccaagccaatgctatctcattcattaagaagtcaattccggttcaattcttctgaagaacatttggattcaaacatacattttgacagcttttaaagtgcacgaaaattgggcacaaaaaggcaaaatataaaatgccaaaatttactttgataaaatggaaatgctattgctcgctttttggcactttttcgatattttttggattcctttggccaattagtgccgcccaatttgcgtgacatccctttgaagtgcgtgattgaacctttgttttgatctctgttcctaattattctgattatgtccattcatttatattttttcgtcattcaatcatcgcattaattaagattaattgatcatcatcactttccaatattttattgtctaaaataaaaaaattttatatggcaataatttatttgttaacgagtcatttattactacattagtggaaaaaaccaataataaatatatgtatgcaagtgtttaattaagcctacacccaacccgattaggaaaacaaaaatatgtattcgataattgccattttattattgaatataaaagacattaaattctttggctttcatttgtttcataaaattattcgaccgacgaaaagataataacaacatatttgagggctattaattaaggacaccttggtgattaatgagaaaacatggagatcaattagacttatgggaatatgttgaaaagaacagaataaaaagaagcgggggcattaattaattaattagtaattaattga

SEQ ID NO: 1398 - DNA, 5169 bp, Heterodera glycines
  unsure (1)..(5169): unsure at all n locations
attttgctgcttatgtgaacccggaatgctgtagggtatgcaccacaaacggactgtttggcattgtgccaacattgtccgtcatgtcaatgtcgtcgttacagctgtcctccgactgcttccgatcggcccccggcggttgagccaccagcggggaactgtcggtggtgcccgacctgcgcagcagcgcgtgcagcagagaaccctgcgaaaaattggctttgattacaccgtaattgtatatttttgagagggtaaataggttattgtagtttttattgttagggtttgaatttattgggggtactatattcaaatatttttgcaaattgttttggggagatttgcacaagggtaaccgagtgccattaatctgagaaactgctcaaaaactcaaatatgtgccagattttacttcttatcgcctgtatgcaaaaagctagggattactgtaagagtcaggtgcaaaattaatgggattgtgtatactgtattatacagggagagatcaaacaatgtgcactgtattcaaatacctgccaatggcactgaaatgtctgattggtcctaacaaaataaataaagaaatgatgattgaaagataacgaatttaaaatgttttttttatctgcagtgttccccctaaaggattttcccaatttttacacacttttgaagttttgcgtgacgcggcctgatgaatgccgtccaaactgcctctgctgaccatcgaacaagcggatttccgacggaatctgagaataaacaatgatcaattaagcacacaatttactaatcattagggaaaaaccttcagtgacgaaaaatctcaaaaatatttaacattaattattaatggaaagtcaatggagtcaattttagcgatgaaaatgccagattagtgctttagtagagaccggacaattggttcgatcggttttttcgatacaaggtcgtaaaaagagcggaatcgaaaaagagcatcggttttttcgaccttttttcaaaatcaaaaattattttatgtatttataaaatcaaattttcaaggcatttttgcagcgataattcgcaaatcatcagtgtcagatttggctcatggggctgttgagtaagcatcgatttcatttattgttttggacatttctatgccatgttcaaaattgatgattgcttttggtgtacctgtagtgtcccctgggcaactccaacactccgccatttggcatatggctgtggtggttgtggtattggtaatgcgcggcggtgacgcacggatatatcggcacggaggaggtgggcggtcgcggcatgccattgttcgtgtcgacggagtcgccgctgaccaacggcctctttttgcccggggggcattcctcgtcagtggtcgcctcttcgatgggaagccatggctcaacggaatgcggttcggtgacgtcgaaaagatcataattgacctgacaattgggaagaatatttaatttgtataaatgaataaaatgattttttaattaaattaaaattttaaagcggtccaaggcttttccgacctcgaattgattggatgtcgaattcagcgtgatcattggcacaaaacgccggccccacaaaatatcttccggcaaaaagctcgtccgtgcctgaaatgccatcccagtggcctctacattccttccaaggtcatgatcagttncaatggncacgaattcagcttgtcctccgtgatctcccacaacggcgagtcggggtcgatgatatgacggattacgacgggcctttatttaaattcagataattttgaaaatggatttatattttttaatttgcccaccacagtaaaagcaccctgtccatgcccgtgtcgtagccaacgttcatgtcctggacaccgatcaattcgcattcaccacgctaaaaggttattactagttaatttcagtcattaattcaatgagtttgtttctcgaataaacaactttgttgatttttgttgtggccatatacaaacgaacgtgggactcggcaatataaaggcgatgctgaatatcggctagccgaatcctataattaaaaagataaaacttttttgaaataaatattttccgctttgtcatacattagtgccggccgtgggtcctcgtcgtccaccggaccgatcacggcttgcacgctaaaccgcatttcctgcttgcgcttcttaggccgcaaaactttggccgtcacaatgccagcctaattgattgattttttgcaaattatcgaatactttattgattttgttataaattctgaccagcaaggtttgtagcagtacgccgaaaatgcactgaagggacagcacagcgtatgccaatggacaaccctcggtcatgtatcgggtaccgtagcctatcgtatgctgagtttcaaggctgaacatttaatgaaatgatctgctaattatttgagccaaaaatcacctgaataaaaaggcactggcgaatgattgaacgttggcaatgcattgattttcttcgggcaatccctgcgaaatttctgatcaaattcaaacgctaaatgtttttttaaatttattactgacttgatactcaaccaaaaattggacgatcagaaaatagaagaggccaaaagtgagccatgagcacagaaagccacaggcgaacagaccgaaaatgcgacgccacgaatgttcaatgatcaaatggaaccagttgcgcatactgtaacggggaagagggtacggtaggggggaggaagaaatactgtagaagaagcaaacaataattctgaacaaatcaccgaccaaattgtgtacgaattgcgtaggttgtttggtcgaatgatgcattcgccgtttttggccacaagccgaggccattgcttaggtgccaatttggccatgcttgcggtgctgttcctcggttttttggaaggccgtcggttggggtggggcaccggtaaccgcgtaaatcctttctaaaattggctttaataaatcctttttgtggaattggaatgtttgtaattttggacatgttttttgctttgttcacctccatttcgttcatggcacagttcaacaccatgccgtcctgctgctgctttttcggctgatggctgttgtagttgtgcaccatttggttctgtcccgtgttgcagttgttgttgttgtttggggttgtgtttttcgcacaatttgccagtgccgttgtcgtcgtcgcccgtggggacgacgccagcagcacttccgcttcactttcggcacaattttccctcattctgtgcagcaacagcagcagcaactcgtgagcagcgaccgcaagcggacgaaggcccaacagtttagacgcgtgacggtaggtgagtacggtggcagggcgcgaggggtttgctgtgggaagggaggtaccgtagtggtacgagattcagcggagagaaatggtaaaggcgggggaatactgtgagcaaggaaaatgccgctgaaataaaaaattttatggaaatggtaattaaaatataaaaattgtaacatttgatggcatttaatgagtatttattgctttattatcgcgtttaatgaggccataaattactttaaaaaaatccgtcatatgacactgattagttatgaatgattatgattgatcattacacattcattggaccatcgcctgcagaaggaaaggggaggggagcagcaaattgaaatggacgttaatttcatgcaaaaagcgggcaaatgtttgaaataaagaaatgaaataataacaattaatcaattaataagcaaaggaccggcagaaaaattaaaaaaataaataatttctttaaaattttgtttaatcaattttaggtctcttatttaattcatttgaaaatgggcctttttctaaccatcgtgacaaattaagaaggtattgagcttgtaaaacaagaaatattcaattatttatttcaatagataaagcgtcaaattaggcaaaaataataaaagtacaaaattggggtttggcatggagctgtgaattcaaatagaaaaagcaatgtacatataataaaatgaaaaattattattttagccaaaaaaaggtaacgaaaaataaatcaaattccaagcaaattatgcgacgaataagttgtgccggctgttgtttgattttccaatttttaatgacaaaatgtatgcaaattaattaatttatttactaattacgccgttacgctggaagggattcgccaaagcgacggtcggttcataacaaagggtccgtcgtctgttcgtttcgccgtttttttttttttttgtcgatttttggtctctttttctttagccaattgttttgtgttgcctttgtccgtacgtgcaaaaagtgtatggaatggcaacgaaaaagagaacagttttgccgttttgtgcgtcaggacaaatgccaacggatgacggacattggcacagaaaagcgcccgcgggggacggattatccgggccaaataatcgccaattgaacggacggacgaatggatgaatgaatgcactgtctgagtgcccttctccccaacggcaaatgattgcgcaaaaattagcacgactattatcacaataatgggcaataaatgtgatgggaggaggcaaatttgaaatgttgaaaatgatcataaaaacaaatttttatgaactgaataaaattttgaaaatagaaatttaaggacaattgcaggaaagataaaataattaaaaaagtaaatgcattttaatggacaattaatctcttttgaatcgcataaatttgtttactctttttctgcttcctgtaattacctcatcaatacttcattaagcaaagtgacagtgattagtaaaggccatttgtcaacggtttttgtcccccataaactttagcaagaatttgttggtacaattcttgccatagtctttgagtacaaaaaatagatagataattttttgaaaatgcaattttatgccataaatgcgttgggttggccgattatcggccgccgttctttggcggtgcggtggggggggcagaggggttggggggcgttcgtcgccgttttggccgcgttttgtgccggacccttcagaggggccgctgcttcagctgtaccttgacaaccgcaaaacggaagccgancactgaaagataccca

SEQ ID NO: 1399 - DNA, 1773 bp, Heterodera glycines
gcggcggagcagagaattcgcttctccagaggcatccatccactcactccttcgactcaatttctcatactcatttcgctaaacgtcgattcaaaattggcaaaaatcgaacattttttcattgggtggcattcgatgaacggcaaaaaaaaaatcggacggagagtttaatcgataatcgggggagaagaagaagtccaacttgagaaaaagtatgacatgaaattattaattaaagggatgaaaaaattctttgaaaagttattaaatatatttaacattgaattgaaaataccgaccaaaaatgaattgaattatattcaatcgaaattcgttcaatttttataattgataaataatggtttaaaatgcaataaaaaagattgattgtgcgctatttaattttgagttttacgccataattttcgcaaattttctagcattgattcagtaaaaacattggcgctaaattcgcataaatttgttggacttttcgccttttggtgagtggcggcttttcgtttaacagagttgtgtcttttccttttcttttctcctttttttgcgcaccaatttgaataagtacacactttgccaagaaaaggcgacccccgcggggcaaaacgaatgccaacgaacgaaatgagtgaatgaatgaatgttctgttgggccaaacgaatgaattttgttgggcgttcatcgccgacacaaaatgagtttatttcttcccctcaaggctcttctccgtcacacaacacaaattgtgctccgaaaagtgcgctccgaatgggctaagttaatcggcaaaaaaccactcaaaccttcgccggggccatgccaccaccgaccaacggcgggacaaccatcccccgcggcattattttgtcatgccatcccccgggggtgggggaggaatcggcaaagagtgcacgggaaaacaaattttaaggctgaagaaagaggtgaattaagcgggctccaaagttgaacatttggatttgaaatatttgcgcaaaattaaaattgatttaattggagcaaaaagagggataaaaagacgaatgggataaaattagcaacggattgaaatgatgggatgatgtgagataaattaatttaagatccgaaatatttgcagtgaaaatttgatgccaaaaggtttttttcttttatttttgaaatttatctctccgccggcgttggttttgtgcgaattggctaaacaaaacagcacaaaaagtgtcgggcaaagggtaagccgatcttttgttggccgacacgacacaaaagcattgaacggcaaaaaaaggggtacagagggggggggggggggggttgtggcgatgattgtatcaaattttaaaaagtaaatttagacaatctcacgtggccattgccctatggatcacctctgctgcgcaaattcacttgcatgaaatctctgaaaaaggtctatggccctgctccatgtgcacagagctacgacccccgtattctctacatggtaatgccactcactaaaatccgaaaaggcataaaggaatattaattcaaatagaaaaaaggacatcggatgaacagagtcagagatattgattgagaaacaaaaggagcaacatatatgtatgtatgtagtttcccccacgacggagcaacattacgctatttatgaaaagacaaagggtgtcaaagaattgatggggcataacaaatcaatggggacggaatgccgatataataagtaaatcgaataaccaggtccatcacgaaca

SEQ ID NO: 1400 - DNA, 778 bp, Heterodera glycines
aaagggagaagcgagcaatttggtcggatttgggggaaattgtcagatagaattggttatacgtcgcttctcccccccccctcccccccgccatccccggcccaaataaataaaagtgtttgttgtgaataatgggattttcagacaatgaaaatgcccccgggggttattcgaaatcggcgaacaaaaacagagaaaatggcacccaatgaaaaaaaagagaaatcaattcaaatgggcgcaattattatttcctaaataggcagagggagcgaaaagcgacggcggaaagccaacgaaggcgggcgcagaaaaagggacaaaggacggacaagagagaaaaggacggacaaattagcaaaaaggtaggataaaagagagaaaaggacggataaattagcaaaaaggtaggacaaaagagagaaaaggacggacaaattagcaaaaaggtaggataaaagagagaaaaggacggacaaattagcaaaaaggtaggacaaaagagagaaaaggacggacaaattagcaaaaaggtaggacaaaagagagaaaaggacggacaaattagcaaaaaggtaggacaaaagagagaaaaggacggacaaattagcaaaaaggtaggataaaagagagaaaaggacggacaaattagcaaaaaggtaggacaaaagagagaaaaggacggacaaattagcaaaaaggtaggacaaaagagagaaaaggacggacaaattagcaaaaaggtaggacaaaagagagaaaaggacggacaaattag

SEQ ID NO: 1401 - DNA, 7165 bp, Heterodera glycines
  unsure (1)..(7165): unsure at all n locations
cctccgaaatttcatcacgcaatgtgccaacgccgcccgccgccgcacattccgtgccgaccaccggcgcccgccgcctccgctgccattggtgagcgcgtcaaancggagcacaaaacgttgccacattttcagtcggctgtaggcgggcagaaatacgcgccgaaattccttgaattgtgccaaatgattagttggattttgcctgggtccaccaggctataggaatgccgaaaagcggtgctagatcgaaccgaaaaaaactcattgtgggcgttgcgaaaatagtctaagtgattgatcaaataattaaatttaattatgcgaatcattaaatttcatataatattattttcaacaattatatggaaatattttttaattatgtataatattgataaaatttttaaaaaattaaaaattttttatttgcttcgtggttataattgaaccaggaaaattaaagaattgaataaattatggtttatacgacggcttgtttaaagcctaacaagcggattttacataaatagaaaatcaattgatgtaatttattttgatttgacacggttccacataaccggctaatatctaagctccaaaacattggtataaataattccttattaaaatggattcagaattactcagaaaaccgaaagtttttcgtcaaaatcgggtctgatttctctgacgaatatccctgtctcagtggtgtgccgcaaggctcaatattgggaccactgttatttcttatttacatttacgatttaccaaaattctgcgaaactgaaaatgttaaaattaaactatttgccgatgatcttaaggcctatcatgttctttcaaatatttccttttctccactccaaaattttattaacaaatttaatcaatactgtaaattaaacggccttaaaatcgcttcaaataaatgtttaactttacatttaggacacaaaaaccaaaaaataaattattttattgatgactttcaaattcctaaaaatcccggaaacgaaccagtcagagaccttggcatttattttactaatgatttgaaatgggcagaacatattgacattatctcgaaaaaagcattacgttctgctttcgctatactaaagtcaatcaaaactcgtgatacgaaaatacttgtaaatttgtttaatatttattgcagaccaattttagaatttggatctccaattttcaatccttatttaaaaaaggatattgaaaaactggagaatgtccaaaaaatttttttgagagtaatatttagacgtaacaattatgctgctgatttacctaattatgctgaattgttaaacatttatgatcaaaagtcgcttgagagtcgtaggttaaaaatagacttaaaactttttcatgaaataattttaggtaaaataaatttacaaaataatgaatccttttctttttccaaaaaccctgtaaaaaatgaatacactataagaacagcttattgctcaaccaatgctagatacaattcgttctttattcgaacctctcgtctctatagacttttacctaaagagacgagattactaaatccaaatgagtttgccaaacttcttgaaagatctgatcttaatttgttgatttctttgccaccccaactccaaaagtgaccaattgattgttttgacattattatttctttatttttcggcgtcacgcttttgcgtataaatgattgattgattgaattgaaacatgcgaccatttttctttttattaaaatattttcattttatcataatatgtcaattatttctattaatctattactttttaaaaggtgctttttaaattgaaagctttcaaaagcccacaattaaataattaaagaatgggcggcttcttttcttgttttgagactccgaccgtttcttttgtttgtattgtttacaattagtcgggtcattagtgaacagtcgtcactttgaagtggacaccatcattattctgttctcattgcagacaggaaatcccacacattttgttgcaattagtgatgatcaatttacattaattgctttggtattatggtcatttctgaatattcaaaatcatttggataattttttgataaaattgccatgaaattgtcgattaattatttctgtatcattcattttgttaccgcgtgcactccgacggctaaaattatgggaggagaaataatcatgacgacgatggaaggcaataaaatgaatattttgacaatttttcattgtttcctccctttttcctttttagcatttgcttcacctgccccaattaccaataggccaactgacggcaatcaaagtgtgccgatgccaatcatttcgccaacaacaaattcattgaccacaaccaccggtggtgaatcatcaagcacatccacggggatttctacaatggcaatatcaggaagtacaacgacaatggcaacaacaacgacgacgacaagcagcacaacaaaaacaacaatagcaaaattggctacaacaatggcaatgccacaaacagaaatgccaacaacgacaatgacgtcaacggaaatgccaacaacagaaatgccaacaacgacaacaaaaggcatgggccagcaatgtcaggttggctgctgactgttggacaattttattttcgaatctcttttttctgtttgaatcttgaaaaataatttatgtccttcctttatgttttggctttttctggctttcatttttgttttcgactttagccttttccacttttgccggttcgtcgcgaggatataaattcgcgggcgatagcacaaattgcgggaacagctgcaaacaatgcatgtaaagcataaaaataatatgaatgaattaattaattaactaattgcttattccctccctcccttcggcagtttcgctttcactgcgatgcatcggccgttcgccaaactcggcactcattctaacggtacttattctttttaatcattttgtgattttaaattttgaaatttatattcacagtattttgggccaaatggtgccgacattgacagtgtattcggcacaggacaaatcagtgccgtgctcagttgtacaacggcgggtcaatgggcagtgggaaatgtgacaaatatcgtcgaattggaatgcatttcaggataaaaacacaatcatttaacaaaatataatcctgaattattttattatttgaaaacgaatggtaaaaagaagagtttacgttgttaatgaatttgagtttgtattttaaaacaattggcatagaaataattttaaaataaaaaaagaaaataataaattataattagggtctccatttttaggcaaatgcctaaaatttctacgcacttaatacgcacagataagcacgaaaaacgcgttttccgcttggtatggggtgtctacaatgacttttgcaatgcctaactttgcctattttggactttttgtgcttaatgcctaaatgcctatttttgtgcctatttcgcaatttttggcgccttttttaggattttcgaaaaaatccttaacaaaaatgcaataaaaacaaaaaatacaccctaagaaatggcctgaaaatttttttagaaaaacacccctgagaattggaaaaattttcctaaaaattaatcgccaaaatttaatatattttttcttaataaaaatttttgttttaaagatttgtcacttattcgaaaaaactttcaaatatttaataatttcatttacaattgaatttttatgtttttatgtgttttgctacctaaaaagtgttaataaaaaattttatttgcctatttttgtgcctatttaatgcctattttgtgattttttctgcctttttaggtgtctatttcgcgattttttgtgcctaaaaatggagtccctaattataatcaatcaaacgcaattggatggattccgttgagagttgcgattcatccctaaaattttattaaatttttacgtcgtctgcttttttgaattcaatcgccctctcccaagcatttgtttatcctgctttgctaataaacctgttcccccaagtggaatatctttgaatcttcactttcaagaggaaatcagttaaaccgacgaacattcgctgacccttctcaattatttatttccatttttatatttcgtttttatcgcttaatttaagtcatttttgtgtccaaaatgccttccgatacggccatttacgtgccgttgttaaaagaattcccaacgcgaccaccgtactattatcggaccccaatgtcactgatgtaccgtattactgtgacgacattttccaaattacaaaattgcgccggttttttgaccggcattttgtttggactgattttggctgcttcggttgtgcattttgtggacaattttgaccattttgtactgatgcccaaaatgtcgaaggagctcaaagagttcagagaacaatttaggaaaattgaaaaaacatataaatacacatataaaagtaagagaaaagaggtggaaaatgaacaatcaaaagcaaacaaaaataccaaaacagagaatggaactgttgccgttgaacttgctaagaaagtgcgcgttttctgttggatattcacttacgaaaaattccacgagagtcgcgccaggtaattaattaattaggattaattaaatcattcattaataaattcattaatgaataattaatttatttattatgactgattaatggaagcaccgcccaattcaatttaacctcctttgtgcccttaaggcatgtccgtgccacgtgggcccagcactgcacccgctatttgttcttctcctcaaaggatgacccgactttgccggcgattgacgtcggaatgccattgggcagaaaatacatttggcgcaggacgcgatggattttaaaatatatttacgacaattttatggtaattaaaccatttgagtttaatttgtctttcttaagagcattccttttttccagaatgacttcgattgggtttttcggattgacgacgatgcttatgtgatcatggaaaatctgaggttgatgcttctgccccattcgccggacgaactgatttattttgggcacaaattgcatacaaccattttcaaggaccacttgttcccgcagggttagcaattttaaaattaattgaaaataaattgaaaatgattgatttttatatttaaattgtataatgattgattttcaaatatcttttaaggaggcgctggatatgtgctgagcagaagtactttgaaattgcttgtggaaaggggcctcaatgacagcacaaaatgttgggatggagatgactctgaggaagatcaggttgactgaatgaccgtcacaatttttcaaatattaattacaatttaattagtttgttgctgtctgtttggaaaggttgggagtgaaatttggcgattcgcgcgattcacaaggccggcacagatttttcggcgattttatcggcaaaaatttaccaccgataacgctgtgggatccatcttattattggatacaaaatttgacgtattatcccatgccgcaggtgatcattaaatgttattttcaattgctgctttttattcctttttttcgaattttctgcctttttagggacccgaatattgcagtgactacgccatttccttccattacactgatgcgcgaatgctttatctgcttgaatatttcatttaccatttcgatgcttacggcgcgcgaacattggccacagatcgaccaaattatttcgaagaagcgatgcgaaaggcatttgataatgttgggccgggcgacattttgagcaagtaaagagaaggaaaaggcgggaatatttcaaaaattggaaaatgggccggtaaatcatcaaaatgccaaaataagtagagaaacggataaccttttttcgataaattgaaattgcatcaaaaatggtgaacataaattttacaaattaaaaattattatttgttaagtcatattttgatcacaactgacaaattaatctttctcatacatagaatagagtgaatgtgcaagagaaatggcattaatttaaaatgttgaaataacaaaattggcaatttgaaccataagctttatatatttttaataccaaataatttgtatttaaaaacttattaagaaatacttctcggcttatgttagacatgaggaaatgaactcactgccaaaagtgccaaggaaacgaaatgccaaattggaaaacaacgggaacaaatgaatgcaccactcatcaatcattgtcagaaaatacttctaaatttgccgttttaaggcattttaatgaatgagactctcaacagatgtttatctcttttctatttatttgttagtcatttttgattttaaatttatttatgtgttaacggaaatacgataaaaggaagcgcaaaaatgctttgctttagttcaatttgttatcgtttccttaaatgtccttgcgttaattaccatatttaaataatattctgtcataattagaagtattaattgtttttgcaaattaatttattgccaattattagtccatcaattcgcttcatcttccgccggttgggtttgtaagcagacattcgatgtcgcgcaccactaacggcggattgcccatcacccaattgccatttgcgttacaaatgccgtcaaaagtcacagtccgtggaccaaccacaaggaaattgttggtgttcacaacaattgcggcattcagctcaagcgctgggttgggttggctaaaaaagcacagacaaacaaacaaaacaaaaaaagctaatttcagcaaaaagacaaataattacgagcaattagccgtcactcttgaccggcaaacgttgctgtcatagacaaaggtcagaacgccatcggcaaatgcggttgaaggtgacaatgtctggttcagaggaggacaacaacctgcatttaaacacttgcaattcaattaaaaaacatgattaatttcaatgaattggccgaacttcgggttttaaattgctaccaaaagcgcacatttatcggatggatttgttttaaaaattatattttatttttgttgcctggaggcactggcggaccaattgtgcttgtggttaagcaggcaaaaagctggcccgag

SEQ ID NO: 1402 - DNA, 8363 bp, Heterodera glycines
tcaaagcgaaacgaattttttctcatttcggaacgataatccgccgttgaactcatcggcggtaattgctatggtaatccttcggaatgtggtcacgccgaaaaattgaaaaagaaagttcaattttctttcaaatgaaaaatgcattgatcacaattcttattgattttgtcaattattttcatcaatacttgattttttaatttttccgttcaaacaatatgaaagcatttattatttttgatttaaaagggaaaattagagcccagaattttgtaattaccaggaccgggtcttggaaagcgacccggacgggagtttctgggccaagacttccattttccgcgactcccgatcccggtctcaatttttgggccggagcctcgccgggatcgggaaataattaaataatgggaaaatttttttttgttagatgccaaaaaattagttttatatatttgagcaaatcacagactcatcagtgctcttatgtgggccataaaaatcgaataactatgtcaaaagaaaaatatatttaaatgaaaaaataattaaataatgggaaaatttataaaaaataattattataaaaaattcttaattttttatttattcatgaaatttaaagcaaaaatgaaaaaagataataacaaatcgtacgtaaatttttaccggtaaaaatttttaaaacttttttgactgtatgacataagcaaagaaaacccccaatgcctgagtaatttatgcaatatattctttcttttaaagtcaaaaatgaacaataaatgacaagtaaatcatttgctcatcaacggtttcatttcgcactgatcgacggacacaaatcactcaaaaagtgatcaattgtcagacggcggtcggttggcggggcggttaaatggcaatggcattcgtccaaaaaagggcaaaaaggcaaagggcggcggtgccgaaccattggatgaagatgggccaaaaggcactttaaatggcggcattcgtccaaaagggggcctaaagccgaagggcggcggtgccgaactgttggacgacgagggaccaaaaaatggccgaaatttgaatgggttgaactgcagctcctcactgcccgactcttccgaattgctctcctccgatgccatttccgacgaattgttcggcgcctcactttgtccattgacaaaaatggcaattgtcaaaataaaagcagcaattaaaaatttgttggccatttttgcgataaattaattaatgattttgacaattcggaagcacagtcaaattaaagttgaataatttcactgattcattcgctccttttatgtgctttcatttcccattcaaatcacagaatcacagctaagcaaattaaattttcattttttttcgttaatccctcaatttgttcagtttgacaaatgcgtcattttgtgaaattttgaaacggaaatgttttaattttattaattaataaatgttgcgttttaaagtattttttttttgctgttaacattaacaaaaattttttggccgaattactgcaaattgagcagatcaaataccttttttaatttcattttttcatttgcgtaaaatcgcctgaggcgcatttgccaattggtccttgactttgaaaattggggggagttaatcaaaattaattaattggtcctaatcaatctatttataaaaatggcaaaaaaaaaatattgaaaaaatcaattttaatcttataatccgggatgaacacatgtattcaaataactgctgtccggtcaaatttagtgctgacaagggaacatcaaaggcgtagccccagacctttggcttcggcggggggggggggggaagtcaaaaactcgattttaggggtgtattcttttttcttcgattaggggtgtatttttcgttttttgaaatcccgaattatgggtttatttttcagtttttcgccaaaaaattactattttttgccattttggtctccaataaaagtggtttgaaatgtatctgaaagcacttgttcgaaataattcatcccttgtcaacaattaatttaacaaaataagcatgcttcgaaattttaaatgtttttctttcctaatttctaagctcgaattcaaactgttttagcatattttgatccataaaattttgaagttttttaaaattcgttctgcagaggagtttgcccgaatcccatagacatttattcggtccttctttataggccattattcagaattcagaatatcatggtaccaatgtccgtgcccacgactctttgttattacatactgattggtgcttttttgtaattatttaacggtatttttggtgctgttttagcaaattggcaacaaaaaatacgcccaattttttatgtcagaaacaaaatggaccactaaatttgttgctgcacgaggtttaaaaagtgatcagcattttgagaaacgaagcaattgatcatcgtcataattggcccactcattcattcgtttgttcgtcttcaaatgattaaattgagcaaaaaatggctgatgatcaggcgatggatggaatttaacgaacaaatcaaaaaatataccaaaattgccgaataaaaaatgacaaattcgtaattaattatgaaaggaattgacatttgggggaaaaatggggaagttgggacaaaaaagcgcaagtgtcacattcgttcaggttctattattaattagcaaaagtttgccgtttgcagttgctgaccaaagttcggccatcaaccggttaaatagcgtacaaaatggggagggaaagtgattagggctcattccattattatgtaattattaatttgagaaaataagttttttaaaatcattttaattatttatttcttaaattaaatgatcaattaattttgatcaatcactttagcgtacaatgggcagcagcaccagtgtccaaagcacgttcattttgcttatttttgccctcatcgcttttggcaattttgccgccggcggcggaagtgccgaaaggggcgggtcatcagcagaaaacgcggcgaaaacagtcgtaagacaaacgttgcagaaatcgtacggatacggtgaagtaccggcaacgtacggagatgagaagccggactattccgtgtgcagcggattgccaaaaaggaacagaaaggcgtgcaaattggtggtgcaaattgcggttgaagcacgaaaggtaagaacaaaaataaaaaatatacggtaattttacgaacaaggcatacggtaacgttcctttgatttgtcaggcagaacgacgaggacttttggaagacgacgaattgccgccgccctcccagggacttggtaagcaaaaaagcataatgattaatgcttggctaacaaaagtaatacgcctgaaatgtcattaaggactgccctaccttcgaaaaccgaccaaagcggaggaggacgcacaaccgccgccaaaagttgtggcggaaagatacgcgtgcatgaacatgacatgtctatgcccatatttgggaggtgaaccttaaatgctgtttatacaactctttttagcgtgtcgcttaatgccaatggttacaaaaaaatgaattggatttttatagtgaaatttgcccccggggagagaaattttgtttgtcttaatcaacagatgcattttagaagctaattgggctacatttttttgttgagtaggcgaaatgtttaacatttggtagtggaattcagcagggagagaacgtttactgatcagagatcaatttgagatttggggctagaatcaccgattttaggcagttcatctgagcccgatcagtgcatttttggcgggagtgctacgaacgaccaagcgggccgagcgcgtcgccagtcgggcaatgcgaacccaaatttggggagggtcgttcgcaaggagtaccgaatgttaacagacaacgaaagggcacgatatgtaagcagtgaaaattgggatgataacaagggaaagaaataaatattcgagaaaaattggataattaaagtaaatgaggcaattaaaaatacctaattaattaattggtcgccctttgcagcacgccgctgttttgcaactgaagcgtggcaccggttcgtacgagtacaaccgaatcgcttacctgcacttcgacctgcgcgcgatgccaggtgctcactccgggccgactttccttccttggcatcgcgaatatttgaaacggtgcggcattttccaaatcaaaacaatttaataataatgcaaaatggacaattaagcaacagtgattcattccttttggctttagttatgaaatcggtctgcgtgccgtcgacccttcggtttccattccctattgggactcaacgttggaccagcgactgccgaaccccgtaacttcagttaaaagcaattttgcaaaattggttttcacaaacagaccgattccataatatggagcgaacgtttcatgggcacacccaacacaaacaacaatggcattgccgatggctttttggccgactgggacaccgtaattttgcgtaataaattatttaattatttttttataatttagatagagggaaggccaattcaacgtgagctcggagtggacggcgaattaatggcggaggacgcgtgagagaaattaaatttgaaaataaaaaaataacatttttgaaatgtttcgaataaattgagatataattaaattaatttgtttgcgtttatttaaattggtcaaaacaatttcagagttaatgcgatgataaatcggcctgaaatggagaacatttacgcctttccgagcgtaattctaaataaataaacccattttccaaattaaaattaatttggttcatttagcggactggcaatggcgcttgcactgtgccgagacccaaccgaggaatgtggttgagctgggccacaacaatgtccacacttggatcggcggcgacatggtcagttagttagttgttggttgaacgtaaaattcatagtatcaaaatggcacgaatagacaatcatgtgcaattttattatattttttagagcggtttgcccacggcacctcaagaccccatctttttcatgcaccactgctacatggactacgtacgtgcttaatttcaattaaatttacttgcttttcaaaaaagtttatcgacttatagttttagatttgggaacagtggcgcctgagatggcaaacgcgtgcccagcgcgagacgcaatttccatctgatcagcaagttgttgcggtgagtggccgtaaactgctaacaaattgctcttattattaccttaattaacctcccgactgcgtaaggcgttttacttttttactgtattttacagtgttccggttcaacaagctaccgtatcggcgaggtaatgcgtccattccaagacccggtggtgctaaatcgaggtcggtcataattgacagtgattagtctgatcaatcacactgcttttggcgtttagccggccttagcaacgattacaccgactttctgtacacttacgcccctcggccgacttgtcgcgcagcggggggatgcggatcgccgtcagtatccaaattcaaaaacattatctatttaataataaaaattcttaagctatttgttttgcgacacaacaaaacggactccgttgtgcgtctccaaaatacggcccgggggcaattgctcaccattcacacgaaacagtgggtgtttatttgatagaattgccaaatgactgctgataactgactgttgaacaattgtgcagctgaacaaccgtgctaccagtcaacgtgtaccaacggacggtgttccgcggcacgaccgagggtattgagaagaggaattaaatgcaaaattagccattatatggacaaaacataattttaatgtgccatgtaaggcaatatcataatgctttatcaaaaaatcacacttgacaggtggcgcgctccaaagactcatcatcgccagaagtggcggaacacagcggcgaaaaggccgaacgtggcgcaccacgaaaagcatacggacacagtagcgaaaggggcggacaaagtgccgaaaagcgcggacaaagtggcgaacagcgcggacaaagtggcgaaaagcgcggacaaagtggcgaaaagggcggacaaagtggcgaaaaggcaggcggcaacaaacgaaaaggatacggatacggcggcaatgttagtgaataagacgggttgtcaaacacctcctaagtaaatttgcagaattctccaacaacggcggaaccaccgaaaccgacgacagtgccagcggacgaatacacaactttggcaccgatggtagggccaaaaagggacaattaccaatgaatgccttaattaaagcaattaaagcacacattttaaatttaaatgcttttctcagtacacaccgccaaaagaacgtgtctgctacgataatcacgagtgctgcgcagtgtgggccaccaaaggcgcgtgtaaaagtgcgccccgttacatgaacacgtggtgtccaggcgcttgccgctacgatggatgtcttccgcaggcggtgaaacgcgcggcaggtgggtcattaatggattttgttggctgaccaattagtgaagcctattatggataaatgaaaaattaatgagttaaggccttgactattattctcaatgcaagcgttggtccattttccatgaaaaatactcccacgccgaggggtggcgttcgtacagaccgaacttggtgttacgaagggagaagttgcgcaacgaatgtgagcgcaacccgcattggatggcatgcaactgtccgcaggcttgcagcaaagtgaagcgcctaaaggaggactgcaggtggcacttggaaatggcattggcattttgatggcattttgtttaattaacctaatttagccaaaacatgccaaaggattatgtgctggaaccagtggacaatagttgataaaattgccttggttgtgatgatgatgccgcttaagcaaatgattttttatcgtagataaccgattattaaaacatatagttatttaattgaagaatactaaaagtaaatttaaatgctggaaattgttttgaaaattattggtaaaatattaatttggacatcaattcattttagaaagatttatttattggaaggtgaaactaaaaaagttagcaaaaaaaatatttttataattttctaaaaattgatatttaattatccgtaatttaaatttcttttttgcttttgcattggcacaaaatttgatcggaaaaaatgaagaaaaccatcggattaaaatcatttttctccctctgtgataatctttcggtttggcgtctaattattttaaattatctctaatggacaaacaacagtcattggtggtcactggcagtgacagatggagtcattcacctcaaacactgagctaatcacaacaatttgctatttaaccaccaaattttaataagtccgtccctcccttattattgctattataatacatttttttattaattaaaatttaagaaaattatttatttattaaattcattatgttcattaaacgtggccatttttttgcgatattttttctcacaacttttagtatatcaaaagcaatgtttatggtaaaaaaattataataaattttaattgaaaattcgacaaaatttttttaaagcccttcaaagtgtccgttcgtttgttggtgtacgataatgcaaacgatattttttgggacttaagcaaggggacattgcacgaggaaagtgtgccaacactgatcagaagtgccgaaattgaaattggaaatgatcggacgacagtccgtgaaattgtggaaaaagtggcgaacgaattttgcaagcaacagcagcaggtgattaaggatcgagaaccattaaataccaattaaacaatttttatgaaattttgtttattaaatttataatgtatcgatttatccttaattatttgcaaaaaaaaacagctgttggatgaggagggagacgaaaagccttatcggataatgacgatttttgaggacaaacaattgaacatgcaaattcagcgggagatggacgccgagccaaacactgaatacaccgccattttattgctcaaaaatgggcaaaaggattcagtgggtaaataaattgcaccttttatttttcaacaatttagtggcttttctgaagaattggaaataatgaagagattaagtgaaagacgatcgaatttttgaaaagaaaaaactcaaaatccgatgaaatattattaataatcaccgaaatatgagtattttaaacaataaaataaatttaactaaaatttatgtataaaatttatg

SEQ ID NO: 1403 - DNA, 1280 bp, Heterodera glycines
aattaatattttataatttgcctaatcaaaaagcatttattatgtaaaaaaaaatcaaaagcacattaggcaaaagaaagaaactttaagccttgtactgtaaatgttcatgataattgttttataagcagcagcaaatggcatctaaaaatgctgttggcactttgtttctatcctccggcaccttttttgaatttggcacaatgtctttttgtactccgtcatttcgtgggtttggcactctgtttgcccccccccccggcattgtccctctctccgttcttctcatccctgttgctgcaccaatttggtgctgcccttcgcatccctcacacacttccaaatgccttggctgtccctaatttggccattcaaagggattcggtcgcctcgtagcgaaaggcatccgaccacctcaaaaggggtaattaataatcattagtgtcaaattgctctcatttttccaatttttcttacccgcgtctcccaccgattgtaattgtaaaatacaaagcagcgcataatgaacaaacggttgacaatctgtttttttaaagaaaggatttcaaattataccagttaattacgcaaaattttccaaattttggcccctatttatttgctttatttgaattatatgccaaactcacccattcctcgccctctcggtattgtctgccttggtggacacacgtgccatgggttgcgcgacaatcgatgggcccgaacaatgccaaaatgccagccaaaatggcaataattttgaaagcaagcgattgatgcattatttctttagtttttctaaaaaaaatatttatttaatttaagtgtttaaaatgcttttcttttgaagcttttggcaattatcagtgagtataaatatttcacaagtgaaatttgaccaaagaatcattcgctggcaaatgaattttttgtgttcaaagcactgacaaattgacgaacacaactgacggattgccacacgcttcccactcaaagtttttggccctatttttgttcgttggcttatgctttttgtcccatgatcaatcatttgtggccgcgggcgatcgcaactgactttttgccgtggaatttggcaatgaaaaggaggcacacggccaaaactttgaaggacataaaaatgaatgaatggcataattgagaaagttttgctgctaattttagacaaagtttgaaaattcaagaataaaaaaaaaaattttgaaatgatatattatttaaaaataatatttaaaatgtttaaaccattttaaatt

SEQ ID NO: 1404 - DNA, 2353 bp, Heterodera glycines
ggcatttcgcttctcgcccttctggtgtgtccgttgtcggcactttgtcccttggcggcgcctcttctcgcagtgcctccatttgccgcgttaatttggttagatttgccgtcagtctggtgataatcgtgtccaatgccatccgttgcaacccctcgtgaatatttgagcagaatgcgaccacctgttcccaggtcacatacgaattgttcgcagcagcgaatttgtcgatgaactcaaccaaacatttttcatctgaaaaattaatgggaatttggcatttaaaaagcataaaatgccattggttcactgaccctttgcgatgtttgcagcgggtgaatttcgctgggtttccgtcgtgttgcaagaaaatttcacccagtccatttccgagaatgacgaatggcacaaaatgcttccgtaacagcccaattggtggagcaacgagcctgagtcacagaattagagaccgaatgggacaggactctgtacggaatttttcagggtcatagtctggcatgttttgaacaatgcaacaggacaatcctgctaaaagaggacttttgccatgtttgtcctactgccctgtccgtctcggaaggggaggaggagcattgttttcttgaaacaaagattgttgcactcatcgcaaaacaaattaaggacgatgaatggatggattgctgtataacgatgagttaaccgcagaggctacggtatctgcgatttttattttttatatcagcgaagaaatggcgacattaaatttgggctccggaaagtttgggcaccagagcgagggatttcaaaaaaatataacaaaataaaccatgcaaaatgttatatataaatcattaaaatttagtaaatttaacaacccttgtgtttaaaaattcatgttttcttacaaattaaaaaaagaacctggcaatcttattatttaatcaattcttacagcatttaaacgtagatttaaacgtgtactacaatagtttctgtttggacttgaccttaatacccggcttagttgggcccgaaatatcaagagacccgtctaattctgtttaatcataaaattttaataataatacgaataatataatgtatgacattgatatagaatgaatgataatgagtctagcaaaataagcatggttaatcgagcggatattcgttaaaaaactttattcctaacttgattaatttactatgcttttaaattagatggttgcaatttatagacaattaaaaatatttttattttttaaatccttaatttggtgcccaaatttcccccgaaaattggtattttgagtctgaatcaaatgtaaaattttaacaaaaaaaggcattcacttccaaataatattttttgctcttttttactccgacattttcaacaaatatcaaagtgcattttgcaaaccgccggttaatttccgaatttgatttttatattaatattttttaaaacaataacaccgttttgtcatcccttttttacaaattttttccttgcattatgctaatgattaagttatttatgtatttttataaataattaacactttaacaaaagagaaataaataaataaataaataataaaattgcctgatatttttatttatcatttaatttatatgcttaaaaattttcgatttattttttaaattctttttattatttaactttcgtgccagctgagcgaaccgacaaaacattcattcatttcccattgctttgtgtcattcggctgtcatttcattttatttcaatcaatacgtaaaaaataaaaaagataatgataatgtgttcattttacaaattgccttttttattttattccagtattttaaataggtaaattaaaattcaaaattagacaaaaataatctaaaaattaattaaaattatcattcatttaaaattaaatcaaaaaaactttaaaaacttttataacttcataacattatgactaataaccagggctgcaaaaaatatgcatgaaaaatgaccaaaatatgcacataaatatgcaaataaaattgccaaatatatgcatcaaatatgcacaaaaatcgcaaaatatgcaaaaaatcagaaaatatttacaaaaaatggcaaaatatgcataaaatatatataaaacccatgaaatatatataaaacccaaaatatgcataaacacccaaaatatgcaaataaaagtcccgatttttatacgcaaacacaaaaaagaaagtatttttcctactatttcagggtttctatatgttcttatttataagaaatgttcttatttcggggtattgttcttatttcttaaaattcttcagaaaatttgtaatttta

SEQ ID NO: 1405 - DNA, 1727 bp, Heterodera glycines
  unsure (1)..(1727): unsure at all n locations
atcatcaccgagtcctgcgtttgcagtgggtttggactggtccaactcctctctgttagtcgngagcaattggggttcactgtgtgacgaaatagatttccatgatagttgttcgtcgggcaaggtggtcatgtcgttctgatacatctccaacgccttttcccattcgcctaatttttcgtaccaacgacccttaaacacagttgaatcgttgagcaacgaaaaaaggcattaaaacccatgttgagaaaagaaagtcacgacttaccgatatttccatgttgtgacgtttggcatactgaacaatgccggcggcgccttcttccagatttaatttgttgaatagcattatcatcgtttgacagtcatccgcgttcggttctccgttgccgcgggtgctcaaaatttccatttctttgtaacgcaatgcttttgcgtatgcacgtgtcttctccgccgattcgctgagcattcgatgtttaattggaagaggtcccttaaagaataaacaaacaaaaagatttttttttttactgcgctttgtttattgccttctcagaatggtccatgaattcggccaaattcagtatggtctgaatgggttcggcatgggggcagtgcctcaacacatcgatcagctgattggtcagttcgttctgttcccgctccggcagttcagtccaaacggacataaaagcggcattgaataattccctgtaaattatttcattaaaaatagaaaagtaaggggaaaaaagaacgactttgagagtgactcgcacatttcggccaacacagcgcaggcgcgaagtgcggacgacggactctgacggatgaattggttgcgcaaagtgccaacccactgaagccaatcctcacgcgagagcagtggttggaccgtccaaaagcgacgcaattggtccaaattgatggccaagcgggaaagatcacggcctaaacccaaccattcgtcccggcattttcctgttcgccttacccgaagacattctgtgcactcgagacatgtccgcactgcttccgccgggcccgggtaaaaacccgacaattccgttgtgtgcgtcgggcaagggcgaagtgtccgttgtcgccccgccgttttgcgtcggcggtggtggtaaaaaagacacttgacgcgcgaataatggtgatgaagtgctggcactgaatgtgccctgttgttgttggtaaacgcctccaccactgccaatggcattctgttgttgctgctgctgttggcgtgcgtatgaaggcgcctggagaagtgccaactgttcctggtactcatggcacagcattggttcgacacgacaccgcaccaaggcggcatttacattctctttgtacacagaaaactgagtccatttctgaaaatgaaggggaaatgaactttttccgccaaaaagcttaaatgaagacggactctgacgatgatgccgagtaactccatcagtcgcggctgttgagacttgatgccaatgcaacgaagccatgtttgcatgacgggcaaagcgtagtcctcgatggaatgtcgacgggccaactcaagcaaagtgtccagtgccgacgtacgcactttttcctccgttttgcggtcgtccaatacggacagaattggcggcagaatcaaatggagatgggagccaagacaagcagaaattgtacgggcgcatgagagtgcctgacaaaaggtcatttaacacaacata

SEQ ID NO: 1406 - DNA, 6881 bp, Heterodera glycines
  unsure (1)..(6881): unsure at all n locations
gttgcctttcgcgagaattactccttcaaaaagtgtttaaaaatatgttaattgctcctcaatttggcattgattgcctcgacggcggtggcaatgcgatcgttggaatcacccgacgcatcggcgaactttgccgccccgtcgaaacgtgaaaagtcggaatgacggcactgacggaagagggcgccgttgttgtgggggccaacgacaaaggcaaaatggacggacgacgggccaaaagggcactgccaggggcggaaaagacataattaacatcacccaaagtgttgatgacattcgactgcacattctgaggcgaagaagagctgctgctgatgctaataaaagggaattaaaatagttaatcgttttgaaaaactattcataaattgaagagagtggcatattatgcgtcttcctaatttgaattttatgcgctaatttccgctttaatttcataaatcgaatgttggccgtcgcactggcgtttacccatttactaattagccttgattaagcgctttattgcccctttacattttattgttggcattagcactgttcatcatctgctgctgctgctgttgtcttctgttgctgttaattgtcgcgtataccatcgactccaacaaattggtgcccctgacattagcaaagcacatccgaagttcattgatcgccatgtccaccccaaagcgtcgaccgttttccgtcgatgtactttaatgaagtgcaaaatgatagtcgacaaatgaaaatggttgcatatttatacagaaagaaaaatcgaaatgtcaaaatcgaaggaagttcaaatttcaccgaacactttttgaaaatttgtttgtgcacgtttgttttttctttagtataaaggcgactcaactcaactcgcattatcatttctcgactttgttaaattcaaaacgctttttagacccctttttgttgactaactcacagaccctaagacgaaaaatccaacttaattgtacttggagcccaaaattgaagcgccgtgtaaaatttaacaaattcggacgattttccctaaagcctcattttgaaaatttagcctcattgatctatcaaaaaaccacaaaatgaggctaaaacctcagatctgggccctgatataggtacctaatcacagccctattaatgaagataagattttgtgtgttttttaatcttttgaaacttattatttcaattcgaaattctcaacccattattttaattttgttttcctttaattaatcatatttctatttccttttctgtgttattatgcaaaattcgctaccttcgccaatgcttgcacccattccaataattgagcccgcaactgtcactgttccgcccaatgaagacgttgtgggctcagatgctgagaatcagcaaagagaagaggaactcctggtcaatgaatttgtcatcaattcggaagcgatcaagcgcatattggacgacccgcgctacgctgacaaaaaggtccacaatattttcaattaaagtgactctgacttaatggaattttttcattaataatttatccaaacttttttttacaaattttggtaaaatgtcgatgagctctatttttcggcaaaaaaatcattaaaaaggtgaaaactatatggctaaacacaaacatagcatttattttagccctattccgaatttcacttcttaaaattggaacaaatgccgaaaatatttatttacggataactcgataaatacaatctcaaattggctgtgattcggaacaggccaaatgaatgtcacatttgtcttttttgccatataaaagtaaccatttgttttccttttaggtgtgtgtagtcagcgtggcgggcgccttccgcaccggaaaatcgtttattttaaacttttttctgcgttatttgcgttggcactcagcacctgttgctgacagaacaggagattggttggaaatggaactgacgttggggggattcagttggcgaggcggtgacgaccgggacaccaacggtattctgatttggccagagccgttcctactcgaagaccgcaacggagagcaggttttggcaggatggggttggatttggagaaacagcacacccaaaatttaattcccgagaaattcattggtctatgtatctatgtatttattcggatgatttttcaggtcgctgtcctcctcatggacacacaaggcattttcgacagtgtcagcactttcaaaaattgcgccaccgttttcgcgttgtccacgatggtttcctctgttcaggttttaaactgaaaaaaaaattttcgagtcaaatttaagggattccatccgttttttcattcatttgcttcccagattttcaacatcaacaagaccatccaggaggaccatctgcagcacttgcaactgttcacagagtacgcccgactggcgctggacgagtacaacaacagcaatccgttccaggcaatgctctttcagctggttgaccatttcgctaatttcagtcgcttttgttccttgtccgtgactggagtttcccttatgacgcggagtacggccaaatcggtggccaacgcattcttgacaaacgattggaggtactcaatttgactagtatataaaatcggatgcgtaaacggatgtactacatccccaggatcagttcccccgtattttattcacggcttgtcgatggatttgttaaaaaatatgtttaattttgccaggttacgccccgacaacacccggaacttcagcagctgcgccatcacattcgctcgtccttcgacaacattggctgctttttgctgcctcaccccggcctcgacgttgccacaaatccacacttccgaggcgaacttgacagtgtgtttgtttgctctttttgtgtgtccactgaattcaaagcatttcggttttccctttaggaatggaactcgacttcaaggcacagctccgttcgctggtgccccatctgttctaccccaacaatttggtcgtcaaacaaattggcggtcagcccatcacttgccgagagcttgccgtctacataaatgtgctctttttgcgttgaattcaaatatttaagttcaaatttttaggcttatttcgaggtgttcagcaaggctgaactgcccgagccgaagacaattctaaatgtaagcattttgatgctttccctccttatgaatgccaattgcttttatttttattaggccaccgctgaagccaatcatctcgcggccgtggtgagcgcaaaagcggtgtatatgagggagatggaagaagtgagttttttgactgattgttggggcgaatgataccgaaaagcaaatttttttgagatggcattgggtacacggcatacatggaaaaaagggtcgaccctattccctctttttcatgtacggttggcagggttccattcaataaacagaccaaacccagaaacattcacacgactcttcccaccccactcattcgaactttaaccaattcagtcgtgcggtggcgacgcgccctttatgagcggcgcggaactgcgaagcgagcacgcgcggtgcagggcggaggcgatgcgcaccttccaaacggcgaagaaaatgggcggtcccgagttggcggagcaattcgcacaaaaattggagcaggacatcacggtgggctttcaaattcttccattgaaatattaaattgctgaaagttatgatatttttgttaattcgctttctgtgcttttcaggaggcatttgaatcgtttgagcgcgttaacaactccaaaaatttgttcaaatcaatgcgtacgcccgccgtgctcgtcgcttcgatgattgccctttactgctgttcgttttgctttccctgggccattgtttgtgttcaaaattattctcaccaattaatgcaatgtttcaaattggtattttggaaggcccgtaaccaaaaaagatttgataagactttgtatgaggcaaaatcggctactttttttcctttatttttttgctcttcgcctgtaaaaattatcattgtcaatgttagtttaaccgaagaaaaaatgcattattatctcagttaattgatttaatgcaaaaaatttgacaaatttttaggtttttgtcccacccctatgctcattttccaggccaagaatttttccaactgctcggcctcgacaccatcgcctccattttctccctcttccacatgctgatttttgtcgcgcttggcatttggacatattcacgctacagcggccaattccgccatgcccaagtgttcatcgacggacgggtgcacgcgttgttgcacaatgtgttggcgcgggcctttttcaaggccttcaaggccgctggtcgcttggcgctgaacatgacggtgattagccatattttgttttcttatattctctgaaccgttttttaggcgaaacgcaataataatttgaagcgaaaatgaacggacggcgaaagcgggtcaaagcaacgaaacttatttggaccgaccgtaacaatttatttgatgctcatttatcccataaataattgttggttgattctttcgttcgaatatatgtttgtttttgtgaggcaatttcgactaatacaaccaaatttaaaaatttgaataacttatttttcgacaaatttaaatttaagcctttttttatcacaattaacaacattcaatatatacaaacaaaactgggatttgttagaattacaaaatgtgagtgttcttttgcgtgacttattaaatgcgaagatgaaagggattgaaatgatgtgaaattaaacaataaattggaattattcattggaaaagagagttgccgccttccccaattccgctcgcgtccaacagattggccatgatgcgcgacatggtcgcttttctggagttcgtcgcgacggaggacgagctgttcgccgccgccccagccgctgcatttaaaattgcgctcgtttggcttaggctgtactccttgaatttgttaagaataccaactaaaatccctgtttttttctccactcactgtatgattcaccatccaattttgaagctctccaaacggcaaataaaatgctttgacgaaattttcgacgaacggtcgttggggaagaggcctaatttcgggaatttacaataaaataaagggatgattgtgaaattgcctcagtccggtgatctcctccaattccccacataattgctcgacatccaacagttgcagtgctcttccctcaatgctgcacttttttacgtcggcgtacctaaaaaattacgtttttgtcaatggtgccactgaaacaaattgggcgtccgcgtacccctggaccaaaatacggaaaatgcacagcaaaagcatggaccaaatggcggcgtacaattcgtcggaaatgtgaacgtaggggaaaaggcggacgaacttttgtttgaattgcgaacattcctaaaaaggaacaccagtaaaacaccttatggaaaaggctgacaattgttattttggccattttttcctttgcttttggccaatattcacccccccccctctgttttccccattcacttggacaattgtgtccacataaggcgaatgttgcgaatggatttccccggttgtccaatcggtcgccgaaatttgcttcagaattgactgaaagagtataattttggccgccacacagccaaacgaagcgtcgcccaaatcgaacaccgccgcaagggactgaaaatggggtaaaatgcatatgggggaaaaaacaaatttgtggcataaaatgggcctggacctggattcaatgttggacttgggcaaaaaaccaggtccaggaaaaccccaggattgggtccaggtccaatcgagctctagtataaacgtttaaatcaaacaaacacgatagaaggagtccaaggacaaattgctgtcgctgcctccgccgctttttggcaaaagcgcctcgaggaaaggccgaagcaattccatttgtttggcgaggaaaacactgcggaaagcatccaaattttgatgcataaaaatcaaaagaacagaaaggaaaacatacactgactcaacgccaacaattctttcgacgagcaaaaacaatttgtccgagtcgtttctgtccaacgcgtggcaaagcgacgaccgacggcaaaacaacgaaagctaaaacgttggcatgtgccatatttgtaataattggtttgtttctgtgtgtctgtcacctccgcattttccacactgtcttgcccaccctctgtcgcccccgggccattcattttcttttcgattgattgcacaaattggcggaggcgaaaagtgacgaaattggtgccgaacatttgctgttgttgttgtgcatcaaaatccgagcaaaaaaatgtgaaaatctgaagagaaaaacaaaatggagaggaatgagcgataggaaaaacgcaaagtgaaaaatttaccgaatggacgtaacaattgaacaaagcgacaatcgactcgacggagagttcagcggacgaccgcaaaacggtggccatttgaaggaaacggcctaaggggggggggccattcgaacaatgactaaggaaaatagacaattgccatgagagactaacaaaccaaaggtggaaattttgcttttacttttttgtttatgtgcttttattagcaaatgagaaactcagaatttcattgtaaaacccttttaagtttcaaatgtcttactttagtaatttttagattttttaaaaaatgcgatttcgctattcgaacctccaccaaatttaaatcccaaccatacctgtacnaaagggggtggtcangtgaaagggtcttacgttcgattcgactttgaccacctggggggggggggggggg

SEQ ID NO: 1407 - DNA, 1326 bp, Heterodera glycines
gacaattcaatgtaattcgataagttttttaccaaaaaattattaggttttttgttattataaaccaacttttttaggaaaatatttgaatttttaatgaaatctttaaaaaaaagaaagcaaaattttaggaatttttcagcctctcctcttacgttcgacgaatattcttcagcagaattcgtcgaacgtaaggaaagagtgtcgaacgtagctgaattggaaaatttcacggcactttccttgatttcgacgctgccttttcccttttttccttcatcttttttcttctttttgacccccccccccccccgatttcttacgtctgacgtcatgaccctccccctttgactacccccttgcacaggtatgaccccaactctaagcaaataaagcacttgccaatcacacgtaaaagattcagcgcggaattgcataaatttggcattgcgttgtgcggcgacggcgccagtgattcgtcttcaatggaatttcgagtgccgtcatcggacgacgaacactgagagacttcgccatttttgcagattatccgtcgtctgtcaccaattcgtcggggctgaattcgtttttccatattttttgtttatttcaaaatcattttttaatgctttctcttcgcaaaaaagtttttcatgtccattttttgtgcctttctcctcacactttcgtcgaattgttcaggcgaataagggaatatttccgtgtccatttccgaagaatgtcgaaacaccgaaaaacggatggatttgccgtggacaaatgtctccactgagttctgttcagtctcttcctccgtttgttcatcattttgctgtttctgttgcaactctttgaggaagaaaaattcctaaatttgaaaagcattttttaaaatgcaatccattgggaaaacctagggaaaaccccgtcaaaagtgtcaatcattgacttaaaaacgaccaattctttctcaccggaaggtcaaacagtgtgaattggacgggcaccgggcaaagagtgaacgtttcgctctccaaaaacattttaacttcctccattttctcggcatggtatcgctcaatatatttgcgcgattggtccatcaaagtgtgtcggatgagttggcacggattgccaaaatattggcgaccgaaggtccggaatctgagcaaatggaaatgaggaggaattaattgaataattattgatagtaaatttacaaattcaaaataaaaatgataaaatatgggacctttccgccaactcaacaactttgatgaactggtcgaaaaagatggcactcatctcggcatggccaaaagacaa

SEQ ID NO: 1408 - DNA, 2986 bp, Heterodera glycines
ttaaaaattagaaagatttgtggtagatcttaatttgaaaaatacccattttcaatcaattttctcctaatcaacgggcgcaatcttttcatagaagtgcatccagcacagcggcaggtgggggggggggggaacattgacgaatccattaaaaggtgaacggaaatttagtcgggggtcaaatggtgaagcgaatgagtgggcaggggtcagcgaaagaaaaagcgggaaatggcggaggggggagggggttagcattgaaaatttggggctaaaaaatggattaaaattaagttcgctaatttatttgaaagagaaagccctatcctaagcaacgtttatttaaaatttgtgaaattaaataaaaaatagagtacgataggaaaaaaataggttcaaataattaaaggaaaattatatgaatcttttttttcgttattattttccgtatttccatgcgtcaaaaaatgggaggggaagagtcaaaaatttgaatcgattaaaccccaaagaatggagggcggcgcgggcaagtggtcggatggcaagggatgttcataaaagggagctcggtaataattggacgggtggggggtttgtctaggaagggccggaattttacaacgagatttgtggacatatactactgacgaatatctaaaaaataaactaaaaaagattactataaaagcattccatttccaaccaaaaaataaattaaatcggaaacgaaaattttaatttcaaatcttgaagccatcaaattgattgacaagtaagcttactagaggatttttcatttttagaaaaaacaaatcttcaaattttctactgaaatttcacccaatattttcgtaaatttaagttcttcatttgtttccccataaatttcgtgaaattttccttcatccctattctttttcaaataattttaaaattcaaaaattattctgcatttattaatggtacgaaagctagcatttattttgagcggaatatttgaagaaaaaacattgaagaaaagttgaacctcgaaattatattattgttatttgaaaattataattaatgtgcaataaaaaaacattgatttaaataattaaatttaaatattcttattgacactgagactatttttcggttcgccctagcagcgaataaaaacacaatgtccaaaaatgaagataaagaaaggcccaatttggaaactgacagaacagtgaaaaccaacaacaagtgtttcaattaaaaatgattaaataaccggataatgtcagacatttttctgatcacctgatcaattgatcagttgaccgctggcatattaaaatgaaacacttgagaaaaactttggcactaaagtcagatctaccgtaattgtgtgctcacgcagaaaatatgcgtgacccaacacggtagatacaatagaaacatgaacaaaacatcaatgcaaagatcgccccaatggttaataggagtgcgaaaatgacaaacaaagtgtgccacggattaatgttgttgtgatcaggataatgatcagaatagacagtgaattcattagaacgtaaattgttgccctcgatcactaacttagaataaccattgttatagaaaattacaaaagtgctgttgtagccataaaagggtacggtagcgatcagtgctaaaagcaatccaaagaagcagccaccgaagacagaagcacgctttttccttctggccatgaaaaagtttggcttttgttggaatgtgggcaactttattgctgaaaacggaaattgttttaaattaaaaaataaaattttacattcaattaaattttgaagaatttctatcattttgctggaaaaattgacaaattttgcaaacattcgcttgttgttctcattgagaatttgatcttttgccaagactgtgtccatttggcttttgtcaaattctttcttttcaatttttgtcgtttgaaacatttccatcgcattttgaaaatttccagttttaaatgatttacagaattcattttgcaattctttcaaatttttatccattttgaattcaaattcgctattacacaaaatgccaatcgcattttcctgtatccattcaatggccgaattggcaccaaagtttcccttttttatttggttaaacaaactcgttgcttggtcaaccagtttgttagcttctttgagttggtctaaaacagataagagcagtgacgcgataaaatcgaacatgagtatcagggctgcacgcaagtggatttacaattacggaaatccgcaatccgcaattgcgggggtccaaaaaccccgcaatttccgtaatccgcaatccgcaattgcgtgcagccctgatgagtatagaatgtcataattgagacctcctatttatttattatttactgaaaaaattgaacttagaaaaagcaaaaaactaaattttgtaaaaaaaaacattacgcgaattttgctcatcaagaatttttgcacaatttttgtattctttccgaaatttttcgatttaagggagtccaaaattttaaaaccctgaaatatggaaaaatatggaaataaaaaatgcatcatagaagcattaaaccaagctaaaaatacgaaaatttggagaatttttaatgatgcttaatatgaaatgacctttattttattaaaccggggtttaagcgtaaatttaaataaaataataacaaataaaagttgaattgcttttcgacgaggaatggtaaccattatagagaatttttttttttgctaaaatacgttaaaacatttataaactaaaaaataaattaaaaaaggcagtatataaaaataatttgctattagctgtaatcatcttatttatgagcacagttttagtgggcgtatacacttccaaggagagcgccacggaattccgacggaaatgccaaaattcaattcattaaattgactgtgttggcaacataaaatgattgattggcatt

SEQ ID NO: 1409 - DNA, 1233 bp, Heterodera glycines
  unsure (1)..(1233): unsure at all n locations
aaaatttgtccgaaatttttaaaaaattatatttcggtaacattttaagaaattatggtataaaagatttatatagtaaaaaagcgtcaattgaatatttttggaaggttcagaaacatcaatgaaatttaaaaaatcaaaatttgtaaatttgtcaatctcgatttaaaactcgagattcaagcggaggtggctgcgccgagaatctatataaaaagtgacttttttaattgattttttttaaacaaagtttgttctattcgggtggtgttcccccgagaatttgcattattttcgttttgcttttgtgtttttctcttcctctccatttccccactctttcattattgtatctgtctttcagccaaaattggcataataataggagggccaaaattggtatggcaaaacgagggccaaaataagcatgttggaaagctgaaattttgatttaaattccgaattgacaaatgcatatgaaggttttaccccccccccccttcccccttatctcgtgccaaaatatgagacacaagactaattcccgacgagaatttgtctccgacttttctttcccaaaagtcggggaaaaccatagatggcacacttgatgttggtcttttattcacacggacaatttaagcgaattacattgagataatgaaatgatagtaatgctctctttatgttggaaattaaattaaaaaataaatatttaaaattatccaaaaagtgcaacatcccactggccctggttgaccaatctttgcaaattcccatttcaaaactgcgcaatggaagtgggaaggacatttttaattttacatattattttattctgcctttaatagtgaggaaaaggcccgcagacggtggctccgacctgattaaaaaaaccagaatttttcaaaatctaagaatgtagtaaaccttccggatttaaggaatttaagctttttttcgtttttaaaattcttagcttttttgtcgaagtattttttagaaatttactgtctcactgacgcattttctattgacgcattcaaagcatatgggcttttagggattcttttttgtcgatttatgcctgaaatttagagcccggaactgggatttaggtattgagtcgagatttcgctagaactcacaaaattctcaatgaaaaataatgaaaatttcccntcacaatttttccccttattatcattnagggcttgccaaaatatgaacaaa

SEQ ID NO: 1410 - DNA, 3309 bp, Heterodera glycines
tacaaaaaaattgcaaaattgacattataaatacatgaaattccgcttttttctaatatattcaagaatatttttttgtctgttgtttttactagagtgccacgggaccgggaattttgggcaaacccgggaccgggaccttttcgggttgaaaaaccgggaatttttggctgggaaaaccgggaaaaaaccgggactagtcccggtcccggtcaaaaccgggaccttggtactcagttgtactcaattgtccgctaccaggtcccggtcccgtggcactctagtttttacccagaattaaattaaggagaaatttctataggctttaagcttcattgttaccaacaatgtaggcattgaccaagtgagaaaaaaaagttatggccaaaaaaactgaatatggcgccattgattaaacacctaaagtgcacttgggcctcctttgcatttatccatcattttccgtgttttctgatgcccatttcatccacattgcttccaaatatttgtcaaaactgtgtcgaagtaatccttggaatggtatgatgatttatgcttgttatgccggccgatggcaaacaaataatcaatatttatttggagcagggaaaagaagacacaaataaattgggaggaatattcaaataataaaagaaggaaataacataaaagaaagaagtgaacggggagggtcaacatcgcgggtatttatgggcggaaaaaggggcgtgacataatgaagggaagagggaaatacaagcaaagcaaagggtcaaaatgggtaccggacaattgggtcccaaccctaacatctccccccttaaaaagtgtcaggcctccgtccatcatccgcatcctcaggtcggcgttcttatgcctcttgttcacagtcggaagctcggagatcatcttccaattaatctcgtcggccgtcactgccgatttggtgcttcccgacagatccaccggatgaggcgctcttcagtccaaatccgtcaagaagaaaattaaaattttcatcttcatccggcatgtacggctgtacactctttgccgggaattctccggtcgtgccgtccgaaaactgaacgtcgtaggtgcctcctttttggctgatcacacgtccggcgcgccatggctcgtctcccaagctggcgatcacattcgctccaacggcgaagttctgcttcttaccacgtccgtgttttccgaagaatttcttcactttcttcttgctcactccgttcattttggcagtctcagtttggaacttgtccttcagaccgatggagtccgacaatcccagtctgtccatcatgtccattccgagtaagttctttgatccgtctttggaaacaaagaaatgcccaaatgctgaacgatttccgaacgaaaatgttgcatttcctttgccaacaaacggtcgagttgttccatcatggtacagagcacgttcttcacaacggctcaatttcaaagctccgatttttcgcacggtgtcctcacgaagaatagttccttcggtgccaaaatctgcaatgaaatccacattcgttccgtccacatcaatcggaacttcgatcattcctttcttcctctggttctcatctttaaccaggaaaactcctccaactcggatgttgttcaccgctttttccttctttcctccgttcttctttagccatgcctggtgcttggcacacatcctttccaagtgcccattcctcttgcactttcggcaaaccgtttcttggtgtcggcattccctcgacgaatgcttcccaccgcatcgccagcattcgcgctgcgatcggttgctgctccgagttcctgtcgacatgctgctcgcattcgacgaatggtccgagttctttctcttttggcccttcaattttgctgccaacaaatgcttcgaaacatgtggctgctccaatgcttggcttcggcgatggtcgacatgtagatcttcaggtcgtctaccacaccgtcatacttgacattgtcaccatccgctgccaacttggccaaaattcgcgaccgtaaagtagcatccttcggcgatttcaaagaaatgagcaaaaccatacagttgaattgcccctcattcaatttcgtgaagttgaaatcccgcagaagcttcttttgccggttgatgaaggtgccaaaatcctcgtcgtcgtctttcaccgagcggagacgcagagacactcatacctgtcaatccagacggattgaggtcggctgaacaatgccttcagcttctccgcagtctccacaaaattgaagtcggtcacttctctcggtaagacggacttacaatattcgctgaacgtcggtccaaacaatttggtcatcaacagcttcaccttcaactcgtcctgaaggttcagcgcggcacagtcaagagcgaacttaaatcgcttgagccagtcctcaatttcacagccactatgctgactagcatcaaaacattccacgtccggaagtgttggcaattgagaggcattctctgccggtggcgcgttttgctggtgtgcattcaacaactgctgcaaaatatccgtcaatcgttggattgatgcgtctcccattcttgccgttcaccactctattgctaacagcgcctagcttgttaacagagtgggtgcgcgtggatgaactgaaaagtgtcgccaagacacaaaatcagcagcgcaaattttcaactactaacagtacctaactgttagcaggtccaacaaaaatgttgtttattatcgcctagataataaacaaatgcagtccagcagcgatgactttcgattgctgttgacctctccctccaattaagagtccaaagtttggaaaaagtttgttggttgcttcaagcaaaccaataaatccaaaactgcttccacatttcaaataaataagcccacagtgcaatacgtacgggcgtcgctaattgttatgccggccgatggcaaacaaataatcaatatttatttggagcagaggggaaaaagacacaaaataaatggggaggaatatttaaataacaaggaaaaataacacaaatgaatgcagtgaacggggagggtcaacatcgcgggtatttatgggcggaaaaaggggcgtgacataaccaagggaaaatggaaatacaataaagcaaagggtcaaaatgggtaccggccaattgggtcccaaccctaacatcattaatattttaagtggcttaattaagcattaaatttaaaatataaatttatttaatttttatattgtacttttaatttatttttttatggacaaatttcacaatatcaa

SEQ ID NO: 1411 - DNA, 3760 bp, Heterodera glycines
  unsure (1)..(3760): unsure at all n locations
ctgctttctggtttgaattntggcaccatttttcggcacaatgtcaatcccttcgcatcaaatgcaaactgccaaggtgctttacatatttttgtgtgtaaaatattttgtttgtttcatctacagtttgcctcagattgtgccgagttaccgtatcaaaggcatactctaacacatacataaaattggattgccctttcacaaacatgaggaatgcttcatcatcaatctatgtttcaatgaatttatcttttatttttattatttttaagaaaaaataataatatcatttaatttttgatgaaaaaagctgtgaacaaattttgtgtctttcaatggcctcttaaaaatttttagactaataaaaaaaacaattaaagttaaaaacatttacagatatgaatggaattaaaaaattggcataatgccgaccaccctacaaaatttatggccgtttttcgctggtttacgtccataaattgcaggcggtaattacaattttattattaattttaccacgctttccactttgtacactagcaaatgcaaaattgctgcatcctttttcttgccaaggtttttgtcggcactttttgattttttgtcggcactttttgatgccaatgatgatgatgttgatgaagccaataatgatgatgatgatggttgtcccatttccatgtctaataattgtccattgccaagtagaaatattttctcattcgtttcattttgttccattttttctttgttttctacggcttttctgtacattttctccatggttttttcaaatttagcacgtgcaattgctaagtttttttttgatttaaaatgaaaataaattttctttccacagtttttttctcaagcaaaaaattaccttcactcataaagtttgaaagctttaagatatagacaaaaaaggcttgaactttattcaaacagaattagtgtttctgaattgggaagcctttgaggcaaaatctatggggcggtccgggtttgaaccggcgtctccggctttccggaccaatgttgtacaagctaaactaccggccttgccctctcctgcctccacaatttgctcgctccttacaccctcctagacctcctgcacccaaatttctcaaaaaagtttgctaaatttttccaaaaaccaacaaattaacaatctttggtcaaatttgttataattggtaaaattttgttttccgcccgggggcggtagcttctccaagctaaacgaaccccgggggccatccctgtgctgactctgttcggtctgctgcactttctgctgcgaccgtttggcattcgttgccttaaaatagcccatcagcgccgactcgttcaaaatcaatggcggttcatcaaacgattcccatgtgtcaaacatcatggccatccgttcttcattgtcctcaccaaatggccaattaaaatggattttcgagactctggccatgcatttgatgtcatcaaataccgtagcgaagcatctgtccgaattgtcataggtactgtagagaaaaatgggcttcaccgcgccgttgtgtccgatgtgctcgcggaacaaatattcatacaaagcatccaaacacttttgaaattgacagcgctcatttttattctgatgaattttggtattggcattggcactttgccattgcttcctcatgcggtgcaaaaggccaagatgtgtgccataaacttgtgccaacatttccttgctttgtgcgcttgtgatttctttgtccgcacaaaattgctcaaacgcggtaggccctttcacaaaggcaaggaatgcgttgtcgtcagtctaattagagataatttaatttttaattagtgtgtgcgccgtccccatcactcaaaaaattgacttttttctgatcattttaactagggttaacccaacatgtttcggggaattacgaaattcgtaaattgcacttgaaataagatggaagtatctttaaatgagtttttaagacttttttgttctggactttttctttttgtgtttttttagactttttatgaaaatttcctccccgacgaaggtgttgctccccgacatttttttaatttcttcagccatccccgacaaattttttcggggaatttccttcccgttccccgacattttgctccccgagggtcggggcttaaccctaattttaaccacaaatttttaatggaaagtctcgaaactaaattgtattttcaatgtaaaattccttctaataattaaataattgaaaaagtgtatagtccacgatgttttgggctccaccggcgtgccccacccgcctggattcggggtaggaatgtttaggcagggattaatcgcggccgcgggattggcactggggctggggtgaagaacaaaaagcatttttttgaaataataattttcaaaaaaattccgtcaaattaattaaatcttgcccaaattataattaccggagatgaaaaagcaattgcgtaaactgacaaactaataataataataatttgagcaaaaatattggaaaggaaaaaattcatttgtaatttttcagagaattaaaatatgaatgaataaaaaattttatggatgtatgcttttccaatttggtgaatgaatttctcatgtaaaaagccttaaattttttctttatttggcaaatcaataaattttataaaaataatactttgaaatgaaaaaaagaattttctttattttgactttttcaaacaattaattttcattattatctctttcgatatttaacaaataattattactttttaaaaatttgcaaaaaaaaaaattttaaaaaaagctaatgaggtttttctttttactataatttaagaatttttttaatttttgcattcagccaaaaaatgaacgagaatatcaatgaccataaccaacaaaaaaagcaagaaaacatatgaaaaaaattgtaaatctttgaaaatctccgtcctcaactgggcaagttttcctttcttatgcccccaggctctccttttcggcctgctttgttgcggtaaaaaaataaatttcgattttgaaaaatcacttaaagaatatgattgattgcgttgagacaaaacgaattaatttttttaaatttttccctcggcaaataattcaattgaaatctttctatttttttcttggaaaatttccgggtcggtcccggtcaaaaatagaggtccctggttctggctgatttggtctcagttttgcacaacattcttgttcccgtattattattctcaattaaccaaaatttttgttattttttgtttgctattattacaaattaataaaaaaaatttttttttgaaattttcttttctcccattattggaaaggcaattaatgtatttgatggacagcacagatcacttacatatttagtcattcaatgataataataaatgtgatgattcagaaatgtatagcaaaatgtgtggggaaatcattcaatgaattaatttaatttcgttatttcgcattcacaattttgaaataacggataattactataaaatttgtttgtcaaatttagtcataatttaaaataataccaaatttatttttaaaaaatgaacacaatgccatcatactgtatcatattctttggtgttcttctgttggcggtccatttttacggtaagttcaaaaatttaatttcacacaaaaatagctaattgttgttttcatcctagaaatgacgaaagccgaagaatgggtttg

SEQ ID NO: 1412 - DNA, 975 bp, Heterodera glycines
cttccccagtgaaatttaacaaattcaccaaatggcgtgtgaatttcaattgtaatttctgaaattcgtttcgactgtagacgatgaaagtactcggtgctatatataacttcactaatcgaccctgggtcattgacgacgttaactattcttaagagtggagccatctggttcccgataattgtgttttctattaaatttggtgcataaatgtatagctgccttacgcctcccgtcaaatctggcatataattcgcctcttccgcatgaaataacctgtgttcttaaaaccaagcacataggcgaggtgttttgacaaatctatgtgggagacagcagcggaaagatagacaataaatttttgatcaatgctgtcatattgaaattgaacatcctcattggctagtctctctcttttttgtggtcctttctcagcttcagatacttgtctattttcaatatctttacgtttaatatgctcacccaaagcctcattaagcctattcactattccgatataacccttttccgatttatcattatattcctcgagagttgatgaatatttgctttttgcctgtttggctattccctttgcgacgtcagctgatttctttgcttctttcaagtcattcttttccacatgctctaatgttgtgtttttggctttatctacttcatcttgaaaagatttaagttcatttcggtatgtttgaatttcggtccccttctctaccattttgtcaaaccacacttttatatcaggctcttctaaaatttgaggatttacttctcttagtgtgcttagtttggtttggatggaactcgatacattgttgatatgattgagttgtctttctacatctctcccggcgcgttctgcggaccctctttgcgacatcaatttttgagtctttggtttcttcagccttggcttctctcttcccacgttgttttttgattttgtaatgatgt

SEQ ID NO: 1413 - DNA, 947 bp, Heterodera glycines
ttgttgggaagggtactgatttgtcccgcctaagttatttaattcttttctatctcttcccctcctactctctctctgctgttccctccataaatacccccgtccctttgaccatccgttcattccctcatttatttgttgtatgtgcccaactccctcaatcgatactcctgcccccatttctcttctttatttaattgtgtcttcaccaaaattggaataaataaatatttattctttggtcaagtgcaaaggcacaacaaattggcgacgcccgtggcagatatttcgacatttaatttcttcaaagaaatttcgtctgttttggatttgttggatttgcttttagcaccaacaaattttttccaaatttcatcggagcgaacttcagccagtcggcatttgaattttccaaattgttcgtcatccctactgattagcttttagcaatcagtagaagttagcgctgctgataatttgtctaggcgacatttattagctcatccacgcgcacccactcagtttgtatctaggcgctgcaaacataagagtggtaacgacaaaaatggcagcaaatccgacaattgatgaattgacgaaattgctggccaagcagcagaaactagtggaacaattgctgattgctcaacagacgaatgccgcgccagctcaatcaactcaactcccagctctttcaaacgtcgaatgttttgatcttgatgatcaatctgggaagaacatcgaaagctggatcgaccgttttgtgttggccctcgactgctcttcaccaaacatccaggaccaactgaaagtgaagctggtgctgacggaattgagcgagggagcatacaacgaatacagcaaattttgtcttgcgaagaaggcgaccgagttcgacttttcggagacatcggcacaactgaaaaagtttgtttgccaacccccaa

SEQ ID NO: 1414 - DNA, 7725 bp, Heterodera glycines
gatgagggcagactctttttaaggggggagatgttgggaagggtactgatttgtcccgcttaattattatttaattcctttctttctcttcccctcccactctctctctgttgcctcctccataaatacccccgtccctttgaccatcgttcattccctcattttatttgtttgtgtccaccatttccctcaatcgatatttgcccccactttctcttatttaattgtgtcttctccaaattggaataaataaatatttattcattggacaagtgcaaaggcacaacaaattggcgacgcccgtggcagatttcgacatatgaatttctgcaaaagaaattgcgtctgtttttttggttttttgcattgcttttagcatcaacaattttcgccaaacttaatctgagtgtacttcagccagtcggcatttgacattgccaattgttcgtcatcgctactgattagcttttagcaatcagtagaagttagcgctgctgataatttgtctaggcgacatttattagctcatccacgcgcacccactcagtttgtatctaggcgctgcaaacaagagtggtgaacgacaaaaatggcagcaaatccgacaattgatgaattgacgaaactagtggaacaattgctgaatgctcaacagacgaatgccgcgccagctcaatcaactcaactcccagctctttcaaacgtcgaatgttttgatcttgatgatcaatctgggaagaacatcgaaagttggatcgaccgttttgtgttggccctcgactgttcttcgcccaacatccaagaccaactgaaagtgaagctgatgctgaccaaattgggcgagggtgcctacaacgaatacagcaaattttgtctgccgaagaagccgaccgagttcgacttttcggagacatcggcacaactgaaaagtttgtttgccaagccccaatcggtttggatcgaccgatacgaatgtttgcgggcatcgaagcaggacgatgaagactttcgttctttcgtcaaccgccacaagcggctgcttcgcgattttgattttaagaagctgaacgaagagcagttcaactgccttatgcttctgatcgctctgaaatcgccgaaagacgccgaactgaggaagcgaattttgggaaagctgacagcagacggcgacaaagcaaagtacgaaaatgtcgtcagtgacttgcagatgttcctgtcaacaattgctgaagctaaggccattgagcgcccatcccattcgaatgttttggcgatcaatcggagaccatttcagaagagggaaccaaacaaaagcccaactcagcctacttgttggcgttgtggcggtggacatgaaccaagatgttgtcctcatgcgaaagcaacatgccgaaaatgttcaaaagttggacatttgcaaaatatgtgtgcgcgtcatcgagaatggctttcgaagcattcgagaaagccgacgcaaggaaaacagatgaatgctttacaactgggaggtatttcagtgaacgcactgaaccaaccgagccgtcttgtggaggcaccagttgatgtgaatggcaaacccattaattttgtgttcgatccgggagctgagataaccgtgatcgacgaagaagcacatcttcaaattggacgtccccgactaattctatgcagcgaaagtgccaagtaccacgatggaactgaatgcaccctgctggggaagggttttgcgactttcacgttcggaggacacacacaccaaggacaattttatgtgaccaaaaagggttcactaaatttattgggaatcgacattttggacgcttttggcttattggacacattcagagccaaagttaaaatggcaatgaaagtgaatgtcgttaaagcgggagggaaggaccgaatgaagagtcaaatcccaatgaagaaggacacgactttgctcgaccttcagtcaaattttccgcatgtttttgcagaaggcctgggccactgcaccaaagccaaagcccatttggaactgaaggcagatgctgttcccgtgtactgcaggccacgtccagtgccattcaacacacgtttgattgttgaggccgaattggaccgattgttggcgcagaaagtgatcagaccgatcgatcacacccgttgggccgcacctattgtggttgttaagaaggccaacggagcagcacgcgtttgtgcagatttttcaacgggcttgaacaacgcgttgcttttgaatcagcatccattgccgttgcccgaagacattttctccaaattgaatggaggacgaattttttctcagatcgaccttaaggatgcgtatctccaggttgaattggatgagaaatcgaaagaactgtgcacaatcgccacgcacaaaggaaatttccaatatttgcgcttaccatttggggtgaaatcagcgccagggattttccaatcgatcatggattcgattttggccgattgtcagttcgcttttgcttaccttgacgacatgatcgtggtcagtcgttcacatgaggagcatcgaaaacatttgaatgaagttttcaaacgaatcggaaattttggattccggattaaacccgacaaatgctttttcaatcagagacagattaaatatctcgggttcgtcatcgacaaaaatggaagacgaccggatccatcgaagattaaggcgatttctgaaatgcccgtccctacaaatgtttcggagcttcgatcatttttgggaatgatcaatcattaccaacaatttgtgaagaacatgcgatttcttcgacagccgttggacgaacttctgaaacaggacgtggcttgggtctggtcaacggaatgccaaaatgccttcgacaaaatcatcgaagtgctgaaatctgaccaactcttgacccactacgacccggaaaaggacatcattgtatctgccgatgcctctgattatggaatcggagcagtgatctcccatcgttttccggatggcagcttgaaagcaattgcacatgcttcttgctctttgtcgcctgccgaaatgaactactcccaaatcgaaaaagagggattagctcttgtctttgcagttcaaaagttccataaatatctttttggaagacacttcgtcctgcaaaccgaccataagccattgttgaccatttttggtaacaaaaagggcattaaagcgtgtacagcaaatcgcttacagcgctgggcactcatacttttggcgtatgattttgagatcgaataccaaaacactgccgattttggtcaagccgatgctctttcgcgcttaattgcaaaaacgccagggcccgaagatgaatttattgtggcaacaataacggaaagccctaatttggcaactgtgaatgcctttacggcacaatttccaattgtccacgaggacattgtcaatgccactaaagccgataatttgcttcaggaagtgaagggattcatcctgaaccaatggccaaacaaagcgaatatgtcagaggacattttacaattccatcgaaggcgagaagctctttcattcgaaaacggatgcattatgtacgccgaccggattgttgtcccagcatcgcttcagacggaagtgcttaagatgctacatcgcggacacccgggaatgaagcgcatgaaaagtctcgcacgccagcatgtttactggcccggaattgatcaccaaatcgaagaagtggtaagaaaatgtgagccttgtgccaccgaagcgaaggcgccaaggaaaacggagctaaattcttggccaaaagcggaagggccatggaaacgtgtccacatggactacgctggtcccttctttggaaagatgtacctgatcattgttgacgcacactccaaatggccggaagtgttcgaaatgcgttcgaccggatcagcagcaacaattgaacaattacgttcattgtgcgctcgttttggactgccggagactttggtcactgataatggcacccagtttagctccaacgaattcaaggaattcgtcaaagaaaatggcatcaaccacctcttctcagcgccatacaatccgatgtccaatggacaagcggagcgctttgtcgacacctttaagagggcatgtcggaaactgaaaaaagagggcgcgcaaaatgtggtgaacacatttttgacgtcataccggacgacgccgaatgacgctttgcccgatggcaaaaaccctgccgaacttttccttctgcgaaagcctcgcacaacattggatttgctgagagcaaaaccatcggcaccactgatcagagacgaggcgatggaaaagcagttcaatcgtcgttttggtgcaaaacctcgaaaattttgtcttggcgataaagtttttgctcgtcatcgccaatcgcaatcatggcgcgctggaatcgtcagccaatgtcagggagtcatttacgaggtaaagttcccgaatgacacttccaaccgattccatgcaaaccaaatgacggcccgtcatacggatgatgatgaccatggcaacgaagcgttgaacattttcaacgacgcttttggtcttccgttggcaccgccggatggtcccaacgaaacagctctgccagctgatcaacaagcggcacctgcacaagagacggacgaagcaaatgctgaacgaggccatgtccgtgtcgatcgcccgcaacgcaatcgacgtcctcctcaacgctattctccgagttgagcggactgatcactgatcaacggaccgatggatgaggacagacttttattttttttaaggggggagatgttgggaagggtactgatttgtcccgcttaattattatttaattcctttctatctcttcccctcccactctctctctctgttgcctcctccataaatacccccgtccctttgaccatccgttcattccctcatttatttgttgtatgtgcccaactccctcaatcgatactcctgcccccatttctcttctttatttaattgtgtcttcaccaaaattggaataaataaatatttattctttggtcaagtgcaaaggcacaacacgggttaaattttaaaaggggtaaaagcatgactgcattaattttctggaccggtaaagtcgtaattaccggaacaaaaaacaattctgaaattgatgaaatgtatcattatatacttccctatttgaaaatggcgcaaaagaaaataaaatattcaaatgaaaatagaaaatgattaaaaatgaaaaaacgggtggtaccccttgtcttggactgatcctcaactgggttcattatgcattaccaccatgtccgagctgggctcgtccctctcagcaaaggtgcgcatgggggacgttcgaaggcgtgaaccccaaacacgccatcccccgagggggcttaactcgaacaccagcgctgagagagcgaaccgagcgcataaccactacgccacggaacgctttgatggcgaagaataaatgtgcaatttgaaggaaatttttgacgagatcaaaatcggagataatgcgcgagcggcgacgaggggagggcagaaggagagggggggggggcaaaaaaaaaataatggagaattgaaaaacgggagaccaacgaattgattaaaaatccaatataaataaataggaattggaattaaatttgcaaaaatataattgtatttccttacctgccacaaatgtgacaggtggaagaattggaaaaaaaaattttaaatttgcaaaagaaaaattcaaatttcctccacctgtcacattggtgacaggtggttgattgatgaccttccgcggcgctgcgcggcgcggaaaaaaaaatacccgcgaggatttggggaaataaatgttgggcggcaacttcaaaggacacataggtttgggatttggcacacgcccctcccataggctttggtttgtgcgggaaaatgtccggggcggcaacatcaaagagctgcacccctcccataggcacggtttcgtgcgggaaacacccgcgtgaaacccgcgaggtttcggggaaaattaaaaaccgccaggcggcagacttcaaagaaacagaccctcacataggtttcggttggcacgcacccctcctataggcatgggttcgtgcgggaaacacccgcgagaaacccgcgaggttttgacgctctatactactatcatggaaatataaattgtataggcgtcgcagaaggatcgagtcgataagcgccaataattttccatttattattttggtttggccagcttgtataattcttacaatttcagctcattacccccttaaaataaactgtataagtgttgcggaagtatggagttgataaacgctaataatctccgatttacaatttacttaagcaaatttttacagatacatttggaggaaaatgagctgaaatgtgaaaatttcacaaagatggtcgtgaaaataataagtcggagattattggcgctatcaactcaatatttccgcaacgcagttagagtttatatttagatgataattagctgaaattttgagaatttcacaaggatggtcgtgaaaataataaatcagagaatattattaacccgatccttctacaatattgctgcagtatttatttagagattaagtagctgaaattgtgagattctctatttacatttcattatcactttgaaattctcaaaatttcagctcattatcatggaaatataaattgtataggcgtcgcagaaggatcgagtcgataagcgccaataattttccatttattattttggtttggccagcttgtataattcttacaatttcagctcattaccccctcaaaataaactgtataagtgttgcggaagtatggagttgataaacgctaataatttccgatttacaatttacttgaacaaatttatacagatacatttggaggaaaatgagctgaaaatgtgaaaatttcacaaagatggtcgtgaaaataataagtcggagattattggcgctatcaactcaatatttccgcaacgctgttagagtttatatttagatgataattagctgaaattttgagaatttcacaaggatggtcacgaaaataataaatcagagaatattattaacccgatccttctacaatattgctgcagtatttatttagagattaagtagctgaaattgtgagattctctatttacatttcattatcactttgaaattctcaaaatttcagctcattatcatggaaatataaattgtataggcgtcgcagaaggatcgagtcgataagcgccaataattttccatttattattttggtttgtccagcttgtataattcttacaatttcagctcattaccccctcaaaataaactgtataagtgttgcggaagtatggagttgataaacgctaataatttccgatttacaatttacttgagcaaatttatacagatacatttggaggaaaatgagctgaaaatgtgaaaatttcacaaagatggtcgtgaaaataataagtcggagattattggcgctatcaactcaatatttccgcaacgcagttagagtttatatttagatgataattagctgaaattttgagaatttcacaaggatggtcacgaaaataataaatcagagataagattaacccgatccttctacaatattgctgcagtctttaaaggagattaagtagctgaaattgtgagattctctattta

SEQ ID NO: 1415 - DNA, 3065 bp, Heterodera glycines
cccaagcaaagcataaccgtggagcacgacggaatcacggagattgacgaagagaaattagccgaccgattgccggtgattgtcgagaacttccggtgcgcttactcctcaaggtgggtgctattgccgcttcaatttggctaattgccctaattaattaattggttcataaaatgcttttctttctcttttcagggcttacgccgcctttttggccttcgaatgttcattggtcatgtctcctctgctgcttctgctcttcgtccttccgctgatgatcggcggtgcctatcgctcctggggtttggacatcgctcgcgcgtggtgggagaggagagattggtcggttagcaacggattacaaaattctcaatttctaaattagtttcggctccgacaattttttaggattcgagactattttgttacatacgggtgcattgcgacccctcctcccccgcgggttccccccgtatcaattccctacccgtgaagtttaaaaaaacactttttaaacagaaatttttcaagaaaaaaaataacaatttaaaacaaatttaacgggggagggtgaacgaactgctcccagtacaaacactcaccccccccccccccaagggagtttcttaagaaaaagacaataaatggctgaatgacattttttcccccgggtgcccccgaaaatcctcagttctaatttttaaaaaacgtcacattttcctacccccccatttctccaacttcaaaaaattttgagaaaacaaagtcaaaaatttttaaaaaatgtttcccaaaaaacaaaaaaaaactttgcaaaattccccccaattatcccatttttttgggaattaataaattaatttctcccacttttctcttccccccctttcgggaaagggtccccgttgggccctttttacaaaatcccaattggggtctccacccccccccccgggggccttggtccccccgaaccctaatggaaataaccttttttttctgggggaaatccaaaacccaacttttccgtggtacagggggcccattggccaggaaaaggacttttttcctgggaaaaaaaataccatataccccaaaaaaaaaataaattttaaaaaagtttcggggttttgcttttttttttgccacaaaaaaaaggagaaattttgttttttttcaaaaagaccccaccaacaatcttctccccccaccccccccggggggcccacaaaaaaaagaaaaaacacagaataaaaaaaaacaaaaaaaaaagaaaaaagaagttgtttctccaaaaaaatacaaaaaaggaccgctcctttttttttttttttttgttgtaggaggaaaaaaaaaaaaaaaattaaatatattttttttttttttttttttttttttttcttcccccccccgccggtgttgggggggggcggggggggaaggaagaggggcggggggggggtgagaaataaaaaatagtatttgattttttttaaaaaaatgttattagtaaaaaatagttgcggaaaaattttttgttttggggaaactgcaaataaaacaccacattttcccgtttttttaggcttttgcctcgggcttcatctccttccaatttcatcattgtcttttcgtctcttcccccttttgttgactccgttgtgccattcgttctgaccaacgaattcactcgtgaacaattggcattcaaaagaattaaccatcgtttgctgctgatccgttgtccaattgcgcgagacgaaagcaaatggacaaaatgggagaaggaagcgattgattggcaaatttataatctgaagaacagaattgacattgatatttatcgtgaggaccaaatcggagacgggtcagagaatgcttatttaaaattcaaattgattgcttttctatttttaggcttctctacgcaactcccggcccaagtgatcagcagtagaagtgaatgattgaattgttaagaaatgatcgatcgatcgataattatgaattgtaaaatgattttttgacttgctcataaaaatgcttttgttggaatgatcagttttgcttgtttttgtattctttaggataaaaaatttagtgatttcctgaaaccgaaactaactgaaagttttttattcaatccaatccacaccataaaaggaatggctctactccagtttatgcgtccaatcgttttttatgcgtccaatcgacttttatgcgtccaatcgctttttatgcgtccaatcaaagttttatgcgtccaatcattttttatgtatcaaattatgtttttttgccaaaataaaggttttatgctttcatgagtcaaaaagtttgccacactttttatgggcagccgctgcctttttccattagtcggcattgagtcgaccctcgtgacagacaagtgcatacccaaggcattgaggctacgtgggggtctctgaagacatctcttcgccatttgcgtggctcaaatgaggatatgttgccgacatatttgtatcagtatatgttcagacgatttcacggaaattccaaaatatatcagcatattttggaagaaatgagacgcaattatcccgtgtagtgtaagagatttttttttacaaaaactggcaagggataataattttcacatggtaaatgttattggatgcataaaaaatgattggacgcataaaactttgattggacgcataaaacgtgattggacgcataaaatgagattggacgcataaaaaacgattggacgcataaactgaagtagagccccttactattacccaaatttttttacaaattacattttatgcctcttattagaacattcgcaaatcgctggccgtggacgtggatctaatctccaacagaagacgggtgacgctaacagcagctaatatttaccatcaacttttgttgtttagaacacggacgcggctacagcaggggtatgcaacaacagcaactcagagaactttcaccaatgcttgggccccgagggggccgaggacacggcgtctcaggacatggcttagaccgtcatcctgttgcttcta

SEQ ID NO: 1416 - DNA, 2960 bp, Heterodera glycines
ttttttgcggttattttaaggcatttctcggccaaaaaatatctcttcatatctggtggcctcttaaaaagctcgtaagagtgggggttctcagctgggtttgatctctgccataggggacggctgttgttgctcatttatccgcaattttcattgtgatgaaggggtatgatgacatgtgttgctgctttttatgtgtgatatttttgacagctatttcgtcaaggaataaacaaaaattgaggagtggcatatagcggagaatgtatttaggatcttttttgttaatctaatgacgtcttgattcagaggcaaataacaaaaaacgtattcatgaaaattgtgaaaaactcgaaattttgaagttttttcttaataaaaattttttcaggcttgaaaatctatctgctttttgtaaggctaatagagcatgttaagagctttcgaatgataccaagattgttagatttgaataacaaataaaaaagctaaattggaaaaacgtgctggcgcccaaccgtgagcgcccaactgacgggttccgaaaaattatgatcaaaaatgttctaaaaatcaagtttttttttcattgttttctgccataaatcataaaaatggccaaaaagtcacaataccttaaatttccatccccaatcattagattatctaaaagttatattaaaaaaacactcaatattcaaaaaacttatagagccaaaaaggtgtgaaaaagcgaatttttttatgcataaatcgtacgaatgaaagaaaataggaaagtagggagagcttttataggaccgtttagtaaaatgatgaaaaaattggcaacaaccaaaaaaattagtacatataaaagcggttgctcctccgtcacttttcgtttatccattcgccatttatccatttgaatctctccgaatttgtcgccctgacaattccttcaaaaaatgattttgtacgttttgctcatttcttcccaattttttcctgtttcttctcattttttagtctgtacggcgtgccaatgtttgttggctgttgtgccattctttggatttattggaaccgccccaaaaaaccaccaaaaccacgaggacatcgcaaaaagaaaatgtaaaaataaaaaataattccatttttcaatttattttttttttaaattttcagtttcatttccggcgacgttttgctgtcggtgttccaatttcttgcgccttctcaattgggtcttggaattgcactggtcagccaccgatttgacaccatcgtcgacgaacagttcaaaacgcggcgttgggtgctgaactccatggaaatttggcgccaattttggaagtttttcacgaaagaaatgggaattgtcgatttctattggaaaacattgccaattccgcaagtccaattgccacgcaacgtcatcggattcaaacgcatcaccatctcgtaaaattgagcgattatgctaaaaattttaagctaacatttccccatccattttcacagtttcatcgaccaaaatgtcatcgcttttctccaccattttcgtccacttttcgccgcctgtccaatttatttgtccatccaaacgtttcgtggtaattatcgcatttggaagttgattttgcgcaacatttggccactgctcggaaacaacattcatagcatgggattgtccgtcggaacattccaccgtttgcgcaaattcgagccgtcatttctcgacgattgtgcatcgcttcgcgttgtctccttggacaatttcttcatcgaattcccggccgatgacagtgccacggcatcggatggacaattcgtggccaaatggctgttcactccgcgcccaaacaatgtgccgaaggtgttcgaatgctcgttgtacatggatgatgaaatgttgttgtcgatgattgacgccatcaaaggggtgattactagggcgtcaaattatatggaaatccatattttttttcctggactgtgggaagcctgaaacgtacgaaaaacatgtttttagctttgtttgaagcttctaggatgggtttctatatccatatttttccatatttcgcgatttatgtccatatttgtccatattttggcatttaagtccatattttatgtccatattttgatatttttccaaaaaacctctattagaacggccccaatcagctaaattagccttttggcccccctaacaaataaggatcgaaaaattttcagaaaaaatgatttttagaaaaatcttatttacatttcaaattttcttaaaaaatggcaacattatgtcaaaaataagcaaagcgaaaattttgcttttcgggccgattttcgctaagactgagtaactaactttatcgttattttttcttctaaaatgatttttaataccatgtttagccatttttgaacgttttactttacatttagcgaatttgaggaaattttgagaaagcatacccttaattctgaaaaatttatgtccatatttttccattttatgtccatattttgagatttttgcaattttatatccatattttgcgatttgttgtccatattttatggccatatttcgtgattttatatccatataatttgacgccctactgattactaattgattcatttggcactttgccgtcttgtgattcgctgatctggcatgaatgttgtttttcatccaatcttcctgactcaaaacgtctcctaccacccaacttgtgttttcattcgatcccatcagatcggtctaaaccgtaaagtgcctcatggggtttttttttgtgccccccccccctccccccccccacaaaaagtgtcatttatttgtcatttactatttattaaccgattttttcccaaatttaggcttttgtttgggctacatcacccgccaatttcatttttgccatttgggtcttgactatgaagacaccgtcgtgccatttgatctg

SEQ ID NO: 1417 - DNA, 4872 bp, Heterodera glycines
tgttttttgctgatccgttgtccaattgcgcgagacgcgaacgaatgggcaaaatgggagaaggaagcgagtggctggcgaattcatgaccaatggaacgcaattgacatttcaattatttgtacgggtgcaatcggcgacgggtcagtgcataaattattcaaattattttgtttttttttttaatttgaaggcttctcgacgcaactcccggcccaagtgatcagcagcagaagtgaatgaatggattgtaaataagtgatcgatcgatcggtcaatttgaattatgaaattattggcgtgctcataaattgttgtacatatttttttttgagtattatatgaaaaatgtccaaatttttgttgcaacctttgggtcttatttcacactaaatggaaaagcatttgctttttatgcggctttttttttgttatttatgaggtaataaaaatgaatctaatcaatgatatattcatgatcagcgaccccgaaaactcttgattgaaagcgtataccgtacatactctttttatcctccatggggtattatttttcaacatcctcagaaagggggggggggataactggagactgggggattaagatagagtaggaatgtgatctgaaaatcaatttgttgacagattttgtcgaaaaaatagtctaaattttactattctggaatgttttttaagaaaataaagaatttttaggatgacgccgcaaattttagaaattttggctagtttttcaacagatttttgtccaaaaatgaacaaatttgtgtcaaactttgaatttcttgaaaaataaagacgctatgccataaaatttcaaaattatgaatatattaagaaatccgaacaattttggtcaataccccaaaatctgaacatttcttagaaataagaacatatcaaatccctgagatagagggattatttttcaaacgcctcttagactgggggataattgagctttggggattaatggagattgggggataattagagaatattcggtaaacactggcactccttgataaaaaattaagcggaaaaatttttcaaatgttcaattgaagtcaggggttcgatcgaaaatttttgaaaacaaggtcatagctaatcaaaaataaattttggaccgaaattcaaaacattttgtgtatcattcgaaagcttaacatgtttagaagctttttctaagacattgcttcgcgattagacaattatcaaaaaaattataacataaaaatagtaaaaaaaaaagttatagtccaaaagcatgctggggtcgaatcgtcgaagccgaactgagcaagtccgaaaccacacacattgtttccctgttcatcatcggctgttgttgtcaccaattttgccgtatttatgtgccgcgttcaatgccatccgaaccgcttccggtgcaacacaataatgtacaaaaagaacagattcccatttgcagatgcaatttacggcatttgtcaatttgacaggtccgccaccttcgcaattttcccttttcttatgctttacttcttcaacccgttctttgcatattcgggcacattgctcacaatatttttgaacatcagcaacacacttgtttggatcaagcttatccgcgtaagccaaatgaatgcctgtgaatgagacaaatgttatgagtaggggcgacgattttaaactctaaaaactgcaaaaatagtctaaaaaaccccaaaataggggctaaataaataatttttaaaatttaaattcttatcaaaaaaaataaataaattttggagacgattttgagaatatttttcatttttagcggtgtttttttggaaattttcggtcgattcttagggggtgtaaactcaaaaaagtagcttaacaacaaccgaaaagaaaaatgtttttcgtgcgtttcagactatggggaactaagtttatccataatttgtaaattatttgaaaattaaattataaaattttatttttcatttgctactaaaatttttacaagtttttcaacatacgatttagcactagcataagaaggaacagaagaagcattgttgtcagcctatgaatttttgaggaatggtaagaaaatgaaaataaaataaaaatggaaataaaaatagaaaaattaaaataaaataaaatggaaatgaaaatgaaaatgaaaaagtataaaaataatattgatcaaatcaatatttttttgtatgacgtacattcatctttatattgttggcttctattgattttatttttcttatacattttatgcttgaattaaaatctgaaactcaataatatccatctaacattaccttatttttttggactcaattttcccgaaattgtccccaaatatcagtccgcaaatgtcagtaaggcgctatgaccgatcaaaataagcaaacaatactttgtttcgatttatagaaaattgttttttggtttttgcacaacccaatcaaatacccaatcaacttagtaaaaatttatttaaaaaataaaatttaagagattgaatcttcgtgaaagttttccatttctagggaaagttgggttttatggaacttgatgaattattggtagaggaaatcaatcaccctgttccacgtggacagttcagaacctcacagccatttcggcgccaaaatacttttgcaaatcttttaaaggggaggcgcgaacgccgtcccccgcactcaaaaatttagctgtgggcctatcccagttcgggaccgccctgcgggtcagccccgaccgaaagtgcaatggtggagcctcgccacaggagccctgcctttgtgatcgcaggaactccccagccaggtaagtttagagagcagcaaccagtccaactgacaggcaaattaaagaagaaatgagagatggggtggaaaataggggagagatgaagaggattgtggaaagagaggacactctctccccaggcacactcgtttcttttccaattagctgtgcactatttccttcccatgatcgtctgtcagttggctgaaattcttcactctttttacacgtcgtccttattttctttccctcaaagaaagcgtaagacacatgcacagatgggcaaaaaagaaaagagataataataccaattacggtttcagaaaatcttaaaatgttttaacgaattaaaactgatttttgtttcacacccacaaaaaagacgaaaactattccatttaaattaaagtacagcggaaccgggaccaaaacacggacaactgagtaccgaagtcccgattttgaccgggactagtcccggtttttccccggttttcccagccaaaaattcccggtttttcaacccgaaaaggtcccggtcccggttaagactaaattcccggtcccgctgctctctcatttaaatttaacttttgaatatcattttcccgcttgaatttttgtaaatgaatcctggcacttttcagtgcctatgcatccaatcagtcagtgatcatcctcagtttcttgggccatagcttttttccataattggcattcatcatggttgaaatgaaagcttaatacaattctttgtgattaagaaatacacgaaaataacaaatgctgacattgaacaaagattgaaaagagaaaatccgaaattctgcttttttaaagtatattcacaaattgttttttgtctgttggctttagccctgaatttagctatacaaaaacttggctaaactccaagctttcaattgatacccaaaaatgtgggcattgagcaaatgaaaaaaaagttttggcctaagaaactaaggatagatcactgcaaaagcaatgtaaaagcaaaatcccaatttcaatatcaattttgttttcccttttcttcagcttcatctccggcgattgttggctggcggtgtacgatttgctgccgccgtcacaacttggactgggaattgcgacgatcagcctccgttatgactattacgtggacgaaaatttcaagacgcgcaaatgggcactgaaatttatgcgaattcaaagcaaaattggagcaaatgggatggaaatgcaaattgtcaattcagttggggaagaattgccaattccacaatttgacgtgcctcccaaagtgaccggcttcgaatgcatcgtgtttgtcggctgttgtgccattctttggctttatgttaaaaacggaaaaaaaaattgaaaattttattgttttcctttttcttcagtttcatctacgccgattgttggctttttgtgcaacaacaccaaaaatgcaaaatttgagcatttttttgatgctggcaactattttttataattttaatacctattgtaacggtaaaagaattatttgacattcaaaaatttgcccatttttcgggtttcaagggcgttgatagttaattaattagtgaataattaatgggatttcttaaaaaataaaaactgtgcctgcaaattgacgagcccgtcaatgtcctgaggcagatgggtgatggaattgttggacaagttcaggctggacaactgagtgaggttgacaaacgatttgggaaaactgaaaaaagaaaattcactttaaaaaacggcgaaaattttggaaaaaacggaggcctacccggtcacaatgtttgtgcttatgtccaaataggccaaattgtggcagagaccgatttcttcagccacttcgacaatttctggggaaaaaaggattgggataaattagagagaaaaattgggataaattagtggatggatttttgaaaaaattgaattttaggaaaataaaagcctcctagaggaggggtcagagttttacgtttgaccaattttctgttttttttggtgaaataagcacaa

SEQ ID NO: 1418 - DNA, 5116 bp, Heterodera glycines
  unsure (1)..(5116): unsure at all n locations
aaattcaattgtttggtttgtttatttttatttcaaatggtatttttgtgatgccaatcctgaattaactgctgacaaattaaactgaatgatttaaagcgaaatttaatattgccttaggcgataaatttaaagcgtccaattcagtgccaataatttgcccaattaaagtaagaaaaatgctagcataattaataattaccaaaaattccattttctgtatcaaataatgcaataaatttattaaaaatttgtttcaaaccctttgagcttttttgggaaatcaaaaaaaaatgccattttaaaattggcgaatgccaatttgagtaccttgatgaagtgttctttgagcacttcggcacggggtttgcccgttctccggtcgtaaatgtcttcaatggacagtttttcactgatcggaaaatggaccgcttaaatgagcacaaattttgcaaaataaattaattattttttgacatttatgtaattagtgccaaattttttcacagttattttaatcttttatttcatataattttttggctttttaggagttaatttattaataaaatcgcaataattctttgggtaattagtccgtaaaatttgccggaattcctaatgagcttttttggggatatctttaagcctcgcatccgtttcgatgctttcaatttccggttttaaatgccggtttaatcaattttaaatttttggttttccattaaatgataaatccggctttttacaattgatcacgcgttccgtggtcgaatgggtcggcatagggcgattccgaagtattaattggcccgttgtatctgtttgtgccggatcattttcatttgctgtggtagctgctgaatcggtgccgggcgaagtcatttgctattggcactgcgttttttagggttaataattatcaagatgggttaattagcgcatccaattaattcattaattaattggttaatcgatcgactaacggagggtaataaatgaattagtcaattcaaaatatgtggaaaaacgggtttttattaattgggattcaatgcggaacaaaatgtatgtattaaatgggcctcattaggaataaaacgcatactaattggcagcaattagaggcaaaatgtctgtcccaagagacttggccaaaagtcaaaagaccccaacaaattgggaggcgccaatccttcacaatttgtggggccataagtcaaacagcagataattaacaaaaataatcggattaaagagacggacaaattgtcgacaaatcaagcggaaaatcggggcaaaattcatcgcccagcaaaaatgtgccatgaaaaatcggacaaaacggcacggctaatcggtgccgtcctttggctttcttggcttttgtgtgtttatggcttcttggagtagcagcagcagcatcaccacaaccacggcattggcattttttgcttttacataataaaataatggtgtgtgtgtgtgcctatgggggaggggagtgtgtacattggcactgacattgtgcgccgcgccgtgccgtaatgccataccaaacgcaacgaggaagatccagataagattttactaaaaatagagcacttcaaggattttgagatattttttgagaaataaggaaaatggacacgatagtgccaataggcggaagtaggaaattttgcatatggaggattaattaattttttagcataaattttaaaatcttttattttttatttttgcttaaattttaattattctataattaaattgcgtcacaaaatcagaggtgtacgcatcgcatcgcctcatcaataaattcgtaaacaaaaaatgtcaagcaaaaggcaatcgtccccccattattatccatatcacccatcccacctttagcattgcaataattagctgtcagattaatatgccagccatgtcccgcccaggcagacaaataacggattaataggccaaggggcatcgccacatctcggctcggggcacggcacggctggcaaaatcttatttacaccgttgattttatttaatttcttttttttttttgttactatcatgccaccgcatcagcagcatgggatgcatttttcgtaatgagttgtgttttaaatgaaaaagcatcaatcagcaattggcaccacacacccacctactaaacgccccctcctctcctgaggcatttaaaaccggtacaaaaaagttgcccgagggatttattaatgggcaaattcacaatttcacggacaattagctccagccctatgctggaccacaccacaaccagaagcaagagttgacgttttgcaggcccatcacctcattttcatcaagcgccaaatagcagtcagcagttagcagaaaaagcgcgcggcgatgtgatagtgtaaataatcccccccgcggggcttcaaacggcaccctcccccctcccctctccgagttcgtcctcgttgtcatatccatttaccgcacagccgaccccatcggtgccatcaatagtagtggtgccaatggaatttcacaccccttttagcctccccccacatcagttgagcagcagcaataatggctccacccctggcgggccggacaagtctccccatcatccattttcattattggcatcttcccagcccccagtcggagaatgtggcaaaaatggaaatcccatcccccacccgtaggcgaaatttcagagcaaaaatcagtgaccatgcgcttctgctcgaagagcaccaaaaattgtttcattagcgaaccacaattaaatttctaaatgcggcgtgaaagtttttctgtctgaaatgataattaaaataattttaaagatagaagaaccatttcaatttgttggcaatgctcgtttccgcccccccccccactccatttttaatgtcatttgtacaaattaaatccgatttttagatgagcggttcccgagacatttaaaataattggatcactaatatgctcataataaaactaatttaaaaccgttattttagaacagaaatttgcttttttccattttaaaatgaggctgttaatctgtgacgaggagctgagtttgttcaacctgaacaacagtttgaccgttgcactgctcgacactttgtggcgtgtttccacgtaattttgtttttccataattttaattaattgttcatttacctatcattttccgagtcgtttatcgtgggttagttatgtaattagccatgaaaatgctacttaatgagctaatcccaaaaacaatgcgtgggagggagtgggtgttaaatgtaatttattttgttattttaaaggcatcccaattccgatgaattcattaaaaccaaaagaataataattatggggccataaaaaatctaaaaaatgccggctaaatttaatttaattggtgccatgccattcattgcgcccgcccttttcagcctgtacaacaaagtgcactgttggcttggcctgttcatctgcgtgttcggctcgttggccaactgtgtgcacatttttgtgctgtcccggcccgccatgcaaaagtgtgcggtcaaccgactgttggccatcatcgcattgtgcgacatcgccacaatggcctcctacacagtgtttgttgtacgctttgagtttgccgtggacaacgaagagccaccgctgggctacgacttcttttggtccgcaaattatatatttttttgtataaataaggaccatacaaatagtcaaggacatttggactagaattaagtttgtgagaacatgcgtgcttaaatgtggaaaatccagggatattcaaggacaaataaatgctcagaaaaatttcacggcttaaattatttaagagcattttcaaatcgagatcaatctaattgatgaagttatttttaagaataaggacacaaaaaacccataaaataccttaatgagattatttatgatcgatttatcgatagctttattcgaatttatccaagtttatttgatcagccctgcttttacattcggctgatcaatttgatcaaattcaggattgtcttcctgttggcccatgttgtctgttcaatcgcgcttcacacaatcaccgtgtacttgactgtgatcacagcattgatccgctacaaaacgctgaagcgtgtcagctctttgtggaaccatgagaacattgcttggtaaaccaaaaatgcttggcattatgtgtctaactttttattcaatttttaaatttaagtccaattttcgtcgctgtcgctgtcctgacagtgttcttgtgcattcccacttttctgatccattccatcattcccgtgtctgccgctgatccgatcacccaccaaaatctcactttgtacactgtgggactggccgagttcaagcagttcgacacatgcttgttcttcaagctcaacctgtggctgaccggcatcatttttaaggtggcctagctcattgcgactatttcgaacttttttacaaatctgatccaactaggatattatttttatctatttctcgggtactattgacctatttaaaaacattttaccttttttgaacaataaagtggaggtgaaagttcaaatccgctacaaaactaatatttttatttatttatttatccaaaaaataaaaatgacgatttttagaaatatttttgaagggtttcgggaactaaaatggacaatatagctctctaaaaataatcccatttttttctctcattgtcctgtctaattttgtgtcaaaaaaggggaagcaatgattcaactcattaactttgacgcacgcacatccatttctaatccgggcacaaatatagagggaccacgacagattaaataatggtttctgttagtggatgaggtcgtagtgattacgtaaaaaaatgttaaattacattttcttagcattccaaacatcattttcatgtcatcagcttanaatgatgaaagtgagaagtagtgacataaattaattagtttttgagatagaaaaattatgaaaaataaataaataaatttttaaattataaagaccatttcggcagagaattttttaanaaacaaattctttanatttattaatgtatgtaatgcaaatt

SEQ ID NO: 1419 - DNA, 2704 bp, Heterodera glycines
gtgggactggccgagttcaagcagttcgacacatgcctgttctttaagctcaacctgtggctgaccggcataattttcaaggtgggctacactatttcgaattatagaatggatactaagacttacaatttccgtttataatttaaatcccatttatttttttatgtttttttttttgcttttcttggcacattaaatattcaccccatacaatttcgaagtgccgaattaaatacagtattaattaaattacagacttaattacctcaattaacattctccaaaaattcaagcttttcttttgattaaaagatttttttcgatttcgaaccctttaatttttaatttaacttccttctaaatttgatttgcgtcatttcgcgcacgcgttttagagcaaccctataaaaatttactggcttatttgtgtttttttattgctttgtgtgcggacatgtgccaacggcggaatggcgtgtttgctaagtcccaaaatctaatattgctaatccggcaccgaaatgccaaaagctttttccgtttccgattaaacagtaattatttgggctgcccaaggccgattatgactaattgacgtaattatttttgttattattttcggtgccacgacatgccgataccaaaataattgtgttgagcatttagcggatgaatggataaaaaatggattttgacgtggataatagcaacactaattaaagcaaataaatagaataacagaaatttaaatgagtagaaattaattttaattttttgaattatttattatgttgtccttatatgtaaaaaaagaaaaagaaaatttattactattcataattaatttctgtattaattaaaaaggctttgatttaaaaggatttggatgtttaagttttgctctttggtcaccaaaagggcataagataattatagtttagatcaaaagctttagagataagtacttctggcaataattagttgacaattatttgaaacatcattaaacattgaacggcttctccttcttccattatgtcatttattcgttttcaaaacgtcataaaataaaaatataattaaattttaattttagaaattttttaatcccggatttttcaaggtgatcccatgtgttctgctactgttgttcacattggcactgctgtacgagctggagaagaacagccggaagcggaaatcgatgtgttccggcacaacattggcataccgacggcattcagcccaatctgatcggactacaaaaattttgttgatccttctgatcgtctttttttgcaccgaatttcctcaaggtgtgataaaagcataaaacaatcctagtatttgagaaattattcatttttttatcatgaattgtgccttgtttattggccacttttgaaatttcaaagcctttttatcccgtcattttttaaggcattttggcaattctgaacgggctgttccccaacgacatccatcagttcgtctacctttcctttggtgaactgcttgatctcctttcgctgatcaactgcaacacatgcttcattgtctacccgctgatctcctcccaatatcgggcaacgctgcgcaacttggccgattgcattcgacagattgcgcagggccggggatggcaagcggcgaccgcaaatctcaggtagcaaatttaataattgcagcagatatcatcagatttttatgttgatctcacataagaggcattttttggaacaaataatttaagaaagaaaattttttccaaaattttcttaagaattctatagcaataattttttgaaaaatcaaattgaaattctcgaaattttaaagaaataattatgatctaacactttccttgaacacagaagccgatcaagaatgtcggaatcaaagtttgtggtcactaatcgccgttacacaatgtcttcttcgtccgggtctcctttatccaagtaaaaatattttgcaaaatttttatttttgtttaatttttcaaaaaaaaaaattcaggccatccttctcatttttcttgaccacttcaaacaaatgtatcacaacacttcgacgcacattcaatcaaaatgccactggcgacattagctgtgacattttgcaacaacaacaggcgatccgtttcatggaaggccacgatctgttcctctgatcagtggtgctttatctccctaacattagtggcaaaagcgtgccctgatcatgtgaattttagccaaatttttaagaattgtagttgattatcacaaaatttagtctctgcattcaaaaatttttccgggttcgtccctgatattgtttgcatgcttctgaactgtctaacatatttattgtgatagagtttcactgttacgggttcaaaaattattttgtttggctgattagttttatgtggaatattttttgtttattaattaatttacaaactttttgttctattattatgttttatttattttacattcatttttgtattttcccaaaattattgtatgtattgtaaaaagcgaagataataaaatgaattggtgttttctttattaaacaagtaaaaaaactaattaagcaatttaattatttatcacaatgaagcatcatcgatcacttttctgtaatgcatcggtttcaggctgatcagccaagttcacagatcgcttgccaagataatagtagtacgggtaca

SEQ ID NO: 1420 - DNA, 1433 bp, Heterodera glycines
gatgtcaggtaactcttgtgtcgaatgcgatattcttgagtcactaatcacagaactggcttgggaaacttccggggttcattttctaatttaacgctttatctatattacagtaataaaataaaagacacttaaaaaatttttataaggaattttctagaaaaaaatatttgaaaattttcgaaaaacccttagtaaactataaaaattttcaaaaaatatctaagaaaaatttttaaacttttttttgcatgaattttcttactaacaaaatttctttaagttattctcatttaaaaaaatctaggccctccccgtcgccttcatcgccctccccagtcaacaccaatgccacagcgtgccgtcgaccgacgctgcgcacattgatcaatggcggtgaagtgccgtccatccgttttctggatgatcaggacgtactactttgattgatcaaatattttccaaattcaaataaaatatttttttgcacacatacatttttatctacccagaaatttcacataataaaattgatttgaaaatgatattccatttgtcacaattaggtaattctttgatcagtcccacatttggcactgtgctgatcatccatccaattttcattgtggcttctcgtttttcaattcatcaggtccaaatccagccgatcgttttccatagaaaccgtagccatagtagggccagcctaaattgattttaaaaaaatttttaaacaatttcagcatgtttaaaatgcattaaatttcaaaacgtactccatgatgacccatatgatccatatccgtacagtccgccgtaaagtgatggccaatagccgccgtaaaattgtgcttcactaacttcgaccataacgccaaccaacaagacagcaaagatgaacattgagatgagcttcattttcaatgcggaagtgaagaaatggaaacttttttttttgctaaatttggtttttttaatttttgacaaaaatttttatgtataaatcaggccaaattgggcttctgaggttaaatcaggatttatccatatgccttaattcatgaatacaggttggctgggcgtaatattttgcccaactaattttgttggataattggacaaatgtgtgtcattagtgcaacagaaaaaattgatttcatttttgaaaatttggcctgaatatgatgaattgggcccgacactttatgatgaattgggtactttgaatgttgatgatgatgatctacaatgaatctgtgccacacttctgtgatcgttctgcttatataggaccgaattttgtacatttatttgttttcccgtgaaaaactttcccactcccgagaatatcttctggagaacaacaaaacaaaaaagcagcaagcagttcacgacccaatgaatggaagtgggggggggataaaaagaacatc

SEQ ID NO: 1421 - DNA, 5511 bp, Heterodera glycines
tgtaaatgggacaaaaccttgtacaagtgcgcaaccaattaatatcagcagagaaaatgattttgaaatattgaaaattgtcatttctttaataaatttaaattacattattaaagacataaaaattgcattttcttatttctttaatttaatatgtaaatattttgatttattaaataatgtattttaatttaaaaaataaacaataaatgaattaattgtgaatttttggcctattatatttggccaaatgcggaggcgaacggggaaacaacctgtgcttatgtaatcaccgtaatgatgcttaattacccatttaaccggcggattggtccgatcggaaaggaaaagcttcaccttttgattaagcatatgtttattcatcggatttatttaggtatattttttctcgccgagttgtaaaaatgtttctataagaaaaggatgataaaataataaaaataattcttttaaaatatattctggatttttcattccaaaaatattaaaatcttttatttaaaatctttttttttacgttttttgttttttgtatagataaaaaattttataattttttttattcatatcttctttttcaaattttttattcttttctttttaataagcccttgctaattttagccattggccttggaatttgttttttttttgtttgctttgccccttccgtttcggccctctctaaaatgcttttcacagaatttggcggaaatgttcatacgtagtttggagaaagcacccatcattttgtgttcagaaggactaattgatttgaagatgaatggagaattttaaagaatttggagctcttgaattttgatgaattaatcaaataaaaatcaaaatgcatacaaatcaaattaaattaaaaaaaaaataaaaatttaacaatcatatgcaaattttaggaaaatgtacatatgatgcgttgctttttcaagatcgtcttggcaattttgacgaatttgtaacccgcattggaatattaccacattaattacatcttaattatacaaactttgggaaaaggtgcgatggtttgcttttttcaaggacatcctttggatccaaggacgcttttccatgtcctgttttggactattcacatagtttttttccatctttgatgttttgtcagacaatacaatttctttctttcttttttgtatttgtttgctcaccgacccgctttcattcatcccgacaattgctgctgttgctctcgttgaatttttttttgcctctattgcaagccgagaacagcatgctctcgagtggagaatgttcatgttcatgcaccctaacctcctaccccaacaaaatttccacttgagaatgtatttggagcattttttgaagtatgccatcgcttggagatggagcggagcgcggcacttgaacaacgatttgttggcattttaggagcaatttttgagtggtgtgccaaccgacagtcgcgcatgcaccgccgataagcctctggtggggggagcttggccccatataaaaggcgtaaatcccaaccaacaaatcatcaatttgcgaagtcaaaaaattctttcaatctccctcacattcaattttcttggctcaacaaacaaaatcatgaaattcgccgttgtctccctgctgttcgtcatggcattcttcgtcggcattgccgtcattgaacagtgtgaagcacaaatgtacggctacggcatgtatggcggctggccctactcctcatacatgtgtatgtctttatgttccaaatttactaatttcagcttaattataacagaaaactgatacaaaacatacgccgttaattatttcgtaaaagcaaaaaatttcggaaaaaattgctacgacttttcataaaagaaatcaaatttacttttttttcgtatcattcagtacggtaaagctaaaagtacggtaacccagctctgaaattcttcctatttttggaaaattatttttttcttcttctcagacccctactacatgtacggcggcattggcaagcgtgaagccggctttggcggcccaagcgggcgactgccgctgttggcacgaaagcccaattagatcagttgcttaaagggcaaaatatgtgatgaaaatgatcggcttacatttgcccaactgaaatgtcgcattcatcagaaaaaattttaaatgcataaaatgtttttaaaattatgaaaaatgaccccatcccaatgaccattttataatgagcgcgggggcgggggttgggaccatggggagggtggaacggtaatgcacaccatggttagtgctaggtcatattatttttttaatttccaggttttaatctattttcgggtttagatcgctatgatgattggtcggtctgtttaagttgatgaaaaaaaaaattttacgatacaaaatagctttagcagaataatctgcgttcatcttggcataagagtaagcaaactattatcggcagagattcggtttaaacataaaaatttttttgtttctatatttttgcacctgactgtactttgttaaagaatcaaaaaattataaattaaattaattttaattttaaaatgattaacaatccgtcctgtccctccctccctcttcacccgtttgtacaaccattctgttgttgctttgcctaatccaaattcaaaatcaaatttttgtcattaatgccctttttgggtcacaaatttacctcggaccaaaaaaagagaaaatgacgtagagaattttggatgaaataaaaattcaaaaaaaaatgcttatttattatgccttcatttttcaatttgttccgatacttcgcatatataaatcagagtacaaaaaaaaatatgtatgaataggatttgttcccccctactgcaaatgtttccctgtccattaaatttagagttgcacggtaccgataccggtactggccggtaattaccggttttttttggtaccggtaccggttttttcaaaaatcaaagtaccggtaccggtttgtctagtaccggtaccgccggtaaaaatttgcactggtaagaatgggggtctggtcgagaaaaaaataggaaattggtgaagaaggagaaatttttgagaaaaaattaaattttatttcatttagtatccatgcatatgtggggtgtaatggttaaaccttctgcctttcattatttttcacttaggttcaattccccactcgggatagaatattctccatattttctttaccattattttaattgaaattttaatttaaaaaaatattccaactttttttctttcattttaagcatcctaaaaacccaaaaattaatcaattggccttttttacaaattctgttaacaaagcgcattaaaaaatacaaaatttttcccggcggcgcctatcggcaccgtcggccctccttgttccccaaaagtcttgagaaaaacgtgccgcgaaaaaagcggtgttgaaagcaaaaaaggtcattgatttacattaatttacatggccggagaccccttcgcagaattggaaaattggccgctgatcccttgttttgcaataatctgaattttagtgttctttatcctgaatttgaaaaaaaaacttggtcaccctcaatatacatatacttctgaacaattctatgctaaaaaacaggcactcgcgcgaaaactgaataaaaattttgtatttgaaaaattttgtccaaaaatttttacgttggaaaattaccgttttttaccggtaccggtaccggtgggaaaagttggtaccccggtaccggtttttgcattaccggtcagtaccggtaccggtttttttacaattaccgattaccgtgcaactctaattaaattgtctatttaaatttttaaattcattttatgtgtattaaaaatttttattgtgtggaatatttagttgacaattttatctcaaaatataattgccgtttaattggtggccaataaaaaaaatgtctgacggcctaaatgaagtgccattgaacaattcggatggttcagaagcattaccattgagtaaaaaccgaaaataaatctctattataaagtccaatctacttttatgagtctaatcttcaatttctttggccataacttttttcgaacttggccaatgcctactttgttggtatcgaacgaaagctaaaagtactgggaattcataaatacaagaaaagagcaaacaaattcatcaaaaatgtgcaatggtaaaaagaaattcagcatttttcgagtatattcatgaataattttttgtctgttgcttttagccgagaatttaaatttacagaaaatgctacagacttaaaactttcttttaatactaagaatttaggtattggttaacaagaagtaagaaaaaagttatggccaaataaactgaagattgtactcataaagtgcactagaggttgtatcttcccttttttcagttacttcgaccttaatgttagcacttttctgcaccatttgtgtccacttttaaacgctggccaaatttttttgctaatgtttgaacacagacaccgttctgaccattttatgcaattcattttgctcaatatttggccaatgctcaacgacaacatttggaatatgatgataattgaaatatgcaatttgcgtcgattttccccgtccattctgtccaattgtccatcgctccgctttctttctgtattttctcttcccgaatttccacccgacgaaagtgccaatgcattggatgaccaagcctaggccaaatggctttttacgcctcgtccggacggtttgccgaaggtgttcatgcacgatccatatcgccatgtggactactatttaccaatgatcgaaggaattcaagcggtgattaaattctaattttgaaaatttgaactttcgactttttgttcgaatccgggtccgcggttcggaattcagaactttcttatagaatttccttttttatactgcaatacttaatactacaaaactttatttaaaaacatttgtatcactcacgctttttccactgacgcattttccgccgcttattttacattttcagccatttctcagcgcttcatcgcctgtcaacttcatcattaccttttgcgttatagttcaaccgtttgttgctttgaccgtgccctatgaattgatcaacgaattcactggggagcgattggaactgattaaactaaatgagcatggcagtcatatggtgatgatccgttctccgatttcacgtgataagccaaatggacgcaatgggaagaggaggccattgaatgggaatctctgactgagtggaacaacattgaagtggaatttggtgatgacgacgtcggcgatgggtaaagcaattaataaataattcaattgcataattaattcatttgatgtttttttaatattctgattttttttagtcaaatagatgcaattcccggcccaagtgatcagcagcatgagtggactctagaggtcccc

SEQ ID NO: 1422 - DNA, 1080 bp, Heterodera glycines
ccatacttaaatggcaaaatgacggtttaaaggcggtcaattgcagcacaaagcattgccattaagccacaattcaaagcaaaaatcattggctaaaaaaatttgaaatttaaaattaaatttgaaaaaatcaaaatttaccgtcataattaagtcagcagtgagcaaactgacaaaatttgtgcccgaaatgacaacaaccaggaaaaaagagtgcccaatttggtggaccaattcacaaaaacaaatcaatgccatcagaaaattggcggagccgcggagggaactgaaaaatgagaaaattaaattaattaaaaatagaaagtttaatttaatttatcatttaaatcattataaataaaataagaaaatgccatggcatttacttggatctggcagtgaccactaaaactgtgccgttcaacataataccaaccaatgcaaccaaattgagcgcaacggccggcacaatcaaatcggcggacgggccgacagaacggtaggccaaataaagctgaaaacaataaaaattttttcaaatacctattaaaataatttaattaataataattttataaaataaatttcgaattttcctatttgaatgtttaattaattttataataattttatgatgaaatttaaagttctttttataagaaaaaatatttgtattaacttcaatatttcttttataaattatttttatatttattaaatatttttatatatattaattattattatttattttaccgcattttcggcgctggtgttcattgagggcattttttgctgtaatttttggcttattaatgaattaaaatgtgaataaaatgaatttaaaaatttctttttatattatttttcttcaatttctgtacttaaatttctttttttttaatttaagttctattcccacgctaatgtgagaattaattttcttaataaattgtctccaataaaaatgttcaaatttcaattagataacatcaatatcattctaaattgggcgctctgtcgtaagtcattttatatatatatatatattttttttaaatttaaatttccatattttat

SEQ ID NO: 1423 - DNA, 2370 bp, Heterodera glycines
  unsure (1)..(2370): unsure at all n locations
ttaatatttcggccaaatttgagtcaaaaatgaactgtccagtgccaactagatccccggaattctcggaaaatcccggcggggtccagactcagtccggctctaatgtcaaccttctgaactgaacactntagaacaaaaattgtaaattaattttgaaattttttaatgggatgagtcaatcaaaatgatgttgaaattaaaattagctcttttttatgataggttagattaaaaaaaaatgttttcaaagattctaattaaattatttatttttgtattttcagtgtaattaaaattgtgacttttaaagttgaaacggaaattgtttgaatggaatatttttccgtttgttaaatatcaaacggaaattttaaatttgtatttgtcgagaaaatttaaatgagctaaatgatttaatttcttcacataaaactcaaattgtcaaatattttcgcatccgtttgatgagacggacgtcaactaaaaattaacattttcccacctatttaacatcaatgtaaatctaaaagttcactcaattaaattttccggcatattgttttaattaattaaataatattctaaattaaaatttaaaaaggacaaattccgagtcaaaatgtcggcataattctcctgacctcaattttatgggagcgggattcggcattggcatcaggctcaattatgattaccgggatttaaatcccggttttttcgggatatgaatcgcttcccgaaatttaaatcccggttttcggtccctatcccggcccttttttccaaaaagccggaaacggcatcgggatcccgggagaatcccggcgggatcccgaccccgtccggctctaatgtcaacctttgaactgaacccttttgggacaaaaaagtataattaattttttgacttttgttaatggcgtgaaataaatacaaatgattattgaaataaaaattggcactttcttttctgagaggttaaataaaataataaattttaaaaggtttttatattaaattattgttttttttattttcaatgtaataaaattgtgactttaaatgttgaaccggaaattgttcattgttttaataggaaactttaagtttgtatttgccgagaaaatttaaatttacggtctctttttttaaattaattaaataatattcccatcggtttttcaaaagttaaatgccattatggtacattgacagatttgatttttgatgataaaatttttaaaaatatggtaaatataaaataaataattaattaattaaattgtgttaagtaatcatttattttgaataaaattttgtcattttacacccctttaatttgaaagtttttggcaactattttcccattttagcatctattttgggagtttttagaacctaaaaactaactattttcctagtttttagcacctaaaatcggagctctagttattaattttaattaattcatttatacaatatttgtttgtttttttgtccaccttttaattgaattccctattttaatgtagaacataaaaggtaactcgctcggtgggactcgaacccacgaccccagcaatccgtgccgtgctctaaccaactgagctacgggcgcctcttttagaggttctctcaggtcctttatcccactttctcccacactccgttccttctggcatcacattccgcctccctcggaagaccggtccctcgggctctccttggcccttcaccgacggacttggactctccttggaccagtggtcccggcagtgtggaggggatccacccaggagcgccaggtagaacataaaaggtaactcgtcacggtgggactcgaacccacgaccccagcattccgtgccgagatctaaccaaatgaactacaggcgcctattttagaggatctctcaagagctttatcccactttcacctgatctccgtaacgactggattctctaaaattttgcgcgaagtattcaaatatgaaaaatataggaaaataccaactgactatatgacttacaaattgacaggaaaatgataaattattagtaatagatcccagaaaataaaactggaaaaaagatatgaatttaaataaatttatttatagaatcatttttatgaacaagaaagcgaaatttcattgaaggaatttatgaacttaaaaatttatatggtgaatacaaaacagaaaaaaattgtgaaagatattgagcattgctcaaaagacattttacacggaaaatataattgtttcaaaacaatataaaaataataatttagttgagagagataatagtcattttacaattttgtctgtcatgctttttttcgattattgaatatcatgttatttt

SEQ ID NO: 1424 - DNA, 2639 bp, Heterodera glycines
tttattggtttttgaatgcctttgggtggtgctccttttaaggtattaaaaaatgagaaatacaaaaacatatttcttggtcatcttaatggttttatttattaatttactcttaatgaacaaatttaaagatgagcggagagaaggagaatgccatttgaagtattattttgattgaaagtagccattacccatccattataatcatatttaatctagacatattatgtgcttctgaccatttcttctgatgttgaacttaaactatcagataaatcattttaatctccatttctctgctaattcattctctgttgaatttcgtttactgcgtttttgtgacttttcccactgcatttaattttaagaatgttcgtttcgaacagtgtttttctgcctgtctcccgctttttccattgtcgcgcgttgtccgctgtgaatttggtggttcatccgtttgtcgctaggaagtgcgcctttttgtctacaccatctttgtcttttccatttcggcgtcaatactcatcattggcatctgctacaacgacgggagcgagcaacgacaagctgaatgtggacaaactgttcgaaaaaataaactttgaagtgcgcggtcacgacttcacagtcctcaagtcgtattcgctttttgttatggtgagtgaggacaacgtttatggaaaaggctctaatgcactttatgagtccaatcaattgacaatcctgggtttttatacaataactttgttcatgttcgaacaaaccctatctttttggtatcattcgaaagcacaaaatctaacgaagctaaaatatataaaatcgcagcgttcaggcaattaccaaaaaagatttgattaattaagtaattgctgattttcgtttgtaactttcttggaatgttagaattctcggtaatagtttagatggtatgacaccttttttgaaaaatttttcaaaagtcttaaaaacatgtttctaggggtttataggtacgctgagcacgaatctgacatccatttcgaccaattccgaaccctggacccgaattcgaacaaaaagtcgaaaattcatttttcatcaaaattcacattcatgcaactaaagcaatacaaatgcacgaaaagacgcataaagaaaataagacagactattcgcatgggtaaaactcagaaatatgcaaccaaagcgccttgccaacatcaccccgccacagacaaaaaaacaacatctctctgataaactggcggcggcacaaacaatcatcggtggacttcaacctggacagtcggacggtgcacctcaatgggccaactccctccttggcttctgtgctgagatggtgggaatctgccgcgagcttctctccatggtcaaagagcagcagaatgacaacatggacacacgagagacttggaggaagaacgccgactccactctgtcgtggtcgtgaacctgccggaaagtgaagaaactgtgccctctgctcgtgtcaactccgattttgtgaatgctcaatcaatgctcgacacttgtgagatcgaatgccggccatgtcaggtttaccgaatgggaaagaagtccgaccgcccccgtctcatgaaaatcgaattccccaccaaaaaacacgcccaaaattttctgtggaacaagacaaaactcaaaaatcacaataaatttaacaatgtcttggtccgcccatctctatccaaacaacaactcgctgaacgttcccgacttattggcatttgcaaaaatgaccatatgagtaatcccaattcgaattctgtcatttatgccggccatgttatgtttgcctctgacattccccgttacaaatccaaccccgactcttttaaatgtatttgtcatgtgcataatgttgatgactcttaatgtgtaattggtgaccactgtaacacgaaatctcttaaaacgcaagctcttttacaaactaatagaaaatatgaaccccccatcaaaaatgcaattaccttaaacaaaaaacaaaatcttttatactcaacattgatcaatacgcgatccctaaataataagctaaaagaattttctggattttgaattggtttttgtaactgaaacttgggcaaaagaaaaaatacctttccaaccatatatcactaacaattacaaaatatatgaagctagcagaagcggtaaaaatggtggtggagtaatgatcttgataaaaactaacctaaattctttttctgttttatcctgttctaatttcaactgtgaaatccaaattgtacagataaatggggcaaaaagattaagaatagctctactttatagaccaccaaacacttctgatagtctcactaaaaagattctgaacctcaatggtaattatttagaagaaaattttatcattatgggagattttaacctaaatgaaaaagatataacctggaccagtggaacaccttttgctaaatcggaaaagggaaacattttttgtgaattttttaataagtatggcttattccttatgacgaacggaccaactcgaggcagtgcttggcttgatctgattttctcctctagtctgattttgttaataatgttttaattgaggatatttttagttctgatcatcttaccactaacttttc

SEQ ID NO: 1425 - DNA, 3871 bp, Heterodera glycines
  unsure (1)..(3871): unsure at all n locations
ccgtgcccgactcattacactngtgtaaatctcaacgtcaatatgacccaacccatcctgtgattatattgtctatgcggggcatgtgcttgcccgcgacgacattcccgcctttaaatctgacctcaattttaaatgtatttgtcataacaaatcttaatgtgttttgggtgaccactcacgaggcaataaccttaatttagctcttttacaaactaaatataggaaaattgaacaccccatagaaaattcgaaaactttactaaataaaaaacaaaattttttatactcaacatttatcaatatgcgatccctaaataataagcttaacgaatttactgcgattatagccctaaaagattttgaattagtttttgtaactgaaacgtgggcaaaagaaaaaatacctttccaaccatttattactaacaattacaaaatatatgaagctagcagaagcggaaaaaatggtggtggagtaatgattttgacaaaaacgagcgtaaattcgttttctgtcttatcctgctctaaattcaattgtgaaatccaaattattcagataaatggagcaaaaaaattaagaatagtattactttacagaccaccgaacacttctgctaatttcacaaaaaagattctgaacctcattggtaactattttgaagaaaattttatattaatgggagactttaacctaaatgcaaaggacataacttggaccagtggaacgccttatgctaagtcggaaaaaggaaatattttttgtgaattttttaataagtatggcttattccttatgactaatggacccactcgtggtagtgcttggcttgatctgattctctcttctaaacctgattttgttaataatgttttaattgaggacatttttagttctgatcatctttccactaatttttcattgtcatttcctcagaataagagtaaggcaaatacatttacagtacgcaattataattctactaaacttaatctactaaatttaaacttatcttcaattttaccctacaaattactacaaaaatttaccattgaagataagtttaaccatttttaccttctttttagagaatatgtagaattatacttgcctaaaatcactgtcggtcaaaaatccagaaagcctaactacccattgagtcttaaactgtcaattaaggaaaaagccagactttataaactacaaaaaataaaccgtgataaatataggcatttgtatgatagcatttcattacatataaaaattcaaataaataactttgttactaaaaatgaaaataattttctgaataaaggaaaaaatgctatctacaaatatataaataaatttacaaaaaattttgaacaaatccactctcttagttacgagaaccaaattatttttgatgattatttaaaagcagaaacttttgcaaaaattttccaagaatccttttcaaattcagatgttccacaaattagcagttgtccttccaatcccaatggaccttctatttctgatgttgaatttaatgccgatgaaatttctaaaattttaaaaaatttaccgaatcgagaatccacatcccccgatgaaatttcctttagaatcttacgtaattgccaccttactctttctcctgtaatttccgaacttttcagaatatcaatggacacaggcaaaattcctgaaatttggaaaaaatctattgttatacctctctttaaaaaaggtgaccgaaatgatccacataattacagacccatttctcttacttgctgtctatgtagagttatggaaaaaataattgcaaaaagcatttataacttccttcatctgaataatttaatatccgaacatcagtttggttttgttaaacaccgatctactaatactcaactaattacagtattagaagattggtacgacagcatatacggtaagaaaaatattgactgtatctatgtggactttcggaaagcttttgattcccttcctattaatattttaataaataaacttcataacattggcattaggggaaaactgctaagttggttatctgaatttttaaaggatagattttacagagttaaaattaacaacaaattttctaatttatatccgattcagtctggtgttccacagggttctgttcttggccctctgttgtttttaatatacattaatgacctcccgcaggtaatccctccgggagttagcatcaagctttttgctgatgatgtcaaaatttatgtttcttacaaaactcgtgatgaaagaagcaaattaaatgttgctttagacaatattggaaaatgggctaatgcatttggtttaaacatctcccaaaataaaacatttatattatttctcggcaaaaataattcaaaacaacaatataaatttttgaacaatattattaatgaggttgaatctattagtgatttaggcattttaattgataataaattaagattttcaaatcattatactaaaattattaaagctgcttatttaaggattcgcaatattgccaaaattttaaaaacccgctctatacgtatttggaccaaagtattcaagacatacattcgtcctatttagaatatgcgcccgaaatttggaatccgacatacaaaaaagatataaataaattggaaagatgccaaaaatattttacaaaaattgctttatttaaatgtaggcttccgtatataccttacgaacaaagacttgatttattcaaacttcaaactttagaagaaaggagaaaaacaattgatttagttcaggcattcaaaatcatcaatggtctcactcatcttaaaaaagacatattcccacaattttctggtcacatcccttataatcttagacgtaaagttgtgttaaaaccacaatccagtaaaacttcaaattcttttatcaacagaacggccttaatatggtctaaactcaacaaagatataacagatgctccatctgttgacagtttcaaaaaacgaataaataaatggattgagttaaacaaaaatttagtctgtaaaagagctccttggacttgatattactttactaaaatctaacgtgtaagtggtcaccccttcgttggatatttttatttcttctgaataaataaataaataaatagaagagccgatctcgagttaaaaactagacagctaaaaaataaactgtgattcgatagagggggtcaaactatgggcctatgcaaaatttgaagaaaattggtcaataggaaaaaatttttttcaaggacaaacatttcaataattttaattcttttttagccaagtccacaatttaaggccaaaccaaataaaatttacaatattctccagaattttcccttcaaaatgagcataaaatggttctattttctctagtattcaccaagttataagctaaaaaaatttcataaaattgtcgatgctgtacgtaaccaacgctttttgaatatgattttttttttattaatgaaaaaataattctgccttcttctttaaaagaagaaattgaaattaacacacaacataaggaggacttgaacctgagacccctttttgttgactaactcacagaccactaagacgaaaaaaccaagcccaaaattgaatcgtcgtgtaaatacataataaagtttgcttttaatgtattattaaacgaaaaaattctggcggcgagattgccaaaaaacaaggcgcggcgagttggccccgcggcgagttggcctcgcggcgaaaaagcgcgcggcgagttggccccgcggcgagtttctcgcggcgagatggccgcgccttgaagggcggttcccgttaaaatcaatctaattttggcgtaaat

SEQ ID NO: 1426 - DNA, 875 bp, Heterodera glycines
  unsure (1)..(875): unsure at all n locations
aacccatccngtcattgcacgttcgtttccaccattgaaagaaaatgtgagggataaataatgccaaatcatttcccaacaaaaaccatttgtttttaattgttttaaggggcataatttattggccgatcaatttggaagaattggcctaactcaaaacaatgcacaaacagaacagttaccggtcactgaaaagtcgagtcaaatggtaaccggaggagcgatggcagtgaaagaacagccgagacgaaatgggacaatggcaataagccaagaaaaagtgcagtgaacgaagaggaggcgaaggacaaaaaagagacattcattgggggggggcgaccgcgacttgaccaatgaatcgccaaaacgactctctcaatcgtgttgtgtctttttctgtcccttcctttatcagtttgtctcggcgctgatggcccattgggtctcttcacattggctccttcccaaccctaattaatattgtaattgccttcctcgtctaagttcgttagacatttgatattaattttattaaatgattcgttcttttccggccctctcttttctcttctcttgaaaaaaccgatggttaattaattaattgacgtcattttcttctgtgtttttaatttccttctaaggattttgacaaagggaattacgacatagcattttatttcacattttcaatcctttgtctgtaagaatttgtccggctgtattttgctgagtttgtcgtattaggccgggacttttttctgtctgtctccgctccctttgtcaatttaactctgtcaaaattcagtcacaaaaatgtgttatgtgatgtgaaccaatcacccggtagaatttttcaaattaattatgttgataaa

SEQ ID NO: 1427 - DNA, 2156 bp, Heterodera glycines
ctctctctctctctccctctctctctccctctctctctctctctttgcactctctctctctctctctcttctctctctccctctctctctccctctctctctttgctctctctctcccccctctctctctctctcctctctctcgtcactcacttgttttccattttcctttgtttttatattacttttgagtgtatacaaaatatcactgctcccctcccatttattgtccatccccacagatttcgactgataattaattaattggtaaacattaaaatatggggttctctccccctcccccgggtgatctttctcctcccatttcattaaatgtccatttgctaattatttcttcaatgatttcccattttgcagatggcccctttgaatgcgattccctccggtgacgcgtcgccgtcgcattccgccggcccagcggcgaatcatttggcacatgcgacaaatgaccggcggaggaggaggacaaacgcgagaaggacgcagaggaaatttttggtgtacccatctgaccaactcaaaatgttgaacaatggcacggaaagaggagcgaaggatggcaaaacgaacaaaaatggcacatgggggaggacaaaccacgacagggaggaggacggaattgggaagaacggactgatgaggactgaagcggacggggcggagaacagctggacgagagaaacggagagaaatggaattagcagaattggatttgaccggaccgaaatgaacggactgaggacgaaactgaacgggacagaacagaacggaacaaagactgaatcggacggaatgtcatttaatgggaagaggacggaacaaaacagaagggaaatgaacggaagaagaagcgaattggaagaattgatgacgaatgggacaggcaaattgggaggacaagaaaagaggcacggaaacggggcggaggagaaacaattttgggggatgaggatgaagacgaagtgggaagatgaggaggagcagcggaacggcatcaacaatgccatcaatggaattgacgaagtgtcgacggacggacagagcacggcacagaccgagacggagatgaagcagaacggcacggggtggggaccgcacagcgtaacggacggactgctgacggaagaggacgccgtcgagtcgggttggacgagctgaatttgacagatttgttgaaaaaggccaaagtttaagcgaccggtggtcaatcctcacaacttcttctcaacggacagcaatcacaacactttggccatgtcgctaaactgcacagtttttgggaagaaatgccaatttcatcgtcgtcacttttgtgcatggacgaggagcaggagacggaacagaaacagcagcaacaccaccgacgaccgaccactttgtcacctcgcgcagtccttgcggcgcacttgccaaaaacggtgccaaagtcaaacgattacgaggaagaaagccacgcgatcaaacgccagcggtgcactctccgggaacaattagtgggagtgccgtcggtggcggcgccgtgggaggcgatcgcagccgaaaggttgggcacccgcagatcaaaagtgatcatgctgggtgactcaggtgagcgatggaaagaaaatcagcagcgaatggatgactttccaatgttaaaggtgttggcaagacgagcattgtgttcagccacaaatacgggccgaaccccgcgctgctcaattcgccgtccaatgcgaccatcggcgcttcttacaccaattttgacatgtgagcaaaatgcgttccctaaactgtacctttttttgtgggcattttgccattcgttcgccatccgttaattttgacgaatggcataaatttttgacatttcatagaattggggagaacattattcacatgctttggtagctaacattaaaagtcaggtcagtgttcaacgccattctcgtgcaattgcaaatttgggacacggccggacaagagagattccgatgcatggtgagaaggacgcatgtaatcagtagtgctgcttgagaccgaaaacttctcgagacaaagaccaaaaaacccgagacttttctcgagtcgagaggttcgagaccgagactttcgagcagcactagaaatcagacgaaaatacggaccaatctgat

SEQ ID NO: 1428 - DNA, 897 bp, Heterodera glycines
accgagactttcgatcagcactagaaatcagacgaatcacccccccgctgatcattagggaggggcttttggtttccatcaatttcccccccccccgccccttaaatctttgatcactgaccaatccgtccaagtattcaattattcctgccacaatagtatgttcgaacatttcgatcgtctcccctcccaattgccttgatcaatcccctcccttttccaaaaggtgccgttgtacatgcgaaatgcaagtgccgccgttctcgtttatgacatcaccaaccgggaatctttcgaacaaattgagcaatggcacaacggttggtttaataaattttaataaatatatagtttggattttggcacagaagtcctgcgttgtcccactgccctcgaagagccgatatttgtgctgatcggcaacaaggcggaccagcaggacgagaaccgcgaagtggccgaaggggagggcgtccaaaagggtgggcacttggccaatgattggtgtgatcaatggcaataattagttctaattaccctttgcgaatttttggaaaagaaaacaaacaaacggacaaaatgttttcttaaaatgaatagacaaagccaatacaaattataatgagtataatgttcctatttttttattttttcctttagcccttcgactgaacgcacatttttttgaggtgtcctccgtcgactctgaaggtaaaaaaggggcgaacggatctgtgccctctaaagtttttttcttatttcgaaatgccaaaaatggcctcccttttcgcttttcgctttttccttttcccttttttctttttccttttcgcttttccgatggtttatccatttttgttttcccttcagtgatccgttccattttcaaattggtgg

SEQ ID NO: 1429 - DNA, 4496 bp, Heterodera glycines
ttttccttttccctttttttttttcctttcgcttttcggatggttatccatttttttttcccttcaagggatccgttccattttcaaattggtggctgagaaaattgtgctccaaagtgccaatgtggagagtgcgcgcgaagcggacgaggcgctttttcggcggatggccaaacgaacggacggcggcgccggcggatggaaaaagcgatggcaaatcgtcgataattcgacttggccccgaagacgtcgattgggcggcgcagctgctgatcagcggacgcaattggtggcgatgggcggccggcgacggagcaccggcgcgaacggcggcgattgtggcgggcggaaattgttgtgcggcactgtagctaggctgtgggtgtactgtaacggtgctgattgatgggtatactgtattaggctgttctcattattaggctgttctcattattaggctgttctcattgttttcatttatttgtaattctcaacagatattcttctcattcaatttcacttttttgttgtttacatttatttatcacagagaaaaaaagattatataaatccaatgtaatcagtccgaattaaaaaaacaaccaattaatccaaactaaacactttattagtgcaaattaataacccttaattagtccaaattaatctgccacaaattgatctccggaatctcagcgtctacgacaagatatctataccggaaaagtgatttcatatttatacaaaataattaaaataatgtaattaaaaatctatttaaattaatgagtgcaaattaggccggcatgattcttaggagaactgctttggtttcgcatgacaaaaactcgcgcattttgttgatcatcgcgcaaaaaagtcttgagaaaagcgcgacggtattcggtgctaaaaagagatgaaaatgagaaatgccaaattggcattggcattggcacctgcaggcgcaaagcaccggcgcactgctggtgtaagcaaacacaaaaatggcacagcaaatgggcgaggctacaaattcgttggcattggcaccgagcaaaggggcgacgaagccaatgaaaaggacattctgaaaaagaaatgatggaaaaatgccaaagcaagtcacggactactccaatatagcagaagaagccaatggacatgatcacactcagcgaaagcatcagacgccgtccattttcagaaactgaatttgcacactcaattagtaccactaattactgaactaaatactaattgggagcagtgccactcactctgcgctttgcgccaccaactgatcagccaaatcagcacatagcagcatagcagcaaaactcgccgaaatacatgcccaaattcaatgcattgaagtagtaattgttctccgggtgtcgtgccgggttgccgagacggcacattacaggcctagaagggaaggggaggccaattagggtccggtcagattatccaaaatcagcaatgatcgcacatttcccattgctttggcatccacaagtaaaagttgcacacatcgaccgccgccaaaaggcaacaaagtgccaacaacaatttaaaaacgatatacttgccccggcctttgtacctgcgaacgaaacgaaatgccaaacgaaaactcaaaatgaaatcaccaaaatggaaaaataacaccgcacaaacggtcgaggccaatggcaatttgaagcgcaacggtaaaagcggagccaatgatgggaagaagctgaatggagaggcaaaagcggagggaaacgtagttgaagccgaagaggaagatgaagaatttgaaggtgaagccgagcagcaggaaggaggcggagaaggcgtacagagcgatcagaacattgcaatgggaatggagtgatctgacaaatgagggagggaaagggagggggaaaaggaaaggaaaggaaaggaactcgtccgacgggactcgaaccaacggccaaccaaaccgcgcaattacggattattttccgtaatttttacccaaaactggaacttattagataattttccgaaaaacggttgctgaaaaatttttgacaaaatgtttattaaaaaccatagtccgaactccgagccgacccgaaattccgatgccccaaaatattgggcgtgagatttgctgatttgcatcttggttccaaaaaattgacaaaaaatagtcaaaacatgaaattatatggattagggaaaatacggcttttttggagcccttaattacggatttcggtaactgaaatctcttatgtccagccctgctctatgcacgacagactgatcaactctggtcggtctgctcttgataaatcctttagatcggtcttgacaaacgctttctcatcagtcttgatcatctcattcccgatcattgcccctctcttggccaacccctctcggtctttggcacttcccgatcttgcaaagtcattttccgtaatttttacccaaaaatggaacttattggattatttttcgaaaaatgattgctgaatcacattattcttgatcattggcaccgcttgacagtattttccaagtcattttcggtctttggcactcccctcagtctttgccatgttattctcgattactcactttgttttgatgctaacatgaactaatgaagcattcagtgccattcccacgaagcaaatcaacgcaataaacccatttatggccacttctcccggcacaaaaccggcgccattgtaaagcgcataaaactgaaaattaaaataaaataaagtaaataaaatttaaaaaacaattaattctaccgggtctttttcatctgacatctgatgatgggcaaaaatattaattttaatgttgcgatttctcaattcaaataattggtaattgaattgatttgtgaattttacctgtaacttgtccatttgcccctattaaatgtcattaaaatgtgccaattgcattttgtttcttttgtaattaatgcgtatgtccttttcattggcttcgtcgcccctttgctcggtgccaatgccaacgaatttgtcgcctcgcccatttgctgtgccatttttgtgtttgcttacaccagcagtgcgccggtgctttgcgcctgcaggtgccaatgccaatgccaatttggcatttctcattttcatctctttttagcaccgaataccgtcgcgcttttctcaagacttttttgcgcgatgatcaacaatcgacgagggtattttatatgcgcatttttcatcagaccaaaaacgaaaatcgcattgttttggcaaatgttgcgatttctcaattcaaataattggtaattgaattgatttgtgaattttacctgtaacttgtccatttgccccctattaaatgtcattaaaatgtgccaattgcattttgtttcttttgtaattaatgcgttgccaatgccttcggcactttctccgttttcaatcccaatttgcttgtactcccccggggtataatttcacttcgtttttcccttcccaactttgtcctcctccttaccatctgtccataattagcaaatgcaaattgtgccctccgcccactcgaaatggtcaaggcaaagtgttggtctcggcacttccacaaaaggggggggcgggggagaagccttttgccattttgccaaggggctcctcttcgcttggcttcggatcggtcgtcgaatgtgcccaaagggaaggcgaggacaacagcggaacaatggccgaggacagcaggcaaagagcggcgccgggggcaaaggaaaagcatcgctcgggggcaaagagtgaccacccaaaagcaaagcctcccacagggcatttgaggggcgaagcggcgacaattatcagagtcgacacggcaacagaatgacttgttcattcagcttcacatttacatattttacgcttaaacctttgttttttgtgccaatttcacaatgtttttgctgttttcgcccaattcgctaatccctcgccaatgggtcaaattcaaattcagaaaatgggttggttcatcccaatgaatggatgggcggaggggcggggaaaagaggggaagggtttcccctcccctccgaatgtgttcgtcgtgtcttcttcccccccccccccaattcgatggaatgagcgtattcatccgcccgatgcccatcttttggtccctcatcaatcccaaatttgtcggaccatttattttttcaaggcggaacggagtgaggaaaaggggaatgagcggagcgatggacaaatggacgacggcgggggggggggatcggcagtccctcttttttccctcatctcctcctccttactcctcccgtttaatctatgctctaatcatttcaggagaccctttcctcctctctatgctgattatctctcactatctctctctctttctgttactccttcattctcttccaccttgtgtgtctctctctaaataatttgtcttgcatatagatccagtctctttccctc

SEQ ID NO: 1430 - DNA, 2263 bp, Heterodera glycines
ttcgtcgtcgttgggggggggggggggcgcgggtcgttccctcaaatggacccccgtcgcctcaaaacgggtcccgggggattgaccggtgaacggaccgaatgcattagccaataatccattaatggaacagaaaaagcatcccaatggacgaaagcaccagcggaagggaaactgatcagcagaaagggacgaacgaacgacggaaaaagcatctcaagcagcaaaatcacttaactgatcagtgaaaggggaagagattggatcaaggcagcagaagaggaccgattggtgatcagaatgattggtcactgatcattgcttggacattgggggggacactttgtccccggccctctcttcggaagattcctcagccgctcgccacctccttctcttccaatcatttttaaattttgcctttttcaattgctcattaaatgccacagattaagcgcgagaatgtcacttccaatttgtccgattagtccttccaattgcgataattagatgcgaataatgcgataccatctccttctgctcattgtcagcattatttgtgtcccctccccatggcactttcttcggcggatgatcatcccttccccttccttcccttccccttccccttccttcccttccccttccttcccttccccttccttcccttccccttccttcccttcccttccccttcctttcccttcgctttccccttcccctccgcccaatctccctaatcttcccctggttttctcattaatcccctcccccaattaattacccgtcgcccttcccagcgatgtttcgaacactgtgttcattgtaaagaaatacactccgagcaaagagcggaagaatgggcggaagtaagaagaatttgggggacacattgggcgtcaacaaaaagaagaaaagcgcgagaaacgcttttggttttggggcgggggaagaaaaggagcgctaatcaaagccaattgaggacaaataaaatgggacgaaagatgaggagaaaaggagagacggggagaggaagtgagagagacaaagagagagagatacagagaaagagagagaggacagagaaagagagagaggacagagagaacgaggaaaatgaaaaaaagagaatgagaaaaatgaaaaacagagaatggcgagtgagagaggcggaaggggggggggaggggggaagcttttaagaatttaagtgcctaagaggagggtgatgaattgaggttatttatgataaggccatcagctgaagtagcaccataagaatgtttttgcgaaaagggtaaaaaaatgggggaggaaatgacacaccaattaaggggaaaagcgagaaatgaacagcacacaacaacaggaggaaaatagcaagaaaaacgaggtaaattaaaaggaaaagcaattaaaaattattgggaaaattgggagagaaaaaatgaaaggaaaatgaaaaggaaaaggaaggagggagaagagaaagaagaaaatgaggaaaggaggaaaagagaaaagggaaaattagggaggagagagagagagggggaaaaggaaaaagaaaaggaaaggaaaggaaaggaggagacaaagggtaaaagaaaaagcggaaaaggaaaagctgatttggagttttggggggtgcgccccgcggcggacggaacgatggctaatcccatgaaatcccttttcgcgcggttcaatcaaataataataacacaaaataaatggccgaatcaattcggacaaaacgaactcacaatcagcagcacacaatggcaaagaataaactccgtttattggtcatcattaacagagcagaaaagcaaagtaaaaattgtaaaaggacgaaaaattagcaaagagagcgaaagacaattagtaaattgcactcactcattaggagggtcaattaggtggggtgaaagcatttggtcatttggaggggaccgaatgtaccgaatgtcggtcccccgccgacgtcgtttaaatgttcggccatttgtccccaaacggtcacttttagttggctaattggctaattgcccctccccaatttattctttgcttatggtccattgccttcttctgcggtcattttgtcctcattctcccccccccccactgaaattggagtcgttgcgaatttcgccgggggaaacccccgggggatttgccttttctgtccgccttttccccggggtgagatttggcaatttgtcgcccatcccttggcccaaaatgggccatattccac

SEQ ID NO: 1431 - DNA, 6126 bp, Heterodera glycines
  unsure (1)..(6126): unsure at all n locations
cggcaatttgctgcgggggccgagggcactcaaagaattgcaattggacggcaatcggctgtcagcgggacaactgaaccaactgctggccgaggttggcacactgaaaaggctcgaggcgaaccattgcgggctaaacgatgccgaagtgttggcactgaatttgagcaaagtgccgcaattggaacgcattggactggcggggaataatctcagcgaagtgccgagcagcacactgaggcaagcagaaacagaaaggcgcaattagcggtgctaattgggcaaaattggccattttggaatttgaaggaacactttttgtcgaaataagcacagttcagggcacttgcgctgctccgtaccgtcgatttgtcccacaatttgctccgttcccttggcccctgcgccttttgcggctccaacatttcccgcgtgtttctctcccacaatttgctgggcattggcggcgatttgcgccccattcaccgcgaagcgttcgcagagacgcgcattttggagttggacctgtcgttcaaccaattggacgctgtgcgcttcagctccgaaatgctgcaggatgcgcaagagtcgctggaagtgttgcacatcagcggaaatggccgtgtggcgttggacgcgccgcaactcatcggaaccctcccgcgcctgcgggcactgcacgtggcggacagtgcgctgggtacagtgccctacagtctgccgaaggcgtacggtcagctgacgctgctgaatctgtctgggaacggattggaccatttgccacccaacctgggctcaatgctgcctcatttgcaagtgattgatttgtcgcgcaatcatttcaggtaaatggtatttggccggaaattttcgtgccgtttgccagttcaattctatgctttcagcagttttccccactctttggtcactttcattcatcggctgagaatggtctttttgcacaatgtaaaaaatacatttaaaaaatcgtttaaaatttggttaattatgcattaattaattaattgcccatttcgccgttcgttcagtgcccttgggattgccaatgcgctgctcaaccactccaattgcacatgctccgccgattggaccacaaggaaatgttgcgatatgacgagacactttgtgctgagccgccaatgctccggggacagccattgcatcgcgtgcaaaagatcaacgactgtgccattctgttcggggccaactacggcatcagtcaggtcgggaaaacgaaaaagcattttttgtgggagggagggaatgttcatttgagcaatgctttacctttccccctctttggcactttcttcagtttttctcactttttcttctgattttgcttaattttcgcctttctcagaacactgaactgttgctgatcctcggtgcccttctgctcgccgcacttttcctttctgcctttttggctttgctgctttattttggccgagaaagcacacaaaagggcacttatgtgacgggcgaaggcgtgggggaggaggacggaaagagggcacggctaattggggggatgagcaaaagcatgacgatgaccagcagcggaagcaacggaacggcaggcggagggggcggaggaagagcaatgatcgatttgggtgggaaagcgatcactgatcagattggagtgacttaatgatgggccaattcgtcctttaaagatgcgatggcaatgaacggaagtgccattggcgggagagagtgccggcaaaaaagcgccgactgtgagtcgcctctgctgctcagcaacagtttggagcagctgcagcaacggagcagaacgaacagacaaaacggcacgccagcgacaacggcgacgacagcaaagagttctttggccgcattggccgtccaaaacctgcatttcgccgcgtcaacagcgccgcttttcgccccgtccgcgtctttggccacggatcgcctgaaggagccgcttttgctgcccaattcgccactttcgtatagctcaagcaacaccggcagcagcaacacactgctgaacatcagcagcaggacgagggcaacaatgagtggacaaccgccgctgactgtgctcggcacactccgacgaacggtgccctcgggggcggacagacaaacgatgagtcaccccggggcaggggacagagacggagggggagcaaaggcactgatcactttctgatcagaggcaaaagggaaagaaaggatctcatcagtcaacaagagagaaagagagagaaagaggcacaaaccgttgcatttcacttattttttgtacaaattttgaataaaaatttatgttcctcaaacattttaaatctgaaaaaagctgaaacttcaaattgagtgtttgatttttgccgatttntgagctacaaatgatacggaattaagcgcttttggcaccgacggaaaatagaaccaaattatatgagattgttaaaaaaatgagcattttatgatccaaggaggtacggcgattttagtgccaaaggaggaacaatcaggaatatttttaaattttttagaaattttcttctgaaaaaaaactttaatttttgaaatttaatatattttcaatctttttttgtttgttataatgtgatccctgataaggtggcttctgctgttctacatttcacttcttaatttgcgttggttcagttcccttccaactaatttcctttttatccagcggtgccgttgggcgcagccgtattgaatttttttaaaaatttggcccggttttgttcaacaatgaccattttgttgagtttttgggtttaaaaaataacgaaatttaaataaattttgatcataaaataattaaataaaaaaagcattcagatttttctgtatatcattttttgatcaatttttggaggtttcgcgggtcttttttactgtaacaaatgaaactaatttgtaaaaaaattcataatttggtttttgcaaattaatttaaaagttttttgcaattatatgtttcaaaaatgtcctttttaatttgatttagtggtctcgaaacgaaacccttcaaaacctaaattattatcgagagtgatgttcggcaaaagaatttaccgggagcggtacagaaaaaaaacccggtaattcccgttcccgcccctttttccgaaattgatcgatcgacggtaatttagcggcttttatcaatgaatcgaagcactcacctccattttgggccttggcctgtgctggtcctaatttaccttcgaattggacgactctttctctaggaaatgctgcgcatagaattttaaatggatttacatgaaaattaatataattaattaatgaagacatgtgaatttgaccagctgattaagcctaccccaaggccaattgtacggaatgaaatgaatgaccaattaattccaagcgaatttggcattttaattttgtaaaaaatgcaaataaaaatcaaagaaaaaatgcgaagaaagtgtttaagtgccgtttccttcttcggtttcctttgcctttccgtgccgtccagggctggacgtaactgattttcaattacggaaatccgtaattgcggcaattttttcagttacggccatccgtaatccgtcattacggaggtccaaaaaggccgtaatttggcgtactccgtaatacgtaatccgtaattttcaaaaaaaaaaaagttttttttaatttaaaaattttttttaaaaaacccaatctatatataaatttttaagattaatttatgatcagaataaaagatctgcatgttttttgaggtggaaatcccaaaatatgggcctaaaccgggagaaaaatagcaaaaataggggtaaaaatggcagattcagagctgtggtcgcaaatttcaaaattttttcattaattatcaatatctcacccttttagaagccattttaaaacaaaattgaaaagattgtcctggtttggcggtgccgaaaggcaaataaattataatttgtgacgtaaaaattcattctttttgaatttttaggattgattttgggaatgatttgtgaagggatcccggctaataaattgagaatcattttttgatttttaaaacagcttatttcgcggtgtgcttttccaaaaaactgggcaagatagggggttgtcaggcggcgccgaaaggcgccgacgggaaaaatttttgaaaatttgatgcaatttgctataagattttgtctaaaaatgactaagatttggggctaatatttaaaaataattaggagtttttggggcgggcagtgccgataagcgccgccgaggaaaatttttagaattttaacgaattttgttaaaaaatagtcaaatttttcgacatttcctcttttccctttgctagcctcccccccccccccccctttatgtatgttaataatactacaaattaccaagaagaagtcagattaaatcggaatttgggtagccttttaataaaaatagaaaaaaaaattcattttataaaaaataatcttacaagaaatcgtctcgaaaaatattctaaaaaagccagttacggatcaaaattacggaaaaatccgtaatccgtaactccaagaaggccgtaatttccataatacgtaatccgtaattacgtccagccctgctgggaaggaaatcctgagcttataaggaggggccccaggagtgtcgggaggggcggttcttccatctgattggctgatcccttgggcgccttacataagtgaccagcgagattgatcaacgtgtaagtgatcgattagactgatcagcgagtgcgtgatcaaagcccgttttacgttaggaacagcggcacggatcttcgtaaagaatgaaatggacggaatgttgcgcttttgctgaaatttatcaattaatggaaaaaagcattgcgtttattttatttcgttcgttatttaaaaagacttttgaatattatttaataaatattctaattgcgataaatgacgtggaaattgctcatagaaatgggagattattttatgttttgaaaagggcggcgacaaacaaaagacaaaaggggggcaattggggggggggggggggacgaaagtcgagcaaaaccgggaaaagaaaaacgaatattatcgggcgggggggcggcattttctccgataagggaaccgagtttaagaacagattgctgaaggacttttttgagcagcgagaaattgagaagcatgaacccgtgcattcatcggtcaaggcgtcggtcgccgagcgggccatccgcaatgtaaaacagcggctgtaccggtattttgcggaaacggagacgctgaactgggtggatgcagcacagaaaattgtggacgggattaaccgctccccgtcacgtgcccacggaatgcgtccgattgatgtgggcttttccaatgctcagagggtgtggaagcgattatatgatgatggacaccgtgcgccccaaaacgacgaccgacacgcttccgcaaagacgattttgtgcgcatgagcagagagaagggacagtttgagaagggctatttgccaaattatggcgacgaaatattggaggttgacgaggtgctgaaagcgattcgccccgttcggtacaagctacgggatgagcgcggagagaaattcaagggcagcttctatgagcaggagttggcgcgtgtaagaaaggatgcagagacaagctaccgtattgaaaaggtgtacagaaagagaaagagggcggatgggtccactgagatgcttgtcaagttcataggataccccgagcgcgaatgggttcacgaatcacaatttgttgtataaaagccccacccatataacaacatatcacattttcataaattttacgtgaaataaaaaaatgtcatcgaacagcttctttgtgtttttgcctagcaatgtgacggattacccggacaatcagcccaataaatttcgggtccggctcccaaagccgttgcattttaacggctcttgggtttgtgggctgcatagcataagctacccatactcatggtcaaccattggcacattggatgcacaatggattgacattcacttcacccagcgcagcacaatggatgaggacaggccgagagt

SEQ ID NO: 1432 - DNA, 687 bp, Heterodera glycines
attttggttttttgaatgaagcaccgctgatttattacatacattctacgaacaatttttacgaataattattattggaaatgtgaaactgagagagatgagctcatcttttttacttaatggaaattcagcaaacaaatcaaaaacaacaaaaaattatttgcataaatgaaaaatataatcattcttttaaccgggatcacaattactcccggtctcctccccttccggcctgtactgtgtaattttaatgcaatttgttaacagatttgtccacaaaataaaacctcaaatcatcatttcaaaaaaaaatcctcaatgacctatcaaaaaaccacaaaatgaggataaatcctcagatctgcgagccctgtgtatcaggggtgtgacttatctcagaaaagacgagagcgagagtcaaaggatttttagggtccagcgatgccgttaggcaccaccgtggaaaattttgaaaatctgagtaattaaattactgaccttttatccaaaaataattgtgctctgattttaaaaaatagaggaagcagagaaagaaaatttatagtgtttttcgcgtaaatttgaatatttttctgatctttcggattcttccattacagaccaagagctatcgattggtatatatttcgaccattttcggctctgggccatatgatcaatatttac

SEQ ID NO: 1433 - DNA, 1427 bp, Heterodera glycines
aaatttttgtaatttttaatgtgatttctaaactattttgttcaaaaaatgacaaaattttatgattttgaccattttttaagagaataagaatttttagggggcggcgaaaatccaggttgccgaaaaatggccaggacctggacctggatccaggaaaaatccaggcctggatccaggtccaggccgagctctagatggaagtgtaccgccgagagaaaaatttgaatatttaactgaatcatgttaagattttgcataataatcgcttcataaaactaaaatattgaaagtactagattctaagcctattttggtcctttttatggcattttgtgattagttcacttcttacgaagaatttttttgtttatacatatttttatttacataattcgcaaattttcttacataaaattagcagccctatttattattaatacactgtgttaatttaaaataaagacaccctgttttttgggagtttgaccacttcccatgaaccgatcgagctgaatttttaactgtacgtagcaattctgaaaatattaagattctgaaagtgagaaaccgaaatgatgacggaaaaaagttttacgattttttttcaaaaatggggtgttaatttaaaatagagacacttgataaaaacgaacaaaatcttttaaattaacacagtgtataattagtagggctgtgaattttagtgacgaaaaatcccaaaatagttaactaaaatagtgagtaaaaatgccaaaatagtgaagaaatagtgacaaaaagtccgaaatagtgacgaatagtgacataattttcagacaaaaattaagcaaaaataatttttattcactgattgcattgcaaatgagtagggctgggatttttaagggcaaaaaaacaaaataggtacataaaaaaataatttttaaaattaaaattcttgccacgaaaatacctttttgagaaaatttttttcatttcttaggagtgctttttgaaattttttttgtcgattcttaggggtgtattttttggttttattgcatttttgttaaagaattttccaaaaaatgtcgaaatagtgaaaaaatagtgacaaaacgccaaaatagtgatttttaactattttagtgacgaagtcgccaaaatagtgatttctagtgaccgatagtgacatcagaatcgaaaatttttaatgcagaaatgcgttttttgagctcctttcttcaaatcaatcgagcaaaaaatttagttaaaacctaaaattcacagccctaataattagccaaaaatagtttctcgaaagttctccgccgtcgcttttccttcgccgcgacgccatttcagcaccaattggttgggactgaattatgtgaaggtcagcaaagcacatacagcaaaacttgaggaggcggaggaggattggc

SEQ ID NO: 1434 - DNA, 3095 bp, Heterodera glycines
  unsure (1)..(3095): unsure at all n locations
tttcataaatgacaatcatgaaanaatgatatatataaaataaattatttttttgataatattactattttttaaatcgaccatcattttttggtgattggtcgtttttcatcaaattaccgtgggagtttttgnctaataagcaaataaattttccattcttgattctttcgataatggaaaagctattttgtgagcttttgttttttatttgaaacttatccatttttaaaattatacatgctaataaataacaagcttaaagccaacgaatgatttgaaagattcggttgcttttgagtaaagttaatttgtctactaaaaataatttttttccaaatctggtacatttaaccaagaaaatgttcccaattctcgtcctataattgctctttaagtggatttatgttatgcaaacattgagcaaaagtcgtcccgtcccgttttgggtgttgcgcattttctccgatccaatcttttggcttcctatttttaaaattagctaaaaatccgcaaaattctacctctacaacatgaattggtgagtatccaatttgattttaatttaagcaattttaaatttatttaccaaaaaagaaaattaacaatgggtaaaagggctcgtcttgccgaaactccctaacctcgcattcttttccaaatgaattcatgatcagtttttttaaaaaccctgtgatcaatcaattgggactaagatttttgaacaggtattgcttggataaggagaaatgcgcagctctcacatgatagatttgatcttgttatattgtgcgcttctgatttctaattaaggcttcaatttttttagttttacgttttacaaatttacacattttttgtataatctttgaactttcaaatttcggcgctcaaaatgcttcgctttgctgagatagtttatgatttttaacatgctgggtcctttcgtaaaaattgccactatggacgtttcgtaaaagtgcaaatttgcaggttttttgcgaaaaatttcctaaacaaaaacaaattaattattcttgatatcataagctaaaccatctggcttgatttattagcatgaaaattatttaatttggtgtgtttaaagaaaagtatgaggagtttttttcggtaaacctgcaaattggcacttttatgaaacgcccatagtggcatttttttatgaaacgacctagcatcattttaataataaaattttttaaaaataatttattctacccaacccgacaattcacatttcgctctcccccgcctccccccccccccctaaaattgggacacggagagagtgcgctgcagtttcaattgtcgcgcaccccccgtcgtcagcagttccttgtccgccctcttctgactgctggcggcgggcgatcggtcacgcatttcccattaaataattgacggacgaatgactgaccgattagtgctgatggctgacctgttttgatcgggtggatttgttctcgcatccactcgagacgaccttgtgcccactctttttcagcatattccttctacgggaattgttggtctcgactctcagtctcgaccaacaaaggaaggattagtacaagggatactctgctacctgctcaacccagcacaggggtggcaaaataattaaaattgatttataattagtgttttaaaacggagtggactctggataagttttgtggtccgtaatcactggttttgggtgtgtatttcctgttttgctgattttcaaaaatcacagagtccaattttttgaaaaaataaaatttcatatttggaaatacaaatttaactatcgcctgggtaacaaaaatttaaatgtcattcgtatctaagtgtttgtgttggcctgcttaatgaaaaaatttaattcggtaaaaaaaattgtaacgaaattagtttttaataattacaatttttatgttattttttattttcattcaatgctttcgaatgcggagtaggacaaaacgtcgtcagccgaaacgtcgtcgaacgaatttttcgaccataacttttttctttctcaaccaaattaaacattcttggtattattcgaaagcattcgaaaaatgctattagcctgcaaattttcaaaaatttttatttatacacaaaaaaatcagagcaaaaaaagtttgaattactgggtttttgagttccttctggccataacttttttgaaacttaaccaaaatttttgagattttgcaaattaataataaacacatagagctatcgaacaacaccaacaattcttaatttaattgacagtgaacaaagttatggttcaaaaagtcttccgacgacgtttcggccgacgacgttttggggtgcaccgtttcgaatgatattaataaataaattgaaatttttattgggaaatgctcttttgttttctcctttatttgttaattgtattacgtcaagatcgttcaggcgcgtttcttagatatgccatagggctagaaaaacaaaaattcatttttatataaatataaaagatttggcaaatatttgaattaataaatttgtgtttgaagttttaattttttgaaatgatacaaatttaaaattttaaaggaaaatttttcataaattgtttaacatttttcatttttttccacttggcgcatttacgaaacgcactaacacaaaatttcttaaatgcttacaaaaatgtttattttaaattcaacacttcttttctagatcttttttttattttgaagtataggaataaaacctaaaaccgaaaagtgcattttattttaattaaattcaaaagatttaattttaaattaatcagcgctatgttttggcgtctgaactgcttggccgccattctattcgcactgtgctgcacctccagcactttttggctcggctccgccactactgacgaacataacaaagcgccccatgttgatcaccataagctgacggaaacgcagcaatacgaagtgggtaaaacaaaatagataccgccaattaattaattcaattagcgatgctcgagggtgagtctcgagtcgagagattcatttagtagatttaaatttgttaaaattaaggca

SEQ ID NO: 1435 - DNA, 6257 bp, Heterodera glycines
  unsure (1)..(6257): unsure at all n locations
aaaaaaaaaatttttttgtaaaaataattaaaaagaaggcagagggaaataccggccaattaaccagcttaagcctttttttaatgaaaaggagggattaggaatgatcgccccctgatcgggggttcggccgggtccaggtttttgcaaactgttcgccgtagtcggtggcctgtgagcggacgctaaacaataaacattcaaatcttcaaacaacaccgccccctgtttataaaagcctgttcagaaatggttatggcaagttatggcaaacgagaattaaaatggtttttctgtgggcgccttagcaaaaaaaaagaatcaagactgataaacgaaaaaaataaatgttttcccctttttctgaatcgttttttcatattaaattagaaaaacccgagggtatataaattttttaagcaaaaatcattaagctcataagtacaaattctgtgctgaaatattctgatttttttaattattcctgctcacaatgtgtcgtaatgggtgagtatttcttccggtgacaatttgccatctttgttttcgtcagcaatatgaattaaatgtttggcttccgcgtcggcatggtcaaagttcaacggcattacccagtcgcgcatttcgtccttaaagcaaaacgccaaatttgaacggttaaatgaaaattataaaataattttgaaatttttttggcaatgtttccatttttggataaaattttacgatttaacaccactaatttgaaatttttggcacctattttgccatttttagcacctattttggggatggcagtttttagcaactataaattgcatccctagacataagtatgtatgccgtaaaatgtatttctctttttatgccaaagaaagtatttaaaattcctttttttgctttaatggacaaaaaaaaaagttgaaaaagacataattatttgcaaccaaaaaattaaaattaatcaaaaaattcctaaagataattaattaattcctttttcaatttttaagttaattattcttgaaaatacaataaattttggcgatttttgcattaaagccgaaaagttttaaaattcaaaattctgttaattaattgtcattaagctcataagtacaaattaatttcggtgaaattttttaatttgaaatttttgattttcactttttttttatatttctcataatgccttcatttggtttttgagaattttttaaagcttttttttgcagttttgaccgccttcgttggtttacttatcttttgatcgattttctatgcttcggttcacttataaatttcgttttttatttttaaattttttcaattaattttcttatatctgactaatccttaaaaataaaataaagttttttttacagaacaatgatgttgagcggacatggaaaaattacaaggaggagcagctgaagaatggcttgctcgattggcaagactacaggtgaagaaaatctaacagagggcgagaagggtggaaaattctaaaaaaattaagaaatttgatttacggaaaaccgcaggagggccaggagatttcaccggaatacgtcaaaatgattgagcgagacgaacgtcggtggaaggtcagaagcaggccaaaaagacctgctaatttatattaaatcgagaggctaacggccaaattttaatatttttaaatgctttccatacagtaaactcaaaaattgatttacaggtggctgactacaattcggacggtaaaatggaccgcacggaatacggctgtttcatgcacccggaggactgtgaccatatgagagacattgtggtgcaggtggattagcaaatttatttattaaaaaaaaatcaaattagattattgcttattaaagtccctttttcaatgattttcattttatatatttttcacttgtcttaacttggaacgggaaaaattcacctcaccctaattctcatatttacccagtattgttgcctaattatttaaaatgatttattattaataaatctttaattgctattggagcaaaccctcaccataattctcatatttatctcaaaccctcgccataattctcatattatctatgtattttcctaattaatcccgaagtattgctaattaataaatcttttaattgttattgatgtcctttccttaaaaatccttaaaaatttctgtacaggaaaccgtcgaagacattgacaaggacaaggacggtttcgtggacatggccgagtacatcggtgacatgtacagaccagacgattatccggaactgaagggcaaagagccggaatgggtggagtcggaacgggaaatgttcagggagcaccgggacaaggacaaggacggcaaattaaacaaggcacgttgaaggggaagaaaaaagtgccacgaaaatgccaatattggctacaaaattggcaattctgccacaattaattaacagaattttgaattttaaaacttttcggctttaatgcaaaaatcgccaaaatttattgtattttcaagaataattaacttcttataaaattgaaaaaggaattaaattatctttaggaattttttcattaattttaattttttggttgcaaataattatgtctttttcaactttttttttttgtccattaaagcaaaaaaaggaattttaaatactttctttggcataaaaagagaaatacattttacgatatacatacttatgtctagggatgcaatttatagttgctaaaaactgccatccccaaaataggtgccaaaaatttcaaattagtggtgttaaatcgtaaaattttatccaaaaatggaaacattgccaaaaaaatttcaaaattattttataattttcattcaaccgttcaaatttggcgttttgctttaaggacgaaatgcgcgactgggtaatgccgttgaactttgaccatgccgacgcggaagccaaacatttaattcatattgctgacgaaaacaaagatggcaaattgtcaccggaagaaatactcacccattacgacacattgtgagcaggaataattaaaaaaatcagaatatttcagcacagaatttgtacttatgagcttaatgatttttgcttaaaaaatttatataccctcgggtttttctaatttaatatgaaaaaacgattcagaaaaaggggaaaacatttatttttttcgtttatcagtcttgattctttttttttgctaaggcgcccacagaaaaaccattttaattctcgtttgccataacttgccataaccatttctgaacaggctttattagagggggtcggtgttgtttgatgatttgaatgtttattgtttagcgtcggctcacaggccaccgactacggcgaacagttgcaaaagcatgacccggccgacctctgatcagtggccgatcattctaatcactcttttcattaaaaaatgccttatgctgttaattgtcgttattccctctgcttcattttaattattattacgaaaaacttttatttttacaaaacataagccatgcccattgtaaggacatcttttttgaaacatttaaaataaaaagccaccaggcttccatagtacatttacatatgtgcaaaaatatttcaaaaattctcttgaaaaaatatttcacaaaatttatttgctgatagaaattgttctgataccaaaataaaaccgaacccatccttttcagattggtcaaattcttatcaagtagaatgatacaaacacatgcaattcacaaaaatattttggagggattagtcctccgaaaactaagaaaaagctttttaaaacttaggaaatttagctgttcctgaatgaaattattgattgattatttttttgctttttgtcagtttatcttttatattttctcatgataaattaatattttactttgaaaatttgcggttttcaaatggtttgacaatcaagtgatttaaaatggcaataaaaaagaataaattctaatactagtgaaatatactaatcttgaaatcgtcattccagttattgttttccaaaattcgtttaaaattagttctttgtagaactctcatcgcaaaattgaggccaattttgggcccaattcaatttggcaatgcactgaagaaatattcaattcactaagtgattaattttttcgttttataagaaaatattaattagcagttttttaaattttaaaccctaaatataaatgcaaattttgcttccaatgaaaattgtataagcaaatgtagccaaaaattgggatcgatatcgaatgattttccgttatatggaattgttggatcaacaaatgaatgccttttgctagtgatattttttactaaaacaaaattttcgtcaatcagattatttgctctccacgatttttagggttttatttaatggttaaaatttaataatccagaattttgacaaagaaaatttaatcaaggggaaaagtttttgaataaatttcaaaaaacacctccaattgtggcaagctttccaaatttctgtcatttatgctttagtcccataaattttgttgcttaaaatcacaaattttgcccagcgttgtctgttcgtatcggtgtaccaaaaaaaaaaaaatgtaaaagcggttcaccaatgttcgcttaaaaacaattttcttttttttcttactgatttagcccttttaaccctaattcacgaattccgattttttttctcgtcccgaatctcggaacttaaccataagctatttttgaccatcactttaaaaaacaaaaatatttgtaagaaaccacggcttttttaagtaccatttacttttttccagctaataattcgcatctttggctaatatttccatggttaatgaaccctaccgctatagaacacttcgactggagaagccatgacctctcctcctttcgctaatcaccttttactctttttttttttatcattttccggctaaatctttcccatcatttttatcttccgtctcccccccccccctcaacattcttcttccccccccccccgaaatgtccatcgggccgagttggaaatgaatggaaaatggggaaattaggcgaggggatgcgctgcaaagacggcggagatagcgtcacaataaacacaacagatattagcaagcaaaaacatcacagagcacaatccccgcgggggatgaattgattggcgggggcgggggatgaaagacagaaaaaaaatattacttttgaacataatttcgtttttcttttattgattttgttttaaaaataaacaaattaattcttttttttgctaaggcacccacagaaaaaccattttaattctcgtttgccataacttgccataaccatttctgaacaggctttaatagagggggtcggtgttgtttgatgatttgaatgtttattgtttagcgtcggctcacaggccaccgactacggcgaacagttgcaaaagcatgacccggccgacctctgatcagtggccgatcattctaatcactcttttcattaaaaaatgccttatgctgttaattgtcgttattccctctgcttcattttaattattattacgaaaaacttttatttttacaaaacataagccatgcccattgtaaggacatcttttttgaaacatttaaaataaaaagccaccaggcttccatagtacatttacatatgtgcaaaaatatttcaaaaattctcttgaaaaaatatttcacaaaatttatttgctgatagaaattgttctgataccaaaataaaaccgaacccatccttttcagattggtcaaattcttatcaagtagaatgatacaaacacatgcaattcacaaaaatattttggagggattagtcctccgaaaactaagaaaaagctttttaaaacttaggaaatttagctgttcctgaatgaaattattgattgattatttttttgctttttgtcagtttatcttttatattttctcatgatagattaatattttactttgaaaatttgcggttttcaaatggtttgacaatcaagtgatttaaaatggcaataaaaaagaataaattctaatactagtgaaatatactaatcttgaaatcgtcattccagttattgttttccanaattcgttntanattagttctttgtagaactctcatcgcaaattgaggcgaatttgggcccanttcattnggcatgcactgaagaatattcattcactaagtgattaattttttcgtttt

SEQ ID NO: 1436 - DNA, 2157 bp, Heterodera glycines
  unsure (1)..(2157): unsure at all n locations
cgtcgtattcgcactgctaatcgaagccgtttcctcagaaattccatgcaatgggccgatgatgtgaatttggctggccaagttccgataaaacaccgacaaacattcgccaaaatatttctcactcagaagggacgaattgcgtgacgaagactaataatggcaattaatagaaaaacaacaaaaaaaagtaaaagaacaggcataatgaagctttaccgacatggtcaatactgttgggtctgtgcaaagcaatcgacggaaaaggaagaaagcccaactgccgcggcacttaagcaaatcatttggcatttaaacaaaaacacccggccatccctccgccatatttgttcggctttgttcccatacccacccactgtgaagatggcctgtccgacgccgttttccctcacccgtgccaatttgtgtcgttcgacacaatgccaaaaactctcagcggaagtgctgtcgttgtcggattcgatgctcacaatgagagtttctgcctcggataatgttttggacaacgaacggagggaaaccaccaaatcagcgggttggtcgacacgacaaaggacggattgagactgttcggagaagaaacgggcacacaattcatagtcaatctgaagagaagacgaagaatgggacgaacggcacaaatcgcaggactttttgaagaggaaaatcaatgcgatggctcagagagtgttccctgtcgcttccgtcccatcgtttgagttcaccggcggcactctcttcgcattcctttgacaaaattcgatatttaaactgcaaaaagtgcggaatggcgtctgatttgtccgtcggctgttcaggcaaacgccaaatgaagcggaaaatggaatttggaacaattggctgaacggaaatcacagagatttggaatttcaaaggcaaaaactttaaatggcgaagggttgagcagctcacaatcagttttaagagaaaggagagagacaaaagtggggaacacatcgacagcgaaagcagcagagactgaaggaatggcaaaatgaacggcgagacaagtaagagagagtgagagagggggagagagagagagaggggggggagagagagaagacaagcaaatgaagacaaaaaagcatatgcccaccacaatccttgcgagaaatgtccacatggaaaagagtgcgatcggacaaaaaagaagtgcgccatgagagaagcataatcgggcgaaaagtgatcggaaaagagcggcggatgatcagaaaatcatcgctaagcagagatttgcaatcagaagcagcgaaccattcgaatttgagctgaaaatatcagtgaccaaattaactctgcaactcggatgacttcgcatttctcttcgatttgtccttcgtttttctgttccgattggtacgtctccaatcggtcgattcctttgcacattcgtaccaaaattcgatgcttttcctccacgtcaagcggagggattagaaattgcgcttcggtggtccaatttccgtcaaaattctttaggttttgtgttacaatttgttttataatgtatttaccaaaaattcaatagaaccgtctgaactttggactaacgacagtttcaaaagggacggcgccgtgagagaggccgtgccgggcgaaacgaacaccgaaaaacgctgttcaatgccagaaacgaaaagggaatggccgaattcggcaccaccgccaaatgaattttctgttggatattgacaatggataaatcatattgcaaagaatggcacctttttcagtgctgtcaatgcatttcatttgaatgttcggtcgaattccgacgacgtaacaaaaaaggttttccaatttagcattttttgccatttgttcctggtaatttagcacaaattcgacgccaaattcgccgttcgatacaaaaaatgagtccaagaaaaaataaccattcacttcaattttctgaggaaaaaagccaattttaaaatggccacttccgaacggaacgaccaaaaaatatgggcaattggcacctgaagtgccaaagtgaattcggtcgtacatttggcacccaatgtgacattatgcggctgcgtttgatgaagatcanagaaatggtcatcgttttccagggcacttttgcgtttttatcggcaacgc

SEQ ID NO: 1437 - DNA, 1505 bp, Heterodera glycines
ttgtatgttttaatgacccaacaaaacccccttttttctcgggagaggcgatgtgaaggaattcgaaaaggaaacggacgaagagcgaaggacggagaaaggcctaacggaaaaggaggagggagaaggacacattcaaatgaacaaattaattaatgaatggtgactcacttaaaacgcgccttcacacgacagtcattcaagggaattgccagcgaattgcgcagtgcgaaaatgagagaaaagggcgaacgattggacgaacaaaggacgaaaggtgcggaggcgaagggcgaacgacggacatggacaacggacaggggaaggggcgcggaatttgggtccaccgacggcagagaggaccaaacggatggccaaggcataaaaatggcactaaagcaaaggaaaatgaacaaaaacggcaattttggcatccaatcatcgctcactttggcttctgttccgtctcttccgctgcttttcgttcccgcgtcaattcactgattttcgagtgccatcgtccaatttcgattttattattctccgactgatcgatcattgaaagaaaggccaaacagcagccaaaaagactgaatttgaaggaaattaagccttgaaagaagccacaaatgaacgaatgctttttctgacattgttttgaaattcgctcccttttcctccgctgtctcttcgaattgtttgaccaaattgtcaaaaatgttttgggcgaaaggaccgttcaaaggatgggaaagaaaggcgcagagattgtggcggaaaagggcgtgcgcatcggagggagacgaaacactgaagggaatgggacaacgcaagttgaaattgggcacatgttaaatgagtgagaggacattgtcagttcggcgagttggtgccgcgcgaggaaagcgttgcgccaccagccgaaccgttcaaaggactcaacggcttccaacagagcgaacttcgcgaaatgctcaaaggctttagtgccctctccgccgtcaattgcctcacaaatcatttgggaaaaggcgcggaagagacggacactttcatcggccaacgccaaatgctggcgttgttggagttcaccggtggaggaggagggaccggaaaagggcaataagtgccaatttggacgaagagaaaacaaacttttggtgccatcggagggaacattcggcgaagtcgcgtcaaaccaacggcgcaacaccataaggcattgtttggacggagaatgatggtcagaggaagcgccacccgacaaaagcgcagtggaaagatggcgaatctgaaacaatgagaaaggggaaaagaaagaaaaaaaggggaagagaaaaagggagaaaaaggaacggaatgaaaaaacgaacagcttcgcattttttgagcagcaaaaagttgagatgagcggcggcggaagaaacgtcgcaaagtttggacgcctttcctccgccgagcaaatgttcgctgaatttgaacagttccgccaaccaaaccaaaag

SEQ ID NO: 1438 - DNA, 1854 bp, Heterodera glycines
ttaaattggcaatgcgaagttcgaaggaagcgaagagaagcgactgaaggaaacggagaaaagcggcgaaggacttttcgttggcgagctcaacgaattcgaagattctgcagggaaaaaatggacaaaagaaaattatttgcattaaaagggccacgaaaaaggccattctttcctccgcccctttttcattaccgattttgaaaacgagaaaagtcgcttttcagtttgtccatcagctgactttttgcttttttgtctttgctgaccttcgaactgtcaaagagaatcgcccaatggttctcttttgcctcattcaaagtggcgaaccattcagaaatttcaggcctaacggtcagacgatattcctcaaaattctaaaatcaaaatatgtaaaaatttaaaaaaagaagcgaactccggaattgacaaagaaaatgtggacgaatgcaaattcggagttggtggatgtgtcattggaactccttggagtcgagcaaatggaagtgtcggcgttgaaagggaccagcgaaggagtgaagcgcaaattgaacggcaaactttgcgatttactctctctaacaataaacaattgtggaacgtatcaaaagaggcgaggaccttttccaggagagaatgccattgcccagtgcattaagaatgtgccgtttgttatgcgtaaaactctcttcattcccatgccctttgaaattaaaacgaatgatttgggaaatgaggatggatttacatgatattctgataggttctcttttgttgattgcgaagagctgacaatcactggtagcgattttcatttaacaattttggatagcaaaaaattaaaaagtctagacgaaaaattcaactttttaaaaaatgaatatgtaaaaaaaactttttcaaaaatttaattttgcgggtatttttggaaattttccaattttattttttgttatccttgctctccagcaggggtggagcgcgggcggaaatgcccacgatcacggaccactgcaaagatcattggtcccgaaatgttttaattaatttttttcgtaaagattttttaaacaattttctaagggtgttttgaggcgctgagcacgaatccggactccatttcgaccaattccgaatccctaacccgaactcgaacatttttagagaaggaaattttaaatttttttttaaatttctcttaaaacattgctttgagttttcgggattgataaccttagaccaaagcacgtatcaataccacaaaaatggtcattctgtaaggatacgaacaaaggacatgacttatgataattcagaattattgagagggagtacgagaacagaactgggaaactgaacaggacgaggtgctggaaacactcaagataatgatgacttctgaacccggatatacaatgcccctaagattaggtaaaccgatcataattgagtgcgacgcgaccaaaaaagcaattggagcggtattactccaaacaaatggcccagtcgcatatgcttcgcgcgctttaaacagacatgaaacaaattacccgtcaatcgaaagagaagcattagccttagtgtatgcgttcaaagaattttcgccttatattggtggttcaggcgtaaataaaaccattacggattgtatcgcactgacgagcatgatgaaagccaaagaattaaaagtgcgactagagaaataccagatcactctccaaagatttgaccttgggaacgtttacggcccccgaagcaaaaacaaggcggtcgattttcttttcccgttataatataccaggcaatgagcccgaaaacccaaacacaaaggtaaaaaagaaaacaaaataaaaa

SEQ ID NO: 1439 - DNA, 1847 bp, Heterodera glycines
tttttttttaaatttctcttaaaacattgttttgtgttttcgggattgttaactttagacaaaagccgtttcaaaaccaaaaaatggtcattctgtaaagatacgaacaaaaaaagaattttgataattttgaattttcgattttttgttcgagttcggatccggtattcgaaattggtcaaaatgaatggcagattcgtgatcagcaatcccgaaaacactaaaaacaatgttttaagagaaactttaaaaaaatttaaaatttagatctcgaaaaatgttcgggttagagattcggaattggtcgaaatggagtcccgattcgtgctcatttgtcagcgccttaaaacacccctagaaaagcgtttaaaaaatttttagaaaaaaataattaattaaaaaatttcgggaccaatgatcttcacaattgcccgctgcccctcccttcccctaaaatttaaattagaattgctgcaactgttgtctctgttcactcactattcattctagcaaaggaacaaaatgataaaggccattttggtgttcaataaccatggaaaaccacgactgctgaagttttacacacaatatgtatgtaattattctattcttcctcttttggacattgtgccgaaattgaacttttgcccattcagagcgaagaagaacagcagcaaattgtgcgggagactttccagcaagtgtcgaaacgtgacgacaacgtgtgcaactttttggagggcggaaaattaattggggggtcggactgcaaattgatttacaggtaaatggtcctgccgatggatggttgggttaattaggacatcctcaaccattttaaatgaaaataatttataaacgaattctccgcctataattttaaggcattacgcgacattgtactttgttttttgtgtggacagctccgaaagtgagttgggcattctcgacctgatccaagtgtttgtggagactttggaccgatgttttgaaaatgtgtgcgagttggatttgattttccatgtcgaaaaggttgccaatttctgcgttttcatccttcgatttttttccttttcggtccatcacattttaaacgaattggtaatgggcggcatggtgctggagacgaacatgaacgaaattctgctgaggatccaagagcaggacaaaattgagaggcaagaggtagcaagcaatttcataaagaaaacccggcaaaatgtcaacttttcttttcatttgccatttccttaggctggcatcgccgctgcccccgcccgcgctgtgtccgctgtgaagaacatgaacatttcgcaacaaattaaggacctgcaaattgccaggattgccctctaaaattgccaatttcaaaagcccattttgaaaattgctgcccttttccaattcatttgtctctctcccaacgtgacattggccgagttgatcgggtcttacaatggaataccgtacaataatttcttatttacttatgtaatttcaaaatttaattcattaagaaaaaaaatagttttttcagaattttagtttttaaattttataagcgaaaccttgtacaaatatcatgacaccagttgatcaccaagttcaaactgaaaaggtcaatttgatgaactgacggatcaactttaaccagttttcattttattttatttttgcaatttaataaattttaaatgtgagaaaggtaaactgcccatattcacagcgaaagttgtgcagaaaatgagcataattcccggagttttcaatagcaaaaagtctcctcactgaagtcgcccattttcaaagaaagcgactgctctttcgtgctaatataaatagttttt

SEQ ID NO: 1440 - DNA, 4570 bp, Heterodera glycines
  unsure (1)..(4570): unsure at all n locations
taattgctgctttttttcgtttgtaactttcttgaaatgttagaattctcttgttttctcgtattattacattattcagactttgtgctttcgaatgataccaaaaagatagggtttgttcgaacatgaacaaagttattgtataaaaacccgggattgtcaattgattggactcataaaggtcgattggactcataaagtgcattagagccttaaatatttcatcactcttttccaattttcgcctttttaggcatttccctttttgtttttcctttcacaacatctccgccagtgtaataattgggttaattatgttttttccctttgaataccgtatctaatcattttggtgtacagtatgcttcgtttttcgctcaaattacgttttcacaatttgttttttgcccgttttctttcccccccccccctactttgttcaaatttatcgtttccgcagtttatccttcgcattgttccgccctttccctcccaaattgtccattcgaaactgttaaatttgtccattttcccatttcgttatgtcgacctatgcaaacacaaaaagtggcactaataaatctctgtcgttctgtcgtcgtgactctctgatcaaacagggtcagctgacactgctttttggcacaatccccgtgattttatacagcttcgttggaccgagttcaaaacgaaggtctccgtcgccaaaatacgcttgtgagtcgtcaggagttggagcgacaagctctttgcaagccggtaagactaatggccattggtgggctatgccctggccaatttccctgtgttcattcatcttttgttttcacattttctgcttctccaacttctcaacgacgaaagcatcgaattaatccggacggcgagcgatgaaaaagcgctttgtgttgtgctttccgtccactgttctggcgaaagtcgcactgtgcttcaatcggcgttggccaatttcagttccattggcctccgcttgggacatttggacacgcggcccgacttaggcaaggctaacaaaaagaaaaagctgatcggacagcgaaacgatggacaaaagcatagaaaccaatcatttttaagttttgttcccacactttaacagctcatcctgacgaattggaaatccgagcccaattaagcggaaggaaagcgcaatttctggaagcattgaccaaattggtagtggaaaaagccatcgaacggatcgaattgagtcatttcatcggacaaacggaggaggaaaaggacaaaagaacggaaacgaaattgggaagaggtacaaaatgaaaaaccacaaatgggtataaaagcaatttaaaagcaacagaaatttggtttcctcggcacgtctctgagctggacaaaagcacgcatgtaatggtcaaatacgaacccaccgaagacccaaaacatccggtgagagagacagggcgaaggagagagagggggagggaaagaggaaggagagagagaatggtgcataagacagaggggtaagggtgaaatgagagacagtttgagaccgagacggggaagatagagaatgagagattttcagggatttggcgaccaacaatacattgcccgccgggctgaactgaatgcgttggccaatggttttcggcacggcgattccctccctttcatttgctataccgacgaagaaaatgtgaaattcaccccttaacgaactcacgaaacataaaacttcagaaaacttggcgagttgcctatgaacagcttaaggaattgcgcgagacgcacacatgcgaagaataccaaaggaacattagagaaatggaaagagaagagataatgtaaaagggggagggagagggggaaagacggaacattcgttcacagaacagccgaccgaattccgcagctgcgtccgctgagtctgtacatccaaagtgggcttccccacccactttttgctcatttgtcagtccaaattctgaagaaaggaccggcttcgaactccgtccctgcggcggtttgctctcggctcgcgactttctcgccagtttggccttccgcgtctttcaggcactcccccaacagaataacccataaaaaaatgttgccattcaggcgacgctttacgttcgccatgccaggtgctccccctccctctccttcctcatgccctacgcgccaatttctcccccccccccccgattaattcgaatgtaaagttttgttgagttcgccgcaccattgccctgagcccgatgtcatccacgaagtgctcgggcattgtccgatgtttgcggtattcgaaggcattgacactttgtgtttaattaaagctgcaaaaggacgaacatttggcgcaaatgtcgcaggaaatcggcctgctttccttaggcgccagcgacgagcaaatcgaacgattggccaccgtattaattaccgtattcactgccattctaattcccccccccccctcttcaggtgtattggttcatcgttgaatttgggctgtgccgacagaatggtaccgtaccataggaatgggcccttgaattggctttctgttcttaattcccaggacaactccgcgcaatcggtgccggccttctctccgcgtttggggaactgaaggcattgccaaccattagaccaattctttaattgttctgtttttgcagttcgcctgctccgatgggccgggccatgaacttttcgtggccgaattggccgcgcaacggttggccacagggaattggcattaattgcagcccaaaagggaggattacactaaattctctctgtttctcagttcgtacgtcgactcggactatcagcccgtctatttcgtggccgaatccatccgaaaagcgatggaaagcatacggtaaatgaaaaagagcgaacgcccccgcctcaccagccgaccaatgaatagtcggcgttaaagcattgcactaattaatgaggtgcttttcagggcctacgccctttcgatgcgtcctcagagaattaacatttaccacccattgccacgctccattcaaagcgttccaagccacgctctgatcggaaaaagaatgggccaattgcaaaaggaatgtacggaactaagccaattgatggacaaaatgaagacggaagaagagaagggaattataccggcggaagagagaagggcagtgattgactaatgattggcaaaacaatgcttttggcaggaaacccacaaatggcatcggcacaacctttgggggttataataccattggcacaaatcctatacggtctaataaataacacattccccaccgagaacaaaaatcatttaatgatgtgacaaataagaggtacaatattcgaacagaagtgaataagcaaaggaagcaaaattagttaggaaagcgatggaatgttgtctaagcaagggattcagcttaaaatgtcaaaaattactcgtaaattccaattaacgcactcatcggaaaaacaaaacggaaaaagggggagggggcaaaaaaggaattgctaacaatgagaactttgagaagaaaacgttacaagggaaaagagtcgctgcatttaaaagggttgagcactttgaagcatggccgttctctgctcacagtcattggttcttcactggcagcgccataaagtgaagggacctgccaacacagaacgacgttggaattggcaaaggcggcgtaaagacggcgcgattcgttggcaaaaaggagactgaaaaggcaaatgccaaattgggaagtaaatgaccacctgaggacgggaaaatggaaggattgaaatgaaatgtcacggactacagtcattgtccacatttcgatcagcctgaaaattaaattgaccgatcaccatttatttccccattgttgtactcaatctcacacaaacaagaaacggggtcatggcaatccgtcagtctatggatttgttcattgacgaattgtatacgagccaaaaagccctggatatccagtccaaaacctaggaacgtccatgttctctcccacctgatcatccccgattggagtccaattgccacacaattaacagcggtaccttcaggcaaatcggttatggcaatgcttaatagttttcctttgttttttgtatcatgcaaactgtaccttgttattgtgcgttggcgctcactgtgcattccgagcaattcgccgttgattgaataaagtgccaaccgcgacatgccggattgaaaaacgacggcaacgtcggcactggtgggtgagacgcagctgagggtgactgtctcctcaatgggcaccgaaccgttgaacacgggcggaggtggcgggaagcggcgttcgaaattgtgcctaagtataggggaaaatcgaaatgcagaaaaaaaagtacgacttgttggcatcccaaagacaaattttggcatcagtgctggtggacaaaatcacgtggaatttgtcagagatcgacaaagaagagatggcacaactgtgagcatagagtgatgagcgctaattgactaatgcctatttcttaaagtgaaanngggaatgaccnntgcaggcccatgcaa

SEQ ID NO: 1441 - DNA, 5799 bp, Heterodera glycines
  unsure (1)..(5799): unsure at all n locations
tcagagatcgacaaagaaagagatggcacaactgtgagncatagagtgatgagcgcaattgacaatgccatttcttaaagtgaaagggaattcttcctntgctattcccggcactcgcctggtcgtattggagagagtacagccgaatggatccgcacttgaagccgagaagaaggctattggctgcggacgaataagcaacccgacaccagttccaacgattgcaagtcaatgagacgctcccaaaactgttgcggcacatcgatggatgaaggcgaaagttggaaatgccttttgctagaatggccagcgtagacgagtttaatgcgcaaaacattgtcggtaaaattggaagggccccaagcgacaacggcacacaatgccaattcattgttgagacgtagcgggtcttggaagaaacggaaaaataaacacaaaggccaaagcatcacaccttttctgtccggtcggtaacagacgattaattcggtcgattcgggaataccgtagcaaattgccgtggtctgatcacaatgcaccagggaaagacggagagagctgaacaccgattcgatttggacgtttgcattaaaaaatcattaaaaagttataatgcaccgttttgttcccgaagtgaaaaatcgtgatggggtcgagaaatagaagccgtcatgttccggactgcctacgaaatcaccccatttcacaccgacgacggagtgaaactgttcccgaaatgagcccgcagagacagacacagatggacgagggtccggacattttggcgttgtttgttggttttggcatttcggtgggttcaaatgcggaagatgaggcgaatcgaacaattgcaagggcatctgaccataagtccgaatctaaacaaaaaaatgcatctatttttattgtgccattgtgcaatttgttacttgccattgtctgaatcgcgcaaacaattaaagggtcgtctttgttgctttccacgaaatctcttcctcggtacgtctattttaaatgttaaaaaatactgattgtgaagaatattttgaacttaccgctggatggaaaacattcattgctcggacggcgttttcaccgttctgtttgaaaccaaatatcaaatcaatccaatggtgaagattggtcgtgacatgacggtctaaagggaagaaagaaaaagcatcgcttttccagagaattttctacacagaattaacgtactttcaagtgcgtgacgatggattagacaaaactgaaaatgcaaacatcaatttttaaaaccaattttagtataataaaacactaccaaacggtgatctccacgaggacaccaaggtggaacttgaacatggtcaactcggtccccagattgccgaactcccaattccaactcgtcgccatttcgtagcatttcatagaggtaaaagaactcagggatgagttcctaagcatttgttactttcttggataaaaaaattagtttcaacaccttaaaatctgtggtcgattctgagctggaaaggcgccaagtcgtgtccattgagctgaagagacggtcgggaatgtcgaagttattgtctggaatataaccaatcatttgacctattttgttaaacgattttactgctgaccttgatattcgagagcaacggaagtgtaaggagggacacggaccaaataatgggcaacaattccagtattagactgaaggacttattgaaataaccaagtgaacacccaggaaataacgaacgtaatgacttccgtaatgatacggcccaaaacgaacggttgaaaaaccactttttggggaagaaccgacagaatcggcactttggttgaatcggtcgtactcttccgccaaactctggtaattttgtgcataaactttctccatgtgcgcatcttgaattgccatcggctttgtcaaattcctaaattgttgacacttaatttttaataaattaaaaaaaggataattcgaatattattaaagcaacaaattaacagcctcagataggaaaagcttcaacaatgatcgcttcagaagcagaactggctcctgaaaatcatcataggctgttttataggatactcaacaaaacaagacgaaattgaagggaatcgaaccgacaatatttgttaaaagagcgagaaaacccactgaaccaacgaattgacaaatggaaggaaaatatgactgtaaattgtgtaaaatttggatgacctgtaagaatttggattggcaatgtcaagggcgtccgagcagtaatcagaaaggacaaacggaaagacggggtactgcatcaaatcgttgaaagttctgccggccaatttattcaaaaccataaggtatctaaaaagcaaagggtcgaaattaaattggaagtttttctcactcgaaatttgtcaaagtgccacggcgccacatttgtgtggcggacttaagctgcgctttgtggtccacgaagagtttatccaaatgaaaagttcgaaacattcggaggataacggcgcgatcctaaaaataaaaataaaaccgaatgtaatttactatttccatcattcacttcttccgatgcgaaaacaacgagaaaggcatcgccagtggtggtgaacagctcaagcgcagtgtctttcaactgataaaaacggatgtgcatctctttgatttggtcataatcccacgaataagtgacgggcgcgtgaacgacgcctttcttagaacaaaatgatcataaagcatttcaatgaaaggtcatccaaacctgtgtacttttagcactttcacccaaaaagtaaagcctttggtcggaaatcaccaaatcaccggaacattcaaacgctgtttgaagaagtgtggcagaaatgctcattcgtatctaaatcaaaatggattaaccttttacagaaacgaaatgctgacagggtcttccatgtccctaagcccattggcatgactttgttggatgtcaccgctattctgaaaaaattagttgatttgtaaaagtggaaataagagtaagaaatgtgccattactaataaattgtccaatggcatcggtgcgttgtgaagactttcaacagctttgcttcgctcacttttaagaaatttgagtggaaacaaataatgtgcgtcggaaaagcgtcgtctctcacgcgatggtccttcggttgtgttaaggacacggccaataggccaaaaaaatggagagaaaaatggcgcctccggatgacaaagctctttctgaatatttttctacctttgttagagtaatatagtataattttacagtatttaaacaatgagcatttttttaaatttattatttttttatatgaaagggattcgaatttgaatagaatttgcaagtgcggcttaaatctatgaaacatcaagatttttgcgattttccatgatctatatcctatccttaatttaaataatgttttgaaaagattttctataaggatcaaataaaatcagcctgatttcccttaccaaatcacgaatcattacgaaattttttttgggtccgtgattgaaatttgaaatatattcatttgcagctctggctgaaatttgacttaccactaaatgtgctaatgttctgttagcgcgcgaccattccctttgagattctttcttccaattgaccagcagtcgtcgaggtacattttgaagttctgccacttcgcatgtcaaagtgatcgcttgctaaaattaaatttaaacggtacgaattgcggagcaggggaagaccaaaagttcagaaatggtcccgataataacatcagaaatcgctcacatcgctagtgaatttgagcaggttgcattccctgtcccaagcggcgttagccctttccgtcattttcccataaaattggctttttatttcagaaaattgttgcagtagcaaaatttcgtctgctgtcagtgagccaatctcttccagtgtcaaatttgcaagaggcgaccgaatattgatggaatgcatgaatttgatcaacaaatccaagtcggtgtcgaagtcgccgatggaagtgaaatgcaaaaggcacaactcatggagaccgattttcagagcgtattggaaatcctgaaaaggcagaatgcaattttgagttaatgtaatgcaaaacaaaccaaattcaattccatgagcattgacatgttctcgcggctctgtctcaattccttggctaaaaatcggacgacgataaatcgacggtggagagaccacggaagaaagtcggaagattggtccaatccaacgcatttcagcggcaaaaataaaatgaatgtgtaatgacttcaggacgaatcaatttttagagcaaagaataaaaaagtctataaatgtttcaacccattttcattttagtttaagagccagggaagtcaagcatcgtattgttttttaaacaatattatttctaattataagctcaaaatgtgtgccgacgttttgtaccattgtttgactgttggcattgtgccgcgtttgagtgtgagctttttgtgagttaatttgtgcaggaaacagcaagaaagcgatagtttcgagcagcaaataacgcgccctacgcaaaaaggacgcacttcgaagaatattctgccagtcgtctattttcttaaatagggaatttcagccaattgtgaactgatcatcagactgatttggacaaattggcttttttctaagttctattcttacaatggacgcttttcgaggcgacaaacagcaggcgcagaagagaatctccaagaaagtcgcgagcaaagtttcttcggcttccgatgccaattggggcgagtcgaaaaacagaaacaaattgcgaaccattgtcaaggagaagagaaggcgatttgcgttctcttcgttagacgcaaagccgggattgaacacagaagcgacggaatggaagccatggggtcgaaaaaagtcaccaaaagctaaacggataatgaaaataagatattaaattgagtactggtacggtacacgaatcggcagcagggaaccattgagaagtactctgaaccaattcaaagtcggaagactcggccgaagatgaatattctaacaataagtcattttaaaaataacaaataaaattacagaggacaacaaaacctcgccgattcccgaacatttctcgtcgctttgaagcggccaaactcgagaaactgctcggcgtccgaaattggtcagaaagtgtggaacgaagagagtcaatccaacagaagagaagttggcaaagagcttgacgaagcaacggattggaagaagaggcagccgatgggtcgaaataaggctaaaacattgataaacaatgttaattgattggtatgacatcaaaaagaatcaccgtcaagtgatcgggggaatggctgctggaagtgctatttgtacgccctgaagaggaggtggagggcctccgatggccaaattcatctgcaaattgtccttgtcctccgtccttccacaaagcaatgatgcataaccaaacaaactcttcacaagacgaataggaaaaagggtcactgaattgaaatggcaaaaataaaagaaaatgctaaacgatcgattgctcactcgtaagggacgagactgttcagaatggactgagcaaacgaaagccaacagtcgaacagagaaaccaattcgaattcgcgctgagtggagagactgcaaagcgagcgcagaacatttgccatggaatcgaccaagccaagttggagcatcgactgacggggggacgaatcggtggagaaaatctgaaaatgggacatta

SEQ ID NO: 1442 - DNA, 5515 bp, Heterodera glycines
aatcgtgctgggccgtttcttaaaaactgccaccatgggcgtttcttaaaactgccagggcgtttcttaaaaactgccaagtgggcgtttcttaaaaactgccactatgggcgtttcttaaaaactgccaccttgggcgagaattaaactacaaattaaaacaactatatagaaatattttatctaaattttattgatataaagtttgtaaattaatatatatattccagtatttcttttttaaattttcttattctttaaaatgttcaccaaaaacatgaactgacaagttcaaataactatttaaaattctaataaatacagacttttgttaatgaacattcagcactttcatacaaacatttgcaaaagcttttgtcgcaatcgtagcgttttctagatttgtttatatagcataaatcatagtaataacagcaatcatcgactatatcatttaaaaatttataataaatttaaatttttttaaaccttttttaaagttgcaaaaccatattactggtgctataaagcatgagtcaaaacatgaagtgccacaataagtgctacaatatttctttgcaactttcaaagggaaattttaattataataagcttatcagtaaaaaatttaaataattaatttatcaagaaaaaatattaaatatatcgttgagctcatttgtaaattttattaactacaatcatcagaagcaataaatttattaatattttaattttactgagcttggtgttgaagatagtgttgacaaacaaatgatgtaaaaattatatgtatatatatttttattatttataacgttggcaaacaactgacataaacattttttaataaataaatatatttgtttgcagtttttaagaaacgcccatagtggcagtttttaagaaacgcccacttggcagtttttaagaaacgcccatagtggcagtttttaagaaacgcccacttggcagtttttaagaaacgcccatagtggcagtttttaagaaacgacctagcacccatttttatcatgtttaatacagtaacaaaggcttacatccatttccaaatatttctgtttgattcttgaaatcgcaaatcttaaaaaaacaaaattcggaaattacttttaaaaaatggctaacgcattttgtaattttgaaaataaaattgtaaaaaataatttttacgtgttttgcttcctaaaaagcattaataaaatttttttttgcctattttagtgcctattcgaggatttttgtgcctatttagcgatttttttaatgcctttttaggtgcctatttcgcgattttttgtgcctaaaaatcgcatccctactaatttggtttaattttgttacttttttgaataaattttgtcatttacactacaaaatttcagattttttagtgatatttttggccgtatcccacccaacttattaccattcagtagcctaaattttattcattatcctaaaaattaaaaaaaataaatttttattaattcaaatttttgccagcctttacaaaagttacagtaagaagaattgagggcggaatttacaaaatgaaaaacaataaccaacttttgtgggtcctcatatgcataacatcccggcaaaccgttcccgatataaaaaatttcagtttgcttctcggccgggttctaaatccgtttcgaaacatttagtaaaataaataaaaaatagatagataaattaaaatatccaaaataaaatttattaactgcgaagattcaaaattttacaaaaaatttttcttggctggcgaacaccgggaaaagcatttgcttctctcgctcgtcttccgacgtgcatttatggtaagccttgtaaattggctttcgtccataaggttttccaatgccatacaatgcggcaaaacggaactaaaaatgataaataaaagccaatggaaaagaaaaagcggctaatttgtagcacttttaatttgcatatttattttcccaaagtcccggtgatctgagattgataaatgtccattaaaataattaccatttgattgccaagtcctacacaaatgccatttgtattcgtcgggaagacatatttatcggcacttttagggaaaagtctacaatcatcaaaattaattttatttatttatttttttgtaaatgataaaatttggtcaaaacttttgttttaccgttcatattcttcgtccgtcagattatttttgcatcgccgcatttcatcagtttgttgaaaactttaaattgaaaatttaaatgtaatttcaataaaaataataataaaaatacagttgaacggtggtcaaccgcacattgaacacagtgaataacaaaaggattaaattcacattcaaaaaatggcacatttttacactaaaaaagaaagaaatgtataaaaaatttttgttttttcgatttatttttttataaaattatttaaatattaactaatatttcttttacattagaaaaattatttccatattaatgggagaaagcacagatcaactacaataaaacatcgttgatcatttatgagaagagatggaaaatggaccaacagcagatggatgattcagcataatctgataaataacgaaaaaatgaaaattgaatattggatattcaaataaaaaatataaaatattaattcagaaaaatctgttcgtccgatgattataaattgctgaagtttattaatgttggtttctcgtaatttattattttttttaaatatggacataatattgactaaaaaagcccgaaacatggactaaaaagctcaaatatgaccaaaacatggagtaaataaaaactgtcaaaaaatttgttttaaacctcaaaaattccaaaaaatgtgtatgattcaatattttcttaaatacatcaaattgtcgtcacttctttgatcacttttgccccctccgtgtcccatgccaacacagtgatttgtgccaatggcacattggacaaagtcacattgtcaatgtctctaattaacaagcgacaagggacgaatggaaaaatcacataaataaaaattattaaaaaaatcattttggattgtttgaggtaataggggggaaattaaacgcactcaaaagaattattaacttcgattgtaaaattatttttttttcacgaagaaaaatttttaaatatttatcgcgctatatcaacctattatatcattagaattttattattattattattatattaataaaattctcttttttaatttattttttcaattattctgcaaccaaaaatggatttgcatttgcttatgaaatttgaaataatttatacaaattgaaatattcgatatgactaaaatttattcaattgccatcttaattaattttgttttatgtgaaaatatttgatctattgaaattatgttttattaacaagattaggctatggcaaaataaatcaacaggtcaatttcgaaatcaaggaacattaatattagagacctgaccgggccgggcccgggttttcccgggcccggcaacccggcccggcgatttttggggaaatccgggttgaccgggttaaccgggttgaccgggttttgagaggccgggcttgaatttgaaattgggcccaaagttcgcctcgatttcatcaccaaagtcccaaaaagtaacgaatgggaacaattggtcgggaacagaatttggtgaattggcaaccgaatagaacgaacctgggataagtaagataaataaggaatcatttgcggtttttttttttgaatagtcaaagggataattgggtaaaaaaacaaaatataaaaaacaaaatttggtataatgaaacttctaggttcaactttttgttattttcgtgcttaatgctgagcatctaatttttgtgcttaatttaacattttaatgctttttgtgcttaattgacatttttttgtaaaattttgacgaaaacaccgtttccaagcaataaaaaacgaaaaattcacccctaagaatcagcctaaaaaacttcaaaaaatacgcccataagaaatcatccaaaaatttttttttacaaacttttgctttaaaatgttaatttttgctaagaaaatattaaaattgtcagtacgaatagaaaaattgagaatttatagttaactgattaaattttttgtcaaaaatcatcaaatttttgtttttgaaataatttggaaaaattgttttattcaattgccacatttattaattttctttttttttggtctattgaaattgttattataatttctcaagagtcattaacagtgaacggatttatatgtgccaaaaaacccaaattatgtgctaaaaactcaaaaaaaaaagagtaagtttgtgccaaaatttgaaaattactcaaaaaatgacttaatttctcaaaaatctcattcttttatatatttcactagcataactcaaatctgaagcattgcaatgctttttaagatttacttatttttcaggattttcttcgctaaaattataattttgacataaaagtgaaaaagtcattaaagtcaaaaaatgcaattaaagaaaattttaaaattttaggcacttggccaagaacttgagaccaaaaaagaaatttttataaaaaaaagagtttttcaaaaatcgccaaaacatgtgccaaaaactacaaaaatcccaaaataaatatgttttttatgagcaaaaagtccaaaataacaaaccctgacgccgtccgtttttggtgaagaaaatctgtcgggtggccaaattaatgccacatccgacaatatcgttttctgtgtaagaatcaactgttgacacttccatacgccattaatgataaaaaatccacgattaagataaaaaatgtttgtttctcccaattttttgtccttttttacggtgaatccgaaggagagtaaagcgtaaggggaactaaataaattaaaaattagtaaaaatttgtctttaggataataaatgctgtttatttactgatgcatttttttgattaaaatttcaaagtaaaaaatgccggagaaatccttgccaaacaaaattggatgggtagctaagacaatgcgaaatccgcctaaatttaaaaaatgtattgtaaatttagatttaattaccttcatttccgttatggcaatggacccttaactcagtgatttgaatctcattattacaagctttggcatccccaagattttgtcggaagtttaaaagcgccttaaacaaaccaaggatgggagccggcgcaaaaaaagtcaggaacaaaagaaacttcaaaaaaatcatacgtaataaacaaaaatggagattaggattttgacgatataattttagcgcgggcttattgggtttcaaatatttatttagaaaatcaaataaatagtgtttttagcttgctttgaaaataattgggttttcgctttttgaccgaacaaataattgctttaaggtatttcgagaatttgaaccgattttttgaca

SEQ ID NO: 1443 - DNA, 3263 bp, Heterodera glycines
aaaaaccttaataaaaggaattttcccaccaatcatttaattcaatttgggcattaaaatcaaatgaaaaatgcaaatatcggaaagcaagaaacaatgatagaaatctgcttatgactcatttgtaatgaatttcgcagattctttcttaattatcccttcgtttttctcatctgtgaataatattctttccatttacggacgctatttggtgaaaagatcggaaatgcttttataagcaaaattggggccaaaattggcctcaattatgtcgccggtttcaaacataaaaacataaggaagcaagtcggtctcgaacacgaacacattcggcatatctgaaaatgtgattgaaattatgggaggagcgcgaccgcgatacgccaccatggcaatgaatccgcgatggcggtttccgaccgcggtaaaatctgtccgtggtcgttggcttttttctcattgttaatttctttatttctcacctaatgactgtccgtttttggtgtaaatggcttccatcgatgtcaaattggccccgaatccgaccgtgtcgccctcatcaaaggagggaaatccctcgaagccattggcattgtgaccataaacagtgccatcgcaataatatcggtaagatgtgtcccggccgatttagaccaaaggccaatgcttatcgtacttaaaagcaaaattattaatttatgctatttttgaatagcgcttgaaaaatttaaaatttaactagtacgatgtcagattcttaaaatcacctagcttttataagtttacttttaaaatgaaatggggatttccccaaaagaatacgtgtccagtcaatgaccatcctcagttgcttaggtcataacttttttcttacctcatcaaggcctacattcttgataacaaacgaaagcttgaagtccatagaattttttatttgcttttttcttgtaaatccctgagtctttagccttcgattcagggctgggaccgcgccgcgatgcgcgaccgcaatttttttttttttttgcgggatccgcgacatttgggactccgcggcaattttggaccaattaaaaaaatcatttatcgaagcgattgttttttatgtttaatattatttaaaaataagtattgtttttgtaaaaagcaagagatttatggaaaattatgtcataatctcataaaatcactattttaccaagaaaatataagattgaggcaaaatttggtcattttctgacaaaatctgttaacaaatcgcattaaaatttaaaaaattttcccggcaccggaccccctcctcttgcccattccccagaacttttttgggaaaatgcgccgcaaaaaaattgttaaaaatctgattttctgatcccaaatgaactgaatttacgatttgcttatttctaatgggagccaccccccaccattcagtcccatcgcaaattttgtatatgcgggattttaactgattttttataagaaaatgaaaaaaattttttttaatggtttaaaaattagaaaaatttttaataatgaacgatccgctggccgcggcaatttgaatgcgcgatgcgcgaccgctgtttttttttgcgagatccgcgacatttgggactccgcggcaatttgaatgcgcgatgcgcgaccgctgtttttttttttgcgagatccgcgacatttgggactccgcggcaatttgaatgcgcgatgcgcgaccgcggtttttttctgtgcgcgccccaccccttcttcgatcgaaattccttttcacaaaaataacaggaaaactgatttagaggttaaagtgatttatttgaccttctttacttactcgcttttggtcgcttgtctccttatgattttgatctcataatacacaatgccaaagtgtggaacgagcacaaattccgcaaataaaagttttgcagctgaagaaaaatttctttaaatcattttaaattaattattacgtaattaattaattaatctttctccattaaacatacaattctctactccacgatgtacggctttcaaataattgggcttaaagatgaaaaattcactggccgatttgttgaggcaccaatgatttttgggctgaaaatatgtaaatgctttttgtattttaatttgaatttacctgaacatcattccaattttgcgaataattcaatttctccacttctggtaatgtctgctgcttttgttgttccaattcggcatttttcgcccgcaaattttcctaaaattttatattttaatttttttaatttttgtttccaattaaaaatatgacggacattctcgttctgcagttttgtcatattttgttcaatttttttgagctttccattcaattcttcaacatctgtgggcgctaattctggaaaatatttatttttttattgaatggaattcgcaccattccctttggtgccattcaaatcgatggaattcgttgtgccattcgaattcactgaagacgaagtttttaattttgaaaattattttaatgtaaataaactaaaaaaccatcattttcttcaacaacgcccggttttgatgaaaattgttgagcatacaaaaataggagaaaaaaagcaaaatatggcacggccatcaaaaatattgtaaaaaaaatgttttttattttgtaaaatataaatttgatttgaggccaacttaaatgattggttaacacaccgtttcaaaaaacgagagatgaaccaataaatagagagtgcagagaaaaaaacatctctcattttggcgtactatttttttgtctctgttattagagaaaaactgaatttacttcgtgacgtttaacttttttcctgcacgttaaatccactccaaattttgcatatcgattgagaaaaaaaatctgcatttttctatactgattttatttttgtttatacgttagttcaaaagatataataaaaacaaaatttcaaagcatcatatcttttttctaacccatcaaattgcttaatgtttgcttataaaaagcttctccccatcaagggctttcgaatgataccaagatttaccaatttggttggcaaaaagcttcaaaaataattcccaaaattcgtcattttttaatattttggacaaaaataaataaaaatattcatgttgcacaacggactcgaaccaccaccctttgtccctttactatcttacaaaaaccactgagccacacatgcaaatctttttggaactgggaggccaaaattgaaacggtgtgt

SEQ ID NO: 1444 - DNA, 1448 bp, Heterodera glycines
  unsure (1)..(1448): unsure at all n locations
aatttgctctgtcaaaaagtacataaaaacaatttttttttcgtgactttctatggaaaaaatataatttccggacattttaactgatgggcacattacgtcaaagtgttttttgtactttaaattgtttcacaaaaattaataattaaaaaataaatttaattttcttttctttttcattataaatgaagtcgtacattttcacactaagaagacaaatattttctcaatactaactttttgaatttttttttaaattgtaaaagtgccaaaaaaatatttcctctttttttcgtcattttctaaattatcttttaattatttatgaaattaattaagttaaatgttgtccgtcctttcctttgtgtgttattccatttatgaactcgtctccatcccgttgtatctgcgcatcattttttttctgatcactaaaaaagaattttcttcaccgttcttccaatttttgagcatcattggcattttggtaatgatatttcaattcatgggtcagataatttattttttataaatttaattatttttttaaataaatgtaaggaaattgcccattttgtcgtcgatgttgtgttctatcggttgcctatttttgctcccacttgcccatggttcggcacgtcgccctcggcactttacagcattggcacatttttggtatattttttcgaatatccaatttatgtgctgcatattgccatcacccttaatcgttgctcgtgcgtttgggccccaatccggcacaaagaagtaaaacaaacacacaaatcatttacaccattacattttcttagttttggtgtcgtgcttgtaagccgacaattgcgtttgcttttgccctttctttggcattttctgcccaccgtttggtcactattgcccagttggttccacttgacaaaacggacccgtccaagggctcaattccgctcattgtcacctaccaactttattttgtatgtccaaattttgcgaattcattttgaaattttgtggcgactgcttatcgcggcgacttttttgcgcgaaacgcgtccacttatgttttagcgcatattaccattttatcttcttttttttggattttcaaaaattaaacccaaaaacctcaaataagtcatattggtttccagtacatatttccaaattcctccagtggtgccgaaaaaatgacttaatctgcagaattggtcgttttatgcataaattccattaaaatttttaataaagttttcaataaattccgggttacacttctgattttatggtcgctcttccacagtttttcattttttgttttaactttttttaatacaaaacagaaaaaatcgaattttcaaatattttacgtgaaaaaaattanaatataacaaataacaaagaagtcaagtatgatccaaaattttaaatcttttttatattttacaaaa

SEQ ID NO: 1445 - DNA, 1423 bp, Heterodera glycines
tttctaatgttaccgccaggccaaaaatacccgtttttaagaaatttgactcaaaaatcataagatttgatcttcgggcattggtttatatgattgaacttttttgctttatgaaatacgaaaaagacaattaatgattggcatttttacatcggcaggcaattcatgaaactgaaaatttattgccgaattcaccgaaaaaacttctcccaaatttaaaattaataaagaattcataattataattaaaaggcacaaaaatatgaatttttgtaaaattcattccattaaatacatcctaataataactctccctccaaatgtctctcacctttccaaattgatcactttcattttcagagttccaaattaaaatttctccacttatttgcatacacaacaatttttggtcaatttgcaaaaaaatcctccgattcgatcaaaatgtagtgatattcgcgatagaaaattttcattagtattgagtacaatgatcaaaaaaaaaaattaccctaaacactgtgtattaagtatttttgtttgactcaaaaatataattatttttgttgacaaaaatataagtggacaaaatcggttacaaatttgtaaatttttaattctttcggcattttaatttgttcaacccacttccagttcataaagttctgcttcatcactttggacgctgccgcttcaatgccgggtacttccaacagcagggcaattagcagaggctaattgaaaaataagtagtgcaattagcaagatacaagaataatgcagtttgctgaaaaatgacttataccacctgtatctttaaaaatcgcaaaaaattttaattttgtttatttttcaatatgtaaaaaagagagggaatatcctatttgaaaattttgtgccaatatttatgcaatttctccaatgattggaatacttccgttagtttattttttgtaactttgaaaattcttaaatttcaaatcgaattccaagcccaaattattggataggcgccgcaggagagattttttgaaaaatttttggtgtgatttggtaacattaaatatttgtcagaaaaacctactaaactcattcaaaaagcttttaattgagttgcaaaatcaacattttttattaaattaaattaacacgaataaaatggtaattagcgttaattgaaaagaatggaatttaaaataaacaaaagcaaaaaaaaacattaattaattaattagatgaaattattatcgccttcgtccattgtttctgctctcttcaaagagtggccaaattgaatttgaaatgtggcccaaagttcgcctcgatttcgttaccaattgttagcaaagaaacgaatgggaacaattcgtctggaacataagatggtaaactgtcgagcgaatagaaggaacctggggataag

SEQ ID NO: 1446 - DNA, 4405 bp, Heterodera glycines
aaaaatttggaaattcaatatgtttgaaatgtctaaaaaatgccttagcctttgttttggtgttttttaaagtcaattcttaatttacacaatttttggcattttttcagagggttaaaagccatttttggcgttttttaacgcatattttagtgcatatttgggtatttttcgggtttatagggcatatttggcggattttagtgcatacaacttcgaaccttagaaatgacaataaagttgatgttaagggtggctatttttcaattttgtgttttcttacagatttttctcaaaatgccaaaaatatatgcaaaattaagctgcagaaaaatatgtaaaaacatcccagctctatagatcactataaatcattcaatttttaatttttaattatgtgaaattgttcagaaaaaagtgaagacggcaaaatgttgagcaaaatattaatttttcattttcgaaagtgtttaacctgagcctggtcccaaattttgtgccggacacccggcggtgccgggcttttgcaaaacttatgtaatgctgctttaaaatgaaaaatttacgtttattaaatttttcaaatagacaaattcagtgggtatgtttacccgttaaaagtccaattttacgtcatattttataaattgggattatagaccattaagcaacaaattccgactcgtctcaactaaatcaagaatacatagaaggagtaggggccatttaggcgccagccaaagtttttggatataacttttatcattctcaaccatccaacaatcttgatatcattcaaaagcttactgtttttaagctgtttctaagctattgattcgcgactaaataattaccaaaaaagttataacgtaataattgcaaaaaagttgaaatttttgaatttttgtttgatttcgttgagaataaaaaaagttatagtccaaaaacttggactgaaagatgtagaggcttggataacagaaatttgttgaatcatatttgtattcactatattaatggacaaaattctcagatatataaaacacacaaaaaattcaagagcattttttaataaaataaaattaaaaacaaataaaataataattcgagttacaaaatcaaaaattaaaaataaacaaagagcaaaaataataattaataaatgaattcaaaattatcgccttcgtccattgtttctgctctcttcaaagagtggccaaattgaatttgaaatgtggcccaaagttcgcctcgatttcgttaccaattgttagcaaagaaacgaatgggaacaattcgtctggaacataagatggtaaactgtcgagcgaatagaaggaacctggggataagataaatgagaaattatttgtggttttttgatgatattgagataagttgtcttcaaaattggcgttttatgtaataatttgttataataattattattttgttaacaaaccctgacgccgtccatttttggtgaagaaaatctgtcgggtggccgaattaatgccacatccgacaatatcgttttcttgaaaagcatctaatttctgatccatccatttgccatcaattgtaaaagagccattgtttgagtatgcataagtgccaaagttagagacaattgttccttccaattttgtccactttatgggggcgaatccaaaggtgatctgactgtgtaggcatctaaaataatttaaaaataatatcaaaatagaaaaacatattctttattattaatattattgaattttttgattaaatgtattttatggtaagaaataatgctggtactttggtatttttttaacaaaaattgcaaagtaaaaaaagctgaaaaaatcctcgccaaacaatattgtatggggagcgaaggtagcgccaagatcgggtacattaaaaacaaatttataaacccttttacttcggaaaaaattattgtgaacgccccgccccgctttatatcgatcgttttgtctcggcgaggtaagtatgagcaaatagttccagatttgcgtaaattccaaaactgacgaagaatgggcccgagggctggagaaagaccggcggtcagatttgctaatgagatctacctatcaaaacttgaggattttatgttacttctcacacaaattgttgcgctgcgtttttcaggggggggggggcaggccgaaggcaccgctcggaaaattttcacaaattttttatgaaatttgcgacaaggaaacggtttaagtttaattgaaacaattaaagtatcatttaacccatttctaagcgggtgttcattattcattatagtttattcacccgattctgcacttaaatgacaatggatcttcaaaccagtgatttcgaggtcatagtgacaagtgtagccatcccaataattttgtcgggagtttaaaagcgccttaaaattaaaattcaccataaagttttgaattttagtattttctagggttgctccccgacccctcggggggcaaaatgtcgggggccggggacctcgggaggcgatatgggggaggagaggagctcaattgtcgggggtcggggaccccgatcggggaatgaccaaattttattttaaccaaaaaaagcatgttttctttttaaatgctcgtaaatcttcttttttcactttaatcatctgatttcgttagcgccagtaagagtgagtccaggctggcctttaaacctgggcttccatttgtcttatttatgtataagaatgttctgattttggggtagcgactaaaattattctgatttcttaaatatacttatagttttgaaattttatggcataatgtcactatttttcaagaaattttaaggtctgccgcaaaattttttgatcttttggtcccgaatttactgaaatttataattttgcattttcctccccaaaatatcaaaattgataatagaagacaaaaaatataaaatttgatcgaataaattggaaaaataacatagaaaaatgttgtaaaatgttcatatttttgatactaaaatcttattttgggcttggagtttataaaatttttcgatggaagccctggtttaaaaataagtggaaaggggtggggtttcaaaggggggatgagctttaggagcgtgaggaaaattttttcttgaaaatttgcaatttgttaacagatttttcctaaaaataccaatttttgcaattttgggacaatttttggaaaaaaaaatttggggttttgttgggccgacggtgccgataggcgccgccgaaaagtttttcggaatttttaattaattaatattaagaaaattgttcaaaatttcataaattttcaacctttcccccttcattattgaattaactttttaaatttttacaacgctcggagtccccaattcccgaattagtgtcggggagtcgggggggcaaaaagtcgggggccggggacctcggggacggggagcaacttttcaaatataataaaatcattttttaaattattttaatcttttttccccttttcattaccattttcatctgaatttttttcagctcctttttcactgcattgtcttttctcttttgttcattttgcaaatgttcgatttggtcgagagaaactaaaaaaaaattaattttttatttattgttatacatttttttcactgcatttaatgcaaaaatgataggtacttttccgtttttgggccaaattttgaatttttttttaaatcaacagcgggcgagaagaattgctaaagttacgcgccaaaatttttcgaaggcataaatgccacaattagagcttagattatttcttcaaatgaagggtctgcgccacgggttttgacattttcgcgccagaggaattcgcacaaatactagtcaagttctactcacccgcttttgatttaaaaaaattcaacctttggccccaaaacggaaaagtaccaaatgatatttgatagtagcaataattataataataatcttacggtacgtacagtaatccttgtccaatttcccttacccttttgctgttgattttccatttccattttgtcaactttcgtctgcaaattcacaatttgttccatcaattttttctcgtggtcttcttggaatgccttctgctgaaattgaaagtaatttataaccgattgccttcccatggtcaaaagtttgatttcaaaggtcataaatttaaaaaaaagttgcaaaaattacgttgttctgtaactcctccaacttgtccatgtactgctcctcctcctcgtccatttttgccttcattttttcaatttcatttttcattttcccattctccgcttcgatcttcgctagcagtgcattcgttttctgctgcttcaacttttcttggagtcccttctaaatttaatt

SEQ ID NO: 1447 - DNA, 1249 bp, Heterodera glycines
ttgctgtgccgagaaccggcagacaatggatggctttcaatctgcaagaaattagattggcaatatgtggttgtaaaaaacttttgggtatggaattattttttgaagtgagtcaaacaccctattagtgctttgctgtgccgagaaccggtatgcaatggatgtctttcaatctgcaagaaattagattggcaatatgtggttgtaaaaaacttttgggtaatgaattattttttgaagtgagtcaaacaccgtattagtgctttgctgtcccgagaaccggcaggcaatggatggctttaaatctgcaagaaattaaattggcaataagtggttgtaaaaaacttgtgtaaggaattatttttcggtgtccgtagactcagcatgatgtggcgaatctaacggtaccgagcgcctcacgttccgttgcccatacgctaaacaatgtgtgcacgaagtttggtgaaaatccttacaacactagtggattggtaaaaagtgaaccgacgaaagcagtcgctgtgccgcgaataggcaacggaacgggacgcggtcggtgtccgtagactcagcatgatgtggcgaatctaacggtaccgagcgcctcacgttccgttgcccatacgctaaacaatgtgtgcacgaagtttggtgaaaatccttacaacactagtggattggtaaaaagtgaaccgacgaaagcagtcgctgtgccgcgaataggcaacggaacgggacgcggtcggtgtccgtagactcagcatgatgtggcgaatctaacggtaccgagcgcctcacgttccgttgcccatacgctaaacaatgtgtgcacgaagtttggtgaaaatccttacaacactagtggattggtaaaaagtgaaccgacgaaagcagtcgctgtgctgcgaataggcaacggaacgggacgcggtcggtgtccgtagactcagcatgatgtggcgaatctaacggtaccgagcgcctcacgttccgttgcccatacgctaaacaatgtgtgcacgaagtttggtgaaaatccttacaacactagtggattggtaaaaagtgaaccgacgaaagcagtcgctgtgctgcgaataggcaacggaacgggacgcggtcggtgtccgtagactcagcatgatgtggcgaatctaacggtaccgagcgcctcacgttccgttgcccatacgctaaacaatgtgtgcacgaagtttggtgaaatccttacaacactagtggattggta

SEQ ID NO: 1448 - DNA, 3144 bp, Heterodera glycines
agtgaaatcgcattttttttccagccacaatatcgcaccatctgacgaaccaccacactcacccacgccaaccaaccaacccatagcacatacgactaggaactttatacaaattttaaaaaagtaatattttgtatatgcatttaatcaaatttctactttctttataaatgttagctaattagtcagcgtctatttattttctgtaaaaattagcctctttatttaaaattaaattatatataatttcatgaaataaggcactaaatgtatagagaatgattaacgtggtcgattggaataaatggaaaaaaagcaaagttaaagacaaaaccttaaagcactagtcgattggaataaatggaaaaaagcaaagttaaagacaaaaccttaaagcactagtcgattggaataaatggaaaaaaagcaaagttaaagacaaaaccttaaagaactagtcgattggaataaatggaaaaaaagcaaagtcaagaacttatcctacctaatttcatggttacgaggcatttgcctacctaatttcagggtgacgaggcatttggctacctgactaaatggtgaagaggcatttgcctacctgacttaacggtggcaacgaggtatttggctacctgacttaatggtgacgaggcatttgcctacctgacttaatggtggcaacgaggcatttggctacctgacttaatggtgacgaggcatttgcctacctgacttaacggtggtaacgaggcatttgactcccttaagagagacccttctcttctcatgtacctttacctaaaatgttgttggcacaaaaagtaaagggggaaaaagaagacaaatcatccgatcaagggctaagtctcaacagatcgcagtgtaaaagctgctctactgctaacaaccccctgaccagtagtcaagtcgtatacaagtgattttgcgccccgacgttccaccatggcacacgagtgctacggctttggcaaatgtgcgagcaattaagcacgcacatcgggccttcagggtgacgaggcatttggctacctgacttaatgttgacgaggcatttggctacctgacttaatggtgacgaggcatttggctacctgactttgtggtagcaacgaggcatttggctacctgacttaatggtgacgaggcatttggctacctgactttgtggtagcaacgaggcatttggctacctgacttaatgttgacgaggcatttggctacctgacttaatggtgacgaggcatttggctacctgactttgtggtagcaacgaggcatttggctacctgacttaatggtgacgaggcatttggctacctgacttaatggtgacgaggcatttggcttacgatgcctgttcgtaagagcaaaaggacaacgctcgacagcgtaattccatatgatagctgttcgtaatagcaaaagatgtctaagcgatgcctgttcgtaagagcaaaggacaacgctgggcagcgtaattccatacgatagctgttcgtaatagcaaaagatgtctaagcgatgtctgttcgtaagagcaaaagacaacgctgggcagcgtaatgtccatacaatagctgttcgtaagagcgaaagtacaacactcggaatcgtaaagtccatacgatgcctgttcgtaagagcagcagcgtaatgtctatgcgatgactgctcgtaagagcaaaaggacaacgctcggcactcggcagcgtaagtccatacgatagctgttcgtaagagcgaaagtgcaacgctcggcagcgtaatgtccatacgatgcctgttcgtaagagcaaaaggacaaggctcggcagcgtaattccatacgatagctgttcgtaatagcaaaaggacaacgctcggcagcgtaatgtccatacgatagctgttcgtaagagtgaaagtgcaacgctgggcagcgtaatgtctatgttatgcctgttcgtaagagcgaaagtacaacactcggaatcgtaatgtccatacgatgcctgttcgtaagagcaaaaggacaacgctcggcagcgtaatgtctatacgatgcctgttcgtaagagcaaaaggacaacgctgggcagcgtaatgtccatacgatagctgttcgtaagagcaaaaggacaaagctcggaatcgtaatgtatatacgatgcctgttcgtaagagcaaaaggacaacgctcggcagcgtaatgtccatacgatagctgttcgtaagattaaacgacaacactgggcagcgtaccgtccaacaccaattcccttgtggtaaacggtttctccatgttcttcatgttcatgttaagagacttttggcttccctgtttgagcacaacaggtactaacgcctcacaccagcgcgaaggtagtctctactcgtgaggcaaccctcacctgaacgaacacgttcaggatcacggggcgaaataatagtgcggcaaaaatacatagagaatgatctctttatttaaacaaaaaccaaaaacacaaacaggtctcagatccttcgctcatcactcgagcagaatttctttgtcggtaaaaattcttctgcaaattcttcctcttgcatggcaacagaaggccctgcgagagatggcccgacatccatagcatcctgtaacagatgcgctggagtcacgtactgctggttcgtcacgatgtcgtgtgcggcagggtagttcagctgttcaggaccctgaaacaccaaatgaactgagctccaattgacatatactgagaaactgaccaagattgtttggaagtggttgagtccattgtaccatatcaaaaccgggttgtgtacctccctttgttgaccttgatgcccatgtacagtgaagtgttgcagctgatcatgtggaaagtcttgctccattctctgtttttaaaccaatatgaggtaggccttgaaattatttgtcaccatatgatttccgtctgggaaaaacactccaattgtatgtcgaacggtgtcgtcataaaagctccaagcacgttgggcattgtcaggatctacaggtgacacgacaacaattgtctgcccgagtaagacggccgcgatcagagcatcagatgcgtctgcccaatcagttgcgcccacccgacttgcgatgtaagcgtcaaa

SEQ ID NO: 1449 - DNA, 795 bp, Heterodera glycines
cccccccctcccccccgaaacccaaaaagtaaaaagtttcaatgtttttttttgaaattttaagcaattttcttaacaaaattgcattaaaattttcctggcggcgcctatcggcaccgccggacccccattttaccaaatttatgaaaaatggagactaaaatggcaaaaaaatagtaattttttggaaaaaagggctaaaaaatttgtaaaatacaccataaaaagaaaaatacatccataaaaatcgaatttttgacttcagtcccccccccccccgaagccaagggtatggctacgcccttgggggggggggggggggtgtacaaagaatcctttttagcaataatgaacatactgacaaatgcattaaaatttttaattgaatcttaatttgagttataaccatgatgacaaattaattagacaaatgtatttctaactcagtaatgcaaaaaatatcaattaacaatttaataatttctgaaactgcaaacattggaaggatggatatataaatacatttatttgggaataaaatgaaatgcagagaacttttgaataaataactattcgtatggccttatgttttgaaatttacaaaggatgattcttcgatttaccttttcctttttcactcatctgtttacttcgatttctcaattccatccttttcgtatttacctgtaaactatactaacgataagatacctactattacgaaggctgctaatgaatttatgcaaccgaatacattattaaacgataagggtccgatgatgagcgtaacttggt

SEQ ID NO: 1450 - DNA, 3262 bp, Heterodera glycines
gtgagcttagttaaaccgtaaagctaaagatgttctaatcagtttgcaaatcctaattcggtttaggaaatcttcctccgtgagctgatctccaactcctctgacgctcttgacaagatccgttaccaggcgctgaccgacccgtctcagatggagagtgggaaagagctcttcatcaaaatcgtgccgaacaaagccgataagacattgaccatcatcgacactggcattggcatgaccaaagcggacctcgtcaacaaccttggcaccattgccaaatccgggacaaaagcgttcatggaggctcttcaggtacagttttctagtcgcgtcgacaacctgcaaattggcaatttgtttttaaggctggtgcagatatttcgatgattggccagttcggtgttggattttattcggctttccttgtggccgaccgtgtcacggtcacatcaaagcacaatgacgacgattgctaccaatgggagagctcagctggtggctcgttcatcattcgcaattgtgccgatcctgaagtcacccgcgggacaaagatcgtcctccacctgaaggaagaccaaacggattatttggaggtttgtttcattggtactttggttcgaaagttatgtcattgtttaggaacgtcgtgtgcgcgaagttgtgaagaaacactcgcagttcatcggttacccgatcaaattgttggtggaaaaggagcgtgacaaggaaatttcggatgatgaggcagaggaggagaagaaggaagatgaagcaaaggaggaggagaagaagccagaagatgacgtgtcaggttgtctttaatcccaagtcaacttttaaactgatcacatatttaaatatttctcgttgctttctaacaactgatacatctacgtttttagatgacgaagccgagaagagaaaagaggaaggggacaaaaagaaaaagaagaccaagaagatcaaggagaaatacacggaggatgaagagctgaacaagaccaaaccgatttggactcgcaatcccgatgacatttcaaatgaggtgtgaatttaggcttccttattcacttgctttgagctattttttttctaattccaggagtatgcggagttctacaagagcttgtcaaatgactgggaggaccatcttgctgtcaagcatttcagcgttgaaggccaactcgaattccggtcggtcttgccttacctatgtttattctattactagtaatgagaaattggtgtcccagcggaatgtaaaaaggattttttcttgagcgaagaataagctggcaaaatgaacttatttttcctagtgctctcctcttcgtcccccaacgcgctccgttcgatctctttgagaacaaaaagagcaagaatgccatcaagctttatgtccgtcgggttttcatcatggagaactgcgaggagctgatgccggagtacctgaacttcatcaaaggagttgtcgactctgaggtttgtttaaattgacattgatgaaaatttactaaaataagtatctcaacctttcttttaattaaggaccttccgctgaacatttctcgtgaaactttgcaacaatcgaagatcttgaaagtcatccgcaaaaaccttgtgaagaagtgcatggaccttttcgaggagatttctgaagacaaggacaacttcaaaaagttctacgagcaattcgcgaagaacattaaggttgcgatttttcaattacatgttcccggacgctgtctttcatttcaaattaattttagcttggtattcatgaggactcggtgaatcgtaagaagctctcagactttctgcggtactacacttcggcctccggcgaggaaccatgcagcttcaaggttatattgggctattactactgtgtctctggtttgggcttctaaaataaattttattgggtatacaaaaggctgaatgtaatttcttttttcaggactatgtttcgcgcatgaaagagaaccaaacatgtatctattacatcaccggcgagtccaaggacgttgtccaaaactcctccttcgtggagcgtgtgaagaagcgcggcttcgaggtcatctacatggtcgacccgattgacgagtactgcgtccagcagctcaaagaatacgacgggaagaagttggtcagtgtgaccaaggaaggccttgagctgccagagagtgaggaggagaagaagaaatttgaagaggacaaggtcaagttcgagaagctgtgcaaagtcattaaggtaagtactttgtttttaattttagttcggagcttaatttattttttaggacatcttggacaagaaagtccaaaaggtttctgtctcaaaccgtttggtctcttctccgtgttgcattgtgaccggagagtacggatggtctgccaacatggaacggatcatgaaggcccaggcattgcgtgactcctccacaatgggatacatggcgtccaaaaagaacctggagatcaaccctgaccattcaatcatcaagtgagcgcattcaagatgaaattgagatcatgatgtaattttttgacaatttttcgtttttaggtctttgcgcgaccgtgttgagaaggagcaggacgacaaaactgcaaaggacctcgttgtgctgctgtacgaaacttctctgctcacctccggcttttcattggaggacccgcaacagcatgcgtcgcgaatttaccgaatggtgaaacttggacttgacatccccgacgaggaggagccggccgagcaacagccgagcacttcgggcgagccgacaattgcggagaaaattgctggtgccgaagaggaggcctcgagaatggaggaagttgactgaatggtgacatcgctatccattcttggatctcggctattcattgtttttttgttttcttgtttgacataaatttgaattaaattttccgtttcgaaaccaaattatatatggaaattgggcagtaagtagcttcctggcatgctttgcttgttaattggatacaaattaacaattttcgtcttacaaattagtctaccgcccacataaaccaagtgagaaaaaagttatggccagggataggatttttaggtttttacctattttttttgcggcttagttatgatgagagaagcccaaaaatagcattttctcctaacaattttcgatttagagcgactttttagcacctaaaaacacctattttggcgttttggcacctaaaatagtttacaacctattttggcatttttcgaatt

SEQ ID NO: 1451 - DNA, 5225 bp, Heterodera glycines
  unsure (1)..(5225): unsure at all n locations
ttttccagaattttcatagcaaaatgcaaataagatgaaaaaacacaccccctaagancctgtnccaaaaattgttttttaaatatacccctaaagatgacccaaaattcangaaaatattcncctaagaaacaaaaaattttcccaaaaattcgtccacaatatttattatttattttcttgaccaattgcaattgtgtgggcgaaattgataaaaaattagtcgcttttggaatttttgtacataaagacactggatttttccaatttttaacacctattttggcctttttgggggtttttagcacctattttagtacctattttgggattttaagcctaaaaattcctgccctagttatggcctaataatttggatattatcattgcataaaaaaaaacccggaaatatgtattagtcaaaaaccaaaaattccgactcgacaatttctttattcaacacacaaaagaacaatgggttgtgtactacatatcgtatcatactttatacatacattaaacgaattgggaggaggcgattatattgtaacgcatatgatcacattatcagcagaactcattgtcaacgcatcaatccacctcgacgacttcttccgtcaccactgactcggaaaatggcgccatcgatacattcttcaagtcgtggaacgctcggatgatgtcgttgtgcgacaatttgatttggattttctccgcttcattttcgcttccctcgttggccaccgaagacgaccttaaggcaatgaaaacattggaattgcaaatgttttgttctgccatggactcactgctgaagaacactgatctgagtttggacgacttgctggtagcgcagaaggaacgcgaaacggatgacctccttcagctcggaactgctcatcttttgcgtcgcttcaacaacttcggcgtagttaaagtccgcctccaaattctcgttcgccaaaatcttgcgcaggagcttctcgcgtgcttcttcatcgggcaagggaatgtgaactttgagtgagaagcggcagagaactgtttcatctaaaaaagaatgttgcataaacacaccaccgacggatggaaaggcattttcctcacccaagtcgagcacacgattggtggcaccgatgatgatcacgttgcagttggaattgcagcgcagaaactcatcccattgcgcgaggaattgcgtcttcagcagctgaaagtcattccgattgcgatggaacagcaaatctgtgagacaagaacaaaagcgaattgcaaaaacatgaaaacacaccaatttcatcgatgaaaatgacacacggctgaattttctctgcctggaaaaggaaggattggcagaaagttcaaaaaaagactgaccaaagtgaacagagacttcatagtaacggatgatccgttgacaaaatctgaaaaatgaaattattgcaattcaattgttgtttttaatccacaaccgaccgacgagcgaagttccaaaattgatgaagtacgcatccacctctttggcaatggcacgcgcaatcagagttttcccacaaccatttggtccataaagaagaattccttaaaagcattcattatgcactcatttttactggtccaatttcataagacaaaggcgacctttcggcgcactgtacagcaacgacggaagagtggtcttgttggacgccagttgaagagggacaacaactttctgcctcagaagttccaaaatggaagaacagccgcccactttctcgaacgaagcggcatcctcggaaaatgctaaacgaagattttcaaaaggaccgacggcaaagcccaaaaaaatactgacagatgagtgaagcaagggccaactgaaaaagaatttccgttatttgactaatcggtttgtttgtgtcgcttcaaaacccgcctcgtgtgagttgagcggagtgttcgggtccaacttcagtgagtccataagctgtgcctcgtctttctttttcctcaaagtcatttcgtctagaagttcttgctgggagcctttgcgctgcaacaatttgtacgcaatacagccgagcgcaacggaagaagcacacacgccaattgtcaacggcaaattcttttcgctggtcattctgattaattttcagatcaaataagcaaaacaaatctaactaaacaaaaaattaggacaaaatgaaaggagaaaaagatttttgtaaaaagtaatgaaaatgaaacaatcacaaaagagttgcttgatataaactttttttatgactagagaacgtaattgtaggaattctcacctttttttttgttgcactatttatatgttggtttgatgtttttagacttcattttatttccatattttggaatggaaagaattgcaatccttttttttacctgaaaatgataattgtttaatttaaaatacatttttaataattaatattaaaaatgtatttaattgtttaatttaaaatacatttttaataattaatattaaatattatttatttaattcaaattcatttttaatattaatttttttgcccatttatttgcctttttcgcttttgcgcctccgtccgtctcgccacgctccacgtaaatgaacagctcggcattccaacactgctgcagttcgtccaagttgcccagctcgacaacggccgtcgtctttttccgctgttcagcaaaagccccgccattttctccccccagcaaattcgaattgccgaaaatcaccaaatgcttgggctcggagatgtgcatcattttgtagcagtacagcagcacattcaaaaggccaccgcctgcaaaaattggaatgggccactacaaacggaaaagcttagaaaaaaatacaacttggtccatttgtgtgaaaagttcttatgttagggggaggggcttctaatacagaggggcgggggcttataattcagcgaatacagtatgactaagactgtagacatgttaaaacgatcgaatttaggtcgattagatgcacaaaattcatctcgaacagcttcaaaacagttgcggttgctgtttctcgtcccttttggcattgctcgtctcccctttctcaaacagtcattttctctcttttttggtgaccattagtcccattttggtgaccattcgtcccatttgatgaccattcgtccctttttggtgaccatttgtcccactttgatgacaattcgtccctttttggtgaccatttgtcccactttgataatcatttgtcctcattttggtgaccattcgtccaattttctaatcatttgtcctcattttttgagctgcggtggctcatcaattcgaacttcttgtgaaatcattttgtccagttgcatttccacctcatctttaatttccgccaaccattcttcttctttttatggcacaatttttccaaactttcgttcatccgaaagaactggaaaatttcaggttggtttttgtccgcatttaatagagtttttagtccctaatattaatacgaatgcagcagtgctaatactcgggactaatatgaagacccgagactaaaatttccccagaatcggggccgagtctctcaagagcagcaggggcggcgaattgaatttttatattttataattaatacatatgtgtaattgtaactattaaattagaaaatattctataagtgtcttatacatttatagaattaatttaaaaataatctactggtgctttgtataattaaaataaaacaattaataaatcactaaataaggatgataattgacacataatataataaaaatgaaaaaaaattttttttggaatgaaaacaaataaaaattcaagaatttaagaaagcgcagatgactcagccggggaccccaggaaaaacgggggtaaaaaactgagattcacaagaaaataaatatttttctcttgagtaggtgggtgatccaacttaattttccgcatcctattaatcatattcttttatttttctctgatttgaattccgctgtttttcctctcatgagtggcgaaacaaattccaaagttcaattaaaatatcaatttaaaatcacaatttaacaaatcatcgtgttttttcgtcacttttcattttgttggccttttcttctcacaatttctttttcattcggaataataaataatattaaataataatttcataaacagtaaataaaatggaaatatttggcataaatattccgtggatcattttgtgttttttgttatttgttccacatttatttaagcaatcaaaaatctgttgtcaaatacctaaataaaaatgagcctataaataaatgagaaattcaccaattaaaataaccatttccccgttaattttgcatttatttttcattttttaagaagcatttcaattttcaaacgattaaaatgtcggacgaaccaaagcctccgcaaacttcgttcttcctttggtagtcaaaaattagtgcaagcgggaattgtaactaatcggaagcaatttaggatgaacgaaaaccgggaccaattctatgagccgggaatgactcaggcggacgttgcgattgtcgcaggtcggcacaaagcccaaaacggagttcggtcttgaaatccgtagtgtttttcatattgttccatgtcacaaagtcggacgaaggattgtttttggggaaatagggctaagtaaagagaaacggggagccgattatcaatacgatgaaaagcatcatccccaaattaaggcgctgagtggcgccgattgccggaatctgagaaagccaaatgggcacagaagtcggaggaggacaaagaacgcttcgcacacggcaaaaaaaggggggggggaagaaaatgaaaaatggcatttttgacatttgcagaaaaagccgagaaaagccaatcgcagcagaaggaagaggaggaatgagaagaacggaaatagaaaagagaatgctaatgatggacgaatggattgatcacatttgagcattttggattaatcacacaaattgccattattgcttcttgttgaagtagaacataattagctcgcaaagtcgattaataaatgtccatgcaattattgctcaattaatttggctttgttattgttcatcgcaacatcactttagcttgtgcacaaattattgcagcttttttccttcctaatatggtgtcgtcattcccaattaaaattcgccattttttgttttgtgtcg

SEQ ID NO: 1452 - DNA, 2898 bp, Heterodera glycines
  unsure (1)..(2898): unsure at all n locations
aaaattagtgcaagcggaaattgtaactaatncggaagcaattttaggatgaacgaaaaccgggaccaattctatgagccgggaatgactcaggcggacgttgcgattgtcgcaggtcggcacaaagcccaaaacggagttcggtcttgaaatccgtagtgtttttcatattgttccatgtcaaaaagtcggacgaaggattgtttttgggtaaatagggctaaataaagagaaacggggagccgattatcaatacgatgaaaagcatcatctccaaattaaggcgctgagtggcgccgattgccggaatctgaaaaagccaaatgggcacagaagtcggaggaggacaaagaacgcttcgcacacggcaaaaaaaggggagggaagaaaatgaaagaatggcatttttgacatttgcagagaaagccgagaaaagccaatcgcagcagaaggaagaggaggaatgagaagaacggaaatagaaaagagaatgctaatgatggacgaatggattgatcacatttgagcattttggattaatcacacaaattgccattattgcttcttgttgaagtagaacataattagctcgcaaagtcgattaataaatgtccatgcaattattgctcaattaatttggctttgttattgttcatcgcaacatcactttagcttgtgcacaaattattgcagcttttttccttcctaatattgtgtcgtcattcccaattaaaattcgccattttttgttttgtgtcggcttttgctttatcttaatccccccccccccccttcccccgcctttccctttgccaatgaacgcttttcccatctgttggtccgccaaatttgcgttaagcgctatcagtccaacaattgtgtggttgtcatggcgttgttcttcggcttttccacatgctgacattttgtgctgcccaacattttgtgttcgaccgcccggctaatgttcgcgttaattggccgcccaacgaacggcgcgagggattggcattccttccgccccacctgctggcccattccgtttgtcggttaagccatgctggtggtggcaactaacgcgaattccattaatagcacatttttggcggaggcgaggggagggaaaagcaaaacaaaccaaaaggcacagcggttaaacgagataaggtagttcagtgacttcaaattaggcatgaattgacatgataagaagcttacggtaacccaatcactgtatgttgttttttgagaattttgataatttcataaaacactacaaaagtttttagttttcaaaaaaattgaattggcaaattcaaaagacattcttatacaattttcactgtgtattacaatagtcatgctataaaattattttcaaaaatactgtatcattgactcattttccggaagcctttaattccattagcatttaatgggactgactgatttgcactggtttttggtagtttctttgggacccttaacttcgatgctcccaattttttagtttcacctaaatttctcctaccttgaaatccaagtcctaccgtctcacttccgtccccccccccgcacccaattactgtaaatccctctaagcagttgtccccgaccattcatccggccaattaattaatttattgcctgacaatttccggcatcgcccgcggcaatggaaagcgcacaacggcaacaacagacgatgagcaaaagccaaccgcaaaaacagcataaaaaacaacagcagattgtgcgacggcaaatcagccaagccaaagggcccgaggcgatgaaaaggtgcgaatgataatttggaaacatttaaaaggcgtggaaccttccaatttccggaatttattaccgaataatagaaaagacagattttattgttttcgaatctttgtaaaacaattggagttaacctgaaaatgccagactttggttgcttggccataatcagaatgcgaatgggaaaggtattcattataaggcttcccgatctgaacgctactcgggactgaattgaccccaaaatttgagactgggcgggaaacacaatgctccaagcttttcgagtcgagaccgaaactaaaccaatcttttttcccgcggcttagagagacggagacgctgcaacgaaaggcggcaccgtcggtgggtgcttggagtgatgaaacatgtcggctggccagcagagttgagcaggtgccgttgctgagcaagacgttcaccgcactaaacatgtcctcctccaccgattttcgccagcgttgccgtgacggcactttgcgttcgccgacgccaatttttcgccaaccgcggcacagatcgaatagcatcgactccgatttgagcgactttggaccaccaggtcagtgggaaaaaaggcttgaactgaacgaaaagtcaagcccctattatgtcgctttagtacctgattgtttcaaaagtgccaaaattgtccagatgtgttcggcattttggcgcgacggaatcgtacaaagtcgcgtgagcgcaacaaatgggacttcagctggcgcgcgccaaagtcgtcggtcagcaacaccgcttcccttagcagcgacggcacattctcgtacggtgccgcctcgtcggtgggaatgacaacgacgaaactgccgcaattggacgggttctgcccgggacggacgagctgccaattgcaacatgtcagccgatcgcatttcgaactgatcaaatacaagcggacattgaattcgtgacggtgccacgaaaatgggaggagcgaaggggcgccaatcgataaacaatcgattaataacagggttgccagatctgaggatttatcctcattttgtggctttttgataggtcaatgaggattttttgaggatttttgaggcttttgggaaa

SEQ ID NO: 1453 - DNA, 2014 bp, Heterodera glycines
  unsure (1)..(2014): unsure at all n locations
aaaatcgcaaaanttggtcatttttcggacaaaatctgttaacaaatcgcattgaaaattacaaaattttttccgggcggcgcctataggcgccccccgggggcccccncctcgccccaaaagttttttgggaaaagcgccgcaaaaaaatcaactttgtttttcatgttcagaatccccaaaaatgcttatttctaacaaaaaaatgctcaaattgatcatggacaatcaaaaatataacatttgaacattttaaacgtgttttgaataaatttgtgaaaatgaggctttttgacccaaaatgaggcttttttgcctgccaaatgaggcttttgaaaattttaatctggcaaccctgattaataataatgtgtaaataatgtatttatttatatgtacatacataaataaatcagtgttttttttcatgaagtattttttgtcgcatggcaaatgaaattttcaaaaccaattcaaaattaattaaaaatcagctctaaattcatattcgttttcacttaaaaaaattacagtattgaaaaaattgtggtgaaattttattttaatatgttacggaaggacctgaataaattaatggatttaaaaatacaaaaaaaataagaaaattattttaaattagcaaaagtataatttactgttaaataatttgtttgaattttggacattatgagaatcaagcaagcccgcgcaccaattagcttcgatctttaaattgtcaaaaatgatgaaatttacgaattgaaaaggtttccattagcagcagaaacaaatttctctttacgctttacgtcactcgctttgttaagctttaatgcttaatattaaaaattgattgttaatagaaataataattacgtaattcgatttgctgcaaaattattttttgcaaattcttctgtttgtttatgattttccattttcaataataatttaatcgcttttttttttgcaaattccatcgttttcaaatgtgccaatgccaatggtcgcgccaatgtgcgtaattcaattgattccatcgattgtatgcatagcaaattttccctcttcctcataaatttatgcgcgtaaaatgttcagacatacatttattccctcataataatatttaattattattaaactatcactaatattttaaattaattctcgctcatttagtgactgaaatggccaactctccgctgcttcttctcccaattttgtcattgtccatattttgcgcgtttttatctgaaattgccatcggtatgccatcgccgtttaaaacacccgaagcattggacagaatggacggaataagcccggtgagcagcgcatggacatcgccgacgatcagcggatgcagcacgcccgagatgggagccggcagagccaatctgcggcgatgtgccagcatcgcgacggacagaatgccaacgacgtaccacggcgccggcagaggccgatccccgccaacactgagccagcaaatgtacggacgaacgacggcactccttcccggggcgagggacggacggacaattggaatttttgaattgattgattttttgggagggggtttcccgaggcttaaagaagcccgcttttttcccggaattcgatcccaatgtttttcggccgttcgaatcgaaattcgattcggccgattttgctacctaccgaagcacacacattgttgaatttaccgcttaattaacatacgtttttatctccttcaccagcttttcatttattttagaagaatgcctatttcttcgccgcctcgtcggacttccaattacaatcgtagcttaatgtaaaataattaaaataaagaaataaatatacaaagtatttctaaaatatgtaaatattatgtattaatataaaaatctggctctttttttcaaatccaaatgccaatttttggcattttcagcaattcgccacggaaagtgccattagccgattaccaaccagtgacttccttgtgccttccgaggaggatgga

SEQ ID NO: 1454 - DNA, 2057 bp, Heterodera glycines
  unsure (1)..(2057): unsure at all n locations
tttgttggcctgaaattctccagccatccgcgctcctcccccacctttgacattaggtggaatttaattcacagttggaaaagactcttctactaatgcccaaattgaagcgatagcaaagcggagtgcgcgagttcaattcccaagagaacacgtgacaatgggcgggttccatttgttgagaaaggcattgctggaagagcaaatgaaaaggaacgtcaaatgcaaaattcacttggattcctttcgtggagtccgtttccgtcttctgacatgcatcccaagtcgcgtcaaattcggcattcaattgagccaagtcgtaatggcaaacgaattggttccgagtggcttccttgcccaccctttctaagacaaccaaaaggccaccaccgtccgaagttttagcagcgacgacagctttttgatgagaaaccaaagggaaaaaggcatcgtcatcatcatcatcacctaatctcggaaacattttatgattgaaaagggacaaaaagcacccaatccgcgacaggacagcaccaattccatgcgcgactccaaggcgaaagacccacttcggcttcggtcattcagacaaacgcgcgacagacgaacatccatacgttcgacttgcaaagtttcactcacaaaaaggggcaagtctgcccgaaaagcactcccaacaaaaaaagcatattggccataacggaaggaagcgaccaccgaatgttgcgaaatgcctctgtcatcgatagcgccgagaacatcgccgctataaaacagggcaattaattgaaagaaagaaaatggaatataaacggacccaacagaaaagtcgaaggcgtggacactcgcatttttagaaccgtaaatggcacgcacaaaaagacgcttttggttgccgaccacagtcctcagagaacggactgttccgggtaaatgccgaattcggcaagtgccattatcggaagaatttgcataaatgggacacaatctaaaggaatccattatacaattaggtaaaccaattgcgaaagcaacctgcataaaacattagtgcaaatgacgagaattgaattggccaaatcaattttgagatcagttaacggcaattctaacggcaagggaatcacccgaaaaggtacgaatggttcggaaatgggcaaacgaccatcgaatttaaaaagagacagcgatttatcggttgcaaccacaaacaaatctccgttggtaacaatccctgaaaaatgtgaggagaataaccagacaaaataaaacacctgatagtttaaattcatttccaattttggtgaccaaatgtcccgtgccatcgcctctcttttttgtaacccccgctgccgtcgatgccgcagcagaaaagtggaattgaagcaggagaataacaaacatatggacggagtatgggaagaagccattggaggtgcgacaagaaagcccagacgggcgaatcaaaaatgcattcagcagcagatccagtttaagaacggcaaagttgaggaagaacgaacgatggtttgtgcaagcaattagagaatttgattgaacagtgaagttaattaggcaatacgaaaatagaaggaaaatccggtaatagttcagtttgtcccccccccctttttttcgaaaattttttttgtgttttcggggtcgctgatcacgaatccggcacccatttcgactaatttcgaacctcagacccgaattcgaacaaaaagtcgaaaattcaaattttcgattttcacatttttgggctaaaagtggctcaaatgatcttttattgaaacaatgttgaatttcagttcgtttccgtgtatttaaacaaagtttgaaccaaaaatgtgaaaatcgaaaatttgaattttcgactttttgttcgaaaccgaactattaccgaaaatcctagtttattaattaagctaaagctgaatttggcaaaattgttcaacagtcatggttanaagtgttgtcccatcctttcttgtaagatatgtatcatcggaaatanattgtaattttgcattctanaaaaagagccctttctg

SEQ ID NO: 1455 - DNA, 5144 bp, Heterodera glycines
catatcatatgcgaagacgacgaaacgaaacttctcggccaaattcccaattcctcgcatagtatttggcttcgttattctttttcgcaagagaatgaactggaggttgttgagatacaaagaagtcgtacaaggaactcgagcgtctcatcggtgctctgagtgaatcgtccgtctgaaagttaatgagtggtcatcatacataaaaaagggggaggggttggccaaagatatattttgacgacctttttttttgctttccaaaaccacttttttgcggcgcactttttccaaaaaattttcgggaactggggtgggcggcggtgccggtaggcgccgcaggggaaaatttggaaattttggatgtgatttggtaacagattttaatgagtctatttgattcgacatgtcctagtttttgcataacctttcttaattctgaagttgcattcggatagacttgaatataatctgttgcattgtgtgattgatattttggcatctctcgaccggcattcgaactaatgagcattgatttgttaatgtattcgctttgattaatctccattatggcatcaatgtcaacgtaatctcctgcaaaattcgctaaagaaacaaaaacaaccaattcggcttaccatcgaacaccggaggaatgtattttgaaaagcatggctaaattagagaatttgattgctgatcgtgcgtagtttattttcatcaataatgtaaacctgtgaagattgtttgcgaggtggtagtggcggtggaagtgaaggcggagatggccgtcttatctaaccattcactaccgtattcacttttgaattagccaacaaattaccaaccattttatctttgttagagcgtccactgacgcgcgttcttccgccccgttgaattattcgcgcgttgagctcactgcaaatgctcaaacttctcaaacttgtcgcgtcggcttctatgaatttttcgcaagaagcatataatggcgaattcttttcttgtaaactcattgcggaagaaatgcctttttcggagactgttgtttctaacagttcctttggatgaaatagcaaactaaagttaaaacggatgcttatccctcacattcagactgttagccaacggcgtgttcacataatgcactgtcgttgcgaaggaaccgctgtaagtgatgttctcctccgtcatggccgactcgttcattgctcccttcctttggcttgtccctccgaaagttgccgttgacattgacctaattttgctttgtatggatgagtgtggttgtgaaactctcagtacatttcttcctcggacttcagcaaacggacgctttcttcttccaccttcacattagtctcgtccatgccgcattgtgtggccaaaatggccacggcattttcacataaagacgactcttcgctgtggctacgatgttcttctctctccacactgctctctcgctgggaattggaagttgaactcctttggctccacttcagacgttcactgccccgttgtatcgcactgtcaattcgaatactcgacgtaacaaaaggctcgttctttcttcggcagttcactaactcattttcaactgattgtttgctgatggctttatccgccatcgaaataactggttttgtgggcagtaaagctccacaatttgcactctcattactttccctcgtgtaactgatgctgttgcttttgtcgccatcatatttcttagaatttaaatgtacagcaaaatcgaaatgcctaactgtgtatgatccagtgagctgtcgtttcagttttctcgaaagtgatttgccgattttatggtggccattctcagcaaaagtaagaaacggcgaatcggaagtgggcttgacaagtccaggcggggccgcattcggactgaaatgggtcacttcggagacgagctgttggttgaggaattgtgcgggcgttccttcgatgaactgcaggtcctcaaacgcccggtcctgtgcgtcttccttgctctgtgctgggtcactctctatcaacagatcctccacagaaaatccgcctccccgttcgcttcctggggtatcgttttggtttggagtttgtctcgcacttctctttacccaaatccaccggaatagcgtatggtccttcttcgattgactttttcttcagcggaggcggctcagcttcgccttcatcaaaactttgtgaatgaggacgacgtccttaaattcatccatatctttaataatggggcattacatcgaaataaggaagccgatcgcgatttaagcaccattccataaaaacccaaaagaaaacatagaaaatttatcaagctctttcaataaaaggaatgtatttaaagtaagaaataaagcaaccagtagcacccatccataactgagattgagccaaattgcaattggactgccatttcgagaatgttccgaggtattaaatgaacaaagaaatggcagtaaaagaaggcacctgagtcaacaacaaatgattaaagcatctgaatgaaaaacaaaacaaaataaagcagaacgaaaaattctttgcaaggcaattttaagtttgctgctgctgatgacccgtcaaattgaaataaagtgaaggaaagagcggagaatgctccgtctgttggtcgctgttgttattaacaaaaagtgatgggaactgaaacttgcgctgaccctcattcgcataaagcgacgcaaaaatgggactcggcgtctgtcttccctcgttggcgtagagaggagagggcgaaaacagaagctgctgatggctggacgacgcctggccaagcgagctgcttttcaacgaaggcattcgacttgcttgactgccctggtgaaggtactgcttcgtcttaacgagaatttcatcccagaaaagacctatgaccgcaccttcaggagacactgcaatttggctgtcagttcagggatctgatcgctagtgaacacaaagctttgcggtgttgaccaggggtaggtcaatgcgcgaaacgcaaagcgattttgaacgcattcaacatctgctgatagatgaaaaacaaaaaattgaccaatccgagcagtaattaccggacaaatcttccaagttgagatacaatcgctgtttcggcggcacttcctggacaatgacgagggcgtagcgctttaaagaataacatttgaaagtagcacttgtattctacaacaaaatacagtgatgtgaattcgtgcacttcgagagtttaatttgatgacggaattgtcctttggaatggtatggcacttgacaaaatacatggcacctgaaaaataagcaccgtcattataagtgcggctcaataaatgacttcgcccacaaacgtccttcaaccactccttccaaaacaccatgctctcgacattgctaaatgagaagatcaaagtttggccttgtatcaagatggcgagcgtcttattcgagcgtttgaatttaaaacctaaaatacactgtaattgttcaaaaaatagaggcttaaagacgaccatattcgtatccgatgtaattctgcaaatagaaaagttccaaatgttcgcctctttcacgacaacctccatttttgaaaataccctgatttttttattgtttaaattctgcgtgaaggaattactagcaaaggagcctcggacaagcagcgcctctggcaaacaacataacgattttgccactaaaataaatttatcaatgctcattatggtattctttcaggatttttcagacatttgttttttaaggggcccaatatagacagtgttactctcattcttttttcttataacctaccttgtcatcggtaagaattttgaggcttgattcgattcgaagcccattatcaaacaaagaaacttcttcctttcgtccaagccatctacaaattcccatttgcggcttaatgtgatgaaaaatgaatagaaaaacaatgcaaaaaacatttaaatatgcaaataaaagcaatgtcgaaatgatacaagcgacaaagaaaaataatttatttgtttgagacaatacgctaaaggataggcacattatttagcacgtataatacaacggcattatggggaaaggaaacaaacgacaaatgaacttttgccaaattagcctcgaatagccttgaagacgaaaaacccgactagcgcaacaaccaaagcagttgaggtaacgatggaaaaaaggttactggaatcccacacgtagaaaaggctttctgaaggttcaacggaagagcctttggcaatacttctaaaaaattaaatcactggtattcgagagaataaaatagaactttggaagtaggtaatcctgcctcaattgcaaattcaaatcgtagccaaatcgttttaacacagtccaaacggtgtcatggcggcctttttgtataaacatttgatggaggtagcgaaagccatccaaagttatggcgttgtccatcaccatgttagtatcataatcggagatcaactttttcacatccttaacacatatatcaacaaccaaacattttgaggtatcaagtgcatagtgatcaaaaaattagcttgaaaaattttcaatattttttcggaggaggaaacaaccgggggaggggggggggaaataacgatggggaaacgaaatgcaggcaattgtgaagttggtccctcaaaaaaaaagaattaaaatccaaaaaaacacatttttaggggttatttgatgcgctgaatacgaatttgatcttcttttgactttgtttcgaacccctgacccggattcgaacaaaaaagtcgaaaattccacttttttggaatttcattttttagtctaaaataatttaaatgttctttttatggaaggattgttgacttttagttcattttcatgtatttaaacaaaggtttgaacaaaaatgtgaaatccgaaaattgaattttcaactttttgttcgagttcgggtccgggattcggaattggttgaaatggatacaggatttgtgaccagtgaccccaaaaacccttgggagcatgtttcaatttttaaaacaaaaaaatgttgcgaaaagtaatgaagggaaccagccttaatattaccaatccgagtctggggttcgaaacaaagtcaaaag

SEQ ID NO: 1456 - DNA, 1197 bp, Heterodera glycines
  unsure (1)..(1197): unsure at all n locations
ttggatcacataactgaaattgaataacaaattttaccaattaacaatcaaatcacatatgatttattttacaccttgaatattcttgtgattgccttttggcatttgatagataattctctcttctcaacagaaaaaagaggtcggaaaggataaatgacctaaattcaaaaaagaaatgaaaagcaacagtaaagaaaataccgctttctgagcgtaataaaaaatttctgagacgtttttgataattttcgcagagcattcgacaacagtttcaatttccaagtagtcttaaaagaagaggaaaaagtaagaaaaaaacgttatcttccaaccattcattatcggagccatttttacaatgtgatctcctccattctgatgatccgatttatttgctaccaaaagcacagaacaattatggttgcttccgccaagtgtttcttggattaagggaagccaatagctggtgacctaatcaatgcattgctaaattgacgaaaatgttaaattaccctttcctcgcttcttcgatcatcaactgaatacaccacacaaatggcatttgcttctcttatcattgacctaagttcttcatcgctttgtaccctttctaaacaaacaaattaaaataaaaaaataaaataaaagccgataaaagaaaaaatcataagcactattttggcggttttcggtgccatcatagctctgttaatgaccgaatttttgtaaaaatttgggaggaataaagcaattagcgtttatttgctacctgaatagtctgttatttgcgtcaaaacgccatcctcgctgaattctctcggaaattggatggtaccacttcttgctggaacatgatcagaaaaacgatcgtatacaagaacatcaattaagcttgttttcccaacattggctggaaataaataataattgttaattttttttattttttacaatctccgacgagcatattctgacttcggcttcagccgtactcgcttcgacattttcaaaaaattgacttgaaaaacttgacagttattagcggtcattgttcgnttgctaaatgtgatgaaatgatgctatgttcagcctgaccttgatttttctatacgaaggtaaaaaatttttgattgacgcggattggggaggggggggggggggggggggggggggggggggggggggggggggggg

SEQ ID NO: 1457 - DNA, 3736 bp, Heterodera glycines
ggatgctattatatgtacttcatcatattagttatctgctttgagtgaagagcagcaacatttctaaaaatacacaaataaattttaagcatttatttatcgttttgtgattttttttattttttttatctcttttcttatgttttgaatgacaaatattttttaacagtctaagattgcttttacgttattaatattaccattaatttttctcttttagaattttctaatatatttcattctaatttcacacattctgtttttatctcatcaagaattaattttagaattttgaacatttgagtttttctttatattttgtttttttcgtgccaaaactcctcaagtaaaactaaaaaaattataaacaaaaatctttgactttttttaaatgcaaattgaaaatagtcttttttaatatatatttttactcttgcatttagccatcaatcgtttgatataattcatagccattttttatttaattttaaaaatttcgaaatttcttaatttaataaatatttgcaaaactttttcgtttttatatgtatattaacttgtttattttttatttaaatcatggtttaaattaattcatcatttcttgtgaaggctggttcctattatttctttcttaattagaccatttcaagtgaaacttaaaaattttatcattgacaataaaaaatgagctttataattatttattatttctataatttaaattatggaacgaaaacaacctttatattttaagatatatgaaatagtgatatttgctttattatcatttattcagcaaattattatctatttatttattaaatgttgagttcccataagtttataaaatgttcggttttttaatatgttcgtttatttttatttttagatatttgttttcttttttaattttttaattaaattttgtgttaaaaagtatttaattttcattattaattttactaatatatagtttataaattaaaaagatattgaaaatcgaatttaaaattataaattcaaacccattttccacttttccgagccccaattaaaccctaaatcccaccacccgcggcgagcactgccgctcgatttttcgaacatttttaactttttaaatattcttttcttttatatttaatattaatgaaattttattttgtttctctattagtcaatcttttattcgtatccatgccatgtttaatgaatggcgcttaactggcaaatgagcaaattttatgactaattatgtattcataaaacttttttttctggaattaaattatttatttatcacatttttcgtttaatgtttatattttttctctataatcttgacgtcttcgttggactttatgttttgctttgcatagagtctaaatttatttaagtagattatgtttttattaaataattcgagtaatggcaccattatttcaaatgttaattttaattaaatgctgttgctttcttaattttacaagaaattaaattatttactaattattattttagctatttaaaaaaattataaaatgcaaagctaatgagtagatgttactcatggcaattaatatgtttgtatttattattattgacctttagtaacaaattagtgcataattgcagtttaattagcatcatattcattaattttgttaaatgtacaactcctctatgttctattcgtttgatattagggttttttaaatttcatttattttaagaccatttttattgtagtagcataatgtatgtaaatcttagactttctgaagtttatttcttactatttttagttgttatttttgtttaattaattttgaaactgataaaaattaaattaataattattatttcttgtccactattagagcgactactctgggttgtctgcattcagtattttatgagtttaaaaatcatgacccagggcttttttcattgtttatttataagagattaaaaaattatttaattaattaaaaaactattaaataatcaattgcgtaaaaaatcattttcatgtaaatgaaaatttatgtaatttaacttgactttcattttatcaatttataaattttttactaatatatttatttctttttttattttcatgatgcagaataaaaaagattataatttaattttctatttcaactgcggaataaataatttttgatttaattttaagcataaaaaatagttataattataaaaacttatctattataatcaaaatgttcttcaagcatttatttttaataactaattttaatatgggtttttattagttcataaaaaataattatctataataaattttaatagattatatttttccggttttgagtaaataaacaatttgattattcaatgttttctaatgtttcatgagtaattactatggagtccaattatatgcacatgcatatttttttcctggactgtgggaggcctgaaacgcacgaaaaacatgtttttagcgtgttttgaagcttctaggatgactttccatatgcatgttttgcatatttgtgcatatttcgcgatttatgtgcatatttgcatatttgtgcatattttggcatttcgtgcatattttatgtgcatatttgggcatttttccaaaaaacctctaatagaacggccccccaacagacaaattggcctttttgacctcaaaaaccggaaaattttccaaaaaaataattttttagcaaaattttcacgaaaaatattgaataaataaattttctcaaaaaatggttaatttatgtcaaaaataagcaaaaaaagcaaaatttcgctttttgggttggtttttcgcaaaaaatgagtaaatttttgctttatcatgtttttttcttctaaaatgatttttaataccacatttagccattttttgaagattttacttaatatttaacaaatttgaagaaatttagagacattacacccttaatttggaaaatttatatgcatatttttcactttttatgtgcatattttgccatttttggtgcatattttatgcgcatattttgcgattttatgtgcatatttttggactccctaattataagtaaagattttgaaaatattttatgttcgctattccaagtgttaattgtcagtatgtaaaacgaatttttatttattatttataaattttgcatttttaaatattttacttaatgttatttcatactgtaatttaataataaaactataaaaaaatattcttaaaatgccatctctgtcgggaggccggagaaggggaggcgtagggcggggaagcggggagagggaggacggggaggcgtagggcggggaagcggggagagggaggacggggaggcgtagggcagggaatcggggaggaggaggacgggaagcgtagagcggggaaaggggtggcgtgggatggggaggcgtgttggtgacaaggttggctttacaatggcatgtgcagtataaatttgagtaaagatggcaacatttcaaaaaaaatacacaaaaattttgaatcttattttaaatgttttatcaatttcttcatttttatttatctcttttattgtctttttgaatgacaaattttttaattgctttcttttgctgtgattattttttttgtacctttaatgtttctcttttagcattttctaatatatttaattctaattacacgcattttgtttgaaactcatcaagggttaatttt

SEQ ID NO: 1458 - DNA, 1589 bp, Heterodera glycines
  unsure (1)..(1589): unsure at all n locations
tttttgaaaaaaacgcgccgtaaaaaacgtgtaaatagtcagtcactccttttcccaaaaatgttctaaaataatggaaaatgacataaaaaatgattttgataaaagcattgaataatttttcaagcaaaatatgcaaataaccaaaaccatttttgaaatcaccttttacttggttaagaattagaaattagcctataaaatatttatttagaaaatttttatttatattttttgaaaaattccgatttccgaaaattttttggggcctcggaatgccagaggggggggggggggggggtagggggcagcggcccgcgccaattttgcgaagtggtccagccatgaaattgtcgacttcttttcttttttgctttaacctctttttttgcggcgtgcttttccccaaaatttaggggggtccggcaaaatttttgaaattttaagcgcattgttaagttttctcaaaatagcaaaaactaggtcaatttttggacaaaatttgttgactatttgcattaaaaatttcaaaaaaattttcccttcaccgggaaaaaatgcataaaaaatggccattgaaaaacagttttctcaaaatagcaaaaactaggtcaatttttggacaaaatttgttgacaatttgcattaaaaatttcaaaaaaattttcccttcaccgggaaaaaatgcataaaaaatggccattgaaaaacagttttctcaaaatagcaaaaactaggtcaatttttggacaaaatttgttgactatttgcattaaaaatttcaaaaaaattttcccttcaccgggaaaaaatgcataaaaaatggccattgaaaaacagttttctcaaaatagcaaaaactaggtcaatttttggacaaaatttgttgactatttgcattaaaaatttcaaaaaaattttcccttcaccgggaaaaaatgcataaaaaatggccattgaaaaacagttttctcaaaatagcaaaaactaggtcaatttttggacaaaatttgttgactatttgcattaaaaatttcaaaaaaattttcccttcaccgggaaaaaatgcataaaaaatggccattgaaaagatggacatcgcaaaaaagtgacgtgaattgtaaatggttgaacgcaaaaagtttgctcaaaccttgaagctgcccaagttcggcttcagtcggttggacaaaatgttgagcgcggtcgatttgccaattccgttggtgcccaccaggccgagcaccgagccgagccgcggcgtgggcaggcggtgcaatttgaatgaattggcactgtaccggtgggtggtctcgcgctccaaattgctgggcaaattgatgatttggatggccccgtaagggcatttctaaagaaaaaacaacgaaaagattgagagagaaataccgaaaaacaaaatgaaaaagtataatgccnggagttttttgttgtaaaaatttatgtgccaacgtttggctattttcttagaatgaaaatncttaaaattttccccgcccgtccctatcggcatcgctgcccccacccccaaaaaaaaaagaattttttcctttaaaaaaatttgctgaaaa

SEQ ID NO: 1459 - DNA, 1551 bp, Heterodera glycines
gctattttcttaagaattgaaaattcttaaattttccccggccgtccctatcggcatcgctgcccccacccccaaaaaaaaagtattttttctttaaaaaattgctgaaaatctcaaaatttggtcattctttggcaaaatctgctaacaaatagcattaaaattacaaaacgtcttcacggcggccccacacaaaaagtttttttaacaaagcgcgtagcaaaaaaaaacgcgttttttaaataacaaaaaaatcgttgccgtctaaaaagcgcaaaaatttggcagttttcgttaaaaatctgttaacaaattgcactcaaactttgaaaatttctctccgcacggcccaaaaaatattttgaaacgcaaaaaattgattagaaaagcaaaagaaaagtcgtcaatttgcagggccggactccttcgcaaaattggctgctgacccaccgtttagcaaaaattttggttgaccccccccccccctccctttttaatgtatgcacaccttaacacaaatgccgcatccgatgcacaatatctcggaaatttcagcaattttcgatgttggctcaaccacaatgcattgtttgcctaaaaatagagggcaaaaaatcatttttaatgttcaaaaaagagggtaaatcggggtcactgatcacacaaagtctgacacccatttcgaccaattcctggtgaaaatttcgaacaaaaaaatccgaaaacgcaaatcttgaccagaaataaaaaaggcagagtcataatgcccaaaatgcttgcgccacagatgttcagaaattgtgttaaacttttgttttttctgcaccgtaatatgatttttttaatttgaattttcgactttttgttcgaattcgagtccgaaattggtcgaaatgaaatcttatagtctgtaaaatatataagtaccaaaaaaaaaaattaccagtgcggacgacgggacaattctttttgcatggctgcccacaatttttctgtaaaattgaaataaaagaattaacgcttaaaaaagcaaattattaataacccatatcaaataagcaattaactttaattaaattgaggcgtaaactcaccggcttgcatctgtccgggtttacaattgcgattcgcgtctgtgctgtttgaatttcgggcttagcactctttttcatcacgaataaggaaagtttgagctttaaactttaaatacaaaaagttaaaaaatttagaaaacagagctctattgcactttaggcgtacatatgtaaaaatattagagcgagcccggacgggcccggcaggcttttaccgggcggcccggtcacgaagccgttttttttggaaaaaaacgagccctggacgcccggtaaaacgggcttttttgaacgagcggcccggtcccggtcaaatggctaaacccggtcccgggcccagtcaatttgaccggctaaaacgggcttgggttttaccagcgaaacggccgaaatttgaaaaatttaataattatgtttggcaaaatgtctttaattcaaattttcaagacagaacttt

SEQ ID NO: 1460 - DNA, 1745 bp, Heterodera glycines
tttattgggttgaattgcatataagatacatttccaaattcttagctgaaaaactcattcgattgtcggcaaatttaaatttattcaatatttttcgtgaaaattttgctaaaaaattatttttttgcatttttccaaaaaacctctattagaacggccccagcagctaaattggcctttttgaacccaaaaaaccggaaaattttccaaaaaaatcattttttcgccaaatttctcgagaatattgaataaatttaaattttcataaaaaaataataaatttatgtcaaaaataagcaaaaaagcgaaaatttcgcttttgtgggtgattttgatctaaaaattaataaatttcattttttttcttctaaaatgattgcacagaattgccgaaaaaattcggtaaaaacccaactcgttttttgccaactcgttttttacccaactcgtttttgacccaactcgtttttattaccccaactcgtttttattatcccaactcgtttttttgactggaaaatggaaaaaccaaagaaaacgtttaaatttttaaaaatttttagttctaaggtaatttttatttatttacagactaatttacggatcatccactaaattcgaattggtgctataaatggacagcggcagggcccgaaaaaagaagagggacagcgttacgtgtgctctggatgcagacgaatcaaggacaagaaggaagttcctagtgacacaaaattgcctgcaaggaaacgacttggtgaatcgtgggcagacagcggtccgaaatacccgcatttttgtcaaccattctcaaagactgagcttctaggcgttgaagtgagtaactttttgaaaagcctgaattaaatcagttttttgaggagcgaagaaagatccaagcggagttggcactcggcgcgagagagaacattgcttcggcgaaagtgcgaattgaatgcagaatcgaacaaaattacagcgacaaaacggatgaggaaaaggcgcaaattcgcgataaagcgtgcggaaatgcaatagcgacaaaaaaagtaattttaaaaatacaaaatgtttattagtttaattaaggcattgtatcgttcccaaatcaagcggaccatgaaggtgcgtacgttgcttgaattgcagcgtgaggaaagcgctcctctgtggaccactctgagagggcgattggcgcacagggacagtgaccactttcaagaacttttcctactggattgttcaaatgaaattgccattttttcgtcacctcgtcagctggccatgctcaaaaaaacgagaacaattataagtgatggcactttcaaaatggcaccaagaggaattttccaggtgaaacaataaatttgaagacctagtgtttgaatttaggtctatcgagtctttgggtttgttgcacacacccattcggttcctttggcaactgcacttatgcgtggcaaaaatggcgacatttattcaaggttttgggacaaaattcggcaagaattggacacaattcctggacatttagaggcattttgtttttctttttggtcattcaaataaattttcagattcgacaggctaattttgactatgaaccggcgtctgtttttgcctttcagcgtgcattccccgaagtccatcccaatatgtgtgtttttcacgtgaaacaggcgctcaaccgtcgcattcaaaggaaaaggctaatcgatttgtacaattccaaggaaccagaaggc

SEQ ID NO: 1461 - DNA, 7557 bp, Heterodera glycines
tgaaaagctcaggtcccggtcccggtcccggtagggcaaccgggaaccgggaaaaacaagcactggtaagaatgggggtctgagtgcaaaaattagtgagaaaattggagttaaaggaaaaaatttagaaataataattaaatatattcataaagtagcaagaccaaaaatttatgtgaaacttaaatctgaatttctaataatattcgatcacttagtccaaaaatgattaattgtttgaaagaaatgaagaaaatttgatttgaaaattttcattaatttattagctttaacttttgggttttattaaataaaaaactaaataaaaatttaattatttaatattttcacttgaaataaattaaaattggtaaaaacccaactcgttttttgccaactcgttttttacccaactcgtttttgacccaactcgtttttattaccccaactcgtttttattatcccaactcgtttttttgactggaaaatggaaaaaccaaagaaaacgtttaaatttttaaaaatttttagttctaaggtaatttttatttatttacagactaatttacataaaatgtatagtcagcgcattggttgtaggtccgtaatggttacggatcatccactaaattcgaattggtgctataaatggacagcggcagggcccgaaaaagaagagggacagcgttacgtgtgctctggatgcagacgaatcaaggacaagaaggaagttcctagtgacacaaaattgcctgcaaggaaacgacttggtgaatcgtgggcagacagcggtccgaaatacccgcatttttgtcaaccattctcaaagactgagcttctaggcgttgaagtgagtaactttttgaaaagcctgaattaaatcagttttttgaggagcgaagaaagatccaagcggagttaaattttgaagttttaggatgacacatggattaaaaaccgtattggtcatgcattttttccctttttgacgtcgaccaacaccgtacaacaaatcatgctgaatcatatcatggtcgtcagcgtcacttttaccaacccggctttttgttagggcggtggattgcaaattttcaggttaacgtgaaaatctttctgtaacttaaataaaaaacaggaactgagccacgctgaagaagaaagtgcagtggcggtagacgaggggcgcgaattaccatctcagcctctgcaacttacaatcgaattggacaatgcaatcgccggtgaaaaggcgaacatcttggcatttttgaggactgactacgatgacgaacaattcactacaacgatgtcaaattattatggaagaatcgggcacttgatcgggttcaaccccgttcaaagaaatgagcttgacgaaatgatcattgacgatgatgcaaggaatttggcggaacaaagtctggacgaaaatggtcttctcaatgccgatttgccttttgacggactggatgaaattgaaaattttgctcgaagacaggcaagaagagaatgctattatttcaacagatgatgaagtcgatatcattaattaaacgcaaattttgaattttattatgttcttcatatttcattgcggttttcaaaaagcttaataaactttattgatcgaaattcagtcagtttgaatttacatgcttaggttgttttatttagtacaaatttacaaaaaaatcatgttttctttggtttttccattttccagtcaaaaaaacgagttgggataataaaaacgagttggggtaataaaaacgagttgggtcaaaaacgagttgggtaaaaaacgagttggcaaaaaacgaagttgggtgtcgtcctgtcaaacacacggtcagagactcgaccaaaatcggacaaatgctttcgaagtgagacgattgtctccgtctaaaaaataaaacatctttttgtggaggataaacatcaaattgcagaacaaaataatgcgacacttttgctcgagtgtaaaaatggtactataactgccggttcaagttatattttttaatctgttaatctcccccccctctctcctatcaccgcggtttgtcccaatattcaaattatggattgatgttcggttgtgagaaaatttcataacaatatttagagccatattagggcatcaaatgaaagcgaacctttgtttcagtctcaggcacgtgttcggacacgttttcaacggccttatgttcctgtaccacctttgaaggacccgacaattcctaaaaggcgaaccgtttgtttaagacattcattttcaaaaattccaaataaagcctgacatcggcaaaaagcatcaccgtttctcaaaagccaacatagacaaagtgcaaacctctttagcatccttctgggccccgggctcacgctcgactgacacactttcctcgttcttatctttctggttacgttgtaccaccgcggcagtgcgtggcacgccctgaaattcaattcagctttaaacgacctttccaaatagtgaggtgcccaagcgcgcggcaacaagtgcggagagtactcgggcagtgccgtcaatgccgacgcctcagggggatggcctacccccttcccacaatgcccccattaccgatggatcgagtgcggcgacgggtgccctttgaatcggtggggctcgattttctcggcccaacagctactctggacgacagcggacaacgacagaaagcatgggttcttctgatcacctgcttaacaactcgagcaatttacatcgacgcaacccgggatttgtcagcaaagagcttcatcgctttactgaggaggttcattgctcgtcgcggagcaccaagccggattctgagcgacaatgcaccgacattcacgattgttggcaaaactttgggcgaatttggcataacgggagacaatccgctggaattcgcggactcccggggcattcaatggcgattcaccccgcaacacacaccatgggccggtggaatctttgaacgggcggtgcaactcgttaagcgagcgttgcagaagacactggggagctgtgtcctcgattacgaaggcttcagcacgcttttggctgaagttgaagcgacggtcaattctcgaccgatcacttatgtcaatggcaacccggaagaaccgctcccgctgcgaccgattgatctaattcaggagaatggtcggctcatagtgaatccaccgccgggatcctccgaaccgaacggccaacgacgcgaaccaccgcacgaacaactgacgagacaatggcggcactctcaacaacgacttgaacatttctggcggcgatggcacccagagtacctcatggcactgcgagaaaaggcgggatggaatcacccgcagaaacgggtgaatgcacccggagcaccaagagtgggggacatcgttttggtggaagataagttccacccgcgcaatttgtgggcgatggttcgcgtcgaggaactcaaaggatcaggcggccacgtccggagtgtgctgctcaaaatggcgaacggaagaatttggggaagaccagtgaataaaatttcgtaatgcacaaccgaatattttttcttcgctctgctgcaaccgaattcgccaaatcagacacacaattaggctaatcactttaattgagaaacaaaacaacaaattagaataaagctcggaacaacaaaataacaatccaaacaaacgtcagaggcgagagaagacttatttttaagcacaatcaaaatatcaaaaatgcagaagatttttggagaccggagacgaataatcaaaaaatccaaagacgtaaaaatgggaagaaaattgagaaaacaaaacgccaaataaaataatttaaaatgagaacaaagtataattaatatttaacacattcccgcacaaagtcaaaaggcgtccctgccgaattaaaaacattcttaggctgttgaaagggggcgattcgtccgggtgagctcactgccagcggtgccaacgagaaaagcgacgacctccagcaacagaagacatcgaaccacgtccaaatccacgatacggatgcatgcgcaactgctgaccggacacagggtggtcatctcgacccatccccgatcgagctgtgattgaacgcaatggtggacggtcacctggacccgagtccccacttcgattttgacggacaacatgaacggcggagcgaacggtgcggatgcccaattccctgttgccagggaatgaagcaatttgtgattggacccaagccgccaatgtcttcactccttctcggctcatccaaccatcggctgccactcgcgttgtgtcgaaagtgtcgccgtgtcggaaaatttccaagatactgcgtcccgtcgatgtcactccgacgaaccattccggaaccaattgggccagtcgagtcacaaattcgccaaattctttgtcccgctggcgcacatatggaggcgggatccagaacacatgagccgaacaaaaacgattgcacatttgtttgagtcgaacacattgttccatcatttggtccacagtttctgattgcaccaatgagtcgcgtccgacacaaatcaaaacagcttgcacattactggacaaaacacaatcgctcaaagctctgatgaccatcggcaaaggcccacgttcaacaccaacaaagtgcgtttggtcacgcatttcggccaaaagttggtggcaggacgaatcaccgacaagaacgcgaggtgtgtcgataaaaatggcggcattgtgaatcagtttggcacggactctttcaagaacaagccccgtattgtcgaagagtgttgtccatcccgtcttttctgattccgtcaacttttcgagcgccggagggacagccatctgaattgttaatgagttttccattttctttccattattaatgaccgtaattgtcgaaaagccagaattggctaatatttctctggccaaaacgcaattttttgcccatatgtgccaaatgtcctccatttgcgctacagttggaaatgtgccacttttgacattgtctctccgtcctccttcgtacaaaatcaattcaaatccaggatcggatttgacgaccaagcggaccaattcttgagctgcggatgctgagactgctgagccagaacggaacaaaaatgccgaaaggagtgcttggagcggagttttaacgacagtttggcccatttcggatgatgtctcgagaactgggtcgagatccacgcacttgacctttgagcatatttcatgtccaaggccatcgcaaatcgaagaccatgtgagcgcgtagctttcgtctttgtctaactccatcgccccgtctaaaaattcaattgtccctaattgactatttgaattcccttcttcaatttccaattttttgggtccgattcggtcatttttctttttcgtccaacttttgggtgcaatcaaagcatttagaacatttctatacatatttttccctcttggaagggtagaaatattcggcaattctggtggtactctaattaggcgttcaatcgggactaaaattggttcagctcttttatcaacaggtacaactttggcggatgatttactgatctcaacaattttataaggtccaaaattgttccacaataattttttatggggagagcgagcgttcgaacccggaaatagcaccatgcagcggtctcctttactaaatttgttttcagtaacatttgggcgcttatcgtagtactttttcgacttttccctagcaatttccgaatttttcacggctatgcttattatgtcctttaagttttcacgaaaaagctgaatataggtttcctcatcaattgtgtaattggggttcgtttgccaattaacgtcctgttcccctggaaaatttgccggctttccgaaaagcaattgatacggtgaaaagcctgtcacctccgatggcgttgtattataacaaaacacaataaacggaagtctttcgtcccaactccaatttgaaccggttgattttctcagcatatttaatatggtctgatttgcgcgttccgttactccgttagcctgtggatcgtaaccggacgttacagttttttcaacaccaagcaattttgagatttccgccaaagtttcattcacaaattcaccccctctatcgctatggagacgtttcggagtgccaaatacgagaataaattcgtttacaaatgcgcgcgcgacagtttcactgtttttgttggttaggggaacagcaatgagatatttagtgaagtgatcaatggccacaagcacataacggttttctgactctgatggtccaatggaaagtatatcaagacacactaattctagtggctctaaagtcttcactatttgcatcggtggctcatttttccgaggcttacgggaatgggcacaaatccgacagctcaatgcgaattttaagcagtcattcatcatgtttggccagaaatataattcacaaagttgtctccacaacttttttccgcttaaatgccctgcgcattttccttcgtgccttcttttgatcagttcttttctgtatttttcaggcacgaacaaacgaaaggaccctgtcttttggtcaacgaaatacaaaagttgttcaatcagagcaaaattattgattttgtccattaaactttgtgcctcgttaatgctttgtggagtttctcttttctcgaaaaactcataaatgccttttaactcactgcttttggtctgttcaacccactcttttcggtccagtttctcaatgtcagcatttgtcttaatttctttgatagacaattttttgataacaactacctcagacggacaatcatctaacaaattttccattttttctgtgtctgactgttttccaactcgagatagaaggtcagcaaccacgttctgcttccctggctgatattcaacagataattggtaacgagcgttcacttccatcagccatcgatcgactcttgcatttcccgtttcctttttacttcgaaacatgggaattaatgctttatgatcggtgatcacccggcatggaatacccgtaatgaattgtgaaaattttcgagttccaaaacggattgccagtgcttcgagttcagtaggacagtatttactctcatatttattgcattggcgagaagcaaagtatatcgggcgaacatttttaagttcgtccggctgacagagaactgctgagattccaaatttactggcatccgtcaaaatgataaatcgcctcaacgcattttccgcagctactttaaagtccggaaaatacaacacaacatcttctaacacttttcttttcaaaaaattaacaattttctgttctttttcgcccattacaaaaggtgtattttctttaatgagatggaagagtggcgcagccaaagatccaaatccgtaaatgaatttacggtagtatgtcatgaatccaagaaatgactgcaattgtttttttgaggaaggaagtggaagttcaagaattggacgaattttatccgcgtccatttttatccccatttgttgttaggatat

SEQ ID NO: 1462 - DNA, 4149 bp, Heterodera glycines
ttttgaaaatacccgcccatttttcatccacgtttttcctgttgaacctctcaccctcgagctccagtgtctgttgcgactcagcgatctcatcatacaaatcattcatttcatcatcagttgtcgccccacaaaaatgcctatgcgccttccgaactttttcagatgttggctcagactcaaaaatgacccaatctccaatcacttcatccatctcagaaaattgtcgtgaccatttgcacaaatatgcatatgcgtcctcgtaaatttgctgaaaaatcaaagctaaacaaatatttaatgaaaaatcaccttaaaggcggctcttaatttgtcttttttggatggatcactccagccgacaacaattgaatccgcccacctcttcagttgactcagacgggacgcgaccgaaggcggacgacaaccaaagcggaagccggtgacaacgacgacgacgacgacggtgaagtcgttgacgacttcttcaccgtggtcggtgtctgggagcgggccggctcccggtcgcgtgccacgcagaccgagaccatccaagtgcgcttccacaactgggagcgggcgcggcgccccgacctactgctcgcacgctgcatcgcccgtctgatggctcgcgtgctggacgggcgtgcggagccgctccgcgtcgggctgtccgtacagccgcccggctgggacaactgcttccacgtgccgatgcgcccaccacagcagaacagtgcgcacgcgctggcggccgccctcgaaacattcgcgaagcagtacgacgagctcgacctgttctccgccgacgtctgcttcaaagtgtcggcggtttgggccttgcccggtgagctcgtcctccgcatcccccacccctgtccctcgacaaagtttgacccctccccccaccgtttagccgcgcgcgtggagggcgcatgtgccgaggacgagcagcgcgcacgtggcactgtccgctgccaatcctttttgccggttgtgaacggggcgggcggcgaccgctggtgcatggcacgcgccatcgtgctggggctggcccagcggcgcatctgcgtactggagcagcgcaacgtggtccacttccgcgccttctgtctggcgcagcgtggcgaagcgggcgcgcccgaggcacgtcgcctgttggaggacgcaacggtgccgctggaccgcccaacgtacggggctgccgaggcgcaacgagtccagcgctggctggacgccagcctaggcgcccaccaagtgcggctggtaatcttcgcccgcgagctggcctaccgcgtggcgtggaagggcgcgcggctggcacgctttaacctgtgcttggtggcgcaggacggccactacgggtacatacagtgcccggagcagctattccatgtttgtcaatgtccctttacttgtgaaattattttaaatatgggaagcttttaggcgcgccagtactgtgtggactgcaagcagccggtggaccggcgcacgcacccgcaaggctgccgggcgctgtgcccccagtgtcttcgctttggctggggcgtccctgtgcgcgggagccgggccgcgctccgtcgcgctgcgccgactgtctgttcgtgttcgagaacgcggactgcttcgaggcgcaccggcgccgggtggacccgccgccgccgcctggctggcaacacgaccgtcgtcgcggcagaccccaccgtccgatgtgtgaggagcggcgcgtgtgcgcccgctgtcgtcaggtggtgtggacccgtcacggcgcgcacgcgtgcgccctcaacaacaatgttggccgacagcaagcagcacaacaacaacaacagtgcgaccgatgcttcgggattcacgacgcgcagtggaccccccacttcatccagccgaagcgggcgcagtgtcagctgatcgtcaacgacgcggtgcggccacccgtcccggcggaaggcctcgacggcgacaacgacgacgacgacgacgacgatgataacgatggcgatgctgacgatgtcgacgacaacgacgacggtggtgatgcggaacagaatcgacaacgtcgacgacggcgcccgctgcgctttctgttctgggatgtggagtgtgcccaagtggcggacgaaaatgaagagggggacgagggggtgccggcgcgagtgctcaaacatgtgccgctgctggtgtgcgcggaggtgatctgtgagcggtgtgtggccgcgggcgtggacttggagcgcgagccggaccgacgggcgcctggctgttgctgcggcggtgcggcttggcgagacggacaacaccgccagtggttgatgcgtgcgcgcgaggacgcgttcagcgacgacgacgacgacaacgcggacggggggcggcgatggcggcggccaaacccgcgccgcttgcgtttcttccacgacgcggcgaccgggcgttcgccgatggcacagtttgccgattttgtgctccacgacgggcccgtgaatgtgcgcaccgtgatgctggcccacaacggggtacgggggtgtacaaaagcggagttgaagaaaagctaccatctacgctttgtaggggcggtacgatgtgcatctgctgatggaggagctccagcggcgcggagtgcgcccccggcggctggtcgccaccgggctgcgcgtctacacgctggagctgggcggacgaaatcagcgcagcgtggtcgccaaggactcgctgaactttttcggctgtgccctgtccaagctgccggccatgttcgggctggacggcgtgccggacaagccgttcttcccctacaactacatccgggccgaaaacatggatgtggcgcatgtgggactgccgccggctgccgactacgacccggaccggatgcgcccggcggagcgcgacgcgttccagcgctggcacgcggcggagcaacagcgtcgacccaaccgactgttcgtgctgcgccgggagctgctccgctactgtgccaacgacgtgcgcattctgcggcgcgcctgtctgcgcttccgccacgtggtcggcgagctgtcgggcggtgtggagccgttcctggccgcctccaccatcgccgggctggcgctggccatctaccggcaacaacatctgccccgtgatctgatggtgcacacgccggagggcggcttcctgcgcggacgacgcgcttccgccgcctcgcgccacttcttcgcgctgctggagagactgcgcccgcaatggcgcggtcgactgcgcaccgcccgctggtccatcggcgaagcgtgcgtggaggacgacggctaccggctggacgcgctgctctaccgcccggtgccgctgcgcccgctcgtcatcgagttcaacgggtgcttctttcacggtaaggaagggggggggctccttttcctgcactttttccatttgcctcgtccaaggttgccccgagtgctacccgaggcgccatcaagtgttggcgggcggccaaaccgccgagtcgctgtgtgccaggacacggcagcgtgcctgggagctggagcagcaccacggcttcgcggtgcgcacggtgtgggagtgcgccttccagcggtggctgcgccgccagcccacccgagtgcggcgcctgtacacggatgtgtgccgggcggtgcccggcccgatggacctgcgccgggacgcgctgttcggcggccgagtggagccgttcgcgctccactacacgtgcacagagcgagaggaaattgacgcattggacattgtaagtgatggggcggggggggggggggggtgttgccctgtctaaacctcacaactctcccccgcgtgtaaaggtgtcccgttcgtgatgaagtaccgcgccttccctgtgggtctgcggcgggtgctcagcgcagagcgagcttgaccgcgacgcgggggtgaggttgccgtggacgagcgcggagcgagaaccccttccgcggcttcctccactgccgcgtgctgccgccccggcccgccgagctgggcgaccgccacgccctgttgccctaccggacgcgcacggggcggctgacttttccgctctgcgccgcgtgcgccgagtgggccaacgtggacaagaaggtgcagcgccgccatcgaaagatgccccgctgtcgacaccgggcggcgcaacgcgcctgg

SEQ ID NO: 1463 - DNA, 2203 bp, Heterodera glycines
actccttccccgcttgtataggtgtcgctctacccgttcgtgatgaagtaccgcgccttccccgtgggtctgccccgggtgctcagcgccgagcagctcgaccgtgtgcggttgccgtggacgagtgtggagcagaatccctaccgcggcttcttccactgccgcgtgctgccgcctcggcccgccgagcttggcgagcgccacgccctgttgccctaccggacgcgcacggggcggctgacttttccgctgtgcgccgcgtgcgccgagtgggccaacgcggacaagaaggtgcagcgccagcaccgcccggtgccccgctgtcgacaccgggcggcgcaacgtgcctggacgcacgcctacaccgatgtggagctgaacgcggcgctacagctcggctacagggtgctggcgctgtacgaagtgtggcactacgaccgctgggcgagcctggaggcgggcaacagcctgttcgccggctacgtcgacacgatgctccggctgaaggtggaggcgagcgggtggccggccgactgccagacggtggagcagcgcgcgcgctacgttgcgcgctacgcggaccgggagggcatccgactcgaggcgggccgcgtgcagccgaacccggggctgcgcgcggtcgccaaggcattgctgaactccctgtggggcaagctggcccagcgcgcggagcgggacgacgtgtgctacacgggcagcgcgcgcgagttccacgagctgttgggcgacccgcgccaagatgtggtcgactttgtccacctcaacgagcagctggaccggtgcgtggtgcggcgccggtggccctttgtgcgcgcgccggacaccaacaacttggcggtcgcctgcttcgtcaccgcgcacgcccgcctccatctgcacgggcggctggaggaggtgcggttggcgggcggccgcatgctgtactgcgacaccgactccgtgtactttgtacgcgcgcggcgaccacccggcccgcaacaacaccagttccttcgatccgagggcgacgcgttcgggcagctgatgcgcgagtggcccggccggcgcattgtccaattcttcagcgccggccctaagaactacggtttccggcaccggtgcgccgcgagcggcggggacgaacgtgcggagcgcaaggtgcgcgggctggagctcacctacaccgccagccaactgctcccgttcgagcgcatgcgtcagctggtgctcaacttcttcggccggtgagcacgagggggtgggtgggataacaatggaatgtgtgtgtgtgtatgctacccccgagcaggatgcctgacgcggagcagcgagtgcccgtcccctgcacccgcttcgtgcgtacgaagcgtgccgaggtgttcacgcgccgcggcaccaagctgtaccagcccgtgtacaccaaagggctggtcgatgcgcttgacgagagggaggctggcggcggcgccggaaatgcctacttcaccagaccgtttggctggtacgacgacgacgacgacgacgacgacgacgctgaccgtgacgatgctgaggaggaggaagccgaagatggggaactctcggacgaaagcgacactgatgatgatgatgatgatgttgattttttggtacttggataattttttaaatttatgcgcaaaaatataagtgaaagtgtggtcgcactttatgggggaggggggtgggggagtttcgactatcgcctgtaagtgcttctgttgaccatcgtctcgatgttctgtaaggcctcgtcgatgtgctcctctctccgtacaccggtcacaatcagctggccgttgacaaacagcagaaaagtgacggcgatcggcggagccacgctctgcggttgttgttgttgtcctcgcaaacgtgactctgaaagtgccatgctgagcgtgcaacgtagcgctgggaaggcacagaagtccagacggcagctgcgtacgccgacaaattgggtgtcggcgagaacattgtcgtcgtggttttggtcaattgccgagtgtcggctcatcaacgagttgtacaaacgttcaatgtgcactcggaagggcaagcgtacgctgctcaccagattccgcactctcacttcccctatgcgtaaggctcgtacagcggctgagagtccagccccacggagcgccgccccaacccggtggcgcacccgatgggccatcacgtt

SEQ ID NO: 1464 - DNA, 5022 bp, Heterodera glycines
tcgtttctcattgtttagacatttctccgtaccatcacttccgccagctacaaaattcaatttaaaatacggcgttaattgtgccatttgaactggtgaacgaacaaacgcacgaaaagctgacactaaagaaagcaaaggaaagtcaatgggtcatccgatggataattaagcgatgcccaattagagagacggcggcgattaattgggaatacaaaaattgcgaggatttgaacaaaatcatcttttatttgtgtggtgaccataattgccttgggtgagcagctcggcaattgccattgctttaacgaattacaaattttgcacatattttaggccattgcgccctccaccggtagacgaagaagcggatcaaagcaactcaaaagctcttttgagtcccgggccgagccatcagtgaaaaaagtcaatgcgatactattgtttcatgagcaatcaggggcagtctcattgatttttggttaatttatcgatataattttgattcgacgagattggccacattaaacggcgcctcacccgatgggccatcacgttgactgtcgagcaaagaccgcacgcgggagcgcgcacacctgtcatgacgacacgtccgctgcgaaacagcagagctgtggccactccattgggctcaacggcgtcgtcaccgctgttgtagcctctaatgcgtaacacgatggcagggaagcgtcgcggcgcgtactccgtacagatgccatgcgttgccatcgcacggaattctgtgtgcgagaaagcagttggccgattgttttggcaaaatgtaaatgtgaccgtactgtttcggatagtattcaacatctacaaatccatgggcttgcaaatttatttcaaaaaaagtgcacaaaaactataacagcacaataagttacgtgatcacgcgcgcaaatctacaatgaccatgtctctcaaaaagctagttgttagcgcatcgacagcaacagcggcaacaatgtcgttccggcattgccatcgactttgtcggagccacgtcgccggattcacgacggtatggctcttcttgcttcaccgtctcctgtttggcgcgcttcgtacgctccagcacgacatggacgagctccaggctgaaggcgtttacgctcacttcccccatttttgcgtaccccccgcttacggatagtaggaggcgtgcgtgccgcccccgaactcgatcatgcacggcatgtacgggtgcttcagctttagcccgtgtttggcgaagaagtattgtcgaacctggacagaaggccgcaccattattggtctacacagtcatcgaattacggtaagctccagatagccaccgcaggcgaacgtccggttggcgttctgcacgctgaggtcgtgacagtggagcgcaatgttacgctccgccggtttcagatgcgcggtatgaagtcggcagtgttgttgcaggtgcgacaccatacgctgtcgcgcgtggacactgtggaagaggagttgaagctccttcattgaacagtcgttgaacgcgcacaggtagttgagcagcggcattcgaacaggctacaaacagtagggggggggggtagaaaattagctggcctccacctacctcctcttcctctcccccgccgagcagttttgcgccttcgcttccaccgccaccgcccgtaccgttcgtcatgtcactgtgctcactggagcgctgctccacccctttaacagtgttggaagagtcatccacaacggttgccgtcgtagccgagggggagtctgtggcgacgggggtgtcttcaatgtcctcatcctcctcctcctcctcctcctccccatcatcggattcgatgaacagcagtgtgccgtggccgccgctgccctcttcagcaccgtccttctcggaggagggggcttctttttccagtctaaactcggcggtggtaggtgtggtgacagtagctgtgtcactgtggaccaactttcctgtcccgttttcctcctcttcgtactccattgagcccacagcagtgcctgtcgtctgagccgttggtcgcagaatccaggcgacagttccgaatgaatccattttgggggtgggggtttagtagaatggaggaagaaattttttatctacatatttatatatatatatgtgtgtgtgtgtgtgcaaatacagagggacgcaaaaaaccgaagaagggaaaatgttcttcaagcacccgttcaccatgtgcgtcgccggatgcaccggtagcgggaaatcgcagtgggtggaccgccttctttctcacattgacctgatggtcagtgaaggccctatcactggcgtgctctactgttatggggaagtgaacgacaatgtgctccggctacaacgtatggagaacaccgccaccacttcaagtgacagcaacaccacggagggaaaacattcgatcagaatgtgccatggagcgcccgaggagagggatgtggagcgggaagcacgcgctacgggcggacggctcctgttggtgctggacgacctgatgtccggcggtctacgctgcagctttctggacacggtgttcacccgtggctcccacaactggggcgtcagcgtggtgctcatcacgcagcatctgttcactcgtgagcttcgtatagcgcgcaacaactgtcactacatggtgttgatgcggaacccggccggcgcacttcagatccgcaacctcggcgcacaactgtttccgggcggggcgctacgctacttcttggaagcgtacgaggacgcaacggccgaaccgtttggctacctgttggtcgacatgcacccaaccacggagcaacagttgcgcctgaaaacgcatatatacccgggggaaatgtgcgtggtgtacatgccacgagcgcgcgcgaattttaatgcaaacgcttagcgcaattagcaaacagcagtcgacaccgaaaaaaattcaaaggggcggagccaacaacaacaacacattgaagaagaggaccgaagggtctggcgaggaaagacgacccagcagccgcaagctcgccccttctcgccccccagtgctgagcgaacacgtgaggcgccacattgatttcttccaacaactgaaggcagcacgcggatcgcctccccgttgccaagcgctggtcgccggagccagcagcgagcagcttctctgccttgtggagagtgcactgaacatcttacgcgcgcgtgtgcccatccaacggcgtcatctggcccgcctcagacagcgtgcgagcgacgtccgcacactgagcagggtgcgtagcacacgctccgcccgtcgccttctgctcaacgcccacgcaccgtcaacagcgcaaactggtcgtggcataccgcctctggtcgggttgctcgccagcgtgctggtgcccgtgctcgtccaacgcgtattcgagacaaccagcagtagtagctgaaaggcacccacacgcacgcttgcccgcgaagaaacaatgacgttgaagcacactgtacgcatgctactcatccccgaggatgtttatcgacgtctgatggacaaccccagtgcagcggcggcgacgtcttctaccacgtgcatgaacaagttgcccacgcccgcaactcccattgagcacacggcacgcaaaatggtggcggcatcgagcaagcacacgaacgacgacgaacgcctcatccactaccaacaggagttcaaacgctaccagaaattgctggaagaggaggcggaacgaccgctcaacgtacagctatcgcaacggacaacaaacgcactgcgtgacactgtgctgcagaaggcttcgccggcaacagcgacgccgccgccagctcgcccccaacggaccacacctctgtccagacgacggggcttacagcatcaaaaccaagcgccgagcgcatcttcctcttcttcgacaaggccaacaaaaagtagcagcagtaacgagcaacaacaaccgctcccccagcagactgctgctccacaaaaaattggcgatctgcctaagcaagctgagccgcgtatacatgccgcgatggcgtacgcgcaacagaacccaggcttgcttggcgtcggcggtgaagacggtcagcaaattttgcaccttgcccagggcgcttatcgccccatccggggcagcaaccttgacacgctgctccgctaccactttgtgggtcgtcatcagcagcagcagcagccgcggtcctccactaccacccccaccgccagtgtcgctaaggcaccaccgggctacaaaaccttcgtcaacaatgcgcgtgacgatcttcaaatgtggcgtctgctgtttccggatgaaagggcggcggcggcgggcagtgattcagcgtcaacagtgggcggacaacctcggcgccaccaacctctgcgcggacaaaagaaaactggcgcgggccgcctactacagcctaatcatcatgcacataaatcggttcaaaaaagtgcgacgagcaagaggaagcccaacactgtggagcattccactgccaaacgttttaagcctcaattatggtgattggaagcaacgccgtccgctcactgatggtggaaagtcttttggacccgatttacaaggacgaacggtcgccagcttgcttcaccagcgtagagcccctgctgcgggaggcgaagcgccggcacccggacgcccgtcttacgcgcgcggagatcagccgctacttggcgggccaacgtgtctacaccctgcaccgacaagtgcgacgacgcttccgccgtctgccgactctggcctccggtctacacaccgactggcaggccgacctggccgatttccaacgtctccgcgcgcaaaaccgcgggtacgcctacctgttggtgtgcatagacacgctgagcaggcaggtgtatgtgcagccggtcaagagcaagcgctcggacgacatgatcgcagcgctcaagcgcacctttgcccgctgtggctacacgccgtggcaaatgttgacggacaagggccgcgagttcaccgcctccgctg

SEQ ID NO: 1465 - DNA, 1403 bp, Heterodera glycines
gtcggggacaattgtactgaacgaacatgaggaggatttttagtcgatcagggcattgcggacgcaacagcaacaccaccatcacaatcattctggcattatatcacctccattcggtgccgtcgatgaattcggcaccgaatgccatgccgagaaggaagacgacggcgaggaggaggagcgggaggaacagcacggcacgcaccacccacaaatagaacgacagcaccagcagcagaaagtaatcgtagtgaacaagtacatggcgaacagtaggcgtggcaacaatgccaacaccaccaacagcaggtggggtaattaaggagcaattaacgcaaataataggtaaaaagtcggaacatttaaacttacgcgcccgactattaaagtgagttaatcaacccctaattaaatcattaatatctttaattcgttttaattgcctttattaaatctcttgaattgttttatttgtttttctcaccccgttttacctcaaatggaaactctctctttctgttcatccattaccgatccgtcaaatgcatttgatcatattacaaatcgtcgcctatttcgtcccattttggtgctgttttcatattgttaaaaaatttgttggcccttcccccgccccccggcgttttgtctgtctgtgtttgttttgctgccatttttgatgcaattaggcacataattttacgataatttgttgaatttaatggccgggaaaaacggaaagagagaaatatttttaaaatatgataagaaaaatttaatctaattttgaataagtgaactgctattaaattgattaaccagcttatggaatttatagaaaatgaaattataatcaaacaaattaaataattgctgtattactttaaaattaataaattaatcaatttttaattggtctgagatttttattattttaagtttttaatttacacgaaaaaatcaattggagcaccttcattaatatgtatgtttaatttaattttgcattactaataatgttgaaacaattttgtgttttcatcacttctacagttttatttgcacgtgcaaaataaatgtttccatttttggtaaattagtcaaaccaacaacaaatggtttttttaattgccgatttttgtcccttttacaatagtaattagcctaattttcgcttttcggtgcaaataatttaaaaaaaaacacacaataacaaaaacctttacatacatatgtaacagtttctgctgctgctccgcttattcggttccgttcttccgtcgccgtcgtcacaaaaaattgggcgcacttttagggcgcggtgagcggcgatcactttgaaatcgataccccatggattttgagtgatgacccttttttttgggagaaccaaccgctccccc

SEQ ID NO: 1466 - DNA, 9214 bp, Heterodera glycines
aaaaacatttcctcataattgttgccacttttaaaatcccccgctaatttgtcataatatctcaatcatattgaggctcctacagtgatcaacaatagcttcactattttctgtttcatgaaatgtcgagaatctctatcaccaactgacctaaccataatttccttaatctatcccgaagagacagttggccaattagcgctaatttggccttaaacacctcattaaatgccgaatgttttaagaacggttccgctaatttgtttatttgggagctaccggaaaataaaaaataaaaaaaataagcaggactaaggccggccaaatcggtcttatttttggacaaattaaaattgtagaattagttttggccaagtcagtgccgatgcctttacactaattgctgttccattaattcctgcctaatcccaaattgtgcagcagaatgccaacttcttcctctgcccacggcaccgccgccggcttctgtgccgtcccgtcccccttctgctccgcctcgtcctcgccctaccaaatccgtgacaccgccacttccgctggtactgcagctataccacacctgcaccaaggccaggacggcgaagtgatgtgtgccgtgtgcggcgacgggccggcaaagctgcactacggcgtgttggcatgctacgggtgcaaggcatgtgccgtaattggtggatggaggggcaaattttagtttaaatttttaaattgaaattagaattatgttgaattattcataattaaaattttcttaatttctattcgctaattgccaaaacttgttggtgtttctatttttttaaatttaaatgattgacatattcgccaaatggattcaaaatgtttcaattcaaattaacatttatctatccgatcatatcactgatttaaaaaaaataattagcttgaggaatattctttatattggcccattaaggggaattagttccaaatccaataagctgaccctttttatgtcccaatgcttttcaagggcttcttccgacgcacattgagtggaaaataccattgtaagcgcatttaaaattactgcttaaatcaccttttcaaaatttagatgtctgtcgcttcgacaacgattgcattgttgacaaatgtgagttataaacgatgatgactcatcgcaaatgcaaaaaattgagccaaatttaatcccaagactctcgcaaagacagcattttctggccaaattcgatgaccaattttgacggtgccattttcagtccagcggaacagttgccgatgttgccgtttcaagcggtgcctcgaggtcggcatggacccgaaagcggtacggcctgatcgcgacctgaccggcaaacagcgcgtgccacgaattcgcaaacgagcactagacgaggagctgatcaatcatatggtaatgatccagaacctgggcttcgagagtggtgcattcgattctttggtgcacgagagtgagaatatttcccgagactcggaaccccgaaaaatccaagcctctcgagaccgtcggccatcaataaggtgttccctccggctcaggttcgtctccagggcaatgattggtcccgcaaaatcccggtggaagcccgggtgcttctgatgcaactgctgaacatcgagtccaaagttgccaaaggggacagtgccatggaccgtcggctcaacaccggcgttggcggtatcactcaatcgacggcggcacaacaacaaaatcaacaccaaaatcagcccccgttaccatacgaaccgtcgacagcaacggcatacaatggtggcaaagagacgacaacaagacaacaacagagggaactgtccctgagggaactgttcgagcagaagccgtcgctgaacacacgcagaacggaggtgtgccgatttgggaagggaagaaggaaacatgaagaagcgatggtggatggacaattgcggcgccaagtcaaagcgacactgcggcgcccgacattttcggcaccgatattttatggcgcccccataaataatgcgctaaaccttttaattaacatccttttgctgcgccgcaagtgtcagcaccgcaagcaaatgtcgcatcaccaattggagagggtcccgttattaagtgccgatcgaacccattctttgggcgagagtcggatcattaactaaattaacggctcactgtcttcatcagtgagttattctttcagctggcaatttctgatccgacatgtaactggccagatcactgatttgatttgatttgatttgatttgatttgatttgatttgatttgatttgatttgatttgatttgatttgatttgatcactcttccctcggacctctctgtagctcaatggaagagttgcccattgtattgggggagtcgtgggttcgattcccaaccgaggcctaacattttaccataattattttggaatattttttttatccattctctctctgtacagatgtgctatgagccgtaccgaatggcacaggcggaagaattgccaaaaattgcgcatcgcggtgccatcgcttcggtggattgggtggagtcgttggccgaactgctcgacactgtgcttctggacacgcaagacaaagttgaaaatttaagaaaagccttttttaatttgaattttgtggcagatttcgctggtcaaagcgtgctatgcgccgttgaccattttcaacttttcggcacggactgcgcaaaacacgcgcaacccggacattctgtgcctgtgctcctattcgtatgtgccgcgtaaattgccgcccgattttaacgggtcaaagtgagtgcaattggcataattagcatttgttttgtcataaattgatcattagaaattaattggaagtttatccattatccgaattttttaataatttcccgacttatgccattagtatttcgacatttatgattgatttaccatttttaatggcgatgttagatttattagagtgcgatattctgaaaaatttatggacagaattcgggaaactcggacaattttcaaaaatgctccaatcgggatactgtgaaaattctgccaaaactagagtgcagcgggaccgggaatttttggcaaaaccgggactgggactttgccgggacctgagaagccgggaccgggacctcgatttttcttcgggacgggaccgggaaccgggaccaaccgggaaattttaaaaattcaaaaaaatttaattttaatttatttcaagtgaaaataatacaaaattaaatttttattttgttttttatttaataaaaccccaaagttaaagctaaattaaattaagaaaaattttcaaatcaaattttcttcatttctttcaaacaattaatcattttttgactcaaatgatcgaatattattagaaattcagatttacgtttcacataaattttttcggcgcgctttttccaaaaaacttttggggaagaaaggggtccggcggtgccgttaggcgccgccgggggaaattttgaaaatttgagtgtaatttgttaacagattttcaacaaaaaaggctggttttcgggattaataggctcaacaatttgtacggattttcatttaaaaaaatgataaaaatgtgacaattaaaataaaactatgagtaatcatattttgtcgataggaaacacatgagtatacaaaaagaatattccaaatatgttagtttctgtagagggattgaaccaggggaaagaagaagggaaagtcaaggagactagccactaggccatccgcacaattgtcgtcgatacttttaaagaatatattaatatatttttaaaattttttccttttaactccaattatcttcactaatttttcactcagacccccattcttaccagtgcttgtttttcccggttgccctaccccgggacctcgaatgaccgggaattcccggcccggtcccggtcccgctgcactctagccaaaacccgtcctgttccggatttataagtaccaatctttggcatttgttagcattgatggtctaaattcattttggcattgtgccaaatcacgtttccctttttcagccacctgtccaacaatctgatcgatcgaacactgaacgaattggtcggcccattgcgcaggctggccctccgggaggaggaggtggtgccgctgaaggccatcatcatcctggacccgaacacgcgcaacttgtcgcccgaggcgcaacgtggcgtggccgaactgcgcgaccgtgtgcaggacatgctgttccacgtggtcaaggagttgcacccggtgcacaacgcagcccaacgcttcggcaatctgttgttgctgttgccaacaatttcggtgccaaaatcgaataaatttgcccctattgatttgaaaattcaagggtagaaaaagttaccgtaaaattataatatctctgagtacggtatcgcgaatatacagtatccctcgcccttctcagacactttctggcgtgatgtgcgagaacatgcagttttgccaagtgttcggctggacagacccgttgctgaacgaactgttcgagacggacactgacaaatgccatggcacaggcgccggaggggtcgaactgtccgagtgtttgtttggcggcgcatcctcattcatgtcctacagtccgccggtgctcggctccgtagacgcaacggcgacggcaccgacaactccattttgcaacccggccgacatttcactccatgtacgatcaatggcatggcattccatcaattttatgcaaaaaattctaaaactttatttggttttttttaattattgaaaagtatttgagttttgcccgaaattagaattaaaactgcttttaataaatttccaactgatcaaagcaaagttttgacccgtacaataaaagtgatcgaatttgtaatttggggacatccattggaaaatttttttaaaaatcaatttgaatggggaagaacgaaaaatggcttttaaccgaagcaaaaatgtctgctctttcctataggacagaaattgatcggctgtcacttgcggttaacggtgcaaaaaattccgattagcatagcataagaagggtgacagaacttatacaacaccccaataataaattcgaatctcggagttaaacatttttacggaagcggatttgccttattattctcaacaaaatccaagggaatgccattgattgggaccccaaaatgcgcgtgatccgcttctgcgtctctctctaataatcgatcaaacacgagactgatcttgatcactccaatcaatcacttctttcagtcctcgcccctcttccacgcttcgacttcgtccgcatcagtgccaacttcgcttccccattcgccctcctccgtttccaattcgtcctcgtcaagcagtacacgaaccatggaaccaccgacgatgtttagcaacagcagtaaatgtcccctgcggctatcgtttcggtgtgaaatgagcacacaaacggagacgaccagcggagcagaagcgaccacaatgttagccgatggtagcacattacacggcgatccgagtacatatcaccagcaccatgagcagcaacaggtagagaggcttagcagcaagttcaacatcagcagatttagggggtcagagatttgatcgacccctcccccccccaactaaaaattatttttacccggcggcgtctatcggcaccgccggcccccaaaatttttgcacctaggagatgctctgatcactcactgattagagtgccttcgagttacccattctcccccccccctttccctcaaggaccttgcttcccaatcgtcggaggacgaccgcgccgcaatgctttcgcctctcggcgtgctgttcgacgatgccgagttggactcgttgtgccgtgaccacaacgggcaacaagtgaccttcgacccgttgctgtttgaacatgccgccgctgcggctgtcgccggctcagcgggtgccgtcgtcgacgaccaccaccaaatcattgacgacgacgacctgttcagactgatgcaataagacgaaatccatccagcacaactcgactaaattaccacacggattaattatcatcattatcatattgctaatgatatgttggtcccaattagagttaaaagggtctgggaattctcggcattttcaggaaccgttgggctaactcggtttttgcatctcggaactactctcgagcaactctaattaattaattaattaattaccccttccctatgggagaaattttcccaattgtactaactccaaacaactccgatacggcaccttcaagccgaacaccgggcacgggcccctgtttccgaccggtctcggatgggaggtgagaatgcccgttcccaatggcatcccaatcccaaccctcaattaagtttccaccgattagcaaaatttttcaaatcactctctgttctaaaatatttatgataatgtattattttacaatattttccaaatttatttcacaatggcaaaagcaattcctcccaaaacagtcattagcgcgcttaaataggtttacaatttgaatggatacaacccactagttatttatgccccagtcgttggaatggaaaagggcagccaaaatgccgcctttttcgccaaaactttatttgacttattaattttatttttgtatacattttgaaaattttattgtcttgtttaaatgcacttcttcaatgtttctttgatgtcaaaatttggaattggcccaaaaattatggcatttatttcccatgtccctccatttgacaaaatcaaaaatttaaaaatacgcatatattttaatttattccgatacaaaaatttatggtccaatattgagcaaataaaaaataaaattatttttataaaaatatataaatttcgagagaatgaccaaaaaatagaattaaaacaacacaaaaaagaaattatgatgaagagaaaaatggacaaagaatggattggtgtgttatgttgtgtatactcgtactatcacagaaaaaagaaatgttggcaaaaggaggagagagggaggaattactgtcaagggacgcggaatacggtagtgggaagagggagaatacggtaggcatttgtcaattgaagtgtgtctggcatatatatatataataagcggcaatcaatcagtgttttggggtcccaatggtgctatgacgttagtcaaaaaccatcataatgggcgttagtcaaaaaaccattaaatgaaaatattttttgatataactttgttcaaaagcatctaaatttttaattcttgatatcattcgataggcctaagggttttctattatcctacaaaattccaaaaagtttcgttaagtttcaagaaagttatgactaaaaatgttcaaaaaaacttggttttttgagcttctcaggtcataactttttttaaacttaaagaattttttaaaaattttgtaggataatagaaaacacttagggctatcgaaaaatatcaatattataaaatttgatccattttagacgaaattatgaataattttctgtcaaaaattattcatttgatggtttttgactaacgtcccagcaccgtcccaatcagggcatttaaaatcatttgtttgccaaaacatttaatgtccataaataattagtgccatttttaaagcgcgaacattttgtcccattaatttcagcttattttttgactgattgatcaaaacattgatgattggttgatcatcgacatttcaacaacaacaacaacaacaaaatattataattcacagaattgtgtcagcagaatcgggcgaaaaagtgatcggcagacgacggcgatcaccagtgccatcggcagacgatgatgacgatgacggcttgttgttgttgttggcactttcgttgctgtgccgttgctgctgttgttccgcgatatcatgccgtcgtggtctttgttctgcgccgtcgccctcctcgtccgcttcgttgttgctacccaagttgcggttgccgttattgttgctgctgcttgacgaactttgcaattgtgccgggtgattggcgctggacgacaatggcatcatcaaattgcagctgtacggtgacgcaaaatgctgcaacaacggtgggcccgctactgttgtttgtgttgctggtggtggtactgcttgcgcttgtcgtcgctgttgttgctgttcgcctccgccgccattcccatggacacgctgattttgctgctggtgatgaacatcaccacttttcgtattgctgcttctgctgtcgtcatgaacaactgtttgatgttgtgattttaatattttgggttttcgtaatataatatttttaaaaagataaaatttaattattaaatatggcacggcaccagagtgggacaaagatgaaaaaatttaagaaattcaggcatttgaataaaaatttctgaaagccagaattcgggacccgaaaaaaatcggaagcgaaatcacatatgcgtcattaatcgttaccacgattgtctgtcattgttgtggattggccgcggagcaaagtgagtatttgttcaaagtccgtgttcattttattctgcatttcggcaatattactgtaaaaatggtaattttttgaaaaataataaaattgctttttaaattttcttcaaactgatcaatgattggatgatccgatcaatcaataatcattcttcactgacttctcgatggagtccagcctccgctcgatcacatccaatcgcgcggcagaagattggccacactcatctgccgcgacggacactgacgaatctgtgaattttcagtttatgctaattttaccaatttatttgctacaaattctttgcactaaattgatcccgagaatcagtcgagacccaaaccacccaaaaagtcgagaaattttctaatactcgagagataaaattttttgagactcaaggaccaaggattggcccgaaaatttaaaaaatagtcgtaaaaaacataaatttcttgacgcggaaaaccgagagtctcgaacatattgtgccgtctgtcccattgctcacattgtgccgtcacgtcgtcgttgctgctgctgttcggcattggcggtggcatcaacagaaagcgttggggctgttgctgttgttgtcggtcgttggtttccggccacggcaataacagtgttttgtaaggaaga

SEQ ID NO: 1467 - DNA, 2150 bp, Heterodera glycines
  unsure (1)..(2150): unsure at all n locations
aagcattaaaaagaggtcaagagtcccgaatcctaaaaattgttgccgaaaagtgaggatttattcgagaattgtgtttttcaaaaattgcagcattggttgtttgatgactttgttccagtgcagttgtcggaccgttgccggcactgtccgttcgcgaaatgccgttcagactgcgccgaacactttcataggcgccgaccgcggtcgctgccgacaaatggttttgtgcggcgaatgaggaggaaaatgcgcggacatctgaatgaaggaagtttaggtttcaagttccgactcaagaaaaggctcagttttttggaactcgagactcggattcgagtttcgacttcggagaggtctcgagacaatcgatctcgagtctctgtctcgaagtcatctcggtttcgagtctcgagttcagtaacgttttgggatgattgatctcgagtttctatttcgagattgtcttggatctgagtctcgatttcagagagggcctcggaatgaccgatctcgagtctcctatcgagtagcggtgccgaccttcgttctgttcgcgcgccgaatttgaggaaactcgctgcaacttttggcgctcaaatgtcggccgtcgccgctttgtcagcgtttcgtcgcgcaatttgtaattgatcaccaaattgatgcaaaaattttcggcgaattcgggatacatatcgccaacatcttgaaaaaaatataaaagattaaaaactaaattaaaattttaccgagcaaatcgtcccgcaaaatcacatgcaaatcgcagtaagtcaacgcccggacggaacagttcgccttgccaacctcttcataaatgagtgggttttcgccaaacacatcgtcctttccttaggcattaaaaaataaaatttgccaaaatttaattttaaattattcattcgaatgagtgataataaaaaattttagtaagttagaattttgaaaagaacatatttcacccaccacaaataccaacgaccaaatcatcttttacaatttcaacagagccacgagcaataaaataaagccgtgccaaaatgtcaccgctaaaaccaaaatttaaataaatatttgtcaataaatcattccgaggagagatattgatgaatatgaatatttaataaatttaccgatggactaaagtgtcgccctaaaatgttttgaattcattaatttaaattaatcggtttaaaaaatcaccggaggcgcgtgtgttgtcctaaacattttttaatggttaattaatggattaatttgtttacctgaagcgaattgacaatgcccgcaggcacccgggcgaacaatttgcaaatgccgggcaacagttcagcaaattacggtttaaatctgagcaaaagtaattgaattagtgaaaagataataatttaaaaattttaatttattttaatttaaattttgcgcttgagaaattgtgactttaatttttcgagaaaatattaatgagagataaaatagtaaaataattacggagacaaatgtccgcctgaagacaatcaggaaagcccttcaaaactgtgttcatgtcgatgccatttgtgtacgacctaacaataattaggacaaattaattatttttgaatttttaaaaattggctaaaaataaaatataaaagacaatttaatttggaaaattatatctgaaagggaaggtatttttaaactataaataacaaaaaaaaatgcccgaattttttctgctctacccgaaaagcagattaaattaaaaattttgatgggattatcgaaatagtcacttaaaagaattttgagaactttactataggctattaatcaatcaatataaatatattaattaattaattaattaatcactgaatcaatcaatgaccatgcatgttggaaatactcctccaatcgctggcgcaacggatttgggatttggtagaaacggatgaattcacgtaggcgactgaaaatgaaagaaaaaatttgatcagtgataatcagcagcattctcgatctcgatgttcaataatagtaaaaatttangtttttattaattnaatcagaaattgaaattatgttanggaagaaaaaaaaattaaattaaaaaaaaattnaaagtcggtagtcccccaactgctgtc

SEQ ID NO: 1468 - DNA, 1838 bp, Heterodera glycines
cctcatttcggtgtgataccgtgccgttcccgaatataaccgttgaatgatggcagagactgtaatattttttgtaattaataccacgacattattagccaaattaattattaaaaatgaaaattaataccgtttccgaacaccgaagcgtacattaagctgaaaatggaattaatttgccaccatcgcccgtccgtccgtccgatcaccttccgcagatcatcattattatggtgaatattttctcggaatcggtcgttgcgctgacattgccaaagccaatggaagtgattgtgctcagagtgaagtaaagtgaggtcacgtaacgcgatttcactgcaaaattgacacaaaaaatgcttatgataaagaggaaaaaaacgcgaaatcaaatttaaattttgccaaattttggtcgggctttttatggcaatccaattaaattaaatgcaaacccataaaattggcaaaggcctgtcaaaatcaggcaatgctccgggtattccaaaaaaagtgaatcagtgatcagctgatttgacaatggtttgaccgaattatgtgatcaaaaaatagtttaaatgataaaattattagagtatctgatcaaaggaatttgttgccaaaaaaactttcgaattaatgccacccgaaagaaaggatttgccctcgaaaattaaggcttataacagaattaattaggcttttaacgctggtaaaaaaaaattgtcaaaatttgattctcgacataattctcgacccgttcaacactcacatgacggaccgccgttcgttaaggacccattttgccgatatggttcattcaggtgccgcgcaagctgtacaatgaatgaattaattaattgctgatcatttttactccaaatgatgtcactattttctcacctgatgaagccatgtgatattattctgaaccaataaataattaattaaattttaaaatttattttcgatttatcactttgtgaagcagttcagccgacccaatggcgtaccaaatgcacgcgagccaatgagcaatcagacaaaataaggccatctgtgatcgatcacaaacagtatatcatttaaccaatttatactttccgaaattaggcatttaataaatatggttttatgaattttaaaatattttggctaaccaacttttaaaaattatttaaacaaataatgccaactttaccaataaaagtaacacctgttgaatgggaggaaaataaattaaccaaatttcatttaatttgatgttgtcactcactgcagctccatattcggagtatctgtccaattttcgtgccacctttaaaaaattttaaaattttattttatggattataatttgttttgtttacccggactaagcgaagaaggcgagcagtttttaagagtccaattaaagttgtcgtctaaattggggacgataaaaaagagtttataaacatttccgctgatcagtccccggctctgatcactttttgctgattaattttatttgtgaccaattttggcccttatttgttagtgaactatgatatctcttttttacaatttaatttagaagttaaaaaattgacacctcatcactgtcggtttcaacaagtaacaaatctgttaaaaaattttaaaataataatgaaaattatggccaaaacactcaccaaatggcacagctgcaatcatctgaaaatggcaaaattagtgccttttaagcagactcaaaatacaccgaagaataataaattggaaaatttggaaattatttatttaattaaaaaataaatattaatttgcctttaacaaagtaatgtcttaattaaatt

SEQ ID NO: 1469 - DNA, 1078 bp, Heterodera glycines
acgccgctgcgtaaggagtgaaaattgccgtgtaaagcaccacaaacaaaatcagccaatcccaaacacgctaattaagggagggggggagcaattaaattttttaatttaaaaaatattaattacctttgaatggggagtagtggatgattctgcaaaataaataaatggatgcattataagcaacaaaaaaaaaaacaaatgttttgcatttttaggcatataaatgacgcaaaaattacagattaattatggcactatgggcatggcgcagggattcacaaaatggcaattaaatgagtgattttggaaatgcataattaccctaattacggactacggttacagggataaaggaatatgccaaatgacatcaactctaatcagtagtaccacacttacgtgcaatgattcaatcgacttggctgaagtttgtactgaaaatggaaaattatagacatacctaattaggtaattaaaaaaatataatttttagctaatattaattaattaattattcacctcaggtagcacgtctgcgccaagcgacagaacctgaattaaaggaaggaaatatgagataattcgataagcaaatgccattattacgttttggctcatttttgcccagtaaaaaaacctgcgggtcccgtgggagtaccgcccccgctgacctctaatttggtttaattgtcataattaactcctcataattatataaagaacaccgactcgaacctttcttttatcaacacaagcattaattaaagtaataaaattaaataaagaattaatataatccgattttttcgtgtccgtttagacgaacaaattgcgcgaccaattggcgctttaaaatcagagacacccaccgaaagctctgcggaggatggcccggcaatggaaaatcggtgtgccgattttttatgcgccggcgccctttggcgggccaaccgatccctttttggccttattatcacagttttttgcttcatatgtaattcatcagcagaaacaacaaaaaatgaagggggggggcaaaaaagtggggggaaagaaagaaagaaaaagttgaaaa

SEQ ID NO: 1470 - DNA, 1619 bp, Heterodera glycines
  unsure (1)..(1619): unsure at all n locations
aggcgagggtttttcatttttttctgtagccttatttttttttttaaaaaacttcaaaatcgtatattaaattaggggtactgttctgggtatttgggcaaataccgggtcagggtattgccgggtacagaaagcccggtcagagtcctagtttttaaaccgagtccaagtcatgaaaaatccaaacaaaaatctttaaaattttttcatgaaaattaaaaaatattttcatgaaatatatttattttagaaacaaactttattatttgtccattttttccaccttttttttgcggtgcgttttttaaaacttcggggacagttggggtcgggcggtgccggtaggcgccgccgaaaaaattttgaaaattgtcttcggatttgttaacagattttattcaaaaaatgaccaaaacttgttttttaaattttttgtttttaagtcgctttttttgtggcgctgtttttccaaaaaaaaattttttggaacattgggtgcggggtccggcggtgccgaatcggcaccgccgataggcgccgccggaaaaattctaaaattttgagtgtaatatattaacagaacttgtcaaaaaatgatcaaagttttggttaaatttgcagttttaggctgtttaaaaaaagaaaaaataataatttttaaattgaaatattttttattaattaaaatttcaattgaaaataatttaaagaaattatttaaaaaattctgtaccgttggggaattgaacccaagagaaaaataatgaaaggcagaaggtttagccagcagaccatatttgaattggagctatccaaaaatagagaaaacattaaggaaggaaagaaagagatttaagatttttttttcgcgtaaatttgaaaatttttctggctgctcaaaagttcaatctttaggggtgtattttcaactctcgcctctcgtcccaaaaaacgagaggcgagagacgagaggcgagagtaccaaaaatggcgagagttggcgagaggcgagagttgtcccacccctggtgcgtaccgtccacaaggcgaataagtgatgtcatagcaattgacctcgtcgccaacaatgtcgccaaagcgagaaattggaagccaaatggagtcctgtgatggcaaacaaacattttatggagtgaatgaagcgcaaatgaaaaagggttacccaaacgggggcagttcattccttacccgaaaatttttttgtaaaaattttaatttcagcgtatttttttagaaattttttgaaaaaaacttaataattcaacataaaatttgaaaaaatcagtgaaaaatcttagtacaccctaccgaatctgagtaggaccatctgaccaccgtttggttggcgccagacgaaagcaactccaaacgctttggatgccatgctaaaaatggaacacgtttagcgggaacagttcgtttcctgcccccgcccgtttcgacatgaattttaaccaattcctaatcccaaacttggacaanaacccgaaaattttgaatttgaaaccctgggacagcatggatttaaataatgtggatacgataaacctggtgtcagattagtgtttatcacccagtaaaatgcctactaattttca

SEQ ID NO: 1471 - DNA, 2606 bp, Heterodera glycines
  unsure (1)..(2606): unsure at all n locations
tcctttatttacgctcaaaaacttcgttccttcccgccacagagtccgatgatgtaccaaccgtgccccgacngacctgtgcatgtgatgaaagttcctctccaacagtcccattgtgcacattgcggccaacacttaccaacaattggtggaaccatccgttggttcgtttggcacccaatgggactaacaataaacgttaattttcctttccaatttcagttaaaattgcgcaaaatttggtgttttctctgaaccggtggaatccgaactttgtgcaggtccaaactcagtcgtccggtaccaaagttttgaacgctgccgccgcctcagcgacagacaaatcgaccgcagcggactcgtctgcttcatctacagcaacgtcacaaatttccacctccgaactgccgatcactgtcgacccgctgctcgtggttgccaatccgtcacagaaagtgccgaaacgacaccttggcgaccaattggaccaacggctgacagtgtcatggagcaatttcatttgcactgttgacagcagcttcatcatcgtgtgcggttaccctgactacagtttccgactgattgagacgggcaatggtgaggacggacatttgggcacataaaactcatgttgtatcggcaccttttcagtacaagttcggcaagttgtgctcggtcatggcaacgtggtcacctgtttggcatgttccgagacgaggtgcggtcattgggaggaattaagggacagcagttcgtttagacacattattgtgttcaaaattcgagactttcaccaaggggaaggccagccaatcattttttcttaaaatcctccacccccttacaccgtgctgtttagtcttttcgccgattgttacgtcgcctcgagcagtgccgactgcaccgtggtactttggcacttcagtcaacacttgggcctgctcgtcggcgattacaatttgcctggggaagagccgtcgccacgtgccattttgactggacacgactcggaaatcagtggtgagtgggtgagaaatgcaaacagagatccggcttggattctaccctccccgggtgtaatttttcccctatgttttagcaatttgcgtttcggctgagcatggcattgtcctctacggacggtacccttctgatgcattccacacagggcgacatgctgcacatcatcatctgctcgaacggcaacggaacggacacattggcaccaatcaacgacattctgttcagcagagactgttacattgcggtaagccgtttaaaaagtattaaatagctgggaggggaggggggggggggtacctcccctcgggcgatgaccttttttttcttttcacactattcccgccacactaatatgctcattaacgaaactaattcttttgaattcccatttgttcaggtgtttttccgtgccggtgttgtggcacacatcgaagacctgcgcgatgctcggctgtcccaattggtcatttgcagtggcggataaaaaaatcaacgaatttgagtattaggtattgcacgcggacggatgatttcctggaaaattgggcaccactaaaaattgagtaaatcagtgttttcataattttggtgtccaattttttattgtataattctggataggcatctcaatttgtcctcatttttgttgtctcaccatttgtgtgtttcattttaaacgattgattaaaatcagatttattttttgttaaatatgaatttttgggaaaaccatgacgtaaaacaacataaaataacaattattcctcaattctatgaattttaacaatgcaacaacttgtagaggccatcaaaaaatgatcacttttttctttcttcgtgtcgacggcagaacaaaacctttaaaaagcaaaaataagtaacaaaaaaaaaagtttcttaagacttaaacaaaaaaaaatttttttaagggcggtaaaccacataagtaccgggggggggggcagccctaccgagatttgctaaatattgtatttgaaatttcttacattctccccccccccccccctaacctctttggtttgcaaaatttttatgtcataaaaggtcgtccaaacattgttattgggggagttttcgcggtcaacaatcacgcatctcacatctattaacccagtttcgattccctagactaaatttgagcaaaaaaagcggaatccgaaacacccaaattttcgacttattggattcgagttcgggtaagagatttgttaaaattagtattaaatttgggattagcgacccggaaattccccaaagaactaccttttatgacaaaaaaattaaaaaaaacacaaaaaggtacccctattgttttttcgagggggaggggtaaagtaaaaaaatgtccaaatttcttgaatgctccccccccctaacctatctcggattttccttggagcaatgtcaaccgccgtttggggagcaagcccgacaaaattggcaatttgtttgacttcttccaattcttcgtcatgttgttgttgttggtgttccaccgcggcacaaatgcgccacactttcagcgttttgtcccgtgagcaagtggcaaacaaatgggcgtc

SEQ ID NO: 1472 - DNA, 6100 bp, Heterodera glycines
agaaaaaaaaattttttgatgaagggggggggggggggggaaagggttttttgaggtataacttccttcatagttatcctaattgtaccaatttagtatcatcattcgatagccctaaatgtactccattagtgttcaaattttaaggaatttcatcaacattcgaaaaattttatggccaacaaaccaaataaaatatgttttcccgcatttttggcaataaattttttaaattttgttaatcttttgaaaattgtggtacaatttgagttagaacacgcaattgtttaaaatcatttgtttttgttaaaagcctaggtgttactgaaaacaaaatttgttgaatttccaggaaaaaattgtcgaattcgtgctggtgccttaggcggttatttacgaattgaattacgaatttttggaatttccgtaacaaatttgcgaatttaattacccatggcttttgccaacctgggccggacaaatcgcctcgcacagtttgcacgcaatgcaccgctcctcgccggacgggtagcgccgcagggcgtgttcaccccgaaaacgcgcgctcagcggacccttctcgaacgggtagttaatggtgaccggctccatgaaagtgtggcccacaatggtagcagcacctaaaaattagtggagggaattgaaatttgagaaaattggcactttttggtgaaaatgttggcataatttcgcagcatctcccaactaattttgtaaatttgttaaaaaaatcaaatgctttttcaaaattcatcggcgagcgccgtaccatttcattgaattgtttttggttttcctaaatttcacataaaaattacccgtcacctaataaaaacggtgtcattacaactcgtacaaaaaaaatttctaagaattttcaactaaaacttagaatttttagattaaaaaaatctaaatggattttctagcctataaaaacattttaaaaattctttaaagttttttttactaattttcagctgcttttttaaacttcttaaattatttgaaaatttaagtgttttaagaaatttttctaggctagaaaattcatttagactttttttaatctaaaaattctaagttttagttgaaaatttcttagaatttttcttgtacgagttgccattgacccaaaaaaacaccgaaaattggatcaatttcttggtatcattcaacagccataaaaattctattaatatgcgaaatagcaaaaaaaaatgatggccaaaaatatttggaaagcgggtttttgaagtttttccacagaaataaaaagtgcaagcaaacaaaaaaaaacctttgatcatttcgtgaaaaagcgcgctcgccattgcagcactggtatcgccttgcaaagtgccgtccgaagcggcagtttcgccaacatattctgaacagaggggacaaaatggcattgcgatgatattaagattgcaaaaattgacccaaacccgaggagtaccggggccatccatcaatggtaacaccaaaaaattggcattggaaaatggggggggggggaatttttgtcattgcagaatcccaaaatttgattttttttttttttttataatttgacgaaataatttactttcagactggtacaacctaaggttttttagagaggttataaggcattttttgtcgaaatatatgtagcacaaaccatgcttaaagacccgcaatattttttcctaatttttctgatttcatagttttttagggtatcgttgaaggcggtcgaacccctaaaaatggctgtgaactcactgtaggcatttcgagaaggctgccaaaaagtgttgggtgaaaatttgttcaagaaatgtttgcttgttcgactgatgtgttgcattgtctaaaaatggaacaaagttaagaaaaaaataagacagaaattgccaaaaaaaatgggggagtcgatttacaacaacccaaacgaatgagaaattatgaatatattagggatgtgattgtcaatgaatgtttaatgcgaaaaaagagagaatttggtagttcaatttcaaccgggctattcaggtcaagagcatcgtcataaatgaattaaaatgctaactcgtacaataaaaattttacaaaaatactgtaggtagtctaaatgtaagcaaaacggaccaggcccagcccaagattttgtggactaaaactttttttgtttccaaccaaatcaaacaatcttggcagcattcaaaagcccttcacatgctctattagcagtacaaaaagcaaagattttcaggcctgtaaaagttatttaagaaaaaattccgactttttagcataattttcatgttataacttttctgataatcatctaatgacccaagcaacagtttagcaacatattcaaaacatttttaagatttcgagtgatatgaagtcaaaaatgatggaaaaaacgagaaaaaccaattttaacacaaaaaacaaacaaaggattgattgcctgtaaatcatcaaaaaccatttgagaatgaatgctgaccaatttttttttattgcattgaattgaattgtcaaagtaaaacgaaacaacacaacatttgttatacaaaattttcgttataacatttcgtttactcgtccgattttctccagccgtgtgccttcgctcaaatgatccgttccaatttcactgcatatttgatgtattgtgcgacaatttgacgactctccaacggcttccgctcacgttcaatgccaccattcgcctgcgccatttgtgccgtgttcgcccgcccggcgtccgccgccgatgccgtgccggtcgcagctccgttggattgcatcgaataattttgtttaattagcgtgcgcttaacaaattttttaagtatacaatatttataagttattgtaaaaaatagagaatgaaaaaatagctttggaccaaaagacccaaagaaacgaacagcgaacaggccaagacaaagcattagatattttttttttgatgaaatttatttattatggcataatgttactattgagataaaattcaaaatttcgaatgaattcttgaaatacgatagacatacaaatcaaacaatctaatgccgcagacgcgcaagttttctatgttttttatgttgatggtaaaaattcatgagaaaacaaatactaaataatgaacgacagaattcaactatatagggagagattggcaaataaaactcagcaatttttgccgaaaattggccgacctttccatcaaattcactaatcaatcacaattaaaaactaattccatcataattagtgcgataataaaatgttcatcattcatttccactgttcattgttgttcttcaccggctgaaagggttgccaaattctctttggatttgtaatggcgatgtcctttgttgattgtgtggaattgaaaatgctgaaaattggtgcaattggacacaaataccgtatttcctataatatagcccctccccccttgaattagagccccccctgaaataaagccccccttttgacgggggtcgaaaaatagagcccccggtggttatattataggaaattcggtaaatttaatcaatatgtgtactgctcgagagtatcgcttttgcaattttggaaatttgggcaccgaaaaattggaaaattttaccgtatcgccatattaaggttcaccggttttgctggagcgcgggggagtggattacaaaaaattttaactaacaatcaagggcatagccctaaaatcgttttttgaaggggggggggaaagagtgttaaaaaagttttcctaaatttttcaaaattttacccaaagtattcgcaggtgctgccaaattggtacttttccgttttggggccaaaaattgaattttttttaaaaatcaaccgtgggcccgtagaattgctaaagctacacaccaaaatgatttgtgaggcaaaaatcaaactttggccccaaaacggaaaagtaccgccaaattttctgagaataattattaccaatttgggacaaaaatgccgtaaattgccaaaattgatttcttttacaattttcccgcatttcatttgtgccgtggcactttaataagcagcgatcctgcttaattattaaactaatcaattaatttaatttaattctaattaatttcttaataatttattcacctccgtgtccgatttgtcttcctttttcaatgattcgaccagttcaccggcagggcatggctttaccttattttggaattcctgaaaaacagaaaaaatttttagggaaaattttggaaattcacagaaatttttgccaagaaaattgatacaaatttcaaaatcttaaatgagtagcctccgctaagctctcgactttcatccattccctcgggactcctcccaatcaaaatttagtaattagccctttaattaggtaaactaaattttttgaaaatatttttgcaccgttctgtatccggtgatcatgtccaggctttaccttattttggaattcctgaaaaaatagaaatttttttcgggaaaatttttgaaaattcaaagaaatttgccaagaaaattaagacaatttcaaaatctcaaaggagtagcctccgctaagctctcgactttcatccattcccatcctcctcaggattctcccgatcaaaatttactaattagtcccttaattaggtaaatttaaatttttaaaaacattttgacaccgttctgtatccggtgaccatgtccatgttgccactcaatctgagtgccgtcgacggccgaatttgctgcgggcgttcaatgcgtgtgaaggactcgggcgacacttggaaatggtccgaatacattgtgttcgagtcgaatgtggctacaaattaagggcatttaatgaattaattatgtcggcactttgtcccatttcggcattttgtcttagttggttgttcccattaaatacatcgccccccccccatatggtaatatttcccgcaatctccaatatccccgatcttcacctcgctcatttttccccccgtttcgcccattttacttatctcggctatttgtctaagttttcatccatttgtcgacaatttcgcccatgccccgtttagcatttttctcccatttcggctttatcccccatcttcatctcgttcattagcacgcatttagccatttgtccctccctttctcgcattttcacttaattcggctatttgtctaacttttggcccattgtccccaattttagctcattttcacttatttgggctatctgtcttttggcccatttgtccaccatttcgcccattttttaattcatttcatctattttccatttggcttatttgtccgccattttggtccatttgtcccctctttcgcccatttgtcccccatttcacccatttgtctcacctcccggctccgtgatgctaaactgtgacccgtgcggcaccggcaccattcgctcgtacgcctcctttggcccaaactgttcctgactgtgcgtgtgcgtgccgtactcgcgtgcccagcggtccatgtccaactcgctttgcaacaggttcggctcgctgccgcccacatttctcgccgctcgctcggccgccgtgacgccgctccaagcgtcgctgtcgccgccgctcgccgcagccgccactttcttctcgccaaaatcttctcgtgatacggtggtgtaatactccagcgccggttggccctgtttttgaacggatttcgacagattttttaaggggaattttttgaaaattaccgtattttcataacacaggccccccccccgtaatccgttgcatccaagttatagctcctacatgaagtacagagcacggccaacgcgactggcagtctaagaaaatgatggatggatgcctgtttttttattgagcaattaacaatgattgattgatgatatgagagattgactaaatgatattgaggcgtaaacgccatatattttcttcttttgatttgaatggtactagagaggaaaatttatttgatgtctctagcattttggaccgtttcatgtcttaccacaacgtttttaaagtctctggatttt

SEQ ID NO: 1473 - DNA, 3698 bp, Heterodera glycines
aattaaattattatcgaataagttatttttttacattaagattatttttgttttatgtatcattaaggctaagatttaaggcacttaaaaccgccataattggcaggattatagccccaaaacccccgaaaattatattaaattagaaaattttattggaattataaaaaataaaaaatataatgtttatgtgtcatcttttataaaatttggactattttaaaatttaaattcatttattataactactatacctacctaaattaaagcctggaccaggacaagtctactccctgggtcccggatttaaacggtatttcccgattttttcccatttttgaccgatttcccggttcaaaaccggaattctggtaaaaatgatttttacttgctttttagcttattggtaaaatgtgttttgtccattagtttcttctaatttatattttaaattttgtgattttttttaaatttaaaaatcccattttaaatacaattctaaaaataattttattattttaaatttaaaattaatttttaaactccaaaaatcactgttttcacctcccatgcgccttggtccaggcggaattgggcctccggcgggcggtggcgctgcgcgcgctccgctcgcttctcgccaaactcgtcgcggctgacggtactcgccggcaccaatgcgcccggctcgggcgtcaaaatgtgcgactcgggcggcacgcgccgctcgtaacgctcaacacggccctggtgcggcacaaagtccgtcctgttcactgtgcccagctcgccaacggtgccctcgcgctatatgccgaacagaaaaaacattgttttcgagacgggaaaaattcggctcggccgaaatcgagggagttgagtcaacttttttgaaattatatttgtggccaaatatttatcttttcaatagtcctatcctttcgggatccggagcgtcggggtcaggatataccgtatttcctataatataaccccccccctgaaaggcccgcccccttctgaaataaagcctcacttttgagggagggggggggggttgaaaaataaagccctctggggctctattatagtataacttatgccgaaaatgacctaaattttcggggacggattgagggacccactcttcagaaccattgcgtcttaccgtatactcatttgtaaaacagtattttttctgcacggtcattagcaagataggcctcattatttgagtaaacgatcattagtgtctcattatttattttgcaaaatttaccctaaatatgtccgaatcgctcggcttcttcgcctccgcccgttcggcccgttttggcccaaactcggccctctgatggctctcccgggcaaatgagccgtgccctttcagtatgttggactcagttggccgtgttggctccgtccgttcgccccgaacatgtgaatagtcggcacggttgacggtcgttccctcaatggttccctcatgctaaatgcatttagaacgattaattttttcaaatacattcattggtttcgttggatattaactctaattatgtcaattaactaattagccccaagagattatttgtcaataatatttttcttaatcaatagatctaattattaattcattcactgtcttgataacagggcgcgatttatttacaaaaaaatcccgaaatattctaataaatatttaaggaaaaaataagaaaatatttatgaaaatattgatcaaaaatgagaaacttagagcaacaaaaaacggaaaagctcatgcaattttcggcaacaaaattaattatcgctcaacgccgcaaaaagtgattggggcatatttgtaaattatcagattattgttaaaagttaaaaatatttttgtaaataaaaaactgtttaaatggataaaaaaattcacactttcctgataactaattagtattgataaatcatgcactcactgatcattcacaagaatcaataacttccatttactcatttgatcagtttattgatcactcactgactatattataggcctaatcaattgatagttctccgattgataacgatcaaaacaataattatctggtctattttatccaaatcgaccaatttctcaatttaaatccccaaatcattctgatcacttccaaaacaacaccttccaaatgtccgacggctggggccgttttgcgtcaaatcgatcgccccgttttggctgatagtcggctgatttgcttgtctccgataaaaaagtgccatcgccgcgaaacaaatcggcaccttcctctgttggcactttgcgctgcgcgcgctccacaccttcgcgcgcgacaaattcagtacgatggacgctggtggcatggggctgatttgaatcaaggtccggctgaaaaagacccaactaaaagccgaataactgatcaagcccacctaattaagcctaactttgataagacaaaaacttggccaagaaatgagcaattataaaagccaaatttcgatcattatctcaccaataaacctaataaaccctataatgatggaaatgcaacagagcaaaagagttttattcttgaatatttaattgtttttatgtatgtatatttttttgaaattgtgaataattctatgtagaaaaatttaccctaaaatattcaaaattcaaaaatatgttattaaatataacttaagtttaaaaaatttcaagaccgcgtcatagaaattgactgtctcgacggaatcagcttgaaaattttatttttaaatttctgagatttttttttagtaaaaaaaacaaaatttttttattttttttaaacacggattttaaaaaaacttcctaccaaaaaataaggaaaaaatatcaaaagaaaaatttttttaattagaaaaaacaattatgaatttgagaaaactaaaaattcagttttttttttaaatttctgagttacttgttgaacccacctaggcatcaattattaaaaaatggtacagtgccccggttgtttgtatcgtgttatggaaattgcggcatttttgtggtaccgtaatcactaatgacactcacatcaaacagcggtgccgacgcttcgcggcccctggcccagctgatctcgtgccgttccccccgctttccatcaatggcatagtcacttcggttcaccgacccttcggcacccattgctccctcgcggtgccatagctctaaatttcttagctaatccttgagtgtcaagaccgattctgttcttgattatcattgctattccagacgggaacagaatgtgccggaatttggcacccgtcgcgactgggaaatgcaggagtaatacagtattttttggcaacaaaatacggtagtattatgaactagaaattttgagcgtcaattgacatgggaacaaacttacagtaatccatttacagtaaattaggttttatggtgaagcgggaagcagaatgtcgcgtaaaatgtaaattcaaatttcagtgttcccacaacaccaaattttcggggaatttaatagggatgtgcgagagtctcggttctcggttcccgactcgggaaatttctcgggtttttcgcttcccggtctcgggtttttagtctcggaaaccgagaaatttttacactgttaaggatgactatttcggggggaggaggtcaccagcaaaggggcaaaaga

SEQ ID NO: 1474 - DNA, 999 bp, Heterodera glycines
  unsure (1)..(999): unsure at all n locations
aaaaacattttgggacattttttctatatatttaaaaaaaaaattttttttccaaaagtgcgggaataatattttttcaaactttttttttggattttntattagcaaggggggcctcaattaatctgagtaccggtcattagcgtcncattatttcctggccccaaatntttaccctaaatatgtccgagtcgctcggcttcttcgcctccgctcgttcggcccgttttggcccaaattcggccctctgatggctctcacgtgcaaatgagccccgccctttcagtatgtcggaatctttcggctgcaccgttgcgtaccgttccgcgcgcgcaccggcgccccctctaccgtactcttccgcgttaactccgcgcccctcaaacgccgctccgcccgccccgttgtggcgccaaatctcggagctttcgtgcggcttggcctcaaaacggtcgccttttccctgctggccgtagtcgtcacgccgcctttccagcggctcttcactctgcaaaaaataaaaaaatggtttttttgggaaataatcggcagaaagttgtgatcgggagatgatcaggacccgtggaaatgttcggaatgattgcagcaattaatcgagaccaagtaggattgaggaggtgatcggaaacttcgcccatctctcttttccactttatctctgacattcccagatcacttcgctctttcactcattttctgtttctctctcactctctattactctttttatacatatctgtctctgttcttgaccctctctctctctcttattctcacacattctctctctgaaaacttttgatcgagctaaactgatcggtggacttgcattcggccaaaataacgggatacattcatcctgatcaatttaaatttaatcggatcagtctgatactctcagtgtattttcaaagtgggagactgaaaatttgccgtgacgagttgtgtggttggccnggtgccccaactgaggcccac

SEQ ID NO: 1475 - DNA, 8711 bp, Heterodera glycines
  unsure (1)..(8711): unsure at all n locations
gagaacatttatttattatttatttatttatttattcgttcgnagaaagtggccaaaacgagtaattaataaatgaccatttttctttgctcatattttgttatttgttcgcatttcgcccgccgtttttccattttccctcttttttttatttccaaaatttgtaatttcccaattttcctctcatccccttacaaaaagttaccaaatttaaatacttttgtggcatttattcagtcgtaaaaaattgcaatttcctccgtttgaccttccttctgcttttttttgtttgttttgtcgaaattcgacttttggacggcccaaagtgatcacttcccacgtcactgtgagaagagaagaaaatggaagagaagggaagggaagagcaactttctccggtttaattttacaacaaatggaaattcagcgaacggatgggaaaaagggaaaaaatgggaaaaaagaggggggacgaaataggggacggcggaccaaggcccatttcaaatctattagtgttttcgatcacatgtgtgcaaaattaatttgttgaacacaacaaattgtgaaagaaaaatgccactggggaggccaaaggccattttggggcaaagatttgcgaaatgagcgaaaaagttcctttgaatggaattcgaattgtcagattaagaacggacgaaattgagatgaattcactctcattcgagacaaaaaaagaaagaaacaaacgaacgaacgaacggttaaaaaaatgaaaaaaaaagtctcgaaaatcgagaggaaaagccaaaggaacaggttggggggaccgagacaacgacgaccgtttaattgatgccaaatttaattagtgcctaattaatttttgtttattttccatgtgctactttttattgccactttttatttttattttttccgctaatttccctcaaaatgttcgtctttcccatttttgtgctttgcttctcttttttcctcgccttttacaacttttactacaaacgcagaaaacttcctccaggttaatttttgttattaaatttgccattttcgttaaatttccgccgtttattttaggcccaattccgctgcctttggtcggcaatattttgacactcatccgaaaaaagccgggcgaagacgcatttttggaatggaagcgaaaatacgggccaatttacacttattggctgggagaaatggtagaattaaatagaaaataatttaatttaattaattccttccccttttagcccgtcgtttgtgtcgccgactacaaaaatatcgtcgaagttttccgcaaaggcggcgaagaatttacgcaacgacaaatttttgtggattttacgcacgaattcagaggcacaagccaaacataagcaaagaattttaaagatttaatttgctttaggcaatatttatggcattttcttcataaacggcgacttttggaaaggttttaatttaacttaatttttaattaatttatttaagttaattgactgacattaaaattttattcagaacaacgaaaatttgcgtccacagttttccgtaactttgggctgtacagtaatttaatggagaaaaaagtgagcattgaaaatcgaagtaataaactataaaattttcaattttaaagattttggtcgaactcagccgaatgttcgaacgaatcgaccgcaaattggcaaagagtgaaagcagcgaaatcaatctgatcgaagacgtcgaaatttcaattggatcgatcataaactgtactctctttggctacggttacgacaatgaggcaaaaattcgaatttattttttggttttttatttattttgttttttaggaacgaatcgacgaatttcacgaattgctcgcacttttcgacagcgctttcaaattggcatatgaaaagaatttgggcagtcttttctcaactttgattgtgtgctttccgaattcaacaaaaaatttgccattttttcggtttaattcgaaaatattttaaaaattatttaaatatttcagagagcgatacgaagctctgatggaagtgagcagaaatctgcgcaacttttttatgaaacgcattcaaaaaagagccgaacaaatcgactttaaagtgagtgaaaatgagaaaaaagagaaaatcggagaattcacagagcgacgaatacgacgattttgtggaggcatttttgaaggaaaaggaacgattggacggacagggcattgcgcactcattttcgtaaatggcaattaactaattgagactaattagacaatcagagaaaggaatcccacccaattgacagaatggaccaattgtggaacatttgcatggacatttggattgctggacaagtgagcaaatttaattaaattatagaaatgcgaagtgcatgccatgaaaatgcaatttgactgatgccaaattcggaaatgccttaggaaacgagcagtacaatcatcgcctggggcatggcgcacttgctgaacaatccgaagagtttggcgcgagtgtacgacgaattggacaaagtgatgggcgacgaacggcgactgatcaccgcgggggacaaagcgcggctgccttacacaaacgcaacgataaatgtgacggaaaatgacaaaaataaataaataaatattacagcaaaaatatttaaaaagggaaaggaagcaaaaataaataattaatttaaaatgaaaaaataaaataattattattttatttgtttaagccaaactgtgccattcccttttaggagtttctgcgcatttccaacatgatcgtgcagaatgcctaccgacgtgtattcgtcgacgtgaccattggcaactttcaaattcccaagggcacttgcattttgccacaaatttcggtggttttggccgatgacgaagtaacaaaaagacaaaaaagaatttaaatttaaatcatttaaattttaaaaatttaggtatttgataacccgaaaatgttccgacccgaaagatttttggacgaaaatggcaattttgtgacatgcgaaaaactgattccattttcagttggacggcggtaagaaaatttgaaaaattcaatgaataattaaaattacaataattaaaatttaaaaaaatcattaaataattttattgctttgtatggtttggaattttagaaaatgttttgccgaatcaatggccaaaatggaaattttcttgttcactgcaaatattctcaatcagtacagagtgcgtttaacaaccaaagaaagaatattaaaatttaattgcatttattttcagctttcggttggcaaagttttgccctcaatcaaacgcgaaatgggcataacaattcattgtccgaatttcgagtgccgagttgagaaaagaatagggcatgaattataaattaaaataatgaaaaaacaaatatttaactgtccatttatgttgcttttttgtttttgtttctatttttgttttcatttaataaaacaattaattacccgacaagcgaatttaaactgagacagggcatttgagtcattttcggcacaatgaaaagtgctgtctttagcccgccaatgaatggtcgaagtagaatgatcaattaccggcccaattagcaaattatgcgcaatttgtcatttgggaagaggcgtacaaaagtttctccctccatttggaacaaattaaatatcggaatttgcctttaatttcgctgtgtgtgcgcaacccaaacgaatgttacggccgagtccttaccaatttaatcgatttttattcattgaaaattatttaattaattttatattttaaaaatattcaaatgatgaatgatgcgttgtccgctgaatgtttccctgcaaatgttctgatcaccggcggatgcggcttcatcggctccaattttgtgaatttcgcttttgacagatggccccaagcaaagtgtggcccattttattttcctttaatcattttcaaaaataaaggttcgtaaatttggacaaaatggcaccgggcgcctcggaagaatgcatcgaaaagaaatgtcgaaattcggaccgctatttattcgtaaaaggaaatctgacggaagcgacactcgtccgaaacattttaaccagaaaccgggtcagtttcagctgccgatcacaccgaactgatcagagagagagcgcgcgccacttcactcttttcagatcgacacaattgtccatttcgccgctttgacccacgtggacgaatcgtacgcgaacccaaccgaatacatgcaggaaaatacggtagcgatgaccgtactgctggaagcggcgaaggaccacggacagttggccaaattagtgcacattagcacaggcgcaattacgcaatttgaaatgacaaaaaaacatccattgttttaaaactgcagatgaagtgtatggcgactgtctgaacgccgaagagccgaaaagggagcaaagtccgatggagccgaccaatccgtacgctgtcagcaaagccgcgtgtgaactgctcttgcgcagctattgggtttaaccgaccgttaaaaaccacttttgggggatcattgcttccgtttgattaagcattcctacaaagtgccttatgttatggtccgaatgaacaatgtctatgggccaagacagttcaggaacaaattagtgccaaaatttgtccgattggcaatggaaaagcgaccgtttacattggcaggaggcggaacaccaaaaaggtggaatttagaaaattaataatttgaaatttaatcattttatgctaagaggctggatgtttgttgaggattgcatcgatggcatttgccaggtcacagaaaaagctgcgcttggcacaatgtacaatatcggcacgacacttgaacttagcaattccgagatggcctaccgtatccatcacactgtgaatcgcctaatcggacggtaattttctatgacaaaagttgcgattttcaaaaaacgttcagggaggaagccaaaccaagatttgaatttgtgccggatagaccacacaatgacctctgatattggatagatttcagtaaaattcacagagaattgggatggaagtgccgcattccgtttgaggagggcataacaaaaacagttgcctattacattgaggaatggacaaaggaaggaggagggaagacagaggaggaaaaataaatggaagagaaaggagaaactaaagagggagaaaaagaagaattggaagaggaaaaagaaggggaagaagaaatggaagaggaggaaaaggaggtggaagaggaggaaaaagaagcggaagaggaggaaagagaattcgtaatgggaggaggaaaagacggaataaagttgcacaacagtgacagaacaacataaattgtaaatggcgaaggtgtgaaagttgaagcataagaaaaaagaacactcattcattgccagaaacgaataaagtgatgagataaagcattgatttgtagagttctcaattaattgcctaataaaaaccatcataaccctttaaaggtggcattgggctatcctaaaatttttgtcgtctaaatttttaagaaatgactttgcggttttcaagctgagatttttttgttaaatcatttaattttaatgacaataaatttagaaaacttagtttgccgattgtgagaaaagaattttgtgagtctcttaagattaaaaatgtacttggcaaagtcgaggtcatctgttattttttgtatatttaaaattggcttaatgtcagtttttaaaattaccttcccttttcattagtcccaaagtttggggcctacgggaaacgcatacaaaatgtttttctaaaaccaaatcaaataataagcaatcaaaaaggattttttacgcaatgggtgatcataacccgacgacttcttcagcttcgataattccagacgattcaccggtaaatgtacaaaatcctgaaaattcagatagcatttgattttaaggtcgatgaaaaagatatgccggcaacggaccgcgcgattgaaaaactttttgatggaattgacgcaatttacttcatggaaaacggattcaaagcgattgcgcacgaattggaagtgcgtgccaattggaattcttacaaataaacataaaatttttgcagtagatttagttaaatttagaacaattttagaaactttccgccatttgttccgaattggaaattgacgagttggaaagggaacggtttaagcttaaacggcaaatgcaaattgtgtcgaggaaaatgtcggcgttaatcgtcaaaaattcgctgtctttcaatcgacaagtggaaaattatgaaagtgtccgaacaaatgctgaacatttgttacgaataacgaggcgaatgcgaaggtgcgaagaatgaatccattcggattttctctgcaaaaatgcgccgtattttaagttcgattgaaattgggaagagaaagtgccgtgttttggcctccgttttggcttccgattacaaaagaaggctttgtttggtggtgaaacgcgaattggcactgatcgccacgctgcgcgacagtgagctcaaagcgagacaactcttgcaggcactcactgcttttggcttcgaatcgcagtttaataaacaaatttcagacggatgacatttggccctttttgacggtcgtcgtcggagtgatcgatgctgcccgccattttcaacattactcctccgtaaagtgactcatttcattttaatttttattcttaaaatcattttttggttattttcaatttcgatccatgacttatttctaacaataagtttggaaaattttcttgaaattccaataaaaattcataattttttttcaattgtaggaaaagactcagataaaggttgtgggaaacaaaacaattttaggcaaatttctctgactcttttgggcattttgcggtcgacagaatgccaaatggacgcagcatttgctgaacaaacgaaactgttcaacttggaacgctacgcacttttgaacacggccaatcactttctcgggaacactgaagtcagtgaaaatcatttgaaaaattagttttgattagagcggcgacttcttcaaacaattaattacctcttccttttgcagttggtctctgttaaattgagaaggcatttcgaagggtcgctttgcgatgcgtcgagaatggccattctcgactcgttgacaatgcggacgaaccccgaggggacaacggaacaatcggacgaacgcacaatcgacaatttaccatttgaacaactttgtcaggtaaaagtctaattttggaattaatttaatttatcccacaatttcaaatggatttgtaaatcagtcaaacagttcttgttttttttaaattagcatatccatctgaatgactttctgcgaattctttgcaaaattggctctgttctcgtggaaatattgtgtatttaccacgcaattttgaaatttcacatggacgaggacaaattggcactgaaaaatggacaaaaggacgacacggggggaagggaaagcgaaaacagtgacaaacaggaggagcaatttgcagaagacaatttcgacacgaatccgttgggtggggctttttattattttcatttgcactttaaatcattcaaaaatttaaaaagcaaaaagcgaccccctaattaaaatagttcaaatgaaaggaaattaaagtcatttgaaatcaaaatataaaaaatgcccaaatacatctaattttgcaatttcattgtttttagttgagaaaggcgttatgcaaaagtcgctcattgacaatgccttcgatgtgttcgaatgcgcctcccaaaatttgaattgtcttttggccaatgccgagatgagtgccatcaaattcgaccagttcatcaaagttgttgagttggcggaaaggtcccatattttatcatttttattttgaatttgtaaatttactatcaataattattcaattaattcctcctcatttccatttgctcagattccggaccttcggtcgccaatattttggcaatccgtgccaactcatccgacacactttgatggaccaatcgcgcaaatatattgagcgataccatgccgagaaaatggaggaagttaaaatgtttttggagagcgaaacgttcactctttgcccggtgcccgtccaattcacactgtttgaccttccggtgagaaagaattggtcgtttttaagtcaatgattgacacttttgacggggttttccctaggttttcccaatggattgcattttaaaaaatgcttttcaaatttaggaatttttcttcctcaaagagttgcaacagaaacagcaaaatgatgaacaaacggaggaagagactgaacagaactcagtggagacatttgtccacggcaaatccatccgtttttcggtgtttcgacattcttcggaaatggacacggaaatattcccttattcgcctgaacaattcgacgaaagtgtgaggagaaaggcacaaaaaatggacatgaaaaacttttttgcgaagagaaagcattaaaaaatgattttgaaataaacaaaaaatatggaaaaacgaattcagccccgacgaattggtgacagacgacggataatctgcaaaaatggcgaagtctctcagtgttcgtcgtccgatgacggcactcgaaattccattgaagacgaatcactggcgccgtcg

SEQ ID NO: 1476 - DNA, 3711 bp, Heterodera glycines
aaagcatttgggaattagttaaataaaaatataaagtcacaaattgagatgaaaatggaataagatacaaaaaataaataaaataaattttatcaattaaaaataatcgccaaaattgagatttgatcttatcatttcttgcaaaataataatatttcggagccagaaagaattccaagttggccagcctcaacaattttgaccacagttccttaataattaaatattaaaaaaaatttattataaaatttcataaattgcggtagatttaataataattttaatttgaaatttatttgaataaattttattgaaaaaactcattaaaatagaaaaaataaaatttttttatgggcccacctctaataaaaattttgttgaactcatgaaaaccgcgaggtaaaattttgagagtttgcgccactttgattaaattttctgtgagccgagaactgaacaaatgaataaaaccaattaaattaattatttattattttttgtgtataatttttttttaccgcattagccacatgaaaaacggcgaatgtgaaaagcaatggtaaaatggcatgccactctcatgctgcaagtcattagcttggatcagttggaagccggctttatctgcttcagctaacagttcgctacgggaatggaggggcggcatgccacaggcaaattcaagttcggacagaagtttgctaaaatttaaaatggattaaagaaaaacagaaaaaatattcaaaattaaaagaattaaatttaaaaactcggaaaaaatcagcttaatatgaaaagaagaataaaaaaaatccaaagaaattcttttaaaattaaaagtgatttacaaaatggatttaatattaaaaataaatattcaaaaaatcggtaaaagctttaaaatgacaaaaaaaatgtaagacaataattttaaataaataatttaaattgaaagaaagtttattgaaagaatttatattccctaccaatgtttttcattgctcacatcaaatttgtccgtttttaacaggtcataaattagcaatttgccaccaggtttcatcacacggtccaattccgcaaaaatatggcccaaatttggcatatatttgagtgaatagagcgcaaatgcggcatctttgctttcattttgaatagaaagagctaaattttaaattttatttatgaaaaagtgaattacgaattgtgtcctttaaaaatattttaagtacggtaatgaagtaaggactatagagagaaaaaaaatggtgaagtgcagaacttttagtgcaatcgcccaaaagcaggaagcaattattgtcgatgccaagcgaacgaaagttggcatttccaatgtgaacctaaaaggaaaataattttttaaaataaatttaaatattttatgttgaaaagtatttttagatttgggttaaaatacttcattttcggcaattgttagcccagtaaaatgggctccggtaaatgccaaattctttatgacgtcaccaatgccacagccgatgtccaaacaatgctttcccgggcctaattcaaggctgaattttttgaaaccatttgcaatttaaccaatcattaagcattttcagtttcaatatattgtgtaagaaaatgaattataatttaaaaagattaattttcttcatttaaaaatttaagcatttttaattatggaaactccatagatcccctgctggtgtttatctttatgctgaagaagcatagcttagacaaatcaactgactctagccaaatttggataaaatctgttagaaaagtaaattttaaaaattcatgcattttgcataatttttcaatgtatttttatccaatatttaggcttatactatttaatttaaattttttcaaattcccttaaattaaattgttttcttataacatataaaattttatttttttcaaattccctcaaatattttatataatgcatttttatttatttttcaattccacacctttgcccaatgcgcaaatgcaattgccgcaatgcgacaggcagtgccattgtggacgatttgttgcacaaacatggcgacttttcatccgattgatgttccgggggaagaatgggcggcacaaaatgaaaactgccgcaaaaatactcattgatcacctgaagatgaaaatgaaataaaaattttattaggaaaaaagcgatcaaatattttaaaaaaagattaataaattccaaattaacgaactttctatttaccgaaattgaaagaattatttaattaaagtcatacatttaatctaattagataaaattgattaaagcgccagatttttttaattatttattttgacgaggtaattaagtaataaaatgcttttaataattttttatatttttatttaatttgcctttgacatgacggaataataatgtgcaatgcattcgccataatcaccactgatttgcgcttcagcataaagacgactatgctcattgacaaatgctaccttaagaattaaaaaaaatttataaaataaattttaattcttattcgaattcgaattctttttcttaatttaaagaaaaatgttgaaaggggaatctaagttaaatcttaggttagattagcctaatcaccctcataaaatgattaagcctatcataaaacttggaaaaatgaaaatttatagaatttttcataaaaaaagaaaatattcattttagttaaaaatttgaaaataatattttaaaaagcaaaatgaaattgggaacattgattattcaatcgatttgggagagaaaagcagcgctctgtcgctgttgtgtgctctgatgatgacagtcctctcccgactttactttgttgattttacgcaataattgcgtggctttttacgctttcgatttttgtaaaataaatatttatgatttttgtatttttaaatcgttagttaaacgaaaaagcaaaaaaatatattcaaaaatataattttaaaaattacttaaactttaatatatattgaataaatttattttttgatacatattttaaacttaaatttctcgatttaatatttaaaaagttttatgaaatttttagttgaaattaatggatttatgaacataatttttttttaacaaatctaatttaacaaataaaactaaaacaattttaacgatttttgttggtaaatttctgttgctttccaaaaaatgtcatacataaatgttagataaatgcagcgatttgtgtgtgtgtttctcagtttcccaggtaacccgaggagttgggcaaacattgggacaaaaaatggaaaaaattgccatttaaataatttgaaaaaataaaaatgataattttcttaccagatcatgtcgtctaaaatggagaagtaaattaaagaattgttgtgaaagattcatagaattaattatttttataaaaatatcttaaaggatattaaattttatcagtaaatgaattaaggttttttttttaatttattcagagattaatatttatttatcggcttcaaaaaattgtttatctcatataaaaatagaatttatcgtatgttaagaagaagcaattataaattaaaaatttaatctatctaaaaaaatgtttttttccataataattttataatttttttaaaattttaaataagacggaaattgagcatcttttctgtcttcggagatgtacatatgag

SEQ ID NO: 1477 - DNA, 2010 bp, Heterodera glycines
tgaaagattcatagaattaattatttttataaaaatactttattttcttaaatgatattaaattttatcagtaaatgaattaaggcttttttttaatttattcagagattaatatttattacaaataaataactgttaattaaaatattttaaaaagatgaatcgtatgttaagaagaagcaattataaattaaaaatttaatctatctaaaaaaatgtttttttccataataattttataatttttttaaaattttaaataagacggaaattgagcatcttttctgtcttcggagatgtacatatgagcacattcttcgaccaaacgcgcattttccgtagaaatatttcagaaaataaaacaggtcaacaactgcgacgtacaccgaccaaagaggaaaagagcaactcaacccccgaggggaggaaaagagcaactcaacccccaaggggaggaaaagagcaactcaacccccgaggggaggaaaagagcaactcaacccccgaggggaggaaaagagcaactcaacccccgaggggaggaaaagagcaacttcatccatcccctgagggtaagaggtggagatgcatcacaattcttcacttaatcgacgaataaaatgttgtgaaatttgaagtggtacaacaacagacaaaagagagaagaagagtagacaaaattgtcaaaaaaataaaataaatgataaaaatttgttaaaatatgcttaaaatttctaattttttgggatgatatggcaaatatttatattttcgatggaaaaaattcgaatttcattttgtccggagttcttagaaacaattttaaattccaatttgtccatccatgtctttgatacttaaacaaaaataccgtacctaattgttatttaatgggtttttcaaattatttatgatcatcaaactaaaaattcctttatgaaagaaattgtagaaattgaaatttttttttagaatttttttcccaaatctttcacgggcattgttctttcggcacacatttgtttgaaatcgaatcgcgcaccaatccgtcggcacattcacaagtgcaaggagggcatatcatcagagtgcaaaattccgggttcggattgtcacagctcggctcacatccattgcatttcctatcgccaggcttctcatttggagggcactttaatccgaagacaattagtgattaaattatttaataattttagtacaatggattattaataattaattggtttttaattcattatattaccatacaacgtccatcattacggtcgtcatcacgatcatcatcatggtcactatcatggaaactctgtacagttatcaatggtagaataacgaaaaataaaattaagcaggggattcggaacatttttttcacttaattggatatttttttaataaaaaaaaaattttgtaaaattaaagaaatttccgtaaaaagaatccacaaaaatattaagttctttaagcttaaaattttaaatctaagctaataaaacagaccatttgctactgcttttgctgctgcgcgttcattcgcttaaatacaacacattttggccccatttttgtgcacaaatatttttgttgtttccccccaatggattaggcttcccccccccccagtgccgcccattgttttgtacatattttgaattttatttattttttaattcagctgatacttatttgtttatttaatatttggtcgaaaacgtaaaatttttgtgatcggattaatgggggggggggttctcccctcccccgccggggatggatgaaaatgtgtccccgtcggcgggggcttttatgtgttcattagggccaatcggagttgcaggtctgatgactcatttcctgctttaattgtcccaaatcgattttcgaaaatgtcgcgcccaattgtgcacatccaaaaaacgaggcaattattcagttctatttcctgtctaattgatgggacaattaccagtgtcgtcagctgcagaaatg
